United States Patent Application Publication US 2026/0327627 A1 - sequence listing, part 2

SEQ ID NO: 4686 - RNA, 23 nt, synthetic construct
  source 1..23: mol_type = other RNA
  modified_base 1: mod_base = OTHER; note = 2'-O-methyluridine-3'-phosphate 5'-(E)-Vinylphosphonate
  modified_base 2: mod_base = OTHER; note = 2'-deoxy-2'-fluorouridine-3'-phosphate
  modified_base 3: mod_base = OTHER; note = 2'-O-methyladenosine-3'-phosphate
  modified_base 4: mod_base = OTHER; note = 2'-O-methyladenosine-3'-phosphate
  modified_base 5: mod_base = OTHER; note = 2'-O-methyladenosine-3'-phosphate
  modified_base 6: mod_base = OTHER; note = 2'-deoxy-2'-fluorouridine-3'-phosphate
  modified_base 7: mod_base = OTHER; note = 2'-O-methyluridine-3'-phosphate
  modified_base 8: mod_base = OTHER; note = 2'-O-methyluridine-3'-phosphate
  modified_base 9: mod_base = OTHER; note = 2'-O-methylcytidine-3'-phosphate
  modified_base 10: mod_base = OTHER; note = 2'-O-methyluridine-3'-phosphate
  modified_base 11: mod_base = OTHER; note = 2'-O-methylguanosine-3'-phosphate
  modified_base 12: mod_base = OTHER; note = 2'-O-methylcytidine-3'-phosphate
  modified_base 13: mod_base = OTHER; note = 2'-O-methylcytidine-3'-phosphate
  modified_base 14: mod_base = OTHER; note = 2'-deoxy-2'-fluorouridine-3'-phosphate
  modified_base 15: mod_base = OTHER; note = 2'-O-methylcytidine-3'-phosphate
  modified_base 16: mod_base = OTHER; note = 2'-deoxy-2'-fluoroadenosine-3'-phosphate
  modified_base 17: mod_base = OTHER; note = 2'-O-methylcytidine-3'-phosphate
  modified_base 18: mod_base = OTHER; note = 2'-O-methylguanosine-3'-phosphate
  modified_base 19: mod_base = OTHER; note = 2'-O-methyladenosine-3'-phosphate
  modified_base 20: mod_base = OTHER; note = 2'-O-methyladenosine-3'-phosphate
  modified_base 21: mod_base = OTHER; note = 2'-O-methyladenosine-3'-phosphate
  modified_base 22: mod_base = OTHER; note = 2'-O-methylcytidine-3'-phosphate
  modified_base 23: mod_base = OTHER; note = 2'-O-methylcytidine
ttaaatttctgcctcacgaaacc

SEQ ID NO: 4687 - RNA, 23 nt, synthetic construct
  source 1..23: mol_type = other RNA
  modified_base 1: mod_base = OTHER; note = 2'-O-methyluridine-3'-phosphate 5'-(E)-Vinylphosphonate
  modified_base 2: mod_base = OTHER; note = 2'-deoxy-2'-fluoroadenosine-3'-phosphate
  modified_base 3: mod_base = OTHER; note = 2'-O-methyluridine-3'-phosphate
  modified_base 4: mod_base = OTHER; note = 2'-O-methylguanosine-3'-phosphate
  modified_base 5: mod_base = OTHER; note = 2'-O-methyluridine-3'-phosphate
  modified_base 6: mod_base = OTHER; note = 2'-deoxy-2'-fluorouridine-3'-phosphate
  modified_base 7: mod_base = OTHER; note = 2'-O-methyluridine-3'-phosphate
  modified_base 8: mod_base = OTHER; note = 2'-O-methyluridine-3'-phosphate
  modified_base 9: mod_base = OTHER; note = 2'-O-methylcytidine-3'-phosphate
  modified_base 10: mod_base = OTHER; note = 2'-O-methyladenosine-3'-phosphate
  modified_base 11: mod_base = OTHER; note = 2'-O-methyluridine-3'-phosphate
  modified_base 12: mod_base = OTHER; note = 2'-O-methylguanosine-3'-phosphate
  modified_base 13: mod_base = OTHER; note = 2'-O-methyluridine-3'-phosphate
  modified_base 14: mod_base = OTHER; note = 2'-deoxy-2'-fluorocytidine-3'-phosphate
  modified_base 15: mod_base = OTHER; note = 2'-O-methylguanosine-3'-phosphate
  modified_base 16: mod_base = OTHER; note = 2'-deoxy-2'-fluorocytidine-3'-phosphate
  modified_base 17: mod_base = OTHER; note = 2'-O-methyladenosine-3'-phosphate
  modified_base 18: mod_base = OTHER; note = 2'-O-methylguanosine-3'-phosphate
  modified_base 19: mod_base = OTHER; note = 2'-O-methylcytidine-3'-phosphate
  modified_base 20: mod_base = OTHER; note = 2'-O-methyladenosine-3'-phosphate
  modified_base 21: mod_base = OTHER; note = 2'-O-methyluridine-3'-phosphate
  modified_base 22: mod_base = OTHER; note = 2'-O-methylguanosine-3'-phosphate
  modified_base 23: mod_base = OTHER; note = 2'-O-methyladenosine
tatgttttcatgtcgcagcatga

SEQ ID NO: 4688 - RNA, 23 nt, synthetic construct
  source 1..23: mol_type = other RNA
  modified_base 1: mod_base = OTHER; note = 2'-O-methyluridine-3'-phosphate 5'-(E)-Vinylphosphonate
  modified_base 2: mod_base = OTHER; note = 2'-deoxy-2'-fluoroadenosine-3'-phosphate
  modified_base 3: mod_base = OTHER; note = 2'-O-methylguanosine-3'-phosphate
  modified_base 4: mod_base = OTHER; note = 2'-O-methylguanosine-3'-phosphate
  modified_base 5: mod_base = OTHER; note = 2'-O-methyladenosine-3'-phosphate
  modified_base 6: mod_base = OTHER; note = 2'-deoxy-2'-fluorouridine-3'-phosphate
  modified_base 7: mod_base = OTHER; note = 2'-O-methylguanosine-3'-phosphate
  modified_base 8: mod_base = OTHER; note = 2'-O-methyluridine-3'-phosphate
  modified_base 9: mod_base = OTHER; note = 2'-O-methyluridine-3'-phosphate
  modified_base 10: mod_base = OTHER; note = 2'-O-methyluridine-3'-phosphate
  modified_base 11: mod_base = OTHER; note = 2'-O-methyluridine-3'-phosphate
  modified_base 12: mod_base = OTHER; note = 2'-O-methylcytidine-3'-phosphate
  modified_base 13: mod_base = OTHER; note = 2'-O-methyladenosine-3'-phosphate
  modified_base 14: mod_base = OTHER; note = 2'-deoxy-2'-fluorouridine-3'-phosphate
  modified_base 15: mod_base = OTHER; note = 2'-O-methylguanosine-3'-phosphate
  modified_base 16: mod_base = OTHER; note = 2'-deoxy-2'-fluorouridine-3'-phosphate
  modified_base 17: mod_base = OTHER; note = 2'-O-methylcytidine-3'-phosphate
  modified_base 18: mod_base = OTHER; note = 2'-O-methylguanosine-3'-phosphate
  modified_base 19: mod_base = OTHER; note = 2'-O-methylcytidine-3'-phosphate
  modified_base 20: mod_base = OTHER; note = 2'-O-methyladenosine-3'-phosphate
  modified_base 21: mod_base = OTHER; note = 2'-O-methylguanosine-3'-phosphate
  modified_base 22: mod_base = OTHER; note = 2'-O-methylcytidine-3'-phosphate
  modified_base 23: mod_base = OTHER; note = 2'-O-methyladenosine
taggatgttttcatgtcgcagca

SEQ ID NO: 4689 - RNA, 23 nt, synthetic construct
  source 1..23: mol_type = other RNA
  modified_base 1: mod_base = OTHER; note = 2'-O-methyluridine-3'-phosphate 5'-(E)-Vinylphosphonate
  modified_base 2: mod_base = OTHER; note = 2'-deoxy-2'-fluoroadenosine-3'-phosphate
  modified_base 3: mod_base = OTHER; note = 2'-O-methyladenosine-3'-phosphate
  modified_base 4: mod_base = OTHER; note = 2'-O-methylguanosine-3'-phosphate
  modified_base 5: mod_base = OTHER; note = 2'-O-methylguanosine-3'-phosphate
  modified_base 6: mod_base = OTHER; note = 2'-deoxy-2'-fluoroadenosine-3'-phosphate
  modified_base 7: mod_base = OTHER; note = 2'-O-methyluridine-3'-phosphate
  modified_base 8: mod_base = OTHER; note = 2'-O-methylguanosine-3'-phosphate
  modified_base 9: mod_base = OTHER; note = 2'-O-methyluridine-3'-phosphate
  modified_base 10: mod_base = OTHER; note = 2'-O-methyluridine-3'-phosphate
  modified_base 11: mod_base = OTHER; note = 2'-O-methyluridine-3'-phosphate
  modified_base 12: mod_base = OTHER; note = 2'-O-methyluridine-3'-phosphate
  modified_base 13: mod_base = OTHER; note = 2'-O-methylcytidine-3'-phosphate
  modified_base 14: mod_base = OTHER; note = 2'-deoxy-2'-fluoroadenosine-3'-phosphate
  modified_base 15: mod_base = OTHER; note = 2'-O-methyluridine-3'-phosphate
  modified_base 16: mod_base = OTHER; note = 2'-deoxy-2'-fluoroguanosine-3'-phosphate
  modified_base 17: mod_base = OTHER; note = 2'-O-methyluridine-3'-phosphate
  modified_base 18: mod_base = OTHER; note = 2'-O-methylcytidine-3'-phosphate
  modified_base 19: mod_base = OTHER; note = 2'-O-methylguanosine-3'-phosphate
  modified_base 20: mod_base = OTHER; note = 2'-O-methylcytidine-3'-phosphate
  modified_base 21: mod_base = OTHER; note = 2'-O-methyladenosine-3'-phosphate
  modified_base 22: mod_base = OTHER; note = 2'-O-methylguanosine-3'-phosphate
  modified_base 23: mod_base = OTHER; note = 2'-O-methylcytidine
taaggatgttttcatgtcgcagc

SEQ ID NO: 4690 - RNA, 23 nt, synthetic construct
  source 1..23: mol_type = other RNA
  modified_base 1: mod_base = OTHER; note = 2'-O-methyluridine-3'-phosphate 5'-(E)-Vinylphosphonate
  modified_base 2: mod_base = OTHER; note = 2'-deoxy-2'-fluorocytidine-3'-phosphate
  modified_base 3: mod_base = OTHER; note = 2'-O-methyladenosine-3'-phosphate
  modified_base 4: mod_base = OTHER; note = 2'-O-methyladenosine-3'-phosphate
  modified_base 5: mod_base = OTHER; note = 2'-O-methylguanosine-3'-phosphate
  modified_base 6: mod_base = OTHER; note = 2'-deoxy-2'-fluoroguanosine-3'-phosphate
  modified_base 7: mod_base = OTHER; note = 2'-O-methyladenosine-3'-phosphate
  modified_base 8: mod_base = OTHER; note = 2'-O-methyluridine-3'-phosphate
  modified_base 9: mod_base = OTHER; note = 2'-O-methylguanosine-3'-phosphate
  modified_base 10: mod_base = OTHER; note = 2'-O-methyluridine-3'-phosphate
  modified_base 11: mod_base = OTHER; note = 2'-O-methyluridine-3'-phosphate
  modified_base 12: mod_base = OTHER; note = 2'-O-methyluridine-3'-phosphate
  modified_base 13: mod_base = OTHER; note = 2'-O-methyluridine-3'-phosphate
  modified_base 14: mod_base = OTHER; note = 2'-deoxy-2'-fluorocytidine-3'-phosphate
  modified_base 15: mod_base = OTHER; note = 2'-O-methyladenosine-3'-phosphate
  modified_base 16: mod_base = OTHER; note = 2'-deoxy-2'-fluorouridine-3'-phosphate
  modified_base 17: mod_base = OTHER; note = 2'-O-methylguanosine-3'-phosphate
  modified_base 18: mod_base = OTHER; note = 2'-O-methyluridine-3'-phosphate
  modified_base 19: mod_base = OTHER; note = 2'-O-methylcytidine-3'-phosphate
  modified_base 20: mod_base = OTHER; note = 2'-O-methylguanosine-3'-phosphate
  modified_base 21: mod_base = OTHER; note = 2'-O-methylcytidine-3'-phosphate
  modified_base 22: mod_base = OTHER; note = 2'-O-methyladenosine-3'-phosphate
  modified_base 23: mod_base = OTHER; note = 2'-O-methylguanosine
tcaaggatgttttcatgtcgcag

SEQ ID NO: 4691 - RNA, 23 nt, synthetic construct
  source 1..23: mol_type = other RNA
  modified_base 1: mod_base = OTHER; note = 2'-O-methyluridine-3'-phosphate 5'-(E)-Vinylphosphonate
  modified_base 2: mod_base = OTHER; note = 2'-deoxy-2'-fluoroadenosine-3'-phosphate
  modified_base 3: mod_base = OTHER; note = 2'-O-methylcytidine-3'-phosphate
  modified_base 4: mod_base = OTHER; note = 2'-O-methylcytidine-3'-phosphate
  modified_base 5: mod_base = OTHER; note = 2'-O-methyladenosine-3'-phosphate
  modified_base 6: mod_base = OTHER; note = 2'-deoxy-2'-fluoroadenosine-3'-phosphate
  modified_base 7: mod_base = OTHER; note = 2'-O-methylguanosine-3'-phosphate
  modified_base 8: mod_base = OTHER; note = 2'-O-methylguanosine-3'-phosphate
  modified_base 9: mod_base = OTHER; note = 2'-O-methyladenosine-3'-phosphate
  modified_base 10: mod_base = OTHER; note = 2'-O-methyluridine-3'-phosphate
  modified_base 11: mod_base = OTHER; note = 2'-O-methylguanosine-3'-phosphate
  modified_base 12: mod_base = OTHER; note = 2'-O-methyluridine-3'-phosphate
  modified_base 13: mod_base = OTHER; note = 2'-O-methyluridine-3'-phosphate
  modified_base 14: mod_base = OTHER; note = 2'-deoxy-2'-fluorouridine-3'-phosphate
  modified_base 15: mod_base = OTHER; note = 2'-O-methyluridine-3'-phosphate
  modified_base 16: mod_base = OTHER; note = 2'-deoxy-2'-fluorocytidine-3'-phosphate
  modified_base 17: mod_base = OTHER; note = 2'-O-methyladenosine-3'-phosphate
  modified_base 18: mod_base = OTHER; note = 2'-O-methyluridine-3'-phosphate
  modified_base 19: mod_base = OTHER; note = 2'-O-methylguanosine-3'-phosphate
  modified_base 20: mod_base = OTHER; note = 2'-O-methyluridine-3'-phosphate
  modified_base 21: mod_base = OTHER; note = 2'-O-methylcytidine-3'-phosphate
  modified_base 22: mod_base = OTHER; note = 2'-O-methylguanosine-3'-phosphate
  modified_base 23: mod_base = OTHER; note = 2'-O-methylcytidine
taccaaggatgttttcatgtcgc

SEQ ID NO: 4692 - RNA, 23 nt, synthetic construct
  source 1..23: mol_type = other RNA
  modified_base 1: mod_base = OTHER; note = 2'-O-methyluridine-3'-phosphate 5'-(E)-Vinylphosphonate
  modified_base 2: mod_base = OTHER; note = 2'-deoxy-2'-fluoroadenosine-3'-phosphate
  modified_base 3: mod_base = OTHER; note = 2'-O-methyladenosine-3'-phosphate
  modified_base 4: mod_base = OTHER; note = 2'-O-methylcytidine-3'-phosphate
  modified_base 5: mod_base = OTHER; note = 2'-O-methylcytidine-3'-phosphate
  modified_base 6: mod_base = OTHER; note = 2'-deoxy-2'-fluoroadenosine-3'-phosphate
  modified_base 7: mod_base = OTHER; note = 2'-O-methyladenosine-3'-phosphate
  modified_base 8: mod_base = OTHER; note = 2'-O-methylguanosine-3'-phosphate
  modified_base 9: mod_base = OTHER; note = 2'-O-methylguanosine-3'-phosphate
  modified_base 10: mod_base = OTHER; note = 2'-O-methyladenosine-3'-phosphate
  modified_base 11: mod_base = OTHER; note = 2'-O-methyluridine-3'-phosphate
  modified_base 12: mod_base = OTHER; note = 2'-O-methylguanosine-3'-phosphate
  modified_base 13: mod_base = OTHER; note = 2'-O-methyluridine-3'-phosphate
  modified_base 14: mod_base = OTHER; note = 2'-deoxy-2'-fluorouridine-3'-phosphate
  modified_base 15: mod_base = OTHER; note = 2'-O-methyluridine-3'-phosphate
  modified_base 16: mod_base = OTHER; note = 2'-deoxy-2'-fluorouridine-3'-phosphate
  modified_base 17: mod_base = OTHER; note = 2'-O-methylcytidine-3'-phosphate
  modified_base 18: mod_base = OTHER; note = 2'-O-methyladenosine-3'-phosphate
  modified_base 19: mod_base = OTHER; note = 2'-O-methyluridine-3'-phosphate
  modified_base 20: mod_base = OTHER; note = 2'-O-methylguanosine-3'-phosphate
  modified_base 21: mod_base = OTHER; note = 2'-O-methyluridine-3'-phosphate
  modified_base 22: mod_base = OTHER; note = 2'-O-methylcytidine-3'-phosphate
  modified_base 23: mod_base = OTHER; note = 2'-O-methylguanosine
taaccaaggatgttttcatgtcg

SEQ ID NO: 4693 - RNA, 23 nt, synthetic construct
  source 1..23: mol_type = other RNA
  modified_base 1: mod_base = OTHER; note = 2'-O-methyluridine-3'-phosphate 5'-(E)-Vinylphosphonate
  modified_base 2: mod_base = OTHER; note = 2'-deoxy-2'-fluoroadenosine-3'-phosphate
  modified_base 3: mod_base = OTHER; note = 2'-O-methyladenosine-3'-phosphate
  modified_base 4: mod_base = OTHER; note = 2'-O-methyladenosine-3'-phosphate
  modified_base 5: mod_base = OTHER; note = 2'-O-methylcytidine-3'-phosphate
  modified_base 6: mod_base = OTHER; note = 2'-deoxy-2'-fluorocytidine-3'-phosphate
  modified_base 7: mod_base = OTHER; note = 2'-O-methyladenosine-3'-phosphate
  modified_base 8: mod_base = OTHER; note = 2'-O-methyladenosine-3'-phosphate
  modified_base 9: mod_base = OTHER; note = 2'-O-methylguanosine-3'-phosphate
  modified_base 10: mod_base = OTHER; note = 2'-O-methylguanosine-3'-phosphate
  modified_base 11: mod_base = OTHER; note = 2'-O-methyladenosine-3'-phosphate
  modified_base 12: mod_base = OTHER; note = 2'-O-methyluridine-3'-phosphate
  modified_base 13: mod_base = OTHER; note = 2'-O-methylguanosine-3'-phosphate
  modified_base 14: mod_base = OTHER; note = 2'-deoxy-2'-fluorouridine-3'-phosphate
  modified_base 15: mod_base = OTHER; note = 2'-O-methyluridine-3'-phosphate
  modified_base 16: mod_base = OTHER; note = 2'-deoxy-2'-fluorouridine-3'-phosphate
  modified_base 17: mod_base = OTHER; note = 2'-O-methyluridine-3'-phosphate
  modified_base 18: mod_base = OTHER; note = 2'-O-methylcytidine-3'-phosphate
  modified_base 19: mod_base = OTHER; note = 2'-O-methyladenosine-3'-phosphate
  modified_base 20: mod_base = OTHER; note = 2'-O-methyluridine-3'-phosphate
  modified_base 21: mod_base = OTHER; note = 2'-O-methylguanosine-3'-phosphate
  modified_base 22: mod_base = OTHER; note = 2'-O-methyluridine-3'-phosphate
  modified_base 23: mod_base = OTHER; note = 2'-O-methylcytidine
taaaccaaggatgttttcatgtc

SEQ ID NO: 4694 - RNA, 23 nt, synthetic construct
  source 1..23: mol_type = other RNA
  modified_base 1: mod_base = OTHER; note = 2'-O-methyluridine-3'-phosphate 5'-(E)-Vinylphosphonate
  modified_base 2: mod_base = OTHER; note = 2'-deoxy-2'-fluoroadenosine-3'-phosphate
  modified_base 3: mod_base = OTHER; note = 2'-O-methyluridine-3'-phosphate
  modified_base 4: mod_base = OTHER; note = 2'-O-methylguanosine-3'-phosphate
  modified_base 5: mod_base = OTHER; note = 2'-O-methyladenosine-3'-phosphate
  modified_base 6: mod_base = OTHER; note = 2'-deoxy-2'-fluoroadenosine-3'-phosphate
  modified_base 7: mod_base = OTHER; note = 2'-O-methyladenosine-3'-phosphate
  modified_base 8: mod_base = OTHER; note = 2'-O-methylcytidine-3'-phosphate
  modified_base 9: mod_base = OTHER; note = 2'-O-methylcytidine-3'-phosphate
  modified_base 10: mod_base = OTHER; note = 2'-O-methyladenosine-3'-phosphate
  modified_base 11: mod_base = OTHER; note = 2'-O-methyladenosine-3'-phosphate
  modified_base 12: mod_base = OTHER; note = 2'-O-methylguanosine-3'-phosphate
  modified_base 13: mod_base = OTHER; note = 2'-O-methylguanosine-3'-phosphate
  modified_base 14: mod_base = OTHER; note = 2'-deoxy-2'-fluoroadenosine-3'-phosphate
  modified_base 15: mod_base = OTHER; note = 2'-O-methyluridine-3'-phosphate
  modified_base 16: mod_base = OTHER; note = 2'-deoxy-2'-fluoroguanosine-3'-phosphate
  modified_base 17: mod_base = OTHER; note = 2'-O-methyluridine-3'-phosphate
  modified_base 18: mod_base = OTHER; note = 2'-O-methyluridine-3'-phosphate
  modified_base 19: mod_base = OTHER; note = 2'-O-methyluridine-3'-phosphate
  modified_base 20: mod_base = OTHER; note = 2'-O-methyluridine-3'-phosphate
  modified_base 21: mod_base = OTHER; note = 2'-O-methylcytidine-3'-phosphate
  modified_base 22: mod_base = OTHER; note = 2'-O-methyladenosine-3'-phosphate
  modified_base 23: mod_base = OTHER; note = 2'-O-methyluridine
tatgaaaccaaggatgttttcat

SEQ ID NO: 4695 - RNA, 23 nt, synthetic construct
  source 1..23: mol_type = other RNA
  modified_base 1: mod_base = OTHER; note = 2'-O-methyluridine-3'-phosphate 5'-(E)-Vinylphosphonate
  modified_base 2: mod_base = OTHER; note = 2'-deoxy-2'-fluorocytidine-3'-phosphate
  modified_base 3: mod_base = OTHER; note = 2'-O-methyladenosine-3'-phosphate
  modified_base 4: mod_base = OTHER; note = 2'-O-methylguanosine-3'-phosphate
  modified_base 5: mod_base = OTHER; note = 2'-O-methylcytidine-3'-phosphate
  modified_base 6: mod_base = OTHER; note = 2'-deoxy-2'-fluoroadenosine-3'-phosphate
  modified_base 7: mod_base = OTHER; note = 2'-O-methyladenosine-3'-phosphate
  modified_base 8: mod_base = OTHER; note = 2'-O-methyluridine-3'-phosphate
  modified_base 9: mod_base = OTHER; note = 2'-O-methylguanosine-3'-phosphate
  modified_base 10: mod_base = OTHER; note = 2'-O-methyladenosine-3'-phosphate
  modified_base 11: mod_base = OTHER; note = 2'-O-methyladenosine-3'-phosphate
  modified_base 12: mod_base = OTHER; note = 2'-O-methyladenosine-3'-phosphate
  modified_base 13: mod_base = OTHER; note = 2'-O-methylcytidine-3'-phosphate
  modified_base 14: mod_base = OTHER; note = 2'-deoxy-2'-fluorocytidine-3'-phosphate
  modified_base 15: mod_base = OTHER; note = 2'-O-methyladenosine-3'-phosphate
  modified_base 16: mod_base = OTHER; note = 2'-deoxy-2'-fluoroadenosine-3'-phosphate
  modified_base 17: mod_base = OTHER; note = 2'-O-methylguanosine-3'-phosphate
  modified_base 18: mod_base = OTHER; note = 2'-O-methylguanosine-3'-phosphate
  modified_base 19: mod_base = OTHER; note = 2'-O-methyladenosine-3'-phosphate
  modified_base 20: mod_base = OTHER; note = 2'-O-methyluridine-3'-phosphate
  modified_base 21: mod_base = OTHER; note = 2'-O-methylguanosine-3'-phosphate
  modified_base 22: mod_base = OTHER; note = 2'-O-methyluridine-3'-phosphate
  modified_base 23: mod_base = OTHER; note = 2'-O-methyluridine
tcagcaatgaaaccaaggatgtt

SEQ ID NO: 4696 - RNA, 23 nt, synthetic construct
  source 1..23: mol_type = other RNA
  modified_base 1: mod_base = OTHER; note = 2'-O-methyluridine-3'-phosphate 5'-(E)-Vinylphosphonate
  modified_base 2: mod_base = OTHER; note = 2'-deoxy-2'-fluorouridine-3'-phosphate
  modified_base 3: mod_base = OTHER; note = 2'-O-methylcytidine-3'-phosphate
  modified_base 4: mod_base = OTHER; note = 2'-O-methyladenosine-3'-phosphate
  modified_base 5: mod_base = OTHER; note = 2'-O-methylguanosine-3'-phosphate
  modified_base 6: mod_base = OTHER; note = 2'-deoxy-2'-fluorocytidine-3'-phosphate
  modified_base 7: mod_base = OTHER; note = 2'-O-methyladenosine-3'-phosphate
  modified_base 8: mod_base = OTHER; note = 2'-O-methylguanosine-3'-phosphate
  modified_base 9: mod_base = OTHER; note = 2'-O-methylcytidine-3'-phosphate
  modified_base 10: mod_base = OTHER; note = 2'-O-methyladenosine-3'-phosphate
  modified_base 11: mod_base = OTHER; note = 2'-O-methyladenosine-3'-phosphate
  modified_base 12: mod_base = OTHER; note = 2'-O-methyluridine-3'-phosphate
  modified_base 13: mod_base = OTHER; note = 2'-O-methylguanosine-3'-phosphate
  modified_base 14: mod_base = OTHER; note = 2'-deoxy-2'-fluoroadenosine-3'-phosphate
  modified_base 15: mod_base = OTHER; note = 2'-O-methyladenosine-3'-phosphate
  modified_base 16: mod_base = OTHER; note = 2'-deoxy-2'-fluoroadenosine-3'-phosphate
  modified_base 17: mod_base = OTHER; note = 2'-O-methylcytidine-3'-phosphate
  modified_base 18: mod_base = OTHER; note = 2'-O-methylcytidine-3'-phosphate
  modified_base 19: mod_base = OTHER; note = 2'-O-methyladenosine-3'-phosphate
  modified_base 20: mod_base = OTHER; note = 2'-O-methyladenosine-3'-phosphate
  modified_base 21: mod_base = OTHER; note = 2'-O-methylguanosine-3'-phosphate
  modified_base 22: mod_base = OTHER; note = 2'-O-methylguanosine-3'-phosphate
  modified_base 23: mod_base = OTHER; note = 2'-O-methyladenosine
ttcagcagcaatgaaaccaagga

SEQ ID NO: 4697 - RNA, 23 nt, synthetic construct
  source 1..23: mol_type = other RNA
  modified_base 1: mod_base = OTHER; note = 2'-O-methyluridine-3'-phosphate 5'-(E)-Vinylphosphonate
  modified_base 2: mod_base = OTHER; note = 2'-deoxy-2'-fluorouridine-3'-phosphate
  modified_base 3: mod_base = OTHER; note = 2'-O-methyluridine-3'-phosphate
  modified_base 4: mod_base = OTHER; note = 2'-O-methylguanosine-3'-phosphate
  modified_base 5: mod_base = OTHER; note = 2'-O-methyluridine-3'-phosphate
  modified_base 6: mod_base = OTHER; note = 2'-deoxy-2'-fluorocytidine-3'-phosphate
  modified_base 7: mod_base = OTHER; note = 2'-O-methyladenosine-3'-phosphate
  modified_base 8: mod_base = OTHER; note = 2'-O-methylguanosine-3'-phosphate
  modified_base 9: mod_base = OTHER; note = 2'-O-methylcytidine-3'-phosphate
  modified_base 10: mod_base = OTHER; note = 2'-O-methyladenosine-3'-phosphate
  modified_base 11: mod_base = OTHER; note = 2'-O-methylguanosine-3'-phosphate
  modified_base 12: mod_base = OTHER; note = 2'-O-methylcytidine-3'-phosphate
  modified_base 13: mod_base = OTHER; note = 2'-O-methyladenosine-3'-phosphate
  modified_base 14: mod_base = OTHER; note = 2'-deoxy-2'-fluoroadenosine-3'-phosphate
  modified_base 15: mod_base = OTHER; note = 2'-O-methyluridine-3'-phosphate
  modified_base 16: mod_base = OTHER; note = 2'-deoxy-2'-fluoroguanosine-3'-phosphate
  modified_base 17: mod_base = OTHER; note = 2'-O-methyladenosine-3'-phosphate
  modified_base 18: mod_base = OTHER; note = 2'-O-methyladenosine-3'-phosphate
  modified_base 19: mod_base = OTHER; note = 2'-O-methyladenosine-3'-phosphate
  modified_base 20: mod_base = OTHER; note = 2'-O-methylcytidine-3'-phosphate
  modified_base 21: mod_base = OTHER; note = 2'-O-methylcytidine-3'-phosphate
  modified_base 22: mod_base = OTHER; note = 2'-O-methyladenosine-3'-phosphate
  modified_base 23: mod_base = OTHER; note = 2'-O-methyladenosine
tttgtcagcagcaatgaaaccaa

SEQ ID NO: 4698 - RNA, 23 nt, synthetic construct
  source 1..23: mol_type = other RNA
  modified_base 1: mod_base = OTHER; note = 2'-O-methyluridine-3'-phosphate 5'-(E)-Vinylphosphonate
  modified_base 2: mod_base = OTHER; note = 2'-deoxy-2'-fluorouridine-3'-phosphate
  modified_base 3: mod_base = OTHER; note = 2'-O-methyluridine-3'-phosphate
  modified_base 4: mod_base = OTHER; note = 2'-O-methylguanosine-3'-phosphate
  modified_base 5: mod_base = OTHER; note = 2'-O-methyluridine-3'-phosphate
  modified_base 6: mod_base = OTHER; note = 2'-deoxy-2'-fluorouridine-3'-phosphate
  modified_base 7: mod_base = OTHER; note = 2'-O-methylguanosine-3'-phosphate
  modified_base 8: mod_base = OTHER; note = 2'-O-methyluridine-3'-phosphate
  modified_base 9: mod_base = OTHER; note = 2'-O-methylcytidine-3'-phosphate
  modified_base 10: mod_base = OTHER; note = 2'-O-methyladenosine-3'-phosphate
  modified_base 11: mod_base = OTHER; note = 2'-O-methylguanosine-3'-phosphate
  modified_base 12: mod_base = OTHER; note = 2'-O-methylcytidine-3'-phosphate
  modified_base 13: mod_base = OTHER; note = 2'-O-methyladenosine-3'-phosphate
  modified_base 14: mod_base = OTHER; note = 2'-deoxy-2'-fluoroguanosine-3'-phosphate
  modified_base 15: mod_base = OTHER; note = 2'-O-methylcytidine-3'-phosphate
  modified_base 16: mod_base = OTHER; note = 2'-deoxy-2'-fluoroadenosine-3'-phosphate
  modified_base 17: mod_base = OTHER; note = 2'-O-methyladenosine-3'-phosphate
  modified_base 18: mod_base = OTHER; note = 2'-O-methyluridine-3'-phosphate
  modified_base 19: mod_base = OTHER; note = 2'-O-methylguanosine-3'-phosphate
  modified_base 20: mod_base = OTHER; note = 2'-O-methyladenosine-3'-phosphate
  modified_base 21: mod_base = OTHER; note = 2'-O-methyladenosine-3'-phosphate
  modified_base 22: mod_base = OTHER; note = 2'-O-methyladenosine-3'-phosphate
  modified_base 23: mod_base = OTHER; note = 2'-O-methylcytidine
tttgttgtcagcagcaatgaaac

SEQ ID NO: 4699 - RNA, 23 nt, synthetic construct
  source 1..23: mol_type = other RNA
  modified_base 1: mod_base = OTHER; note = 2'-O-methyluridine-3'-phosphate 5'-(E)-Vinylphosphonate
  modified_base 2: mod_base = OTHER; note = 2'-deoxy-2'-fluorouridine-3'-phosphate
  modified_base 3: mod_base = OTHER; note = 2'-O-methyluridine-3'-phosphate
  modified_base 4: mod_base = OTHER; note = 2'-O-methyluridine-3'-phosphate
  modified_base 5: mod_base = OTHER; note = 2'-O-methylguanosine-3'-phosphate
  modified_base 6: mod_base = OTHER; note = 2'-deoxy-2'-fluorouridine-3'-phosphate
  modified_base 7: mod_base = OTHER; note = 2'-O-methyluridine-3'-phosphate
  modified_base 8: mod_base = OTHER; note = 2'-O-methylguanosine-3'-phosphate
  modified_base 9: mod_base = OTHER; note = 2'-O-methyluridine-3'-phosphate
  modified_base 10: mod_base = OTHER; note = 2'-O-methylcytidine-3'-phosphate
  modified_base 11: mod_base = OTHER; note = 2'-O-methyladenosine-3'-phosphate
  modified_base 12: mod_base = OTHER; note = 2'-O-methylguanosine-3'-phosphate
  modified_base 13: mod_base = OTHER; note = 2'-O-methylcytidine-3'-phosphate
  modified_base 14: mod_base = OTHER; note = 2'-deoxy-2'-fluoroadenosine-3'-phosphate
  modified_base 15: mod_base = OTHER; note = 2'-O-methylguanosine-3'-phosphate
  modified_base 16: mod_base = OTHER; note = 2'-deoxy-2'-fluorocytidine-3'-phosphate
  modified_base 17: mod_base = OTHER; note = 2'-O-methyladenosine-3'-phosphate
  modified_base 18: mod_base = OTHER; note = 2'-O-methyladenosine-3'-phosphate
  modified_base 19: mod_base = OTHER; note = 2'-O-methyluridine-3'-phosphate
  modified_base 20: mod_base = OTHER; note = 2'-O-methylguanosine-3'-phosphate
  modified_base 21: mod_base = OTHER; note = 2'-O-methyladenosine-3'-phosphate
  modified_base 22: mod_base = OTHER; note = 2'-O-methyladenosine-3'-phosphate
  modified_base 23: mod_base = OTHER; note = 2'-O-methyladenosine
ttttgttgtcagcagcaatgaaa

SEQ ID NO: 4700 - RNA, 23 nt, synthetic construct
  source 1..23: mol_type = other RNA
  modified_base 1: mod_base = OTHER; note = 2'-O-methyluridine-3'-phosphate 5'-(E)-Vinylphosphonate
  modified_base 2: mod_base = OTHER; note = 2'-deoxy-2'-fluoroadenosine-3'-phosphate
  modified_base 3: mod_base = OTHER; note = 2'-O-methyluridine-3'-phosphate
  modified_base 4: mod_base = OTHER; note = 2'-O-methylcytidine-3'-phosphate
  modified_base 5: mod_base = OTHER; note = 2'-O-methyluridine-3'-phosphate
  modified_base 6: mod_base = OTHER; note = 2'-deoxy-2'-fluorouridine-3'-phosphate
  modified_base 7: mod_base = OTHER; note = 2'-O-methyluridine-3'-phosphate
  modified_base 8: mod_base = OTHER; note = 2'-O-methylguanosine-3'-phosphate
  modified_base 9: mod_base = OTHER; note = 2'-O-methyluridine-3'-phosphate
  modified_base 10: mod_base = OTHER; note = 2'-O-methyluridine-3'-phosphate
  modified_base 11: mod_base = OTHER; note = 2'-O-methylguanosine-3'-phosphate
  modified_base 12: mod_base = OTHER; note = 2'-O-methyluridine-3'-phosphate
  modified_base 13: mod_base = OTHER; note = 2'-O-methylcytidine-3'-phosphate
  modified_base 14: mod_base = OTHER; note = 2'-deoxy-2'-fluoroadenosine-3'-phosphate
  modified_base 15: mod_base = OTHER; note = 2'-O-methylguanosine-3'-phosphate
  modified_base 16: mod_base = OTHER; note = 2'-deoxy-2'-fluorocytidine-3'-phosphate
  modified_base 17: mod_base = OTHER; note = 2'-O-methyladenosine-3'-phosphate
  modified_base 18: mod_base = OTHER; note = 2'-O-methylguanosine-3'-phosphate
  modified_base 19: mod_base = OTHER; note = 2'-O-methylcytidine-3'-phosphate
  modified_base 20: mod_base = OTHER; note = 2'-O-methyladenosine-3'-phosphate
  modified_base 21: mod_base = OTHER; note = 2'-O-methyladenosine-3'-phosphate
  modified_base 22: mod_base = OTHER; note = 2'-O-methyluridine-3'-phosphate
  modified_base 23: mod_base = OTHER; note = 2'-O-methylguanosine
tatctttgttgtcagcagcaatg

SEQ ID NO: 4701 - RNA, 23 nt, synthetic construct
  source 1..23: mol_type = other RNA
  modified_base 1: mod_base = OTHER; note = 2'-O-methyluridine-3'-phosphate 5'-(E)-Vinylphosphonate
  modified_base 2: mod_base = OTHER; note = 2'-deoxy-2'-fluorocytidine-3'-phosphate
  modified_base 3: mod_base = OTHER; note = 2'-O-methyladenosine-3'-phosphate
  modified_base 4: mod_base = OTHER; note = 2'-O-methyluridine-3'-phosphate
  modified_base 5: mod_base = OTHER; note = 2'-O-methyluridine-3'-phosphate
  modified_base 6: mod_base = OTHER; note = 2'-deoxy-2'-fluoroadenosine-3'-phosphate
  modified_base 7: mod_base = OTHER; note = 2'-O-methyluridine-3'-phosphate
  modified_base 8: mod_base = OTHER; note = 2'-O-methylcytidine-3'-phosphate
  modified_base 9: mod_base = OTHER; note = 2'-O-methyluridine-3'-phosphate
  modified_base 10: mod_base = OTHER; note = 2'-O-methyluridine-3'-phosphate
  modified_base 11: mod_base = OTHER; note = 2'-O-methyluridine-3'-phosphate
  modified_base 12: mod_base = OTHER; note = 2'-O-methylguanosine-3'-phosphate
  modified_base 13: mod_base = OTHER; note = 2'-O-methyluridine-3'-phosphate
  modified_base 14: mod_base = OTHER; note = 2'-deoxy-2'-fluorouridine-3'-phosphate
  modified_base 15: mod_base = OTHER; note = 2'-O-methylguanosine-3'-phosphate
  modified_base 16: mod_base = OTHER; note = 2'-deoxy-2'-fluorouridine-3'-phosphate
  modified_base 17: mod_base = OTHER; note = 2'-O-methylcytidine-3'-phosphate
  modified_base 18: mod_base = OTHER; note = 2'-O-methyladenosine-3'-phosphate
  modified_base 19: mod_base = OTHER; note = 2'-O-methylguanosine-3'-phosphate
  modified_base 20: mod_base = OTHER; note = 2'-O-methylcytidine-3'-phosphate
  modified_base 21: mod_base = OTHER; note = 2'-O-methyladenosine-3'-phosphate
  modified_base 22: mod_base = OTHER; note = 2'-O-methylguanosine-3'-phosphate
  modified_base 23: mod_base = OTHER; note = 2'-O-methylcytidine
tcattatctttgttgtcagcagc

SEQ ID NO: 4702 - RNA, 23 nt, synthetic construct
  source 1..23: mol_type = other RNA
  modified_base 1: mod_base = OTHER; note = 2'-O-methyluridine-3'-phosphate 5'-(E)-Vinylphosphonate
  modified_base 2: mod_base = OTHER; note = 2'-deoxy-2'-fluorocytidine-3'-phosphate
  modified_base 3: mod_base = OTHER; note = 2'-O-methylcytidine-3'-phosphate
  modified_base 4: mod_base = OTHER; note = 2'-O-methyladenosine-3'-phosphate
  modified_base 5: mod_base = OTHER; note = 2'-O-methyluridine-3'-phosphate
  modified_base 6: mod_base = OTHER; note = 2'-deoxy-2'-fluorouridine-3'-phosphate
  modified_base 7: mod_base = OTHER; note = 2'-O-methyladenosine-3'-phosphate
  modified_base 8: mod_base = OTHER; note = 2'-O-methyluridine-3'-phosphate
  modified_base 9: mod_base = OTHER; note = 2'-O-methylcytidine-3'-phosphate
  modified_base 10: mod_base = OTHER; note = 2'-O-methyluridine-3'-phosphate
  modified_base 11: mod_base = OTHER; note = 2'-O-methyluridine-3'-phosphate
  modified_base 12: mod_base = OTHER; note = 2'-O-methyluridine-3'-phosphate
  modified_base 13: mod_base = OTHER; note = 2'-O-methylguanosine-3'-phosphate
  modified_base 14: mod_base = OTHER; note = 2'-deoxy-2'-fluorouridine-3'-phosphate
  modified_base 15: mod_base = OTHER; note = 2'-O-methyluridine-3'-phosphate
  modified_base 16: mod_base = OTHER; note = 2'-deoxy-2'-fluoroguanosine-3'-phosphate
  modified_base 17: mod_base = OTHER; note = 2'-O-methyluridine-3'-phosphate
  modified_base 18: mod_base = OTHER; note = 2'-O-methylcytidine-3'-phosphate
  modified_base 19: mod_base = OTHER; note = 2'-O-methyladenosine-3'-phosphate
  modified_base 20: mod_base = OTHER; note = 2'-O-methylguanosine-3'-phosphate
  modified_base 21: mod_base = OTHER; note = 2'-O-methylcytidine-3'-phosphate
  modified_base 22: mod_base = OTHER; note = 2'-O-methyladenosine-3'-phosphate
  modified_base 23: mod_base = OTHER; note = 2'-O-methylguanosine
tccattatctttgttgtcagcag

SEQ ID NO: 4703 - RNA, 23 nt, synthetic construct
  source 1..23: mol_type = other RNA
  modified_base 1: mod_base = OTHER; note = 2'-O-methyluridine-3'-phosphate 5'-(E)-Vinylphosphonate
  modified_base 2: mod_base = OTHER; note = 2'-deoxy-2'-fluorouridine-3'-phosphate
  modified_base 3: mod_base = OTHER; note = 2'-O-methyluridine-3'-phosphate
  modified_base 4: mod_base = OTHER; note = 2'-O-methylcytidine-3'-phosphate
  modified_base 5: mod_base = OTHER; note = 2'-O-methylcytidine-3'-phosphate
  modified_base 6: mod_base = OTHER; note = 2'-deoxy-2'-fluoroadenosine-3'-phosphate
  modified_base 7: mod_base = OTHER; note = 2'-O-methyluridine-3'-phosphate
  modified_base 8: mod_base = OTHER; note = 2'-O-methyluridine-3'-phosphate
  modified_base 9: mod_base = OTHER; note = 2'-O-methyladenosine-3'-phosphate
  modified_base 10: mod_base = OTHER; note = 2'-O-methyluridine-3'-phosphate
  modified_base 11: mod_base = OTHER; note = 2'-O-methylcytidine-3'-phosphate
  modified_base 12: mod_base = OTHER; note = 2'-O-methyluridine-3'-phosphate
  modified_base 13: mod_base = OTHER; note = 2'-O-methyluridine-3'-phosphate
  modified_base 14: mod_base = OTHER; note = 2'-deoxy-2'-fluorouridine-3'-phosphate
  modified_base 15: mod_base = OTHER; note = 2'-O-methylguanosine-3'-phosphate
  modified_base 16: mod_base = OTHER; note = 2'-deoxy-2'-fluorouridine-3'-phosphate
  modified_base 17: mod_base = OTHER; note = 2'-O-methyluridine-3'-phosphate
  modified_base 18: mod_base = OTHER; note = 2'-O-methylguanosine-3'-phosphate
  modified_base 19: mod_base = OTHER; note = 2'-O-methyluridine-3'-phosphate
  modified_base 20: mod_base = OTHER; note = 2'-O-methylcytidine-3'-phosphate
  modified_base 21: mod_base = OTHER; note = 2'-O-methyladenosine-3'-phosphate
  modified_base 22: mod_base = OTHER; note = 2'-O-methylguanosine-3'-phosphate
  modified_base 23: mod_base = OTHER; note = 2'-O-methylcytidine
tttccattatctttgttgtcagc

SEQ ID NO: 4704 - RNA, 23 nt, synthetic construct
  source 1..23: mol_type = other RNA
  modified_base 1: mod_base = OTHER; note = 2'-O-methyluridine-3'-phosphate 5'-(E)-Vinylphosphonate
  modified_base 2: mod_base = OTHER; note = 2'-deoxy-2'-fluoroguanosine-3'-phosphate
  modified_base 3: mod_base = OTHER; note = 2'-O-methyluridine-3'-phosphate
  modified_base 4: mod_base = OTHER; note = 2'-O-methyluridine-3'-phosphate
  modified_base 5: mod_base = OTHER; note = 2'-O-methylcytidine-3'-phosphate
  modified_base 6: mod_base = OTHER; note = 2'-deoxy-2'-fluorocytidine-3'-phosphate
  modified_base 7: mod_base = OTHER; note = 2'-O-methyladenosine-3'-phosphate
  modified_base 8: mod_base = OTHER; note = 2'-O-methyluridine-3'-phosphate
  modified_base 9: mod_base = OTHER; note = 2'-O-methyluridine-3'-phosphate
  modified_base 10: mod_base = OTHER; note = 2'-O-methyladenosine-3'-phosphate
  modified_base 11: mod_base = OTHER; note = 2'-O-methyluridine-3'-phosphate
  modified_base 12: mod_base = OTHER; note = 2'-O-methylcytidine-3'-phosphate
  modified_base 13: mod_base = OTHER; note = 2'-O-methyluridine-3'-phosphate
  modified_base 14: mod_base = OTHER; note = 2'-deoxy-2'-fluorouridine-3'-phosphate
  modified_base 15: mod_base = OTHER; note = 2'-O-methyluridine-3'-phosphate
  modified_base 16: mod_base = OTHER; note = 2'-deoxy-2'-fluoroguanosine-3'-phosphate
  modified_base 17: mod_base = OTHER; note = 2'-O-methyluridine-3'-phosphate
  modified_base 18: mod_base = OTHER; note = 2'-O-methyluridine-3'-phosphate
  modified_base 19: mod_base = OTHER; note = 2'-O-methylguanosine-3'-phosphate
  modified_base 20: mod_base = OTHER; note = 2'-O-methyluridine-3'-phosphate
  modified_base 21: mod_base = OTHER; note = 2'-O-methylcytidine-3'-phosphate
  modified_base 22: mod_base = OTHER; note = 2'-O-methyladenosine-3'-phosphate
  modified_base 23: mod_base = OTHER; note = 2'-O-methylguanosine
tgttccattatctttgttgtcag

SEQ ID NO: 4705 - RNA, 23 nt, synthetic construct
  source 1..23: mol_type = other RNA
  modified_base 1: mod_base = OTHER; note = 2'-O-methyluridine-3'-phosphate 5'-(E)-Vinylphosphonate
  modified_base 2: mod_base = OTHER; note = 2'-deoxy-2'-fluorocytidine-3'-phosphate
  modified_base 3: mod_base = OTHER; note = 2'-O-methyladenosine-3'-phosphate
  modified_base 4: mod_base = OTHER; note = 2'-O-methyladenosine-3'-phosphate
  modified_base 5: mod_base = OTHER; note = 2'-O-methylguanosine-3'-phosphate
  modified_base 6: mod_base = OTHER; note = 2'-deoxy-2'-fluorouridine-3'-phosphate
  modified_base 7: mod_base = OTHER; note = 2'-O-methyluridine-3'-phosphate
  modified_base 8: mod_base = OTHER; note = 2'-O-methylcytidine-3'-phosphate
  modified_base 9: mod_base = OTHER; note = 2'-O-methylcytidine-3'-phosphate
  modified_base 10: mod_base = OTHER; note = 2'-O-methyladenosine-3'-phosphate
  modified_base 11: mod_base = OTHER; note = 2'-O-methyluridine-3'-phosphate
  modified_base 12: mod_base = OTHER; note = 2'-O-methyluridine-3'-phosphate
  modified_base 13: mod_base = OTHER; note = 2'-O-methyladenosine-3'-phosphate
  modified_base 14: mod_base = OTHER; note = 2'-deoxy-2'-fluorouridine-3'-phosphate
  modified_base 15: mod_base = OTHER; note = 2'-O-methylcytidine-3'-phosphate
  modified_base 16: mod_base = OTHER; note = 2'-deoxy-2'-fluorouridine-3'-phosphate
  modified_base 17: mod_base = OTHER; note = 2'-O-methyluridine-3'-phosphate
  modified_base 18: mod_base = OTHER; note = 2'-O-methyluridine-3'-phosphate
  modified_base 19: mod_base = OTHER; note = 2'-O-methylguanosine-3'-phosphate
  modified_base 20: mod_base = OTHER; note = 2'-O-methyluridine-3'-phosphate
  modified_base 21: mod_base = OTHER; note = 2'-O-methyluridine-3'-phosphate
  modified_base 22: mod_base = OTHER; note = 2'-O-methylguanosine-3'-phosphate
  modified_base 23: mod_base = OTHER; note = 2'-O-methyluridine
tcaagttccattatctttgttgt

SEQ ID NO: 4706 - RNA, 23 nt, synthetic construct
  source 1..23: mol_type = other RNA
  modified_base 1: mod_base = OTHER; note = 2'-O-methyluridine-3'-phosphate 5'-(E)-Vinylphosphonate
  modified_base 2: mod_base = OTHER; note = 2'-deoxy-2'-fluoroadenosine-3'-phosphate
  modified_base 3: mod_base = OTHER; note = 2'-O-methyluridine-3'-phosphate
  modified_base 4: mod_base = OTHER; note = 2'-O-methyluridine-3'-phosphate
  modified_base 5: mod_base = OTHER; note = 2'-O-methylcytidine-3'-phosphate
  modified_base 6: mod_base = OTHER; note = 2'-deoxy-2'-fluoroadenosine-3'-phosphate
  modified_base 7: mod_base = OTHER; note = 2'-O-methylguanosine-3'-phosphate
  modified_base 8: mod_base = OTHER; note = 2'-O-methyladenosine-3'-phosphate
  modified_base 9: mod_base = OTHER; note = 2'-O-methyluridine-3'-phosphate
  modified_base 10: mod_base = OTHER; note = 2'-O-methyladenosine-3'-phosphate
  modified_base 11: mod_base = OTHER; note = 2'-O-methylcytidine-3'-phosphate
  modified_base 12: mod_base = OTHER; note = 2'-O-methylcytidine-3'-phosphate
  modified_base 13: mod_base = OTHER; note = 2'-O-methyladenosine-3'-phosphate
  modified_base 14: mod_base = OTHER; note = 2'-deoxy-2'-fluoroguanosine-3'-phosphate
  modified_base 15: mod_base = OTHER; note = 2'-O-methylcytidine-3'-phosphate
  modified_base 16: mod_base = OTHER; note = 2'-deoxy-2'-fluorocytidine-3'-phosphate
  modified_base 17: mod_base = OTHER; note = 2'-O-methyladenosine-3'-phosphate
  modified_base 18: mod_base = OTHER; note = 2'-O-methyladenosine-3'-phosphate
  modified_base 19: mod_base = OTHER; note = 2'-O-methyladenosine-3'-phosphate
  modified_base 20: mod_base = OTHER; note = 2'-O-methylguanosine-3'-phosphate
  modified_base 21: mod_base = OTHER; note = 2'-O-methyluridine-3'-phosphate
  modified_base 22: mod_base = OTHER; note = 2'-O-methyluridine-3'-phosphate
  modified_base 23: mod_base = OTHER; note = 2'-O-methylguanosine
tattcagataccagccaaagttg

SEQ ID NO: 4707 - RNA, 23 nt, synthetic construct
  source 1..23: mol_type = other RNA
  modified_base 1: mod_base = OTHER; note = 2'-O-methyluridine-3'-phosphate 5'-(E)-Vinylphosphonate
  modified_base 2: mod_base = OTHER; note = 2'-deoxy-2'-fluoroadenosine-3'-phosphate
  modified_base 3: mod_base = OTHER; note = 2'-O-methyluridine-3'-phosphate
  modified_base 4: mod_base = OTHER; note = 2'-O-methyladenosine-3'-phosphate
  modified_base 5: mod_base = OTHER; note = 2'-O-methyluridine-3'-phosphate
  modified_base 6: mod_base = OTHER; note = 2'-deoxy-2'-fluorouridine-3'-phosphate
  modified_base 7: mod_base = OTHER; note = 2'-O-methylcytidine-3'-phosphate
  modified_base 8: mod_base = OTHER; note = 2'-O-methyladenosine-3'-phosphate
  modified_base 9: mod_base = OTHER; note = 2'-O-methylguanosine-3'-phosphate
  modified_base 10: mod_base = OTHER; note = 2'-O-methyladenosine-3'-phosphate
  modified_base 11: mod_base = OTHER; note = 2'-O-methyluridine-3'-phosphate
  modified_base 12: mod_base = OTHER; note = 2'-O-methyladenosine-3'-phosphate
  modified_base 13: mod_base = OTHER; note = 2'-O-methylcytidine-3'-phosphate
  modified_base 14: mod_base = OTHER; note = 2'-deoxy-2'-fluorocytidine-3'-phosphate
  modified_base 15: mod_base = OTHER; note = 2'-O-methyladenosine-3'-phosphate
  modified_base 16: mod_base = OTHER; note = 2'-deoxy-2'-fluoroguanosine-3'-phosphate
  modified_base 17: mod_base = OTHER; note = 2'-O-methylcytidine-3'-phosphate
  modified_base 18: mod_base = OTHER; note = 2'-O-methylcytidine-3'-phosphate
  modified_base 19: mod_base = OTHER; note = 2'-O-methyladenosine-3'-phosphate
  modified_base 20: mod_base = OTHER; note = 2'-O-methyladenosine-3'-phosphate
  modified_base 21: mod_base = OTHER; note = 2'-O-methyladenosine-3'-phosphate
  modified_base 22: mod_base = OTHER; note = 2'-O-methylguanosine-3'-phosphate
  modified_base 23: mod_base = OTHER; note = 2'-O-methyluridine
tatattcagataccagccaaagt

SEQ ID NO: 4708 - RNA, 23 nt, synthetic construct
  source 1..23: mol_type = other RNA
  modified_base 1: mod_base = OTHER; note = 2'-O-methyluridine-3'-phosphate 5'-(E)-Vinylphosphonate
  modified_base 2: mod_base = OTHER; note = 2'-deoxy-2'-fluoroguanosine-3'-phosphate
  modified_base 3: mod_base = OTHER; note = 2'-O-methyladenosine-3'-phosphate
  modified_base 4: mod_base = OTHER; note = 2'-O-methyluridine-3'-phosphate
  modified_base 5: mod_base = OTHER; note = 2'-O-methyladenosine-3'-phosphate
  modified_base 6: mod_base = OTHER; note = 2'-deoxy-2'-fluorouridine-3'-phosphate
  modified_base 7: mod_base = OTHER; note = 2'-O-methyluridine-3'-phosphate
  modified_base 8: mod_base = OTHER; note = 2'-O-methylcytidine-3'-phosphate
  modified_base 9: mod_base = OTHER; note = 2'-O-methyladenosine-3'-phosphate
  modified_base 10: mod_base = OTHER; note = 2'-O-methylguanosine-3'-phosphate
  modified_base 11: mod_base = OTHER; note = 2'-O-methyladenosine-3'-phosphate
  modified_base 12: mod_base = OTHER; note = 2'-O-methyluridine-3'-phosphate
  modified_base 13: mod_base = OTHER; note = 2'-O-methyladenosine-3'-phosphate
  modified_base 14: mod_base = OTHER; note = 2'-deoxy-2'-fluorocytidine-3'-phosphate
  modified_base 15: mod_base = OTHER; note = 2'-O-methylcytidine-3'-phosphate
  modified_base 16: mod_base = OTHER; note = 2'-deoxy-2'-fluoroadenosine-3'-phosphate
  modified_base 17: mod_base = OTHER; note = 2'-O-methylguanosine-3'-phosphate
  modified_base 18: mod_base = OTHER; note = 2'-O-methylcytidine-3'-phosphate
  modified_base 19: mod_base = OTHER; note = 2'-O-methylcytidine-3'-phosphate
  modified_base 20: mod_base = OTHER; note = 2'-O-methyladenosine-3'-phosphate
  modified_base 21: mod_base = OTHER; note = 2'-O-methyladenosine-3'-phosphate
  modified_base 22: mod_base = OTHER; note = 2'-O-methyladenosine-3'-phosphate
  modified_base 23: mod_base = OTHER; note = 2'-O-methylguanosine
tgatattcagataccagccaaag

SEQ ID NO: 4709 - RNA, 23 nt, synthetic construct
  source 1..23: mol_type = other RNA
  modified_base 1: mod_base = OTHER; note = 2'-O-methyluridine-3'-phosphate 5'-(E)-Vinylphosphonate
  modified_base 2: mod_base = OTHER; note = 2'-deoxy-2'-fluorouridine-3'-phosphate
  modified_base 3: mod_base = OTHER; note = 2'-O-methylguanosine-3'-phosphate
  modified_base 4: mod_base = OTHER; note = 2'-O-methyladenosine-3'-phosphate
  modified_base 5: mod_base = OTHER; note = 2'-O-methyluridine-3'-phosphate
  modified_base 6: mod_base = OTHER; note = 2'-deoxy-2'-fluoroadenosine-3'-phosphate
  modified_base 7: mod_base = OTHER; note = 2'-O-methyluridine-3'-phosphate
  modified_base 8: mod_base = OTHER; note = 2'-O-methyluridine-3'-phosphate
  modified_base 9: mod_base = OTHER; note = 2'-O-methylcytidine-3'-phosphate
  modified_base 10: mod_base = OTHER; note = 2'-O-methyladenosine-3'-phosphate
  modified_base 11: mod_base = OTHER; note = 2'-O-methylguanosine-3'-phosphate
  modified_base 12: mod_base = OTHER; note = 2'-O-methyladenosine-3'-phosphate
  modified_base 13: mod_base = OTHER; note = 2'-O-methyluridine-3'-phosphate
  modified_base 14: mod_base = OTHER; note = 2'-deoxy-2'-fluoroadenosine-3'-phosphate
  modified_base 15: mod_base = OTHER; note = 2'-O-methylcytidine-3'-phosphate
  modified_base 16: mod_base = OTHER; note = 2'-deoxy-2'-fluorocytidine-3'-phosphate
  modified_base 17: mod_base = OTHER; note = 2'-O-methyladenosine-3'-phosphate
  modified_base 18: mod_base = OTHER; note = 2'-O-methylguanosine-3'-phosphate
  modified_base 19: mod_base = OTHER; note = 2'-O-methylcytidine-3'-phosphate
  modified_base 20: mod_base = OTHER; note = 2'-O-methylcytidine-3'-phosphate
  modified_base 21: mod_base = OTHER; note = 2'-O-methyladenosine-3'-phosphate
  modified_base 22: mod_base = OTHER; note = 2'-O-methyladenosine-3'-phosphate
  modified_base 23: mod_base = OTHER; note = 2'-O-methyladenosine
ttgatattcagataccagccaaa

SEQ ID NO: 4710 - RNA, 23 nt, synthetic construct
  source 1..23: mol_type = other RNA
  modified_base 1: mod_base = OTHER; note = 2'-O-methyluridine-3'-phosphate 5'-(E)-Vinylphosphonate
  modified_base 2: mod_base = OTHER; note = 2'-deoxy-2'-fluorouridine-3'-phosphate
  modified_base 3: mod_base = OTHER; note = 2'-O-methyluridine-3'-phosphate
  modified_base 4: mod_base = OTHER; note = 2'-O-methylcytidine-3'-phosphate
  modified_base 5: mod_base = OTHER; note = 2'-O-methyladenosine-3'-phosphate
  modified_base 6: mod_base = OTHER; note = 2'-deoxy-2'-fluorouridine-3'-phosphate
  modified_base 7: mod_base = OTHER; note = 2'-O-methylguanosine-3'-phosphate
  modified_base 8: mod_base = OTHER; note = 2'-O-methyladenosine-3'-phosphate
  modified_base 9: mod_base = OTHER; note = 2'-O-methyluridine-3'-phosphate
  modified_base 10: mod_base = OTHER; note = 2'-O-methyladenosine-3'-phosphate
  modified_base 11: mod_base = OTHER; note = 2'-O-methyluridine-3'-phosphate
  modified_base 12: mod_base = OTHER; note = 2'-O-methyluridine-3'-phosphate
  modified_base 13: mod_base = OTHER; note = 2'-O-methylcytidine-3'-phosphate
  modified_base 14: mod_base = OTHER; note = 2'-deoxy-2'-fluoroadenosine-3'-phosphate
  modified_base 15: mod_base = OTHER; note = 2'-O-methylguanosine-3'-phosphate
  modified_base 16: mod_base = OTHER; note = 2'-deoxy-2'-fluoroadenosine-3'-phosphate
  modified_base 17: mod_base = OTHER; note = 2'-O-methyluridine-3'-phosphate
  modified_base 18: mod_base = OTHER; note = 2'-O-methyladenosine-3'-phosphate
  modified_base 19: mod_base = OTHER; note = 2'-O-methylcytidine-3'-phosphate
  modified_base 20: mod_base = OTHER; note = 2'-O-methylcytidine-3'-phosphate
  modified_base 21: mod_base = OTHER; note = 2'-O-methyladenosine-3'-phosphate
  modified_base 22: mod_base = OTHER; note = 2'-O-methylguanosine-3'-phosphate
  modified_base 23: mod_base = OTHER; note = 2'-O-methylcytidine
tttcatgatattcagataccagc

SEQ ID NO: 4711 - RNA, 23 nt, synthetic construct
  source 1..23: mol_type = other RNA
  modified_base 1: mod_base = OTHER; note = 2'-O-methyluridine-3'-phosphate 5'-(E)-Vinylphosphonate
  modified_base 2: mod_base = OTHER; note = 2'-deoxy-2'-fluorouridine-3'-phosphate
  modified_base 3: mod_base = OTHER; note = 2'-O-methylguanosine-3'-phosphate
  modified_base 4: mod_base = OTHER; note = 2'-O-methyluridine-3'-phosphate
  modified_base 5: mod_base = OTHER; note = 2'-O-methyluridine-3'-phosphate
  modified_base 6: mod_base = OTHER; note = 2'-deoxy-2'-fluorocytidine-3'-phosphate
  modified_base 7: mod_base = OTHER; note = 2'-O-methyladenosine-3'-phosphate
  modified_base 8: mod_base = OTHER; note = 2'-O-methyluridine-3'-phosphate
  modified_base 9: mod_base = OTHER; note = 2'-O-methylguanosine-3'-phosphate
  modified_base 10: mod_base = OTHER; note = 2'-O-methyladenosine-3'-phosphate
  modified_base 11: mod_base = OTHER; note = 2'-O-methyluridine-3'-phosphate
  modified_base 12: mod_base = OTHER; note = 2'-O-methyladenosine-3'-phosphate
  modified_base 13: mod_base = OTHER; note = 2'-O-methyluridine-3'-phosphate
  modified_base 14: mod_base = OTHER; note = 2'-deoxy-2'-fluorouridine-3'-phosphate
  modified_base 15: mod_base = OTHER; note = 2'-O-methylcytidine-3'-phosphate
  modified_base 16: mod_base = OTHER; note = 2'-deoxy-2'-fluoroadenosine-3'-phosphate
  modified_base 17: mod_base = OTHER; note = 2'-O-methylguanosine-3'-phosphate
  modified_base 18: mod_base = OTHER; note = 2'-O-methyladenosine-3'-phosphate
  modified_base 19: mod_base = OTHER; note = 2'-O-methyluridine-3'-phosphate
  modified_base 20: mod_base = OTHER; note = 2'-O-methyladenosine-3'-phosphate
  modified_base 21: mod_base = OTHER; note = 2'-O-methylcytidine-3'-phosphate
  modified_base 22: mod_base = OTHER; note = 2'-O-methylcytidine-3'-phosphate
  modified_base 23: mod_base = OTHER; note = 2'-O-methyladenosine
ttgttcatgatattcagatacca

SEQ ID NO: 4712 - RNA, 23 nt, synthetic construct
  source 1..23: mol_type = other RNA
  modified_base 1: mod_base = OTHER; note = 2'-O-methyluridine-3'-phosphate 5'-(E)-Vinylphosphonate
  modified_base 2: mod_base = OTHER; note = 2'-deoxy-2'-fluorouridine-3'-phosphate
  modified_base 3: mod_base = OTHER; note = 2'-O-methyladenosine-3'-phosphate
  modified_base 4: mod_base = OTHER; note = 2'-O-methyluridine-3'-phosphate
  modified_base 5: mod_base = OTHER; note = 2'-O-methyladenosine-3'-phosphate
  modified_base 6: mod_base = OTHER; note = 2'-deoxy-2'-fluoroadenosine-3'-phosphate
  modified_base 7: mod_base = OTHER; note = 2'-O-methylguanosine-3'-phosphate
  modified_base 8: mod_base = OTHER; note = 2'-O-methylguanosine-3'-phosphate
  modified_base 9: mod_base = OTHER; note = 2'-O-methyladenosine-3'-phosphate
  modified_base 10: mod_base = OTHER; note = 2'-O-methylguanosine-3'-phosphate
  modified_base 11: mod_base = OTHER; note = 2'-O-methylcytidine-3'-phosphate
  modified_base 12: mod_base = OTHER; note = 2'-O-methylcytidine-3'-phosphate
  modified_base 13: mod_base = OTHER; note = 2'-O-methylcytidine-3'-phosphate
  modified_base 14: mod_base = OTHER; note = 2'-deoxy-2'-fluorouridine-3'-phosphate
  modified_base 15: mod_base = OTHER; note = 2'-O-methylguanosine-3'-phosphate
  modified_base 16: mod_base = OTHER; note = 2'-deoxy-2'-fluorouridine-3'-phosphate
  modified_base 17: mod_base = OTHER; note = 2'-O-methyluridine-3'-phosphate
  modified_base 18: mod_base = OTHER; note = 2'-O-methylcytidine-3'-phosphate
  modified_base 19: mod_base = OTHER; note = 2'-O-methyladenosine-3'-phosphate
  modified_base 20: mod_base = OTHER; note = 2'-O-methyluridine-3'-phosphate
  modified_base 21: mod_base = OTHER; note = 2'-O-methylguanosine-3'-phosphate
  modified_base 22: mod_base = OTHER; note = 2'-O-methyladenosine-3'-phosphate
  modified_base 23: mod_base = OTHER; note = 2'-O-methyluridine
ttataaggagccctgttcatgat

SEQ ID NO: 4713 - RNA, 23 nt, synthetic construct
  source 1..23: mol_type = other RNA
  modified_base 1: mod_base = OTHER; note = 2'-O-methyluridine-3'-phosphate 5'-(E)-Vinylphosphonate
  modified_base 2: mod_base = OTHER; note = 2'-deoxy-2'-fluoroadenosine-3'-phosphate
  modified_base 3: mod_base = OTHER; note = 2'-O-methyluridine-3'-phosphate
  modified_base 4: mod_base = OTHER; note = 2'-O-methyladenosine-3'-phosphate
  modified_base 5: mod_base = OTHER; note = 2'-O-methyluridine-3'-phosphate
  modified_base 6: mod_base = OTHER; note = 2'-deoxy-2'-fluoroadenosine-3'-phosphate
  modified_base 7: mod_base = OTHER; note = 2'-O-methyladenosine-3'-phosphate
  modified_base 8: mod_base = OTHER; note = 2'-O-methylguanosine-3'-phosphate
  modified_base 9: mod_base = OTHER; note = 2'-O-methylguanosine-3'-phosphate
  modified_base 10: mod_base = OTHER; note = 2'-O-methyladenosine-3'-phosphate
  modified_base 11: mod_base = OTHER; note = 2'-O-methylguanosine-3'-phosphate
  modified_base 12: mod_base = OTHER; note = 2'-O-methylcytidine-3'-phosphate
  modified_base 13: mod_base = OTHER; note = 2'-O-methylcytidine-3'-phosphate
  modified_base 14: mod_base = OTHER; note = 2'-deoxy-2'-fluorocytidine-3'-phosphate
  modified_base 15: mod_base = OTHER; note = 2'-O-methyluridine-3'-phosphate
  modified_base 16: mod_base = OTHER; note = 2'-deoxy-2'-fluoroguanosine-3'-phosphate
  modified_base 17: mod_base = OTHER; note = 2'-O-methyluridine-3'-phosphate
  modified_base 18: mod_base = OTHER; note = 2'-O-methyluridine-3'-phosphate
  modified_base 19: mod_base = OTHER; note = 2'-O-methylcytidine-3'-phosphate
  modified_base 20: mod_base = OTHER; note = 2'-O-methyladenosine-3'-phosphate
  modified_base 21: mod_base = OTHER; note = 2'-O-methyluridine-3'-phosphate
  modified_base 22: mod_base = OTHER; note = 2'-O-methylguanosine-3'-phosphate
  modified_base 23: mod_base = OTHER; note = 2'-O-methyladenosine
tatataaggagccctgttcatga

SEQ ID NO: 4714 - RNA, 23 nt, synthetic construct
  source 1..23: mol_type = other RNA
  modified_base 1: mod_base = OTHER; note = 2'-O-methyluridine-3'-phosphate 5'-(E)-Vinylphosphonate
  modified_base 2: mod_base = OTHER; note = 2'-deoxy-2'-fluoroadenosine-3'-phosphate
  modified_base 3: mod_base = OTHER; note = 2'-O-methylguanosine-3'-phosphate
  modified_base 4: mod_base = OTHER; note = 2'-O-methyluridine-3'-phosphate
  modified_base 5: mod_base = OTHER; note = 2'-O-methylcytidine-3'-phosphate
  modified_base 6: mod_base = OTHER; note = 2'-deoxy-2'-fluoroadenosine-3'-phosphate
  modified_base 7: mod_base = OTHER; note = 2'-O-methyluridine-3'-phosphate
  modified_base 8: mod_base = OTHER; note = 2'-O-methyladenosine-3'-phosphate
  modified_base 9: mod_base = OTHER; note = 2'-O-methyluridine-3'-phosphate
  modified_base 10: mod_base = OTHER; note = 2'-O-methyladenosine-3'-phosphate
  modified_base 11: mod_base = OTHER; note = 2'-O-methyladenosine-3'-phosphate
  modified_base 12: mod_base = OTHER; note = 2'-O-methylguanosine-3'-phosphate
  modified_base 13: mod_base = OTHER; note = 2'-O-methylguanosine-3'-phosphate
  modified_base 14: mod_base = OTHER; note = 2'-deoxy-2'-fluoroadenosine-3'-phosphate
  modified_base 15: mod_base = OTHER; note = 2'-O-methylguanosine-3'-phosphate
  modified_base 16: mod_base = OTHER; note = 2'-deoxy-2'-fluorocytidine-3'-phosphate
  modified_base 17: mod_base = OTHER; note = 2'-O-methylcytidine-3'-phosphate
  modified_base 18: mod_base = OTHER; note = 2'-O-methylcytidine-3'-phosphate
  modified_base 19: mod_base = OTHER; note = 2'-O-methyluridine-3'-phosphate
  modified_base 20: mod_base = OTHER; note = 2'-O-methylguanosine-3'-phosphate
  modified_base 21: mod_base = OTHER; note = 2'-O-methyluridine-3'-phosphate
  modified_base 22: mod_base = OTHER; note = 2'-O-methyluridine-3'-phosphate
  modified_base 23: mod_base = OTHER; note = 2'-O-methylcytidine
tagtcatataaggagccctgttc

SEQ ID NO: 4715 - RNA, 23 nt, synthetic construct
  source 1..23: mol_type = other RNA
  modified_base 1: mod_base = OTHER; note = 2'-O-methyluridine-3'-phosphate 5'-(E)-Vinylphosphonate
  modified_base 2: mod_base = OTHER; note = 2'-deoxy-2'-fluorouridine-3'-phosphate
  modified_base 3: mod_base = OTHER; note = 2'-O-methyladenosine-3'-phosphate
  modified_base 4: mod_base = OTHER; note = 2'-O-methylguanosine-3'-phosphate
  modified_base 5: mod_base = OTHER; note = 2'-O-methyluridine-3'-phosphate
  modified_base 6: mod_base = OTHER; note = 2'-deoxy-2'-fluorocytidine-3'-phosphate
  modified_base 7: mod_base = OTHER; note = 2'-O-methyladenosine-3'-phosphate
  modified_base 8: mod_base = OTHER; note = 2'-O-methyluridine-3'-phosphate
  modified_base 9: mod_base = OTHER; note = 2'-O-methyladenosine-3'-phosphate
  modified_base 10: mod_base = OTHER; note = 2'-O-methyluridine-3'-phosphate
  modified_base 11: mod_base = OTHER; note = 2'-O-methyladenosine-3'-phosphate
  modified_base 12: mod_base = OTHER; note = 2'-O-methyladenosine-3'-phosphate
  modified_base 13: mod_base = OTHER; note = 2'-O-methylguanosine-3'-phosphate
  modified_base 14: mod_base = OTHER; note = 2'-deoxy-2'-fluoroguanosine-3'-phosphate
  modified_base 15: mod_base = OTHER; note = 2'-O-methyladenosine-3'-phosphate
  modified_base 16: mod_base = OTHER; note = 2'-deoxy-2'-fluoroguanosine-3'-phosphate
  modified_base 17: mod_base = OTHER; note = 2'-O-methylcytidine-3'-phosphate
  modified_base 18: mod_base = OTHER; note = 2'-O-methylcytidine-3'-phosphate
  modified_base 19: mod_base = OTHER; note = 2'-O-methylcytidine-3'-phosphate
  modified_base 20: mod_base = OTHER; note = 2'-O-methyluridine-3'-phosphate
  modified_base 21: mod_base = OTHER; note = 2'-O-methylguanosine-3'-phosphate
  modified_base 22: mod_base = OTHER; note = 2'-O-methyluridine-3'-phosphate
  modified_base 23: mod_base = OTHER; note = 2'-O-methyluridine
ttagtcatataaggagccctgtt

SEQ ID NO: 4716 - RNA, 23 nt, synthetic construct
  source 1..23: mol_type = other RNA
  modified_base 1: mod_base = OTHER; note = 2'-O-methyluridine-3'-phosphate 5'-(E)-Vinylphosphonate
  modified_base 2: mod_base = OTHER; note = 2'-deoxy-2'-fluoroadenosine-3'-phosphate
  modified_base 3: mod_base = OTHER; note = 2'-O-methyluridine-3'-phosphate
  modified_base 4: mod_base = OTHER; note = 2'-O-methyladenosine-3'-phosphate
  modified_base 5: mod_base = OTHER; note = 2'-O-methylguanosine-3'-phosphate
  modified_base 6: mod_base = OTHER; note = 2'-deoxy-2'-fluorouridine-3'-phosphate
  modified_base 7: mod_base = OTHER; note = 2'-O-methylcytidine-3'-phosphate
  modified_base 8: mod_base = OTHER; note = 2'-O-methyladenosine-3'-phosphate
  modified_base 9: mod_base = OTHER; note = 2'-O-methyluridine-3'-phosphate
  modified_base 10: mod_base = OTHER; note = 2'-O-methyladenosine-3'-phosphate
  modified_base 11: mod_base = OTHER; note = 2'-O-methyluridine-3'-phosphate
  modified_base 12: mod_base = OTHER; note = 2'-O-methyladenosine-3'-phosphate
  modified_base 13: mod_base = OTHER; note = 2'-O-methyladenosine-3'-phosphate
  modified_base 14: mod_base = OTHER; note = 2'-deoxy-2'-fluoroguanosine-3'-phosphate
  modified_base 15: mod_base = OTHER; note = 2'-O-methylguanosine-3'-phosphate
  modified_base 16: mod_base = OTHER; note = 2'-deoxy-2'-fluoroadenosine-3'-phosphate
  modified_base 17: mod_base = OTHER; note = 2'-O-methylguanosine-3'-phosphate
  modified_base 18: mod_base = OTHER; note = 2'-O-methylcytidine-3'-phosphate
  modified_base 19: mod_base = OTHER; note = 2'-O-methylcytidine-3'-phosphate
  modified_base 20: mod_base = OTHER; note = 2'-O-methylcytidine-3'-phosphate
  modified_base 21: mod_base = OTHER; note = 2'-O-methyluridine-3'-phosphate
  modified_base 22: mod_base = OTHER; note = 2'-O-methylguanosine-3'-phosphate
  modified_base 23: mod_base = OTHER; note = 2'-O-methyluridine
tatagtcatataaggagccctgt

SEQ ID NO: 4717 - RNA, 23 nt, synthetic construct
  source 1..23: mol_type = other RNA
  modified_base 1: mod_base = OTHER; note = 2'-O-methyluridine-3'-phosphate 5'-(E)-Vinylphosphonate
  modified_base 2: mod_base = OTHER; note = 2'-deoxy-2'-fluoroadenosine-3'-phosphate
  modified_base 3: mod_base = OTHER; note = 2'-O-methyladenosine-3'-phosphate
  modified_base 4: mod_base = OTHER; note = 2'-O-methyluridine-3'-phosphate
  modified_base 5: mod_base = OTHER; note = 2'-O-methyladenosine-3'-phosphate
  modified_base 6: mod_base = OTHER; note = 2'-deoxy-2'-fluoroguanosine-3'-phosphate
  modified_base 7: mod_base = OTHER; note = 2'-O-methyluridine-3'-phosphate
  modified_base 8: mod_base = OTHER; note = 2'-O-methylcytidine-3'-phosphate
  modified_base 9: mod_base = OTHER; note = 2'-O-methyladenosine-3'-phosphate
  modified_base 10: mod_base = OTHER; note = 2'-O-methyluridine-3'-phosphate
  modified_base 11: mod_base = OTHER; note = 2'-O-methyladenosine-3'-phosphate
  modified_base 12: mod_base = OTHER; note = 2'-O-methyluridine-3'-phosphate
  modified_base 13: mod_base = OTHER; note = 2'-O-methyladenosine-3'-phosphate
  modified_base 14: mod_base = OTHER; note = 2'-deoxy-2'-fluoroadenosine-3'-phosphate
  modified_base 15: mod_base = OTHER; note = 2'-O-methylguanosine-3'-phosphate
  modified_base 16: mod_base = OTHER; note = 2'-deoxy-2'-fluoroguanosine-3'-phosphate
  modified_base 17: mod_base = OTHER; note = 2'-O-methyladenosine-3'-phosphate
  modified_base 18: mod_base = OTHER; note = 2'-O-methylguanosine-3'-phosphate
  modified_base 19: mod_base = OTHER; note = 2'-O-methylcytidine-3'-phosphate
  modified_base 20: mod_base = OTHER; note = 2'-O-methylcytidine-3'-phosphate
  modified_base 21: mod_base = OTHER; note = 2'-O-methylcytidine-3'-phosphate
  modified_base 22: mod_base = OTHER; note = 2'-O-methyluridine-3'-phosphate
  modified_base 23: mod_base = OTHER; note = 2'-O-methylguanosine
taatagtcatataaggagccctg

SEQ ID NO: 4718 - RNA, 23 nt, synthetic construct
  source 1..23: mol_type = other RNA
  modified_base 1: mod_base = OTHER; note = 2'-O-methyluridine-3'-phosphate 5'-(E)-Vinylphosphonate
  modified_base 2: mod_base = OTHER; note = 2'-deoxy-2'-fluoroadenosine-3'-phosphate
  modified_base 3: mod_base = OTHER; note = 2'-O-methyladenosine-3'-phosphate
  modified_base 4: mod_base = OTHER; note = 2'-O-methyladenosine-3'-phosphate
  modified_base 5: mod_base = OTHER; note = 2'-O-methyluridine-3'-phosphate
  modified_base 6: mod_base = OTHER; note = 2'-deoxy-2'-fluoroadenosine-3'-phosphate
  modified_base 7: mod_base = OTHER; note = 2'-O-methylguanosine-3'-phosphate
  modified_base 8: mod_base = OTHER; note = 2'-O-methyluridine-3'-phosphate
  modified_base 9: mod_base = OTHER; note = 2'-O-methylcytidine-3'-phosphate
  modified_base 10: mod_base = OTHER; note = 2'-O-methyladenosine-3'-phosphate
  modified_base 11: mod_base = OTHER; note = 2'-O-methyluridine-3'-phosphate
  modified_base 12: mod_base = OTHER; note = 2'-O-methyladenosine-3'-phosphate
  modified_base 13: mod_base = OTHER; note = 2'-O-methyluridine-3'-phosphate
  modified_base 14: mod_base = OTHER; note = 2'-deoxy-2'-fluoroadenosine-3'-phosphate
  modified_base 15: mod_base = OTHER; note = 2'-O-methyladenosine-3'-phosphate
  modified_base 16: mod_base = OTHER; note = 2'-deoxy-2'-fluoroguanosine-3'-phosphate
  modified_base 17: mod_base = OTHER; note = 2'-O-methylguanosine-3'-phosphate
  modified_base 18: mod_base = OTHER; note = 2'-O-methyladenosine-3'-phosphate
  modified_base 19: mod_base = OTHER; note = 2'-O-methylguanosine-3'-phosphate
  modified_base 20: mod_base = OTHER; note = 2'-O-methylcytidine-3'-phosphate
  modified_base 21: mod_base = OTHER; note = 2'-O-methylcytidine-3'-phosphate
  modified_base 22: mod_base = OTHER; note = 2'-O-methylcytidine-3'-phosphate
  modified_base 23: mod_base = OTHER; note = 2'-O-methyluridine
taaatagtcatataaggagccct

SEQ ID NO: 4719 - RNA, 23 nt, synthetic construct
  source 1..23: mol_type = other RNA
  modified_base 1: mod_base = OTHER; note = 2'-O-methyluridine-3'-phosphate 5'-(E)-Vinylphosphonate
  modified_base 2: mod_base = OTHER; note = 2'-deoxy-2'-fluorocytidine-3'-phosphate
  modified_base 3: mod_base = OTHER; note = 2'-O-methyladenosine-3'-phosphate
  modified_base 4: mod_base = OTHER; note = 2'-O-methyladenosine-3'-phosphate
  modified_base 5: mod_base = OTHER; note = 2'-O-methyladenosine-3'-phosphate
  modified_base 6: mod_base = OTHER; note = 2'-deoxy-2'-fluorouridine-3'-phosphate
  modified_base 7: mod_base = OTHER; note = 2'-O-methyladenosine-3'-phosphate
  modified_base 8: mod_base = OTHER; note = 2'-O-methylguanosine-3'-phosphate
  modified_base 9: mod_base = OTHER; note = 2'-O-methyluridine-3'-phosphate
  modified_base 10: mod_base = OTHER; note = 2'-O-methylcytidine-3'-phosphate
  modified_base 11: mod_base = OTHER; note = 2'-O-methyladenosine-3'-phosphate
  modified_base 12: mod_base = OTHER; note = 2'-O-methyluridine-3'-phosphate
  modified_base 13: mod_base = OTHER; note = 2'-O-methyladenosine-3'-phosphate
  modified_base 14: mod_base = OTHER; note = 2'-deoxy-2'-fluorouridine-3'-phosphate
  modified_base 15: mod_base = OTHER; note = 2'-O-methyladenosine-3'-phosphate
  modified_base 16: mod_base = OTHER; note = 2'-deoxy-2'-fluoroadenosine-3'-phosphate
  modified_base 17: mod_base = OTHER; note = 2'-O-methylguanosine-3'-phosphate
  modified_base 18: mod_base = OTHER; note = 2'-O-methylguanosine-3'-phosphate
  modified_base 19: mod_base = OTHER; note = 2'-O-methyladenosine-3'-phosphate
  modified_base 20: mod_base = OTHER; note = 2'-O-methylguanosine-3'-phosphate
  modified_base 21: mod_base = OTHER; note = 2'-O-methylcytidine-3'-phosphate
  modified_base 22: mod_base = OTHER; note = 2'-O-methylcytidine-3'-phosphate
  modified_base 23: mod_base = OTHER; note = 2'-O-methylcytidine
tcaaatagtcatataaggagccc

SEQ ID NO: 4720 - RNA, 23 nt, synthetic construct
  source 1..23: mol_type = other RNA
  modified_base 1: mod_base = OTHER; note = 2'-O-methyluridine-3'-phosphate 5'-(E)-Vinylphosphonate
  modified_base 2: mod_base = OTHER; note = 2'-deoxy-2'-fluorouridine-3'-phosphate
  modified_base 3: mod_base = OTHER; note = 2'-O-methylcytidine-3'-phosphate
  modified_base 4: mod_base = OTHER; note = 2'-O-methyladenosine-3'-phosphate
  modified_base 5: mod_base = OTHER; note = 2'-O-methyladenosine-3'-phosphate
  modified_base 6: mod_base = OTHER; note = 2'-deoxy-2'-fluoroadenosine-3'-phosphate
  modified_base 7: mod_base = OTHER; note = 2'-O-methyluridine-3'-phosphate
  modified_base 8: mod_base = OTHER; note = 2'-O-methyladenosine-3'-phosphate
  modified_base 9: mod_base = OTHER; note = 2'-O-methylguanosine-3'-phosphate
  modified_base 10: mod_base = OTHER; note = 2'-O-methyluridine-3'-phosphate
  modified_base 11: mod_base = OTHER; note = 2'-O-methylcytidine-3'-phosphate
  modified_base 12: mod_base = OTHER; note = 2'-O-methyladenosine-3'-phosphate
  modified_base 13: mod_base = OTHER; note = 2'-O-methyluridine-3'-phosphate
  modified_base 14: mod_base = OTHER; note = 2'-deoxy-2'-fluoroadenosine-3'-phosphate
  modified_base 15: mod_base = OTHER; note = 2'-O-methyluridine-3'-phosphate
  modified_base 16: mod_base = OTHER; note = 2'-deoxy-2'-fluoroadenosine-3'-phosphate
  modified_base 17: mod_base = OTHER; note = 2'-O-methyladenosine-3'-phosphate
  modified_base 18: mod_base = OTHER; note = 2'-O-methylguanosine-3'-phosphate
  modified_base 19: mod_base = OTHER; note = 2'-O-methylguanosine-3'-phosphate
  modified_base 20: mod_base = OTHER; note = 2'-O-methyladenosine-3'-phosphate
  modified_base 21: mod_base = OTHER; note = 2'-O-methylguanosine-3'-phosphate
  modified_base 22: mod_base = OTHER; note = 2'-O-methylcytidine-3'-phosphate
  modified_base 23: mod_base = OTHER; note = 2'-O-methylcytidine
ttcaaatagtcatataaggagcc

SEQ ID NO: 4721 - RNA, 23 nt, synthetic construct
  source 1..23: mol_type = other RNA
  modified_base 1: mod_base = OTHER; note = 2'-O-methyluridine-3'-phosphate 5'-(E)-Vinylphosphonate
  modified_base 2: mod_base = OTHER; note = 2'-deoxy-2'-fluorouridine-3'-phosphate
  modified_base 3: mod_base = OTHER; note = 2'-O-methyluridine-3'-phosphate
  modified_base 4: mod_base = OTHER; note = 2'-O-methylcytidine-3'-phosphate
  modified_base 5: mod_base = OTHER; note = 2'-O-methyladenosine-3'-phosphate
  modified_base 6: mod_base = OTHER; note = 2'-deoxy-2'-fluoroadenosine-3'-phosphate
  modified_base 7: mod_base = OTHER; note = 2'-O-methyladenosine-3'-phosphate
  modified_base 8: mod_base = OTHER; note = 2'-O-methyluridine-3'-phosphate
  modified_base 9: mod_base = OTHER; note = 2'-O-methyladenosine-3'-phosphate
  modified_base 10: mod_base = OTHER; note = 2'-O-methylguanosine-3'-phosphate
  modified_base 11: mod_base = OTHER; note = 2'-O-methyluridine-3'-phosphate
  modified_base 12: mod_base = OTHER; note = 2'-O-methylcytidine-3'-phosphate
  modified_base 13: mod_base = OTHER; note = 2'-O-methyladenosine-3'-phosphate
  modified_base 14: mod_base = OTHER; note = 2'-deoxy-2'-fluorouridine-3'-phosphate
  modified_base 15: mod_base = OTHER; note = 2'-O-methyladenosine-3'-phosphate
  modified_base 16: mod_base = OTHER; note = 2'-deoxy-2'-fluorouridine-3'-phosphate
  modified_base 17: mod_base = OTHER; note = 2'-O-methyladenosine-3'-phosphate
  modified_base 18: mod_base = OTHER; note = 2'-O-methyladenosine-3'-phosphate
  modified_base 19: mod_base = OTHER; note = 2'-O-methylguanosine-3'-phosphate
  modified_base 20: mod_base = OTHER; note = 2'-O-methylguanosine-3'-phosphate
  modified_base 21: mod_base = OTHER; note = 2'-O-methyladenosine-3'-phosphate
  modified_base 22: mod_base = OTHER; note = 2'-O-methylguanosine-3'-phosphate
  modified_base 23: mod_base = OTHER; note = 2'-O-methylcytidine
tttcaaatagtcatataaggagc

SEQ ID NO: 4722 - RNA, 23 nt, synthetic construct
  source 1..23: mol_type = other RNA
  modified_base 1: mod_base = OTHER; note = 2'-O-methyluridine-3'-phosphate 5'-(E)-Vinylphosphonate
  modified_base 2: mod_base = OTHER; note = 2'-deoxy-2'-fluoroadenosine-3'-phosphate
  modified_base 3: mod_base = OTHER; note = 2'-O-methyluridine-3'-phosphate
  modified_base 4: mod_base = OTHER; note = 2'-O-methyluridine-3'-phosphate
  modified_base 5: mod_base = OTHER; note = 2'-O-methylcytidine-3'-phosphate
  modified_base 6: mod_base = OTHER; note = 2'-deoxy-2'-fluoroadenosine-3'-phosphate
  modified_base 7: mod_base = OTHER; note = 2'-O-methyladenosine-3'-phosphate
  modified_base 8: mod_base = OTHER; note = 2'-O-methyladenosine-3'-phosphate
  modified_base 9: mod_base = OTHER; note = 2'-O-methyluridine-3'-phosphate
  modified_base 10: mod_base = OTHER; note = 2'-O-methyladenosine-3'-phosphate
  modified_base 11: mod_base = OTHER; note = 2'-O-methylguanosine-3'-phosphate
  modified_base 12: mod_base = OTHER; note = 2'-O-methyluridine-3'-phosphate
  modified_base 13: mod_base = OTHER; note = 2'-O-methylcytidine-3'-phosphate
  modified_base 14: mod_base = OTHER; note = 2'-deoxy-2'-fluoroadenosine-3'-phosphate
  modified_base 15: mod_base = OTHER; note = 2'-O-methyluridine-3'-phosphate
  modified_base 16: mod_base = OTHER; note = 2'-deoxy-2'-fluoroadenosine-3'-phosphate
  modified_base 17: mod_base = OTHER; note = 2'-O-methyluridine-3'-phosphate
  modified_base 18: mod_base = OTHER; note = 2'-O-methyladenosine-3'-phosphate
  modified_base 19: mod_base = OTHER; note = 2'-O-methyladenosine-3'-phosphate
  modified_base 20: mod_base = OTHER; note = 2'-O-methylguanosine-3'-phosphate
  modified_base 21: mod_base = OTHER; note = 2'-O-methylguanosine-3'-phosphate
  modified_base 22: mod_base = OTHER; note = 2'-O-methyladenosine-3'-phosphate
  modified_base 23: mod_base = OTHER; note = 2'-O-methylguanosine
tattcaaatagtcatataaggag

SEQ ID NO: 4723 - RNA, 23 nt, synthetic construct
  source 1..23: mol_type = other RNA
  modified_base 1: mod_base = OTHER; note = 2'-O-methyluridine-3'-phosphate 5'-(E)-Vinylphosphonate
  modified_base 2: mod_base = OTHER; note = 2'-deoxy-2'-fluorocytidine-3'-phosphate
  modified_base 3: mod_base = OTHER; note = 2'-O-methyluridine-3'-phosphate
  modified_base 4: mod_base = OTHER; note = 2'-O-methyladenosine-3'-phosphate
  modified_base 5: mod_base = OTHER; note = 2'-O-methyluridine-3'-phosphate
  modified_base 6: mod_base = OTHER; note = 2'-deoxy-2'-fluorouridine-3'-phosphate
  modified_base 7: mod_base = OTHER; note = 2'-O-methylcytidine-3'-phosphate
  modified_base 8: mod_base = OTHER; note = 2'-O-methyladenosine-3'-phosphate
  modified_base 9: mod_base = OTHER; note = 2'-O-methyladenosine-3'-phosphate
  modified_base 10: mod_base = OTHER; note = 2'-O-methyladenosine-3'-phosphate
  modified_base 11: mod_base = OTHER; note = 2'-O-methyluridine-3'-phosphate
  modified_base 12: mod_base = OTHER; note = 2'-O-methyladenosine-3'-phosphate
  modified_base 13: mod_base = OTHER; note = 2'-O-methylguanosine-3'-phosphate
  modified_base 14: mod_base = OTHER; note = 2'-deoxy-2'-fluorouridine-3'-phosphate
  modified_base 15: mod_base = OTHER; note = 2'-O-methylcytidine-3'-phosphate
  modified_base 16: mod_base = OTHER; note = 2'-deoxy-2'-fluoroadenosine-3'-phosphate
  modified_base 17: mod_base = OTHER; note = 2'-O-methyluridine-3'-phosphate
  modified_base 18: mod_base = OTHER; note = 2'-O-methyladenosine-3'-phosphate
  modified_base 19: mod_base = OTHER; note = 2'-O-methyluridine-3'-phosphate
  modified_base 20: mod_base = OTHER; note = 2'-O-methyladenosine-3'-phosphate
  modified_base 21: mod_base = OTHER; note = 2'-O-methyladenosine-3'-phosphate
  modified_base 22: mod_base = OTHER; note = 2'-O-methylguanosine-3'-phosphate
  modified_base 23: mod_base = OTHER; note = 2'-O-methylguanosine
tctattcaaatagtcatataagg

SEQ ID NO: 4724 - RNA, 23 nt, synthetic construct
  source 1..23: mol_type = other RNA
  modified_base 1: mod_base = OTHER; note = 2'-O-methyluridine-3'-phosphate 5'-(E)-Vinylphosphonate
  modified_base 2: mod_base = OTHER; note = 2'-deoxy-2'-fluoroadenosine-3'-phosphate
  modified_base 3: mod_base = OTHER; note = 2'-O-methyluridine-3'-phosphate
  modified_base 4: mod_base = OTHER; note = 2'-O-methylcytidine-3'-phosphate
  modified_base 5: mod_base = OTHER; note = 2'-O-methyladenosine-3'-phosphate
  modified_base 6: mod_base = OTHER; note = 2'-deoxy-2'-fluorouridine-3'-phosphate
  modified_base 7: mod_base = OTHER; note = 2'-O-methyluridine-3'-phosphate
  modified_base 8: mod_base = OTHER; note = 2'-O-methylcytidine-3'-phosphate
  modified_base 9: mod_base = OTHER; note = 2'-O-methylcytidine-3'-phosphate
  modified_base 10: mod_base = OTHER; note = 2'-O-methyladenosine-3'-phosphate
  modified_base 11: mod_base = OTHER; note = 2'-O-methylguanosine-3'-phosphate
  modified_base 12: mod_base = OTHER; note = 2'-O-methylcytidine-3'-phosphate
  modified_base 13: mod_base = OTHER; note = 2'-O-methylcytidine-3'-phosphate
  modified_base 14: mod_base = OTHER; note = 2'-deoxy-2'-fluoroadenosine-3'-phosphate
  modified_base 15: mod_base = OTHER; note = 2'-O-methylcytidine-3'-phosphate
  modified_base 16: mod_base = OTHER; note = 2'-deoxy-2'-fluoroguanosine-3'-phosphate
  modified_base 17: mod_base = OTHER; note = 2'-O-methylguanosine-3'-phosphate
  modified_base 18: mod_base = OTHER; note = 2'-O-methyluridine-3'-phosphate
  modified_base 19: mod_base = OTHER; note = 2'-O-methylcytidine-3'-phosphate
  modified_base 20: mod_base = OTHER; note = 2'-O-methyladenosine-3'-phosphate
  modified_base 21: mod_base = OTHER; note = 2'-O-methylcytidine-3'-phosphate
  modified_base 22: mod_base = OTHER; note = 2'-O-methyluridine-3'-phosphate
  modified_base 23: mod_base = OTHER; note = 2'-O-methyladenosine
tatcattccagccacggtcacta

SEQ ID NO: 4725 - RNA, 23 nt, synthetic construct
  source 1..23: mol_type = other RNA
  modified_base 1: mod_base = OTHER; note = 2'-O-methyluridine-3'-phosphate 5'-(E)-Vinylphosphonate
  modified_base 2: mod_base = OTHER; note = 2'-deoxy-2'-fluoroguanosine-3'-phosphate
  modified_base 3: mod_base = OTHER; note = 2'-O-methylcytidine-3'-phosphate
  modified_base 4: mod_base = OTHER; note = 2'-O-methyluridine-3'-phosphate
  modified_base 5: mod_base = OTHER; note = 2'-O-methyluridine-3'-phosphate
  modified_base 6: mod_base = OTHER; note = 2'-deoxy-2'-fluoroguanosine-3'-phosphate
  modified_base 7: mod_base = OTHER; note = 2'-O-methyladenosine-3'-phosphate
  modified_base 8: mod_base = OTHER; note = 2'-O-methyluridine-3'-phosphate
  modified_base 9: mod_base = OTHER; note = 2'-O-methylcytidine-3'-phosphate
  modified_base 10: mod_base = OTHER; note = 2'-O-methyladenosine-3'-phosphate
  modified_base 11: mod_base = OTHER; note = 2'-O-methyluridine-3'-phosphate
  modified_base 12: mod_base = OTHER; note = 2'-O-methyluridine-3'-phosphate
  modified_base 13: mod_base = OTHER; note = 2'-O-methylcytidine-3'-phosphate
  modified_base 14: mod_base = OTHER; note = 2'-deoxy-2'-fluorocytidine-3'-phosphate
  modified_base 15: mod_base = OTHER; note = 2'-O-methyladenosine-3'-phosphate
  modified_base 16: mod_base = OTHER; note = 2'-deoxy-2'-fluoroguanosine-3'-phosphate
  modified_base 17: mod_base = OTHER; note = 2'-O-methylcytidine-3'-phosphate
  modified_base 18: mod_base = OTHER; note = 2'-O-methylcytidine-3'-phosphate
  modified_base 19: mod_base = OTHER; note = 2'-O-methyladenosine-3'-phosphate
  modified_base 20: mod_base = OTHER; note = 2'-O-methylcytidine-3'-phosphate
  modified_base 21: mod_base = OTHER; note = 2'-O-methylguanosine-3'-phosphate
  modified_base 22: mod_base = OTHER; note = 2'-O-methylguanosine-3'-phosphate
  modified_base 23: mod_base = OTHER; note = 2'-O-methyluridine
tgcttgatcattccagccacggt

SEQ ID NO: 4726 - RNA, 23 nt, synthetic construct
  source 1..23: mol_type = other RNA
  modified_base 1: mod_base = OTHER; note = 2'-O-methyluridine-3'-phosphate 5'-(E)-Vinylphosphonate
  modified_base 2: mod_base = OTHER; note = 2'-deoxy-2'-fluorocytidine-3'-phosphate
  modified_base 3: mod_base = OTHER; note = 2'-O-methyladenosine-3'-phosphate
  modified_base 4: mod_base = OTHER; note = 2'-O-methylguanosine-3'-phosphate
  modified_base 5: mod_base = OTHER; note = 2'-O-methylcytidine-3'-phosphate
  modified_base 6: mod_base = OTHER; note = 2'-deoxy-2'-fluorouridine-3'-phosphate
  modified_base 7: mod_base = OTHER; note = 2'-O-methyluridine-3'-phosphate
  modified_base 8: mod_base = OTHER; note = 2'-O-methylguanosine-3'-phosphate
  modified_base 9: mod_base = OTHER; note = 2'-O-methyladenosine-3'-phosphate
  modified_base 10: mod_base = OTHER; note = 2'-O-methyluridine-3'-phosphate
  modified_base 11: mod_base = OTHER; note = 2'-O-methylcytidine-3'-phosphate
  modified_base 12: mod_base = OTHER; note = 2'-O-methyladenosine-3'-phosphate
  modified_base 13: mod_base = OTHER; note = 2'-O-methyluridine-3'-phosphate
  modified_base 14: mod_base = OTHER; note = 2'-deoxy-2'-fluorouridine-3'-phosphate
  modified_base 15: mod_base = OTHER; note = 2'-O-methylcytidine-3'-phosphate
  modified_base 16: mod_base = OTHER; note = 2'-deoxy-2'-fluorocytidine-3'-phosphate
  modified_base 17: mod_base = OTHER; note = 2'-O-methyladenosine-3'-phosphate
  modified_base 18: mod_base = OTHER; note = 2'-O-methylguanosine-3'-phosphate
  modified_base 19: mod_base = OTHER; note = 2'-O-methylcytidine-3'-phosphate
  modified_base 20: mod_base = OTHER; note = 2'-O-methylcytidine-3'-phosphate
  modified_base 21: mod_base = OTHER; note = 2'-O-methyladenosine-3'-phosphate
  modified_base 22: mod_base = OTHER; note = 2'-O-methylcytidine-3'-phosphate
  modified_base 23: mod_base = OTHER; note = 2'-O-methylguanosine
tcagcttgatcattccagccacg

SEQ ID NO: 4727 - RNA, 23 nt, synthetic construct
  source 1..23: mol_type = other RNA
  modified_base 1: mod_base = OTHER; note = 2'-O-methyluridine-3'-phosphate 5'-(E)-Vinylphosphonate
  modified_base 2: mod_base = OTHER; note = 2'-deoxy-2'-fluorocytidine-3'-phosphate
  modified_base 3: mod_base = OTHER; note = 2'-O-methyladenosine-3'-phosphate
  modified_base 4: mod_base = OTHER; note = 2'-O-methylcytidine-3'-phosphate
  modified_base 5: mod_base = OTHER; note = 2'-O-methyluridine-3'-phosphate
  modified_base 6: mod_base = OTHER; note = 2'-deoxy-2'-fluoroadenosine-3'-phosphate
  modified_base 7: mod_base = OTHER; note = 2'-O-methylguanosine-3'-phosphate
  modified_base 8: mod_base = OTHER; note = 2'-O-methylcytidine-3'-phosphate
  modified_base 9: mod_base = OTHER; note = 2'-O-methyladenosine-3'-phosphate
  modified_base 10: mod_base = OTHER; note = 2'-O-methyladenosine-3'-phosphate
  modified_base 11: mod_base = OTHER; note = 2'-O-methyluridine-3'-phosphate
  modified_base 12: mod_base = OTHER; note = 2'-O-methyluridine-3'-phosphate
  modified_base 13: mod_base = OTHER; note = 2'-O-methylguanosine-3'-phosphate
  modified_base 14: mod_base = OTHER; note = 2'-deoxy-2'-fluoroadenosine-3'-phosphate
  modified_base 15: mod_base = OTHER; note = 2'-O-methylguanosine-3'-phosphate
  modified_base 16: mod_base = OTHER; note = 2'-deoxy-2'-fluoroadenosine-3'-phosphate
  modified_base 17: mod_base = OTHER; note = 2'-O-methylguanosine-3'-phosphate
  modified_base 18: mod_base = OTHER; note = 2'-O-methylcytidine-3'-phosphate
  modified_base 19: mod_base = OTHER; note = 2'-O-methylguanosine-3'-phosphate
  modified_base 20: mod_base = OTHER; note = 2'-O-methylcytidine-3'-phosphate
  modified_base 21: mod_base = OTHER; note = 2'-O-methylcytidine-3'-phosphate
  modified_base 22: mod_base = OTHER; note = 2'-O-methyladenosine-3'-phosphate
  modified_base 23: mod_base = OTHER; note = 2'-O-methylguanosine
tcactagcaattgagagcgccag

SEQ ID NO: 4728 - RNA, 23 nt, synthetic construct
  source 1..23: mol_type = other RNA
  modified_base 1: mod_base = OTHER; note = 2'-O-methyluridine-3'-phosphate 5'-(E)-Vinylphosphonate
  modified_base 2: mod_base = OTHER; note = 2'-deoxy-2'-fluoroadenosine-3'-phosphate
  modified_base 3: mod_base = OTHER; note = 2'-O-methylguanosine-3'-phosphate
  modified_base 4: mod_base = OTHER; note = 2'-O-methyladenosine-3'-phosphate
  modified_base 5: mod_base = OTHER; note = 2'-O-methylcytidine-3'-phosphate
  modified_base 6: mod_base = OTHER; note = 2'-deoxy-2'-fluorocytidine-3'-phosphate
  modified_base 7: mod_base = OTHER; note = 2'-O-methyladenosine-3'-phosphate
  modified_base 8: mod_base = OTHER; note = 2'-O-methylcytidine-3'-phosphate
  modified_base 9: mod_base = OTHER; note = 2'-O-methyluridine-3'-phosphate
  modified_base 10: mod_base = OTHER; note = 2'-O-methyladenosine-3'-phosphate
  modified_base 11: mod_base = OTHER; note = 2'-O-methylguanosine-3'-phosphate
  modified_base 12: mod_base = OTHER; note = 2'-O-methylcytidine-3'-phosphate
  modified_base 13: mod_base = OTHER; note = 2'-O-methyladenosine-3'-phosphate
  modified_base 14: mod_base = OTHER; note = 2'-deoxy-2'-fluoroadenosine-3'-phosphate
  modified_base 15: mod_base = OTHER; note = 2'-O-methyluridine-3'-phosphate
  modified_base 16: mod_base = OTHER; note = 2'-deoxy-2'-fluorouridine-3'-phosphate
  modified_base 17: mod_base = OTHER; note = 2'-O-methylguanosine-3'-phosphate
  modified_base 18: mod_base = OTHER; note = 2'-O-methyladenosine-3'-phosphate
  modified_base 19: mod_base = OTHER; note = 2'-O-methylguanosine-3'-phosphate
  modified_base 20: mod_base = OTHER; note = 2'-O-methyladenosine-3'-phosphate
  modified_base 21: mod_base = OTHER; note = 2'-O-methylguanosine-3'-phosphate
  modified_base 22: mod_base = OTHER; note = 2'-O-methylcytidine-3'-phosphate
  modified_base 23: mod_base = OTHER; note = 2'-O-methylguanosine
tagaccactagcaattgagagcg

SEQ ID NO: 4729 - RNA, 23 nt, synthetic construct
  source 1..23: mol_type = other RNA
  modified_base 1: mod_base = OTHER; note = 2'-O-methyluridine-3'-phosphate 5'-(E)-Vinylphosphonate
  modified_base 2: mod_base = OTHER; note = 2'-deoxy-2'-fluorouridine-3'-phosphate
  modified_base 3: mod_base = OTHER; note = 2'-O-methylcytidine-3'-phosphate
  modified_base 4: mod_base = OTHER; note = 2'-O-methylcytidine-3'-phosphate
  modified_base 5: mod_base = OTHER; note = 2'-O-methyladenosine-3'-phosphate
  modified_base 6: mod_base = OTHER; note = 2'-deoxy-2'-fluorouridine-3'-phosphate
  modified_base 7: mod_base = OTHER; note = 2'-O-methyladenosine-3'-phosphate
  modified_base 8: mod_base = OTHER; note = 2'-O-methyluridine-3'-phosphate
  modified_base 9: mod_base = OTHER; note = 2'-O-methylguanosine-3'-phosphate
  modified_base 10: mod_base = OTHER; note = 2'-O-methyladenosine-3'-phosphate
  modified_base 11: mod_base = OTHER; note = 2'-O-methyladenosine-3'-phosphate
  modified_base 12: mod_base = OTHER; note = 2'-O-methylguanosine-3'-phosphate
  modified_base 13: mod_base = OTHER; note = 2'-O-methylguanosine-3'-phosphate
  modified_base 14: mod_base = OTHER; note = 2'-deoxy-2'-fluorouridine-3'-phosphate
  modified_base 15: mod_base = OTHER; note = 2'-O-methylguanosine-3'-phosphate
  modified_base 16: mod_base = OTHER; note = 2'-deoxy-2'-fluorouridine-3'-phosphate
  modified_base 17: mod_base = OTHER; note = 2'-O-methylguanosine-3'-phosphate
  modified_base 18: mod_base = OTHER; note = 2'-O-methylcytidine-3'-phosphate
  modified_base 19: mod_base = OTHER; note = 2'-O-methylcytidine-3'-phosphate
  modified_base 20: mod_base = OTHER; note = 2'-O-methyladenosine-3'-phosphate
  modified_base 21: mod_base = OTHER; note = 2'-O-methylguanosine-3'-phosphate
  modified_base 22: mod_base = OTHER; note = 2'-O-methyladenosine-3'-phosphate
  modified_base 23: mod_base = OTHER; note = 2'-O-methylcytidine
ttccatatgaaggtgtgccagac

SEQ ID NO: 4730 - RNA, 23 nt, synthetic construct
  source 1..23: mol_type = other RNA
  modified_base 1: mod_base = OTHER; note = 2'-O-methyluridine-3'-phosphate 5'-(E)-Vinylphosphonate
  modified_base 2: mod_base = OTHER; note = 2'-deoxy-2'-fluorocytidine-3'-phosphate
  modified_base 3: mod_base = OTHER; note = 2'-O-methyluridine-3'-phosphate
  modified_base 4: mod_base = OTHER; note = 2'-O-methylcytidine-3'-phosphate
  modified_base 5: mod_base = OTHER; note = 2'-O-methylcytidine-3'-phosphate
  modified_base 6: mod_base = OTHER; note = 2'-deoxy-2'-fluoroadenosine-3'-phosphate
  modified_base 7: mod_base = OTHER; note = 2'-O-methyluridine-3'-phosphate
  modified_base 8: mod_base = OTHER; note = 2'-O-methyladenosine-3'-phosphate
  modified_base 9: mod_base = OTHER; note = 2'-O-methyluridine-3'-phosphate
  modified_base 10: mod_base = OTHER; note = 2'-O-methylguanosine-3'-phosphate
  modified_base 11: mod_base = OTHER; note = 2'-O-methyladenosine-3'-phosphate
  modified_base 12: mod_base = OTHER; note = 2'-O-methyladenosine-3'-phosphate
  modified_base 13: mod_base = OTHER; note = 2'-O-methylguanosine-3'-phosphate
  modified_base 14: mod_base = OTHER; note = 2'-deoxy-2'-fluoroguanosine-3'-phosphate
  modified_base 15: mod_base = OTHER; note = 2'-O-methyluridine-3'-phosphate
  modified_base 16: mod_base = OTHER; note = 2'-deoxy-2'-fluoroguanosine-3'-phosphate
  modified_base 17: mod_base = OTHER; note = 2'-O-methyluridine-3'-phosphate
  modified_base 18: mod_base = OTHER; note = 2'-O-methylguanosine-3'-phosphate
  modified_base 19: mod_base = OTHER; note = 2'-O-methylcytidine-3'-phosphate
  modified_base 20: mod_base = OTHER; note = 2'-O-methylcytidine-3'-phosphate
  modified_base 21: mod_base = OTHER; note = 2'-O-methyladenosine-3'-phosphate
  modified_base 22: mod_base = OTHER; note = 2'-O-methylguanosine-3'-phosphate
  modified_base 23: mod_base = OTHER; note = 2'-O-methyladenosine
tctccatatgaaggtgtgccaga

SEQ ID NO: 4731 - RNA, 23 nt, synthetic construct
  source 1..23: mol_type = other RNA
  modified_base 1: mod_base = OTHER; note = 2'-O-methyluridine-3'-phosphate 5'-(E)-Vinylphosphonate
  modified_base 2: mod_base = OTHER; note = 2'-deoxy-2'-fluorouridine-3'-phosphate
  modified_base 3: mod_base = OTHER; note = 2'-O-methylcytidine-3'-phosphate
  modified_base 4: mod_base = OTHER; note = 2'-O-methyluridine-3'-phosphate
  modified_base 5: mod_base = OTHER; note = 2'-O-methylcytidine-3'-phosphate
  modified_base 6: mod_base = OTHER; note = 2'-deoxy-2'-fluorocytidine-3'-phosphate
  modified_base 7: mod_base = OTHER; note = 2'-O-methyladenosine-3'-phosphate
  modified_base 8: mod_base = OTHER; note = 2'-O-methyluridine-3'-phosphate
  modified_base 9: mod_base = OTHER; note = 2'-O-methyladenosine-3'-phosphate
  modified_base 10: mod_base = OTHER; note = 2'-O-methyluridine-3'-phosphate
  modified_base 11: mod_base = OTHER; note = 2'-O-methylguanosine-3'-phosphate
  modified_base 12: mod_base = OTHER; note = 2'-O-methyladenosine-3'-phosphate
  modified_base 13: mod_base = OTHER; note = 2'-O-methyladenosine-3'-phosphate
  modified_base 14: mod_base = OTHER; note = 2'-deoxy-2'-fluoroguanosine-3'-phosphate
  modified_base 15: mod_base = OTHER; note = 2'-O-methylguanosine-3'-phosphate
  modified_base 16: mod_base = OTHER; note = 2'-deoxy-2'-fluorouridine-3'-phosphate
  modified_base 17: mod_base = OTHER; note = 2'-O-methylguanosine-3'-phosphate
  modified_base 18: mod_base = OTHER; note = 2'-O-methyluridine-3'-phosphate
  modified_base 19: mod_base = OTHER; note = 2'-O-methylguanosine-3'-phosphate
  modified_base 20: mod_base = OTHER; note = 2'-O-methylcytidine-3'-phosphate
  modified_base 21: mod_base = OTHER; note = 2'-O-methylcytidine-3'-phosphate
  modified_base 22: mod_base = OTHER; note = 2'-O-methyladenosine-3'-phosphate
  modified_base 23: mod_base = OTHER; note = 2'-O-methylguanosine
ttctccatatgaaggtgtgccag

SEQ ID NO: 4732 - RNA, 23 nt, synthetic construct
  source 1..23: mol_type = other RNA
  modified_base 1: mod_base = OTHER; note = 2'-O-methyluridine-3'-phosphate 5'-(E)-Vinylphosphonate
  modified_base 2: mod_base = OTHER; note = 2'-deoxy-2'-fluoroadenosine-3'-phosphate
  modified_base 3: mod_base = OTHER; note = 2'-O-methyluridine-3'-phosphate
  modified_base 4: mod_base = OTHER; note = 2'-O-methylcytidine-3'-phosphate
  modified_base 5: mod_base = OTHER; note = 2'-O-methyluridine-3'-phosphate
  modified_base 6: mod_base = OTHER; note = 2'-deoxy-2'-fluorocytidine-3'-phosphate
  modified_base 7: mod_base = OTHER; note = 2'-O-methylcytidine-3'-phosphate
  modified_base 8: mod_base = OTHER; note = 2'-O-methyladenosine-3'-phosphate
  modified_base 9: mod_base = OTHER; note = 2'-O-methyluridine-3'-phosphate
  modified_base 10: mod_base = OTHER; note = 2'-O-methyladenosine-3'-phosphate
  modified_base 11: mod_base = OTHER; note = 2'-O-methyluridine-3'-phosphate
  modified_base 12: mod_base = OTHER; note = 2'-O-methylguanosine-3'-phosphate
  modified_base 13: mod_base = OTHER; note = 2'-O-methyladenosine-3'-phosphate
  modified_base 14: mod_base = OTHER; note = 2'-deoxy-2'-fluoroadenosine-3'-phosphate
  modified_base 15: mod_base = OTHER; note = 2'-O-methylguanosine-3'-phosphate
  modified_base 16: mod_base = OTHER; note = 2'-deoxy-2'-fluoroguanosine-3'-phosphate
  modified_base 17: mod_base = OTHER; note = 2'-O-methyluridine-3'-phosphate
  modified_base 18: mod_base = OTHER; note = 2'-O-methylguanosine-3'-phosphate
  modified_base 19: mod_base = OTHER; note = 2'-O-methyluridine-3'-phosphate
  modified_base 20: mod_base = OTHER; note = 2'-O-methylguanosine-3'-phosphate
  modified_base 21: mod_base = OTHER; note = 2'-O-methylcytidine-3'-phosphate
  modified_base 22: mod_base = OTHER; note = 2'-O-methylcytidine-3'-phosphate
  modified_base 23: mod_base = OTHER; note = 2'-O-methyladenosine
tatctccatatgaaggtgtgcca

SEQ ID NO: 4733 - RNA, 23 nt, synthetic construct
  source 1..23: mol_type = other RNA
  modified_base 1: mod_base = OTHER; note = 2'-O-methyluridine-3'-phosphate 5'-(E)-Vinylphosphonate
  modified_base 2: mod_base = OTHER; note = 2'-deoxy-2'-fluoroadenosine-3'-phosphate
  modified_base 3: mod_base = OTHER; note = 2'-O-methyladenosine-3'-phosphate
  modified_base 4: mod_base = OTHER; note = 2'-O-methyluridine-3'-phosphate
  modified_base 5: mod_base = OTHER; note = 2'-O-methylcytidine-3'-phosphate
  modified_base 6: mod_base = OTHER; note = 2'-deoxy-2'-fluorouridine-3'-phosphate
  modified_base 7: mod_base = OTHER; note = 2'-O-methylcytidine-3'-phosphate
  modified_base 8: mod_base = OTHER; note = 2'-O-methylcytidine-3'-phosphate
  modified_base 9: mod_base = OTHER; note = 2'-O-methyladenosine-3'-phosphate
  modified_base 10: mod_base = OTHER; note = 2'-O-methyluridine-3'-phosphate
  modified_base 11: mod_base = OTHER; note = 2'-O-methyladenosine-3'-phosphate
  modified_base 12: mod_base = OTHER; note = 2'-O-methyluridine-3'-phosphate
  modified_base 13: mod_base = OTHER; note = 2'-O-methylguanosine-3'-phosphate
  modified_base 14: mod_base = OTHER; note = 2'-deoxy-2'-fluoroadenosine-3'-phosphate
  modified_base 15: mod_base = OTHER; note = 2'-O-methyladenosine-3'-phosphate
  modified_base 16: mod_base = OTHER; note = 2'-deoxy-2'-fluoroguanosine-3'-phosphate
  modified_base 17: mod_base = OTHER; note = 2'-O-methylguanosine-3'-phosphate
  modified_base 18: mod_base = OTHER; note = 2'-O-methyluridine-3'-phosphate
  modified_base 19: mod_base = OTHER; note = 2'-O-methylguanosine-3'-phosphate
  modified_base 20: mod_base = OTHER; note = 2'-O-methyluridine-3'-phosphate
  modified_base 21: mod_base = OTHER; note = 2'-O-methylguanosine-3'-phosphate
  modified_base 22: mod_base = OTHER; note = 2'-O-methylcytidine-3'-phosphate
  modified_base 23: mod_base = OTHER; note = 2'-O-methylcytidine
taatctccatatgaaggtgtgcc

SEQ ID NO: 4734 - RNA, 23 nt, synthetic construct
  source 1..23: mol_type = other RNA
  modified_base 1: mod_base = OTHER; note = 2'-O-methyluridine-3'-phosphate 5'-(E)-Vinylphosphonate
  modified_base 2: mod_base = OTHER; note = 2'-deoxy-2'-fluorocytidine-3'-phosphate
  modified_base 3: mod_base = OTHER; note = 2'-O-methyladenosine-3'-phosphate
  modified_base 4: mod_base = OTHER; note = 2'-O-methyladenosine-3'-phosphate
  modified_base 5: mod_base = OTHER; note = 2'-O-methyluridine-3'-phosphate
  modified_base 6: mod_base = OTHER; note = 2'-deoxy-2'-fluorocytidine-3'-phosphate
  modified_base 7: mod_base = OTHER; note = 2'-O-methyluridine-3'-phosphate
  modified_base 8: mod_base = OTHER; note = 2'-O-methylcytidine-3'-phosphate
  modified_base 9: mod_base = OTHER; note = 2'-O-methylcytidine-3'-phosphate
  modified_base 10: mod_base = OTHER; note = 2'-O-methyladenosine-3'-phosphate
  modified_base 11: mod_base = OTHER; note = 2'-O-methyluridine-3'-phosphate
  modified_base 12: mod_base = OTHER; note = 2'-O-methyladenosine-3'-phosphate
  modified_base 13: mod_base = OTHER; note = 2'-O-methyluridine-3'-phosphate
  modified_base 14: mod_base = OTHER; note = 2'-deoxy-2'-fluoroguanosine-3'-phosphate
  modified_base 15: mod_base = OTHER; note = 2'-O-methyladenosine-3'-phosphate
  modified_base 16: mod_base = OTHER; note = 2'-deoxy-2'-fluoroadenosine-3'-phosphate
  modified_base 17: mod_base = OTHER; note = 2'-O-methylguanosine-3'-phosphate
  modified_base 18: mod_base = OTHER; note = 2'-O-methylguanosine-3'-phosphate
  modified_base 19: mod_base = OTHER; note = 2'-O-methyluridine-3'-phosphate
  modified_base 20: mod_base = OTHER; note = 2'-O-methylguanosine-3'-phosphate
  modified_base 21: mod_base = OTHER; note = 2'-O-methyluridine-3'-phosphate
  modified_base 22: mod_base = OTHER; note = 2'-O-methylguanosine-3'-phosphate
  modified_base 23: mod_base = OTHER; note = 2'-O-methylcytidine
tcaatctccatatgaaggtgtgc

SEQ ID NO: 4735 - RNA, 23 nt, synthetic construct
  source 1..23: mol_type = other RNA
  modified_base 1: mod_base = OTHER; note = 2'-O-methyluridine-3'-phosphate 5'-(E)-Vinylphosphonate
  modified_base 2: mod_base = OTHER; note = 2'-deoxy-2'-fluoroadenosine-3'-phosphate
  modified_base 3: mod_base = OTHER; note = 2'-O-methylcytidine-3'-phosphate
  modified_base 4: mod_base = OTHER; note = 2'-O-methyladenosine-3'-phosphate
  modified_base 5: mod_base = OTHER; note = 2'-O-methyladenosine-3'-phosphate
  modified_base 6: mod_base = OTHER; note = 2'-deoxy-2'-fluorouridine-3'-phosphate
  modified_base 7: mod_base = OTHER; note = 2'-O-methylcytidine-3'-phosphate
  modified_base 8: mod_base = OTHER; note = 2'-O-methyluridine-3'-phosphate
  modified_base 9: mod_base = OTHER; note = 2'-O-methylcytidine-3'-phosphate
  modified_base 10: mod_base = OTHER; note = 2'-O-methylcytidine-3'-phosphate
  modified_base 11: mod_base = OTHER; note = 2'-O-methyladenosine-3'-phosphate
  modified_base 12: mod_base = OTHER; note = 2'-O-methyluridine-3'-phosphate
  modified_base 13: mod_base = OTHER; note = 2'-O-methyladenosine-3'-phosphate
  modified_base 14: mod_base = OTHER; note = 2'-deoxy-2'-fluorouridine-3'-phosphate
  modified_base 15: mod_base = OTHER; note = 2'-O-methylguanosine-3'-phosphate
  modified_base 16: mod_base = OTHER; note = 2'-deoxy-2'-fluoroadenosine-3'-phosphate
  modified_base 17: mod_base = OTHER; note = 2'-O-methyladenosine-3'-phosphate
  modified_base 18: mod_base = OTHER; note = 2'-O-methylguanosine-3'-phosphate
  modified_base 19: mod_base = OTHER; note = 2'-O-methylguanosine-3'-phosphate
  modified_base 20: mod_base = OTHER; note = 2'-O-methyluridine-3'-phosphate
  modified_base 21: mod_base = OTHER; note = 2'-O-methylguanosine-3'-phosphate
  modified_base 22: mod_base = OTHER; note = 2'-O-methyluridine-3'-phosphate
  modified_base 23: mod_base = OTHER; note = 2'-O-methylguanosine
tacaatctccatatgaaggtgtg

SEQ ID NO: 4736 - RNA, 23 nt, synthetic construct
  source 1..23: mol_type = other RNA
  modified_base 1: mod_base = OTHER; note = 2'-O-methyluridine-3'-phosphate 5'-(E)-Vinylphosphonate
  modified_base 2: mod_base = OTHER; note = 2'-deoxy-2'-fluoroadenosine-3'-phosphate
  modified_base 3: mod_base = OTHER; note = 2'-O-methyladenosine-3'-phosphate
  modified_base 4: mod_base = OTHER; note = 2'-O-methylcytidine-3'-phosphate
  modified_base 5: mod_base = OTHER; note = 2'-O-methyladenosine-3'-phosphate
  modified_base 6: mod_base = OTHER; note = 2'-deoxy-2'-fluoroadenosine-3'-phosphate
  modified_base 7: mod_base = OTHER; note = 2'-O-methyluridine-3'-phosphate
  modified_base 8: mod_base = OTHER; note = 2'-O-methylcytidine-3'-phosphate
  modified_base 9: mod_base = OTHER; note = 2'-O-methyluridine-3'-phosphate
  modified_base 10: mod_base = OTHER; note = 2'-O-methylcytidine-3'-phosphate
  modified_base 11: mod_base = OTHER; note = 2'-O-methylcytidine-3'-phosphate
  modified_base 12: mod_base = OTHER; note = 2'-O-methyladenosine-3'-phosphate
  modified_base 13: mod_base = OTHER; note = 2'-O-methyluridine-3'-phosphate
  modified_base 14: mod_base = OTHER; note = 2'-deoxy-2'-fluoroadenosine-3'-phosphate
  modified_base 15: mod_base = OTHER; note = 2'-O-methyluridine-3'-phosphate
  modified_base 16: mod_base = OTHER; note = 2'-deoxy-2'-fluoroguanosine-3'-phosphate
  modified_base 17: mod_base = OTHER; note = 2'-O-methyladenosine-3'-phosphate
  modified_base 18: mod_base = OTHER; note = 2'-O-methyladenosine-3'-phosphate
  modified_base 19: mod_base = OTHER; note = 2'-O-methylguanosine-3'-phosphate
  modified_base 20: mod_base = OTHER; note = 2'-O-methylguanosine-3'-phosphate
  modified_base 21: mod_base = OTHER; note = 2'-O-methyluridine-3'-phosphate
  modified_base 22: mod_base = OTHER; note = 2'-O-methylguanosine-3'-phosphate
  modified_base 23: mod_base = OTHER; note = 2'-O-methyluridine
taacaatctccatatgaaggtgt

SEQ ID NO: 4737 - RNA, 23 nt, synthetic construct
  source 1..23: mol_type = other RNA
  modified_base 1: mod_base = OTHER; note = 2'-O-methyluridine-3'-phosphate 5'-(E)-Vinylphosphonate
  modified_base 2: mod_base = OTHER; note = 2'-deoxy-2'-fluorocytidine-3'-phosphate
  modified_base 3: mod_base = OTHER; note = 2'-O-methyladenosine-3'-phosphate
  modified_base 4: mod_base = OTHER; note = 2'-O-methyladenosine-3'-phosphate
  modified_base 5: mod_base = OTHER; note = 2'-O-methylcytidine-3'-phosphate
  modified_base 6: mod_base = OTHER; note = 2'-deoxy-2'-fluoroadenosine-3'-phosphate
  modified_base 7: mod_base = OTHER; note = 2'-O-methyladenosine-3'-phosphate
  modified_base 8: mod_base = OTHER; note = 2'-O-methyluridine-3'-phosphate
  modified_base 9: mod_base = OTHER; note = 2'-O-methylcytidine-3'-phosphate
  modified_base 10: mod_base = OTHER; note = 2'-O-methyluridine-3'-phosphate
  modified_base 11: mod_base = OTHER; note = 2'-O-methylcytidine-3'-phosphate
  modified_base 12: mod_base = OTHER; note = 2'-O-methylcytidine-3'-phosphate
  modified_base 13: mod_base = OTHER; note = 2'-O-methyladenosine-3'-phosphate
  modified_base 14: mod_base = OTHER; note = 2'-deoxy-2'-fluorouridine-3'-phosphate
  modified_base 15: mod_base = OTHER; note = 2'-O-methyladenosine-3'-phosphate
  modified_base 16: mod_base = OTHER; note = 2'-deoxy-2'-fluorouridine-3'-phosphate
  modified_base 17: mod_base = OTHER; note = 2'-O-methylguanosine-3'-phosphate
  modified_base 18: mod_base = OTHER; note = 2'-O-methyladenosine-3'-phosphate
  modified_base 19: mod_base = OTHER; note = 2'-O-methyladenosine-3'-phosphate
  modified_base 20: mod_base = OTHER; note = 2'-O-methylguanosine-3'-phosphate
  modified_base 21: mod_base = OTHER; note = 2'-O-methylguanosine-3'-phosphate
  modified_base 22: mod_base = OTHER; note = 2'-O-methyluridine-3'-phosphate
  modified_base 23: mod_base = OTHER; note = 2'-O-methylguanosine
tcaacaatctccatatgaaggtg

SEQ ID NO: 4738 - RNA, 23 nt, synthetic construct
  source 1..23: mol_type = other RNA
  modified_base 1: mod_base = OTHER; note = 2'-O-methyluridine-3'-phosphate 5'-(E)-Vinylphosphonate
  modified_base 2: mod_base = OTHER; note = 2'-deoxy-2'-fluorocytidine-3'-phosphate
  modified_base 3: mod_base = OTHER; note = 2'-O-methylcytidine-3'-phosphate
  modified_base 4: mod_base = OTHER; note = 2'-O-methyladenosine-3'-phosphate
  modified_base 5: mod_base = OTHER; note = 2'-O-methyladenosine-3'-phosphate
  modified_base 6: mod_base = OTHER; note = 2'-deoxy-2'-fluorocytidine-3'-phosphate
  modified_base 7: mod_base = OTHER; note = 2'-O-methyladenosine-3'-phosphate
  modified_base 8: mod_base = OTHER; note = 2'-O-methyladenosine-3'-phosphate
  modified_base 9: mod_base = OTHER; note = 2'-O-methyluridine-3'-phosphate
  modified_base 10: mod_base = OTHER; note = 2'-O-methylcytidine-3'-phosphate
  modified_base 11: mod_base = OTHER; note = 2'-O-methyluridine-3'-phosphate
  modified_base 12: mod_base = OTHER; note = 2'-O-methylcytidine-3'-phosphate
  modified_base 13: mod_base = OTHER; note = 2'-O-methylcytidine-3'-phosphate
  modified_base 14: mod_base = OTHER; note = 2'-deoxy-2'-fluoroadenosine-3'-phosphate
  modified_base 15: mod_base = OTHER; note = 2'-O-methyluridine-3'-phosphate
  modified_base 16: mod_base = OTHER; note = 2'-deoxy-2'-fluoroadenosine-3'-phosphate
  modified_base 17: mod_base = OTHER; note = 2'-O-methyluridine-3'-phosphate
  modified_base 18: mod_base = OTHER; note = 2'-O-methylguanosine-3'-phosphate
  modified_base 19: mod_base = OTHER; note = 2'-O-methyladenosine-3'-phosphate
  modified_base 20: mod_base = OTHER; note = 2'-O-methyladenosine-3'-phosphate
  modified_base 21: mod_base = OTHER; note = 2'-O-methylguanosine-3'-phosphate
  modified_base 22: mod_base = OTHER; note = 2'-O-methylguanosine-3'-phosphate
  modified_base 23: mod_base = OTHER; note = 2'-O-methyluridine
tccaacaatctccatatgaaggt

SEQ ID NO: 4739 - RNA, 23 nt, synthetic construct
  source 1..23: mol_type = other RNA
  modified_base 1: mod_base = OTHER; note = 2'-O-methyluridine-3'-phosphate 5'-(E)-Vinylphosphonate
  modified_base 2: mod_base = OTHER; note = 2'-deoxy-2'-fluoroadenosine-3'-phosphate
  modified_base 3: mod_base = OTHER; note = 2'-O-methylcytidine-3'-phosphate
  modified_base 4: mod_base = OTHER; note = 2'-O-methylcytidine-3'-phosphate
  modified_base 5: mod_base = OTHER; note = 2'-O-methyladenosine-3'-phosphate
  modified_base 6: mod_base = OTHER; note = 2'-deoxy-2'-fluoroadenosine-3'-phosphate
  modified_base 7: mod_base = OTHER; note = 2'-O-methylcytidine-3'-phosphate
  modified_base 8: mod_base = OTHER; note = 2'-O-methyladenosine-3'-phosphate
  modified_base 9: mod_base = OTHER; note = 2'-O-methyladenosine-3'-phosphate
  modified_base 10: mod_base = OTHER; note = 2'-O-methyluridine-3'-phosphate
  modified_base 11: mod_base = OTHER; note = 2'-O-methylcytidine-3'-phosphate
  modified_base 12: mod_base = OTHER; note = 2'-O-methyluridine-3'-phosphate
  modified_base 13: mod_base = OTHER; note = 2'-O-methylcytidine-3'-phosphate
  modified_base 14: mod_base = OTHER; note = 2'-deoxy-2'-fluorocytidine-3'-phosphate
  modified_base 15: mod_base = OTHER; note = 2'-O-methyladenosine-3'-phosphate
  modified_base 16: mod_base = OTHER; note = 2'-deoxy-2'-fluorouridine-3'-phosphate
  modified_base 17: mod_base = OTHER; note = 2'-O-methyladenosine-3'-phosphate
  modified_base 18: mod_base = OTHER; note = 2'-O-methyluridine-3'-phosphate
  modified_base 19: mod_base = OTHER; note = 2'-O-methylguanosine-3'-phosphate
  modified_base 20: mod_base = OTHER; note = 2'-O-methyladenosine-3'-phosphate
  modified_base 21: mod_base = OTHER; note = 2'-O-methyladenosine-3'-phosphate
  modified_base 22: mod_base = OTHER; note = 2'-O-methylguanosine-3'-phosphate
  modified_base 23: mod_base = OTHER; note = 2'-O-methylguanosine
taccaacaatctccatatgaagg

SEQ ID NO: 4740 - RNA, 23 nt, synthetic construct
  source 1..23: mol_type = other RNA
  modified_base 1: mod_base = OTHER; note = 2'-O-methyluridine-3'-phosphate 5'-(E)-Vinylphosphonate
  modified_base 2: mod_base = OTHER; note = 2'-deoxy-2'-fluorouridine-3'-phosphate
  modified_base 3: mod_base = OTHER; note = 2'-O-methyladenosine-3'-phosphate
  modified_base 4: mod_base = OTHER; note = 2'-O-methylcytidine-3'-phosphate
  modified_base 5: mod_base = OTHER; note = 2'-O-methylcytidine-3'-phosphate
  modified_base 6: mod_base = OTHER; note = 2'-deoxy-2'-fluoroadenosine-3'-phosphate
  modified_base 7: mod_base = OTHER; note = 2'-O-methyladenosine-3'-phosphate
  modified_base 8: mod_base = OTHER; note = 2'-O-methylcytidine-3'-phosphate
  modified_base 9: mod_base = OTHER; note = 2'-O-methyladenosine-3'-phosphate
  modified_base 10: mod_base = OTHER; note = 2'-O-methyladenosine-3'-phosphate
  modified_base 11: mod_base = OTHER; note = 2'-O-methyluridine-3'-phosphate
  modified_base 12: mod_base = OTHER; note = 2'-O-methylcytidine-3'-phosphate
  modified_base 13: mod_base = OTHER; note = 2'-O-methyluridine-3'-phosphate
  modified_base 14: mod_base = OTHER; note = 2'-deoxy-2'-fluorocytidine-3'-phosphate
  modified_base 15: mod_base = OTHER; note = 2'-O-methylcytidine-3'-phosphate
  modified_base 16: mod_base = OTHER; note = 2'-deoxy-2'-fluoroadenosine-3'-phosphate
  modified_base 17: mod_base = OTHER; note = 2'-O-methyluridine-3'-phosphate
  modified_base 18: mod_base = OTHER; note = 2'-O-methyladenosine-3'-phosphate
  modified_base 19: mod_base = OTHER; note = 2'-O-methyluridine-3'-phosphate
  modified_base 20: mod_base = OTHER; note = 2'-O-methylguanosine-3'-phosphate
  modified_base 21: mod_base = OTHER; note = 2'-O-methyladenosine-3'-phosphate
  modified_base 22: mod_base = OTHER; note = 2'-O-methyladenosine-3'-phosphate
  modified_base 23: mod_base = OTHER; note = 2'-O-methylguanosine
ttaccaacaatctccatatgaag

SEQ ID NO: 4741 - RNA, 23 nt, synthetic construct
  source 1..23: mol_type = other RNA
  modified_base 1: mod_base = OTHER; note = 2'-O-methyluridine-3'-phosphate 5'-(E)-Vinylphosphonate
  modified_base 2: mod_base = OTHER; note = 2'-deoxy-2'-fluoroguanosine-3'-phosphate
  modified_base 3: mod_base = OTHER; note = 2'-O-methyluridine-3'-phosphate
  modified_base 4: mod_base = OTHER; note = 2'-O-methyladenosine-3'-phosphate
  modified_base 5: mod_base = OTHER; note = 2'-O-methylcytidine-3'-phosphate
  modified_base 6: mod_base = OTHER; note = 2'-deoxy-2'-fluorocytidine-3'-phosphate
  modified_base 7: mod_base = OTHER; note = 2'-O-methyladenosine-3'-phosphate
  modified_base 8: mod_base = OTHER; note = 2'-O-methyladenosine-3'-phosphate
  modified_base 9: mod_base = OTHER; note = 2'-O-methylcytidine-3'-phosphate
  modified_base 10: mod_base = OTHER; note = 2'-O-methyladenosine-3'-phosphate
  modified_base 11: mod_base = OTHER; note = 2'-O-methyladenosine-3'-phosphate
  modified_base 12: mod_base = OTHER; note = 2'-O-methyluridine-3'-phosphate
  modified_base 13: mod_base = OTHER; note = 2'-O-methylcytidine-3'-phosphate
  modified_base 14: mod_base = OTHER; note = 2'-deoxy-2'-fluorouridine-3'-phosphate
  modified_base 15: mod_base = OTHER; note = 2'-O-methylcytidine-3'-phosphate
  modified_base 16: mod_base = OTHER; note = 2'-deoxy-2'-fluorocytidine-3'-phosphate
  modified_base 17: mod_base = OTHER; note = 2'-O-methyladenosine-3'-phosphate
  modified_base 18: mod_base = OTHER; note = 2'-O-methyluridine-3'-phosphate
  modified_base 19: mod_base = OTHER; note = 2'-O-methyladenosine-3'-phosphate
  modified_base 20: mod_base = OTHER; note = 2'-O-methyluridine-3'-phosphate
  modified_base 21: mod_base = OTHER; note = 2'-O-methylguanosine-3'-phosphate
  modified_base 22: mod_base = OTHER; note = 2'-O-methyladenosine-3'-phosphate
  modified_base 23: mod_base = OTHER; note = 2'-O-methyladenosine
tgtaccaacaatctccatatgaa

SEQ ID NO: 4742 - RNA, 23 nt, synthetic construct
  source 1..23: mol_type = other RNA
  modified_base 1: mod_base = OTHER; note = 2'-O-methyluridine-3'-phosphate 5'-(E)-Vinylphosphonate
  modified_base 2: mod_base = OTHER; note = 2'-deoxy-2'-fluorouridine-3'-phosphate
  modified_base 3: mod_base = OTHER; note = 2'-O-methylguanosine-3'-phosphate
  modified_base 4: mod_base = OTHER; note = 2'-O-methyluridine-3'-phosphate
  modified_base 5: mod_base = OTHER; note = 2'-O-methyladenosine-3'-phosphate
  modified_base 6: mod_base = OTHER; note = 2'-deoxy-2'-fluorocytidine-3'-phosphate
  modified_base 7: mod_base = OTHER; note = 2'-O-methylcytidine-3'-phosphate
  modified_base 8: mod_base = OTHER; note = 2'-O-methyladenosine-3'-phosphate
  modified_base 9: mod_base = OTHER; note = 2'-O-methyladenosine-3'-phosphate
  modified_base 10: mod_base = OTHER; note = 2'-O-methylcytidine-3'-phosphate
  modified_base 11: mod_base = OTHER; note = 2'-O-methyladenosine-3'-phosphate
  modified_base 12: mod_base = OTHER; note = 2'-O-methyladenosine-3'-phosphate
  modified_base 13: mod_base = OTHER; note = 2'-O-methyluridine-3'-phosphate
  modified_base 14: mod_base = OTHER; note = 2'-deoxy-2'-fluorocytidine-3'-phosphate
  modified_base 15: mod_base = OTHER; note = 2'-O-methyluridine-3'-phosphate
  modified_base 16: mod_base = OTHER; note = 2'-deoxy-2'-fluorocytidine-3'-phosphate
  modified_base 17: mod_base = OTHER; note = 2'-O-methylcytidine-3'-phosphate
  modified_base 18: mod_base = OTHER; note = 2'-O-methyladenosine-3'-phosphate
  modified_base 19: mod_base = OTHER; note = 2'-O-methyluridine-3'-phosphate
  modified_base 20: mod_base = OTHER; note = 2'-O-methyladenosine-3'-phosphate
  modified_base 21: mod_base = OTHER; note = 2'-O-methyluridine-3'-phosphate
  modified_base 22: mod_base = OTHER; note = 2'-O-methylguanosine-3'-phosphate
  modified_base 23: mod_base = OTHER; note = 2'-O-methyladenosine
ttgtaccaacaatctccatatga

SEQ ID NO: 4743 - RNA, 23 nt, synthetic construct
  source 1..23: mol_type = other RNA
  modified_base 1: mod_base = OTHER; note = 2'-O-methyluridine-3'-phosphate 5'-(E)-Vinylphosphonate
  modified_base 2: mod_base = OTHER; note = 2'-deoxy-2'-fluoroguanosine-3'-phosphate
  modified_base 3: mod_base = OTHER; note = 2'-O-methyluridine-3'-phosphate
  modified_base 4: mod_base = OTHER; note = 2'-O-methylguanosine-3'-phosphate
  modified_base 5: mod_base = OTHER; note = 2'-O-methyluridine-3'-phosphate
  modified_base 6: mod_base = OTHER; note = 2'-deoxy-2'-fluoroadenosine-3'-phosphate
  modified_base 7: mod_base = OTHER; note = 2'-O-methylcytidine-3'-phosphate
  modified_base 8: mod_base = OTHER; note = 2'-O-methylcytidine-3'-phosphate
  modified_base 9: mod_base = OTHER; note = 2'-O-methyladenosine-3'-phosphate
  modified_base 10: mod_base = OTHER; note = 2'-O-methyladenosine-3'-phosphate
  modified_base 11: mod_base = OTHER; note = 2'-O-methylcytidine-3'-phosphate
  modified_base 12: mod_base = OTHER; note = 2'-O-methyladenosine-3'-phosphate
  modified_base 13: mod_base = OTHER; note = 2'-O-methyladenosine-3'-phosphate
  modified_base 14: mod_base = OTHER; note = 2'-deoxy-2'-fluorouridine-3'-phosphate
  modified_base 15: mod_base = OTHER; note = 2'-O-methylcytidine-3'-phosphate
  modified_base 16: mod_base = OTHER; note = 2'-deoxy-2'-fluorouridine-3'-phosphate
  modified_base 17: mod_base = OTHER; note = 2'-O-methylcytidine-3'-phosphate
  modified_base 18: mod_base = OTHER; note = 2'-O-methylcytidine-3'-phosphate
  modified_base 19: mod_base = OTHER; note = 2'-O-methyladenosine-3'-phosphate
  modified_base 20: mod_base = OTHER; note = 2'-O-methyluridine-3'-phosphate
  modified_base 21: mod_base = OTHER; note = 2'-O-methyladenosine-3'-phosphate
  modified_base 22: mod_base = OTHER; note = 2'-O-methyluridine-3'-phosphate
  modified_base 23: mod_base = OTHER; note = 2'-O-methylguanosine
tgtgtaccaacaatctccatatg

SEQ ID NO: 4744 - RNA, 23 nt, synthetic construct
  source 1..23: mol_type = other RNA
  modified_base 1: mod_base = OTHER; note = 2'-O-methyluridine-3'-phosphate 5'-(E)-Vinylphosphonate
  modified_base 2: mod_base = OTHER; note = 2'-deoxy-2'-fluorouridine-3'-phosphate
  modified_base 3: mod_base = OTHER; note = 2'-O-methylguanosine-3'-phosphate
  modified_base 4: mod_base = OTHER; note = 2'-O-methyluridine-3'-phosphate
  modified_base 5: mod_base = OTHER; note = 2'-O-methylguanosine-3'-phosphate
  modified_base 6: mod_base = OTHER; note = 2'-deoxy-2'-fluorouridine-3'-phosphate
  modified_base 7: mod_base = OTHER; note = 2'-O-methyladenosine-3'-phosphate
  modified_base 8: mod_base = OTHER; note = 2'-O-methylcytidine-3'-phosphate
  modified_base 9: mod_base = OTHER; note = 2'-O-methylcytidine-3'-phosphate
  modified_base 10: mod_base = OTHER; note = 2'-O-methyladenosine-3'-phosphate
  modified_base 11: mod_base = OTHER; note = 2'-O-methyladenosine-3'-phosphate
  modified_base 12: mod_base = OTHER; note = 2'-O-methylcytidine-3'-phosphate
  modified_base 13: mod_base = OTHER; note = 2'-O-methyladenosine-3'-phosphate
  modified_base 14: mod_base = OTHER; note = 2'-deoxy-2'-fluoroadenosine-3'-phosphate
  modified_base 15: mod_base = OTHER; note = 2'-O-methyluridine-3'-phosphate
  modified_base 16: mod_base = OTHER; note = 2'-deoxy-2'-fluorocytidine-3'-phosphate
  modified_base 17: mod_base = OTHER; note = 2'-O-methyluridine-3'-phosphate
  modified_base 18: mod_base = OTHER; note = 2'-O-methylcytidine-3'-phosphate
  modified_base 19: mod_base = OTHER; note = 2'-O-methylcytidine-3'-phosphate
  modified_base 20: mod_base = OTHER; note = 2'-O-methyladenosine-3'-phosphate
  modified_base 21: mod_base = OTHER; note = 2'-O-methyluridine-3'-phosphate
  modified_base 22: mod_base = OTHER; note = 2'-O-methyladenosine-3'-phosphate
  modified_base 23: mod_base = OTHER; note = 2'-O-methyluridine
ttgtgtaccaacaatctccatat

SEQ ID NO: 4745 - RNA, 23 nt, synthetic construct
  source 1..23: mol_type = other RNA
  modified_base 1: mod_base = OTHER; note = 2'-O-methyluridine-3'-phosphate 5'-(E)-Vinylphosphonate
  modified_base 2: mod_base = OTHER; note = 2'-deoxy-2'-fluorouridine-3'-phosphate
  modified_base 3: mod_base = OTHER; note = 2'-O-methyluridine-3'-phosphate
  modified_base 4: mod_base = OTHER; note = 2'-O-methylguanosine-3'-phosphate
  modified_base 5: mod_base = OTHER; note = 2'-O-methyluridine-3'-phosphate
  modified_base 6: mod_base = OTHER; note = 2'-deoxy-2'-fluoroguanosine-3'-phosphate
  modified_base 7: mod_base = OTHER; note = 2'-O-methyluridine-3'-phosphate
  modified_base 8: mod_base = OTHER; note = 2'-O-methyladenosine-3'-phosphate
  modified_base 9: mod_base = OTHER; note = 2'-O-methylcytidine-3'-phosphate
  modified_base 10: mod_base = OTHER; note = 2'-O-methylcytidine-3'-phosphate
  modified_base 11: mod_base = OTHER; note = 2'-O-methyladenosine-3'-phosphate
  modified_base 12: mod_base = OTHER; note = 2'-O-methyladenosine-3'-phosphate
  modified_base 13: mod_base = OTHER; note = 2'-O-methylcytidine-3'-phosphate
  modified_base 14: mod_base = OTHER; note = 2'-deoxy-2'-fluoroadenosine-3'-phosphate
  modified_base 15: mod_base = OTHER; note = 2'-O-methyladenosine-3'-phosphate
  modified_base 16: mod_base = OTHER; note = 2'-deoxy-2'-fluorouridine-3'-phosphate
  modified_base 17: mod_base = OTHER; note = 2'-O-methylcytidine-3'-phosphate
  modified_base 18: mod_base = OTHER; note = 2'-O-methyluridine-3'-phosphate
  modified_base 19: mod_base = OTHER; note = 2'-O-methylcytidine-3'-phosphate
  modified_base 20: mod_base = OTHER; note = 2'-O-methylcytidine-3'-phosphate
  modified_base 21: mod_base = OTHER; note = 2'-O-methyladenosine-3'-phosphate
  modified_base 22: mod_base = OTHER; note = 2'-O-methyluridine-3'-phosphate
  modified_base 23: mod_base = OTHER; note = 2'-O-methyladenosine
tttgtgtaccaacaatctccata

SEQ ID NO: 4746 - RNA, 23 nt, synthetic construct
  source 1..23: mol_type = other RNA
  modified_base 1: mod_base = OTHER; note = 2'-O-methyluridine-3'-phosphate 5'-(E)-Vinylphosphonate
  modified_base 2: mod_base = OTHER; note = 2'-deoxy-2'-fluorocytidine-3'-phosphate
  modified_base 3: mod_base = OTHER; note = 2'-O-methyluridine-3'-phosphate
  modified_base 4: mod_base = OTHER; note = 2'-O-methyluridine-3'-phosphate
  modified_base 5: mod_base = OTHER; note = 2'-O-methylguanosine-3'-phosphate
  modified_base 6: mod_base = OTHER; note = 2'-deoxy-2'-fluorouridine-3'-phosphate
  modified_base 7: mod_base = OTHER; note = 2'-O-methylguanosine-3'-phosphate
  modified_base 8: mod_base = OTHER; note = 2'-O-methyluridine-3'-phosphate
  modified_base 9: mod_base = OTHER; note = 2'-O-methyladenosine-3'-phosphate
  modified_base 10: mod_base = OTHER; note = 2'-O-methylcytidine-3'-phosphate
  modified_base 11: mod_base = OTHER; note = 2'-O-methylcytidine-3'-phosphate
  modified_base 12: mod_base = OTHER; note = 2'-O-methyladenosine-3'-phosphate
  modified_base 13: mod_base = OTHER; note = 2'-O-methyladenosine-3'-phosphate
  modified_base 14: mod_base = OTHER; note = 2'-deoxy-2'-fluorocytidine-3'-phosphate
  modified_base 15: mod_base = OTHER; note = 2'-O-methyladenosine-3'-phosphate
  modified_base 16: mod_base = OTHER; note = 2'-deoxy-2'-fluoroadenosine-3'-phosphate
  modified_base 17: mod_base = OTHER; note = 2'-O-methyluridine-3'-phosphate
  modified_base 18: mod_base = OTHER; note = 2'-O-methylcytidine-3'-phosphate
  modified_base 19: mod_base = OTHER; note = 2'-O-methyluridine-3'-phosphate
  modified_base 20: mod_base = OTHER; note = 2'-O-methylcytidine-3'-phosphate
  modified_base 21: mod_base = OTHER; note = 2'-O-methylcytidine-3'-phosphate
  modified_base 22: mod_base = OTHER; note = 2'-O-methyladenosine-3'-phosphate
  modified_base 23: mod_base = OTHER; note = 2'-O-methyluridine
tcttgtgtaccaacaatctccat

SEQ ID NO: 4747 - RNA, 23 nt, synthetic construct
  source 1..23: mol_type = other RNA
  modified_base 1: mod_base = OTHER; note = 2'-O-methyluridine-3'-phosphate 5'-(E)-Vinylphosphonate
  modified_base 2: mod_base = OTHER; note = 2'-deoxy-2'-fluorocytidine-3'-phosphate
  modified_base 3: mod_base = OTHER; note = 2'-O-methylcytidine-3'-phosphate
  modified_base 4: mod_base = OTHER; note = 2'-O-methyluridine-3'-phosphate
  modified_base 5: mod_base = OTHER; note = 2'-O-methyluridine-3'-phosphate
  modified_base 6: mod_base = OTHER; note = 2'-deoxy-2'-fluoroguanosine-3'-phosphate
  modified_base 7: mod_base = OTHER; note = 2'-O-methyluridine-3'-phosphate
  modified_base 8: mod_base = OTHER; note = 2'-O-methylguanosine-3'-phosphate
  modified_base 9: mod_base = OTHER; note = 2'-O-methyluridine-3'-phosphate
  modified_base 10: mod_base = OTHER; note = 2'-O-methyladenosine-3'-phosphate
  modified_base 11: mod_base = OTHER; note = 2'-O-methylcytidine-3'-phosphate
  modified_base 12: mod_base = OTHER; note = 2'-O-methylcytidine-3'-phosphate
  modified_base 13: mod_base = OTHER; note = 2'-O-methyladenosine-3'-phosphate
  modified_base 14: mod_base = OTHER; note = 2'-deoxy-2'-fluoroadenosine-3'-phosphate
  modified_base 15: mod_base = OTHER; note = 2'-O-methylcytidine-3'-phosphate
  modified_base 16: mod_base = OTHER; note = 2'-deoxy-2'-fluoroadenosine-3'-phosphate
  modified_base 17: mod_base = OTHER; note = 2'-O-methyladenosine-3'-phosphate
  modified_base 18: mod_base = OTHER; note = 2'-O-methyluridine-3'-phosphate
  modified_base 19: mod_base = OTHER; note = 2'-O-methylcytidine-3'-phosphate
  modified_base 20: mod_base = OTHER; note = 2'-O-methyluridine-3'-phosphate
  modified_base 21: mod_base = OTHER; note = 2'-O-methylcytidine-3'-phosphate
  modified_base 22: mod_base = OTHER; note = 2'-O-methylcytidine-3'-phosphate
  modified_base 23: mod_base = OTHER; note = 2'-O-methyladenosine
tccttgtgtaccaacaatctcca

SEQ ID NO: 4748 - RNA, 23 nt, synthetic construct
  source 1..23: mol_type = other RNA
  modified_base 1: mod_base = OTHER; note = 2'-O-methyluridine-3'-phosphate 5'-(E)-Vinylphosphonate
  modified_base 2: mod_base = OTHER; note = 2'-deoxy-2'-fluorouridine-3'-phosphate
  modified_base 3: mod_base = OTHER; note = 2'-O-methyluridine-3'-phosphate
  modified_base 4: mod_base = OTHER; note = 2'-O-methyladenosine-3'-phosphate
  modified_base 5: mod_base = OTHER; note = 2'-O-methylcytidine-3'-phosphate
  modified_base 6: mod_base = OTHER; note = 2'-deoxy-2'-fluorocytidine-3'-phosphate
  modified_base 7: mod_base = OTHER; note = 2'-O-methyluridine-3'-phosphate
  modified_base 8: mod_base = OTHER; note = 2'-O-methyluridine-3'-phosphate
  modified_base 9: mod_base = OTHER; note = 2'-O-methylguanosine-3'-phosphate
  modified_base 10: mod_base = OTHER; note = 2'-O-methyluridine-3'-phosphate
  modified_base 11: mod_base = OTHER; note = 2'-O-methylguanosine-3'-phosphate
  modified_base 12: mod_base = OTHER; note = 2'-O-methyluridine-3'-phosphate
  modified_base 13: mod_base = OTHER; note = 2'-O-methyladenosine-3'-phosphate
  modified_base 14: mod_base = OTHER; note = 2'-deoxy-2'-fluorocytidine-3'-phosphate
  modified_base 15: mod_base = OTHER; note = 2'-O-methylcytidine-3'-phosphate
  modified_base 16: mod_base = OTHER; note = 2'-deoxy-2'-fluoroadenosine-3'-phosphate
  modified_base 17: mod_base = OTHER; note = 2'-O-methyladenosine-3'-phosphate
  modified_base 18: mod_base = OTHER; note = 2'-O-methylcytidine-3'-phosphate
  modified_base 19: mod_base = OTHER; note = 2'-O-methyladenosine-3'-phosphate
  modified_base 20: mod_base = OTHER; note = 2'-O-methyladenosine-3'-phosphate
  modified_base 21: mod_base = OTHER; note = 2'-O-methyluridine-3'-phosphate
  modified_base 22: mod_base = OTHER; note = 2'-O-methylcytidine-3'-phosphate
  modified_base 23: mod_base = OTHER; note = 2'-O-methyluridine
tttaccttgtgtaccaacaatct

SEQ ID NO: 4749 - RNA, 23 nt, synthetic construct
  source 1..23: mol_type = other RNA
  modified_base 1: mod_base = OTHER; note = 2'-O-methyluridine-3'-phosphate 5'-(E)-Vinylphosphonate
  modified_base 2: mod_base = OTHER; note = 2'-deoxy-2'-fluoroadenosine-3'-phosphate
  modified_base 3: mod_base = OTHER; note = 2'-O-methylguanosine-3'-phosphate
  modified_base 4: mod_base = OTHER; note = 2'-O-methylguanosine-3'-phosphate
  modified_base 5: mod_base = OTHER; note = 2'-O-methyluridine-3'-phosphate
  modified_base 6: mod_base = OTHER; note = 2'-deoxy-2'-fluorouridine-3'-phosphate
  modified_base 7: mod_base = OTHER; note = 2'-O-methyluridine-3'-phosphate
  modified_base 8: mod_base = OTHER; note = 2'-O-methyladenosine-3'-phosphate
  modified_base 9: mod_base = OTHER; note = 2'-O-methylcytidine-3'-phosphate
  modified_base 10: mod_base = OTHER; note = 2'-O-methylcytidine-3'-phosphate
  modified_base 11: mod_base = OTHER; note = 2'-O-methyluridine-3'-phosphate
  modified_base 12: mod_base = OTHER; note = 2'-O-methyluridine-3'-phosphate
  modified_base 13: mod_base = OTHER; note = 2'-O-methylguanosine-3'-phosphate
  modified_base 14: mod_base = OTHER; note = 2'-deoxy-2'-fluorouridine-3'-phosphate
  modified_base 15: mod_base = OTHER; note = 2'-O-methylguanosine-3'-phosphate
  modified_base 16: mod_base = OTHER; note = 2'-deoxy-2'-fluorouridine-3'-phosphate
  modified_base 17: mod_base = OTHER; note = 2'-O-methyladenosine-3'-phosphate
  modified_base 18: mod_base = OTHER; note = 2'-O-methylcytidine-3'-phosphate
  modified_base 19: mod_base = OTHER; note = 2'-O-methylcytidine-3'-phosphate
  modified_base 20: mod_base = OTHER; note = 2'-O-methyladenosine-3'-phosphate
  modified_base 21: mod_base = OTHER; note = 2'-O-methyladenosine-3'-phosphate
  modified_base 22: mod_base = OTHER; note = 2'-O-methylcytidine-3'-phosphate
  modified_base 23: mod_base = OTHER; note = 2'-O-methyladenosine
taggtttaccttgtgtaccaaca

SEQ ID NO: 4750 - RNA, 23 nt, synthetic construct
  source 1..23: mol_type = other RNA
  modified_base 1: mod_base = OTHER; note = 2'-O-methyluridine-3'-phosphate 5'-(E)-Vinylphosphonate
  modified_base 2: mod_base = OTHER; note = 2'-deoxy-2'-fluoroadenosine-3'-phosphate
  modified_base 3: mod_base = OTHER; note = 2'-O-methylguanosine-3'-phosphate
  modified_base 4: mod_base = OTHER; note = 2'-O-methylcytidine-3'-phosphate
  modified_base 5: mod_base = OTHER; note = 2'-O-methyladenosine-3'-phosphate
  modified_base 6: mod_base = OTHER; note = 2'-deoxy-2'-fluoroguanosine-3'-phosphate
  modified_base 7: mod_base = OTHER; note = 2'-O-methylguanosine-3'-phosphate
  modified_base 8: mod_base = OTHER; note = 2'-O-methyluridine-3'-phosphate
  modified_base 9: mod_base = OTHER; note = 2'-O-methyluridine-3'-phosphate
  modified_base 10: mod_base = OTHER; note = 2'-O-methyluridine-3'-phosphate
  modified_base 11: mod_base = OTHER; note = 2'-O-methyladenosine-3'-phosphate
  modified_base 12: mod_base = OTHER; note = 2'-O-methylcytidine-3'-phosphate
  modified_base 13: mod_base = OTHER; note = 2'-O-methylcytidine-3'-phosphate
  modified_base 14: mod_base = OTHER; note = 2'-deoxy-2'-fluorouridine-3'-phosphate
  modified_base 15: mod_base = OTHER; note = 2'-O-methyluridine-3'-phosphate
  modified_base 16: mod_base = OTHER; note = 2'-deoxy-2'-fluoroguanosine-3'-phosphate
  modified_base 17: mod_base = OTHER; note = 2'-O-methyluridine-3'-phosphate
  modified_base 18: mod_base = OTHER; note = 2'-O-methylguanosine-3'-phosphate
  modified_base 19: mod_base = OTHER; note = 2'-O-methyluridine-3'-phosphate
  modified_base 20: mod_base = OTHER; note = 2'-O-methyladenosine-3'-phosphate
  modified_base 21: mod_base = OTHER; note = 2'-O-methylcytidine-3'-phosphate
  modified_base 22: mod_base = OTHER; note = 2'-O-methylcytidine-3'-phosphate
  modified_base 23: mod_base = OTHER; note = 2'-O-methyladenosine
tagcaggtttaccttgtgtacca

SEQ ID NO: 4751 - RNA, 23 nt, synthetic construct
  source 1..23: mol_type = other RNA
  modified_base 1: mod_base = OTHER; note = 2'-O-methyluridine-3'-phosphate 5'-(E)-Vinylphosphonate
  modified_base 2: mod_base = OTHER; note = 2'-deoxy-2'-fluorouridine-3'-phosphate
  modified_base 3: mod_base = OTHER; note = 2'-O-methyladenosine-3'-phosphate
  modified_base 4: mod_base = OTHER; note = 2'-O-methylguanosine-3'-phosphate
  modified_base 5: mod_base = OTHER; note = 2'-O-methylcytidine-3'-phosphate
  modified_base 6: mod_base = OTHER; note = 2'-deoxy-2'-fluoroadenosine-3'-phosphate
  modified_base 7: mod_base = OTHER; note = 2'-O-methylguanosine-3'-phosphate
  modified_base 8: mod_base = OTHER; note = 2'-O-methylguanosine-3'-phosphate
  modified_base 9: mod_base = OTHER; note = 2'-O-methyluridine-3'-phosphate
  modified_base 10: mod_base = OTHER; note = 2'-O-methyluridine-3'-phosphate
  modified_base 11: mod_base = OTHER; note = 2'-O-methyluridine-3'-phosphate
  modified_base 12: mod_base = OTHER; note = 2'-O-methyladenosine-3'-phosphate
  modified_base 13: mod_base = OTHER; note = 2'-O-methylcytidine-3'-phosphate
  modified_base 14: mod_base = OTHER; note = 2'-deoxy-2'-fluorocytidine-3'-phosphate
  modified_base 15: mod_base = OTHER; note = 2'-O-methyluridine-3'-phosphate
  modified_base 16: mod_base = OTHER; note = 2'-deoxy-2'-fluorouridine-3'-phosphate
  modified_base 17: mod_base = OTHER; note = 2'-O-methylguanosine-3'-phosphate
  modified_base 18: mod_base = OTHER; note = 2'-O-methyluridine-3'-phosphate
  modified_base 19: mod_base = OTHER; note = 2'-O-methylguanosine-3'-phosphate
  modified_base 20: mod_base = OTHER; note = 2'-O-methyluridine-3'-phosphate
  modified_base 21: mod_base = OTHER; note = 2'-O-methyladenosine-3'-phosphate
  modified_base 22: mod_base = OTHER; note = 2'-O-methylcytidine-3'-phosphate
  modified_base 23: mod_base = OTHER; note = 2'-O-methylcytidine
ttagcaggtttaccttgtgtacc

SEQ ID NO: 4752 - RNA, 23 nt, synthetic construct
  source 1..23: mol_type = other RNA
  modified_base 1: mod_base = OTHER; note = 2'-O-methyluridine-3'-phosphate 5'-(E)-Vinylphosphonate
  modified_base 2: mod_base = OTHER; note = 2'-deoxy-2'-fluoroadenosine-3'-phosphate
  modified_base 3: mod_base = OTHER; note = 2'-O-methyluridine-3'-phosphate
  modified_base 4: mod_base = OTHER; note = 2'-O-methyladenosine-3'-phosphate
  modified_base 5: mod_base = OTHER; note = 2'-O-methylguanosine-3'-phosphate
  modified_base 6: mod_base = OTHER; note = 2'-deoxy-2'-fluorocytidine-3'-phosphate
  modified_base 7: mod_base = OTHER; note = 2'-O-methyladenosine-3'-phosphate
  modified_base 8: mod_base = OTHER; note = 2'-O-methylguanosine-3'-phosphate
  modified_base 9: mod_base = OTHER; note = 2'-O-methylguanosine-3'-phosphate
  modified_base 10: mod_base = OTHER; note = 2'-O-methyluridine-3'-phosphate
  modified_base 11: mod_base = OTHER; note = 2'-O-methyluridine-3'-phosphate
  modified_base 12: mod_base = OTHER; note = 2'-O-methyluridine-3'-phosphate
  modified_base 13: mod_base = OTHER; note = 2'-O-methyladenosine-3'-phosphate
  modified_base 14: mod_base = OTHER; note = 2'-deoxy-2'-fluorocytidine-3'-phosphate
  modified_base 15: mod_base = OTHER; note = 2'-O-methylcytidine-3'-phosphate
  modified_base 16: mod_base = OTHER; note = 2'-deoxy-2'-fluorouridine-3'-phosphate
  modified_base 17: mod_base = OTHER; note = 2'-O-methyluridine-3'-phosphate
  modified_base 18: mod_base = OTHER; note = 2'-O-methylguanosine-3'-phosphate
  modified_base 19: mod_base = OTHER; note = 2'-O-methyluridine-3'-phosphate
  modified_base 20: mod_base = OTHER; note = 2'-O-methylguanosine-3'-phosphate
  modified_base 21: mod_base = OTHER; note = 2'-O-methyluridine-3'-phosphate
  modified_base 22: mod_base = OTHER; note = 2'-O-methyladenosine-3'-phosphate
  modified_base 23: mod_base = OTHER; note = 2'-O-methylcytidine
tatagcaggtttaccttgtgtac

SEQ ID NO: 4753 - RNA, 23 nt, synthetic construct
  source 1..23: mol_type = other RNA
  modified_base 1: mod_base = OTHER; note = 2'-O-methyluridine-3'-phosphate 5'-(E)-Vinylphosphonate
  modified_base 2: mod_base = OTHER; note = 2'-deoxy-2'-fluoroadenosine-3'-phosphate
  modified_base 3: mod_base = OTHER; note = 2'-O-methyladenosine-3'-phosphate
  modified_base 4: mod_base = OTHER; note = 2'-O-methyluridine-3'-phosphate
  modified_base 5: mod_base = OTHER; note = 2'-O-methyladenosine-3'-phosphate
  modified_base 6: mod_base = OTHER; note = 2'-deoxy-2'-fluoroguanosine-3'-phosphate
  modified_base 7: mod_base = OTHER; note = 2'-O-methylcytidine-3'-phosphate
  modified_base 8: mod_base = OTHER; note = 2'-O-methyladenosine-3'-phosphate
  modified_base 9: mod_base = OTHER; note = 2'-O-methylguanosine-3'-phosphate
  modified_base 10: mod_base = OTHER; note = 2'-O-methylguanosine-3'-phosphate
  modified_base 11: mod_base = OTHER; note = 2'-O-methyluridine-3'-phosphate
  modified_base 12: mod_base = OTHER; note = 2'-O-methyluridine-3'-phosphate
  modified_base 13: mod_base = OTHER; note = 2'-O-methyluridine-3'-phosphate
  modified_base 14: mod_base = OTHER; note = 2'-deoxy-2'-fluoroadenosine-3'-phosphate
  modified_base 15: mod_base = OTHER; note = 2'-O-methylcytidine-3'-phosphate
  modified_base 16: mod_base = OTHER; note = 2'-deoxy-2'-fluorocytidine-3'-phosphate
  modified_base 17: mod_base = OTHER; note = 2'-O-methyluridine-3'-phosphate
  modified_base 18: mod_base = OTHER; note = 2'-O-methyluridine-3'-phosphate
  modified_base 19: mod_base = OTHER; note = 2'-O-methylguanosine-3'-phosphate
  modified_base 20: mod_base = OTHER; note = 2'-O-methyluridine-3'-phosphate
  modified_base 21: mod_base = OTHER; note = 2'-O-methylguanosine-3'-phosphate
  modified_base 22: mod_base = OTHER; note = 2'-O-methyluridine-3'-phosphate
  modified_base 23: mod_base = OTHER; note = 2'-O-methyladenosine
taatagcaggtttaccttgtgta

SEQ ID NO: 4754 - RNA, 23 nt, synthetic construct
  source 1..23: mol_type = other RNA
  modified_base 1: mod_base = OTHER; note = 2'-O-methyluridine-3'-phosphate 5'-(E)-Vinylphosphonate
  modified_base 2: mod_base = OTHER; note = 2'-deoxy-2'-fluorocytidine-3'-phosphate
  modified_base 3: mod_base = OTHER; note = 2'-O-methyladenosine-3'-phosphate
  modified_base 4: mod_base = OTHER; note = 2'-O-methyladenosine-3'-phosphate
  modified_base 5: mod_base = OTHER; note = 2'-O-methyluridine-3'-phosphate
  modified_base 6: mod_base = OTHER; note = 2'-deoxy-2'-fluoroadenosine-3'-phosphate
  modified_base 7: mod_base = OTHER; note = 2'-O-methylguanosine-3'-phosphate
  modified_base 8: mod_base = OTHER; note = 2'-O-methylcytidine-3'-phosphate
  modified_base 9: mod_base = OTHER; note = 2'-O-methyladenosine-3'-phosphate
  modified_base 10: mod_base = OTHER; note = 2'-O-methylguanosine-3'-phosphate
  modified_base 11: mod_base = OTHER; note = 2'-O-methylguanosine-3'-phosphate
  modified_base 12: mod_base = OTHER; note = 2'-O-methyluridine-3'-phosphate
  modified_base 13: mod_base = OTHER; note = 2'-O-methyluridine-3'-phosphate
  modified_base 14: mod_base = OTHER; note = 2'-deoxy-2'-fluorouridine-3'-phosphate
  modified_base 15: mod_base = OTHER; note = 2'-O-methyladenosine-3'-phosphate
  modified_base 16: mod_base = OTHER; note = 2'-deoxy-2'-fluorocytidine-3'-phosphate
  modified_base 17: mod_base = OTHER; note = 2'-O-methylcytidine-3'-phosphate
  modified_base 18: mod_base = OTHER; note = 2'-O-methyluridine-3'-phosphate
  modified_base 19: mod_base = OTHER; note = 2'-O-methyluridine-3'-phosphate
  modified_base 20: mod_base = OTHER; note = 2'-O-methylguanosine-3'-phosphate
  modified_base 21: mod_base = OTHER; note = 2'-O-methyluridine-3'-phosphate
  modified_base 22: mod_base = OTHER; note = 2'-O-methylguanosine-3'-phosphate
  modified_base 23: mod_base = OTHER; note = 2'-O-methyluridine
tcaatagcaggtttaccttgtgt

SEQ ID NO: 4755 - RNA, 23 nt, synthetic construct
  source 1..23: mol_type = other RNA
  modified_base 1: mod_base = OTHER; note = 2'-O-methyluridine-3'-phosphate 5'-(E)-Vinylphosphonate
  modified_base 2: mod_base = OTHER; note = 2'-deoxy-2'-fluoroguanosine-3'-phosphate
  modified_base 3: mod_base = OTHER; note = 2'-O-methylcytidine-3'-phosphate
  modified_base 4: mod_base = OTHER; note = 2'-O-methyladenosine-3'-phosphate
  modified_base 5: mod_base = OTHER; note = 2'-O-methyladenosine-3'-phosphate
  modified_base 6: mod_base = OTHER; note = 2'-deoxy-2'-fluorouridine-3'-phosphate
  modified_base 7: mod_base = OTHER; note = 2'-O-methyladenosine-3'-phosphate
  modified_base 8: mod_base = OTHER; note = 2'-O-methylguanosine-3'-phosphate
  modified_base 9: mod_base = OTHER; note = 2'-O-methylcytidine-3'-phosphate
  modified_base 10: mod_base = OTHER; note = 2'-O-methyladenosine-3'-phosphate
  modified_base 11: mod_base = OTHER; note = 2'-O-methylguanosine-3'-phosphate
  modified_base 12: mod_base = OTHER; note = 2'-O-methylguanosine-3'-phosphate
  modified_base 13: mod_base = OTHER; note = 2'-O-methyluridine-3'-phosphate
  modified_base 14: mod_base = OTHER; note = 2'-deoxy-2'-fluorouridine-3'-phosphate
  modified_base 15: mod_base = OTHER; note = 2'-O-methyluridine-3'-phosphate
  modified_base 16: mod_base = OTHER; note = 2'-deoxy-2'-fluoroadenosine-3'-phosphate
  modified_base 17: mod_base = OTHER; note = 2'-O-methylcytidine-3'-phosphate
  modified_base 18: mod_base = OTHER; note = 2'-O-methylcytidine-3'-phosphate
  modified_base 19: mod_base = OTHER; note = 2'-O-methyluridine-3'-phosphate
  modified_base 20: mod_base = OTHER; note = 2'-O-methyluridine-3'-phosphate
  modified_base 21: mod_base = OTHER; note = 2'-O-methylguanosine-3'-phosphate
  modified_base 22: mod_base = OTHER; note = 2'-O-methyluridine-3'-phosphate
  modified_base 23: mod_base = OTHER; note = 2'-O-methylguanosine
tgcaatagcaggtttaccttgtg

SEQ ID NO: 4756 - RNA, 23 nt, synthetic construct
  source 1..23: mol_type = other RNA
  modified_base 1: mod_base = OTHER; note = 2'-O-methyluridine-3'-phosphate 5'-(E)-Vinylphosphonate
  modified_base 2: mod_base = OTHER; note = 2'-deoxy-2'-fluoroadenosine-3'-phosphate
  modified_base 3: mod_base = OTHER; note = 2'-O-methylguanosine-3'-phosphate
  modified_base 4: mod_base = OTHER; note = 2'-O-methylcytidine-3'-phosphate
  modified_base 5: mod_base = OTHER; note = 2'-O-methyladenosine-3'-phosphate
  modified_base 6: mod_base = OTHER; note = 2'-deoxy-2'-fluoroadenosine-3'-phosphate
  modified_base 7: mod_base = OTHER; note = 2'-O-methyluridine-3'-phosphate
  modified_base 8: mod_base = OTHER; note = 2'-O-methyladenosine-3'-phosphate
  modified_base 9: mod_base = OTHER; note = 2'-O-methylguanosine-3'-phosphate
  modified_base 10: mod_base = OTHER; note = 2'-O-methylcytidine-3'-phosphate
  modified_base 11: mod_base = OTHER; note = 2'-O-methyladenosine-3'-phosphate
  modified_base 12: mod_base = OTHER; note = 2'-O-methylguanosine-3'-phosphate
  modified_base 13: mod_base = OTHER; note = 2'-O-methylguanosine-3'-phosphate
  modified_base 14: mod_base = OTHER; note = 2'-deoxy-2'-fluorouridine-3'-phosphate
  modified_base 15: mod_base = OTHER; note = 2'-O-methyluridine-3'-phosphate
  modified_base 16: mod_base = OTHER; note = 2'-deoxy-2'-fluorouridine-3'-phosphate
  modified_base 17: mod_base = OTHER; note = 2'-O-methyladenosine-3'-phosphate
  modified_base 18: mod_base = OTHER; note = 2'-O-methylcytidine-3'-phosphate
  modified_base 19: mod_base = OTHER; note = 2'-O-methylcytidine-3'-phosphate
  modified_base 20: mod_base = OTHER; note = 2'-O-methyluridine-3'-phosphate
  modified_base 21: mod_base = OTHER; note = 2'-O-methyluridine-3'-phosphate
  modified_base 22: mod_base = OTHER; note = 2'-O-methylguanosine-3'-phosphate
  modified_base 23: mod_base = OTHER; note = 2'-O-methyluridine
tagcaatagcaggtttaccttgt

SEQ ID NO: 4757 - RNA, 23 nt, synthetic construct
  source 1..23: mol_type = other RNA
  modified_base 1: mod_base = OTHER; note = 2'-O-methyluridine-3'-phosphate 5'-(E)-Vinylphosphonate
  modified_base 2: mod_base = OTHER; note = 2'-deoxy-2'-fluoroguanosine-3'-phosphate
  modified_base 3: mod_base = OTHER; note = 2'-O-methyladenosine-3'-phosphate
  modified_base 4: mod_base = OTHER; note = 2'-O-methylguanosine-3'-phosphate
  modified_base 5: mod_base = OTHER; note = 2'-O-methylcytidine-3'-phosphate
  modified_base 6: mod_base = OTHER; note = 2'-deoxy-2'-fluoroadenosine-3'-phosphate
  modified_base 7: mod_base = OTHER; note = 2'-O-methyladenosine-3'-phosphate
  modified_base 8: mod_base = OTHER; note = 2'-O-methyluridine-3'-phosphate
  modified_base 9: mod_base = OTHER; note = 2'-O-methyladenosine-3'-phosphate
  modified_base 10: mod_base = OTHER; note = 2'-O-methylguanosine-3'-phosphate
  modified_base 11: mod_base = OTHER; note = 2'-O-methylcytidine-3'-phosphate
  modified_base 12: mod_base = OTHER; note = 2'-O-methyladenosine-3'-phosphate
  modified_base 13: mod_base = OTHER; note = 2'-O-methylguanosine-3'-phosphate
  modified_base 14: mod_base = OTHER; note = 2'-deoxy-2'-fluoroguanosine-3'-phosphate
  modified_base 15: mod_base = OTHER; note = 2'-O-methyluridine-3'-phosphate
  modified_base 16: mod_base = OTHER; note = 2'-deoxy-2'-fluorouridine-3'-phosphate
  modified_base 17: mod_base = OTHER; note = 2'-O-methyluridine-3'-phosphate
  modified_base 18: mod_base = OTHER; note = 2'-O-methyladenosine-3'-phosphate
  modified_base 19: mod_base = OTHER; note = 2'-O-methylcytidine-3'-phosphate
  modified_base 20: mod_base = OTHER; note = 2'-O-methylcytidine-3'-phosphate
  modified_base 21: mod_base = OTHER; note = 2'-O-methyluridine-3'-phosphate
  modified_base 22: mod_base = OTHER; note = 2'-O-methyluridine-3'-phosphate
  modified_base 23: mod_base = OTHER; note = 2'-O-methylguanosine
tgagcaatagcaggtttaccttg

SEQ ID NO: 4758 - RNA, 23 nt, synthetic construct
  source 1..23: mol_type = other RNA
  modified_base 1: mod_base = OTHER; note = 2'-O-methyluridine-3'-phosphate 5'-(E)-Vinylphosphonate
  modified_base 2: mod_base = OTHER; note = 2'-deoxy-2'-fluorouridine-3'-phosphate
  modified_base 3: mod_base = OTHER; note = 2'-O-methylguanosine-3'-phosphate
  modified_base 4: mod_base = OTHER; note = 2'-O-methyladenosine-3'-phosphate
  modified_base 5: mod_base = OTHER; note = 2'-O-methylguanosine-3'-phosphate
  modified_base 6: mod_base = OTHER; note = 2'-deoxy-2'-fluorocytidine-3'-phosphate
  modified_base 7: mod_base = OTHER; note = 2'-O-methyladenosine-3'-phosphate
  modified_base 8: mod_base = OTHER; note = 2'-O-methyladenosine-3'-phosphate
  modified_base 9: mod_base = OTHER; note = 2'-O-methyluridine-3'-phosphate
  modified_base 10: mod_base = OTHER; note = 2'-O-methyladenosine-3'-phosphate
  modified_base 11: mod_base = OTHER; note = 2'-O-methylguanosine-3'-phosphate
  modified_base 12: mod_base = OTHER; note = 2'-O-methylcytidine-3'-phosphate
  modified_base 13: mod_base = OTHER; note = 2'-O-methyladenosine-3'-phosphate
  modified_base 14: mod_base = OTHER; note = 2'-deoxy-2'-fluoroguanosine-3'-phosphate
  modified_base 15: mod_base = OTHER; note = 2'-O-methylguanosine-3'-phosphate
  modified_base 16: mod_base = OTHER; note = 2'-deoxy-2'-fluorouridine-3'-phosphate
  modified_base 17: mod_base = OTHER; note = 2'-O-methyluridine-3'-phosphate
  modified_base 18: mod_base = OTHER; note = 2'-O-methyluridine-3'-phosphate
  modified_base 19: mod_base = OTHER; note = 2'-O-methyladenosine-3'-phosphate
  modified_base 20: mod_base = OTHER; note = 2'-O-methylcytidine-3'-phosphate
  modified_base 21: mod_base = OTHER; note = 2'-O-methylcytidine-3'-phosphate
  modified_base 22: mod_base = OTHER; note = 2'-O-methyluridine-3'-phosphate
  modified_base 23: mod_base = OTHER; note = 2'-O-methyluridine
ttgagcaatagcaggtttacctt

SEQ ID NO: 4759 - RNA, 23 nt, synthetic construct
  source 1..23: mol_type = other RNA
  modified_base 1: mod_base = OTHER; note = 2'-O-methyluridine-3'-phosphate 5'-(E)-Vinylphosphonate
  modified_base 2: mod_base = OTHER; note = 2'-deoxy-2'-fluoroadenosine-3'-phosphate
  modified_base 3: mod_base = OTHER; note = 2'-O-methyluridine-3'-phosphate
  modified_base 4: mod_base = OTHER; note = 2'-O-methylguanosine-3'-phosphate
  modified_base 5: mod_base = OTHER; note = 2'-O-methyladenosine-3'-phosphate
  modified_base 6: mod_base = OTHER; note = 2'-deoxy-2'-fluoroguanosine-3'-phosphate
  modified_base 7: mod_base = OTHER; note = 2'-O-methylcytidine-3'-phosphate
  modified_base 8: mod_base = OTHER; note = 2'-O-methyladenosine-3'-phosphate
  modified_base 9: mod_base = OTHER; note = 2'-O-methyladenosine-3'-phosphate
  modified_base 10: mod_base = OTHER; note = 2'-O-methyluridine-3'-phosphate
  modified_base 11: mod_base = OTHER; note = 2'-O-methyladenosine-3'-phosphate
  modified_base 12: mod_base = OTHER; note = 2'-O-methylguanosine-3'-phosphate
  modified_base 13: mod_base = OTHER; note = 2'-O-methylcytidine-3'-phosphate
  modified_base 14: mod_base = OTHER; note = 2'-deoxy-2'-fluoroadenosine-3'-phosphate
  modified_base 15: mod_base = OTHER; note = 2'-O-methylguanosine-3'-phosphate
  modified_base 16: mod_base = OTHER; note = 2'-deoxy-2'-fluoroguanosine-3'-phosphate
  modified_base 17: mod_base = OTHER; note = 2'-O-methyluridine-3'-phosphate
  modified_base 18: mod_base = OTHER; note = 2'-O-methyluridine-3'-phosphate
  modified_base 19: mod_base = OTHER; note = 2'-O-methyluridine-3'-phosphate
  modified_base 20: mod_base = OTHER; note = 2'-O-methyladenosine-3'-phosphate
  modified_base 21: mod_base = OTHER; note = 2'-O-methylcytidine-3'-phosphate
  modified_base 22: mod_base = OTHER; note = 2'-O-methylcytidine-3'-phosphate
  modified_base 23: mod_base = OTHER; note = 2'-O-methyluridine
tatgagcaatagcaggtttacct

SEQ ID NO: 4760 - RNA, 23 nt, synthetic construct
  source 1..23: mol_type = other RNA
  modified_base 1: mod_base = OTHER; note = 2'-O-methyluridine-3'-phosphate 5'-(E)-Vinylphosphonate
  modified_base 2: mod_base = OTHER; note = 2'-deoxy-2'-fluoroguanosine-3'-phosphate
  modified_base 3: mod_base = OTHER; note = 2'-O-methyladenosine-3'-phosphate
  modified_base 4: mod_base = OTHER; note = 2'-O-methyluridine-3'-phosphate
  modified_base 5: mod_base = OTHER; note = 2'-O-methylguanosine-3'-phosphate
  modified_base 6: mod_base = OTHER; note = 2'-deoxy-2'-fluoroadenosine-3'-phosphate
  modified_base 7: mod_base = OTHER; note = 2'-O-methylguanosine-3'-phosphate
  modified_base 8: mod_base = OTHER; note = 2'-O-methylcytidine-3'-phosphate
  modified_base 9: mod_base = OTHER; note = 2'-O-methyladenosine-3'-phosphate
  modified_base 10: mod_base = OTHER; note = 2'-O-methyladenosine-3'-phosphate
  modified_base 11: mod_base = OTHER; note = 2'-O-methyluridine-3'-phosphate
  modified_base 12: mod_base = OTHER; note = 2'-O-methyladenosine-3'-phosphate
  modified_base 13: mod_base = OTHER; note = 2'-O-methylguanosine-3'-phosphate
  modified_base 14: mod_base = OTHER; note = 2'-deoxy-2'-fluorocytidine-3'-phosphate
  modified_base 15: mod_base = OTHER; note = 2'-O-methyladenosine-3'-phosphate
  modified_base 16: mod_base = OTHER; note = 2'-deoxy-2'-fluoroguanosine-3'-phosphate
  modified_base 17: mod_base = OTHER; note = 2'-O-methylguanosine-3'-phosphate
  modified_base 18: mod_base = OTHER; note = 2'-O-methyluridine-3'-phosphate
  modified_base 19: mod_base = OTHER; note = 2'-O-methyluridine-3'-phosphate
  modified_base 20: mod_base = OTHER; note = 2'-O-methyluridine-3'-phosphate
  modified_base 21: mod_base = OTHER; note = 2'-O-methyladenosine-3'-phosphate
  modified_base 22: mod_base = OTHER; note = 2'-O-methylcytidine-3'-phosphate
  modified_base 23: mod_base = OTHER; note = 2'-O-methylcytidine
tgatgagcaatagcaggtttacc

SEQ ID NO: 4761 - RNA, 23 nt, synthetic construct
  source 1..23: mol_type = other RNA
  modified_base 1: mod_base = OTHER; note = 2'-O-methyluridine-3'-phosphate 5'-(E)-Vinylphosphonate
  modified_base 2: mod_base = OTHER; note = 2'-deoxy-2'-fluorocytidine-3'-phosphate
  modified_base 3: mod_base = OTHER; note = 2'-O-methylguanosine-3'-phosphate
  modified_base 4: mod_base = OTHER; note = 2'-O-methyladenosine-3'-phosphate
  modified_base 5: mod_base = OTHER; note = 2'-O-methyluridine-3'-phosphate
  modified_base 6: mod_base = OTHER; note = 2'-deoxy-2'-fluoroguanosine-3'-phosphate
  modified_base 7: mod_base = OTHER; note = 2'-O-methyladenosine-3'-phosphate
  modified_base 8: mod_base = OTHER; note = 2'-O-methylguanosine-3'-phosphate
  modified_base 9: mod_base = OTHER; note = 2'-O-methylcytidine-3'-phosphate
  modified_base 10: mod_base = OTHER; note = 2'-O-methyladenosine-3'-phosphate
  modified_base 11: mod_base = OTHER; note = 2'-O-methyladenosine-3'-phosphate
  modified_base 12: mod_base = OTHER; note = 2'-O-methyluridine-3'-phosphate
  modified_base 13: mod_base = OTHER; note = 2'-O-methyladenosine-3'-phosphate
  modified_base 14: mod_base = OTHER; note = 2'-deoxy-2'-fluoroguanosine-3'-phosphate
  modified_base 15: mod_base = OTHER; note = 2'-O-methylcytidine-3'-phosphate
  modified_base 16: mod_base = OTHER; note = 2'-deoxy-2'-fluoroadenosine-3'-phosphate
  modified_base 17: mod_base = OTHER; note = 2'-O-methylguanosine-3'-phosphate
  modified_base 18: mod_base = OTHER; note = 2'-O-methylguanosine-3'-phosphate
  modified_base 19: mod_base = OTHER; note = 2'-O-methyluridine-3'-phosphate
  modified_base 20: mod_base = OTHER; note = 2'-O-methyluridine-3'-phosphate
  modified_base 21: mod_base = OTHER; note = 2'-O-methyluridine-3'-phosphate
  modified_base 22: mod_base = OTHER; note = 2'-O-methyladenosine-3'-phosphate
  modified_base 23: mod_base = OTHER; note = 2'-O-methylcytidine
tcgatgagcaatagcaggtttac

SEQ ID NO: 4762 - RNA, 23 nt, synthetic construct
  source 1..23: mol_type = other RNA
  modified_base 1: mod_base = OTHER; note = 2'-O-methyluridine-3'-phosphate 5'-(E)-Vinylphosphonate
  modified_base 2: mod_base = OTHER; note = 2'-deoxy-2'-fluorouridine-3'-phosphate
  modified_base 3: mod_base = OTHER; note = 2'-O-methylcytidine-3'-phosphate
  modified_base 4: mod_base = OTHER; note = 2'-O-methylguanosine-3'-phosphate
  modified_base 5: mod_base = OTHER; note = 2'-O-methyladenosine-3'-phosphate
  modified_base 6: mod_base = OTHER; note = 2'-deoxy-2'-fluorouridine-3'-phosphate
  modified_base 7: mod_base = OTHER; note = 2'-O-methylguanosine-3'-phosphate
  modified_base 8: mod_base = OTHER; note = 2'-O-methyladenosine-3'-phosphate
  modified_base 9: mod_base = OTHER; note = 2'-O-methylguanosine-3'-phosphate
  modified_base 10: mod_base = OTHER; note = 2'-O-methylcytidine-3'-phosphate
  modified_base 11: mod_base = OTHER; note = 2'-O-methyladenosine-3'-phosphate
  modified_base 12: mod_base = OTHER; note = 2'-O-methyladenosine-3'-phosphate
  modified_base 13: mod_base = OTHER; note = 2'-O-methyluridine-3'-phosphate
  modified_base 14: mod_base = OTHER; note = 2'-deoxy-2'-fluoroadenosine-3'-phosphate
  modified_base 15: mod_base = OTHER; note = 2'-O-methylguanosine-3'-phosphate
  modified_base 16: mod_base = OTHER; note = 2'-deoxy-2'-fluorocytidine-3'-phosphate
  modified_base 17: mod_base = OTHER; note = 2'-O-methyladenosine-3'-phosphate
  modified_base 18: mod_base = OTHER; note = 2'-O-methylguanosine-3'-phosphate
  modified_base 19: mod_base = OTHER; note = 2'-O-methylguanosine-3'-phosphate
  modified_base 20: mod_base = OTHER; note = 2'-O-methyluridine-3'-phosphate
  modified_base 21: mod_base = OTHER; note = 2'-O-methyluridine-3'-phosphate
  modified_base 22: mod_base = OTHER; note = 2'-O-methyluridine-3'-phosphate
  modified_base 23: mod_base = OTHER; note = 2'-O-methyladenosine
ttcgatgagcaatagcaggttta

SEQ ID NO: 4763 - RNA, 23 nt, synthetic construct
  source 1..23: mol_type = other RNA
  modified_base 1: mod_base = OTHER; note = 2'-O-methyluridine-3'-phosphate 5'-(E)-Vinylphosphonate
  modified_base 2: mod_base = OTHER; note = 2'-deoxy-2'-fluorocytidine-3'-phosphate
  modified_base 3: mod_base = OTHER; note = 2'-O-methyluridine-3'-phosphate
  modified_base 4: mod_base = OTHER; note = 2'-O-methylcytidine-3'-phosphate
  modified_base 5: mod_base = OTHER; note = 2'-O-methylguanosine-3'-phosphate
  modified_base 6: mod_base = OTHER; note = 2'-deoxy-2'-fluoroadenosine-3'-phosphate
  modified_base 7: mod_base = OTHER; note = 2'-O-methyluridine-3'-phosphate
  modified_base 8: mod_base = OTHER; note = 2'-O-methylguanosine-3'-phosphate
  modified_base 9: mod_base = OTHER; note = 2'-O-methyladenosine-3'-phosphate
  modified_base 10: mod_base = OTHER; note = 2'-O-methylguanosine-3'-phosphate
  modified_base 11: mod_base = OTHER; note = 2'-O-methylcytidine-3'-phosphate
  modified_base 12: mod_base = OTHER; note = 2'-O-methyladenosine-3'-phosphate
  modified_base 13: mod_base = OTHER; note = 2'-O-methyladenosine-3'-phosphate
  modified_base 14: mod_base = OTHER; note = 2'-deoxy-2'-fluorouridine-3'-phosphate
  modified_base 15: mod_base = OTHER; note = 2'-O-methyladenosine-3'-phosphate
  modified_base 16: mod_base = OTHER; note = 2'-deoxy-2'-fluoroguanosine-3'-phosphate
  modified_base 17: mod_base = OTHER; note = 2'-O-methylcytidine-3'-phosphate
  modified_base 18: mod_base = OTHER; note = 2'-O-methyladenosine-3'-phosphate
  modified_base 19: mod_base = OTHER; note = 2'-O-methylguanosine-3'-phosphate
  modified_base 20: mod_base = OTHER; note = 2'-O-methylguanosine-3'-phosphate
  modified_base 21: mod_base = OTHER; note = 2'-O-methyluridine-3'-phosphate
  modified_base 22: mod_base = OTHER; note = 2'-O-methyluridine-3'-phosphate
  modified_base 23: mod_base = OTHER; note = 2'-O-methyluridine
tctcgatgagcaatagcaggttt

SEQ ID NO: 4764 - RNA, 23 nt, synthetic construct
  source 1..23: mol_type = other RNA
  modified_base 1: mod_base = OTHER; note = 2'-O-methyluridine-3'-phosphate 5'-(E)-Vinylphosphonate
  modified_base 2: mod_base = OTHER; note = 2'-deoxy-2'-fluorouridine-3'-phosphate
  modified_base 3: mod_base = OTHER; note = 2'-O-methylcytidine-3'-phosphate
  modified_base 4: mod_base = OTHER; note = 2'-O-methyluridine-3'-phosphate
  modified_base 5: mod_base = OTHER; note = 2'-O-methylcytidine-3'-phosphate
  modified_base 6: mod_base = OTHER; note = 2'-deoxy-2'-fluoroguanosine-3'-phosphate
  modified_base 7: mod_base = OTHER; note = 2'-O-methyladenosine-3'-phosphate
  modified_base 8: mod_base = OTHER; note = 2'-O-methyluridine-3'-phosphate
  modified_base 9: mod_base = OTHER; note = 2'-O-methylguanosine-3'-phosphate
  modified_base 10: mod_base = OTHER; note = 2'-O-methyladenosine-3'-phosphate
  modified_base 11: mod_base = OTHER; note = 2'-O-methylguanosine-3'-phosphate
  modified_base 12: mod_base = OTHER; note = 2'-O-methylcytidine-3'-phosphate
  modified_base 13: mod_base = OTHER; note = 2'-O-methyladenosine-3'-phosphate
  modified_base 14: mod_base = OTHER; note = 2'-deoxy-2'-fluoroadenosine-3'-phosphate
  modified_base 15: mod_base = OTHER; note = 2'-O-methyluridine-3'-phosphate
  modified_base 16: mod_base = OTHER; note = 2'-deoxy-2'-fluoroadenosine-3'-phosphate
  modified_base 17: mod_base = OTHER; note = 2'-O-methylguanosine-3'-phosphate
  modified_base 18: mod_base = OTHER; note = 2'-O-methylcytidine-3'-phosphate
  modified_base 19: mod_base = OTHER; note = 2'-O-methyladenosine-3'-phosphate
  modified_base 20: mod_base = OTHER; note = 2'-O-methylguanosine-3'-phosphate
  modified_base 21: mod_base = OTHER; note = 2'-O-methylguanosine-3'-phosphate
  modified_base 22: mod_base = OTHER; note = 2'-O-methyluridine-3'-phosphate
  modified_base 23: mod_base = OTHER; note = 2'-O-methyluridine
ttctcgatgagcaatagcaggtt

SEQ ID NO: 4765 - RNA, 23 nt, synthetic construct
  source 1..23: mol_type = other RNA
  modified_base 1: mod_base = OTHER; note = 2'-O-methyluridine-3'-phosphate 5'-(E)-Vinylphosphonate
  modified_base 2: mod_base = OTHER; note = 2'-deoxy-2'-fluoroguanosine-3'-phosphate
  modified_base 3: mod_base = OTHER; note = 2'-O-methyluridine-3'-phosphate
  modified_base 4: mod_base = OTHER; note = 2'-O-methylcytidine-3'-phosphate
  modified_base 5: mod_base = OTHER; note = 2'-O-methyluridine-3'-phosphate
  modified_base 6: mod_base = OTHER; note = 2'-deoxy-2'-fluorocytidine-3'-phosphate
  modified_base 7: mod_base = OTHER; note = 2'-O-methylguanosine-3'-phosphate
  modified_base 8: mod_base = OTHER; note = 2'-O-methyladenosine-3'-phosphate
  modified_base 9: mod_base = OTHER; note = 2'-O-methyluridine-3'-phosphate
  modified_base 10: mod_base = OTHER; note = 2'-O-methylguanosine-3'-phosphate
  modified_base 11: mod_base = OTHER; note = 2'-O-methyladenosine-3'-phosphate
  modified_base 12: mod_base = OTHER; note = 2'-O-methylguanosine-3'-phosphate
  modified_base 13: mod_base = OTHER; note = 2'-O-methylcytidine-3'-phosphate
  modified_base 14: mod_base = OTHER; note = 2'-deoxy-2'-fluoroadenosine-3'-phosphate
  modified_base 15: mod_base = OTHER; note = 2'-O-methyladenosine-3'-phosphate
  modified_base 16: mod_base = OTHER; note = 2'-deoxy-2'-fluorouridine-3'-phosphate
  modified_base 17: mod_base = OTHER; note = 2'-O-methyladenosine-3'-phosphate
  modified_base 18: mod_base = OTHER; note = 2'-O-methylguanosine-3'-phosphate
  modified_base 19: mod_base = OTHER; note = 2'-O-methylcytidine-3'-phosphate
  modified_base 20: mod_base = OTHER; note = 2'-O-methyladenosine-3'-phosphate
  modified_base 21: mod_base = OTHER; note = 2'-O-methylguanosine-3'-phosphate
  modified_base 22: mod_base = OTHER; note = 2'-O-methylguanosine-3'-phosphate
  modified_base 23: mod_base = OTHER; note = 2'-O-methyluridine
tgtctcgatgagcaatagcaggt

SEQ ID NO: 4766 - RNA, 23 nt, synthetic construct
  source 1..23: mol_type = other RNA
  modified_base 1: mod_base = OTHER; note = 2'-O-methyluridine-3'-phosphate 5'-(E)-Vinylphosphonate
  modified_base 2: mod_base = OTHER; note = 2'-deoxy-2'-fluorouridine-3'-phosphate
  modified_base 3: mod_base = OTHER; note = 2'-O-methylguanosine-3'-phosphate
  modified_base 4: mod_base = OTHER; note = 2'-O-methyluridine-3'-phosphate
  modified_base 5: mod_base = OTHER; note = 2'-O-methylcytidine-3'-phosphate
  modified_base 6: mod_base = OTHER; note = 2'-deoxy-2'-fluorouridine-3'-phosphate
  modified_base 7: mod_base = OTHER; note = 2'-O-methylcytidine-3'-phosphate
  modified_base 8: mod_base = OTHER; note = 2'-O-methylguanosine-3'-phosphate
  modified_base 9: mod_base = OTHER; note = 2'-O-methyladenosine-3'-phosphate
  modified_base 10: mod_base = OTHER; note = 2'-O-methyluridine-3'-phosphate
  modified_base 11: mod_base = OTHER; note = 2'-O-methylguanosine-3'-phosphate
  modified_base 12: mod_base = OTHER; note = 2'-O-methyladenosine-3'-phosphate
  modified_base 13: mod_base = OTHER; note = 2'-O-methylguanosine-3'-phosphate
  modified_base 14: mod_base = OTHER; note = 2'-deoxy-2'-fluorocytidine-3'-phosphate
  modified_base 15: mod_base = OTHER; note = 2'-O-methyladenosine-3'-phosphate
  modified_base 16: mod_base = OTHER; note = 2'-deoxy-2'-fluoroadenosine-3'-phosphate
  modified_base 17: mod_base = OTHER; note = 2'-O-methyluridine-3'-phosphate
  modified_base 18: mod_base = OTHER; note = 2'-O-methyladenosine-3'-phosphate
  modified_base 19: mod_base = OTHER; note = 2'-O-methylguanosine-3'-phosphate
  modified_base 20: mod_base = OTHER; note = 2'-O-methylcytidine-3'-phosphate
  modified_base 21: mod_base = OTHER; note = 2'-O-methyladenosine-3'-phosphate
  modified_base 22: mod_base = OTHER; note = 2'-O-methylguanosine-3'-phosphate
  modified_base 23: mod_base = OTHER; note = 2'-O-methylguanosine
ttgtctcgatgagcaatagcagg

SEQ ID NO: 4767 - RNA, 23 nt, synthetic construct
  source 1..23: mol_type = other RNA
  modified_base 1: mod_base = OTHER; note = 2'-O-methyluridine-3'-phosphate 5'-(E)-Vinylphosphonate
  modified_base 2: mod_base = OTHER; note = 2'-deoxy-2'-fluoroadenosine-3'-phosphate
  modified_base 3: mod_base = OTHER; note = 2'-O-methyluridine-3'-phosphate
  modified_base 4: mod_base = OTHER; note = 2'-O-methylguanosine-3'-phosphate
  modified_base 5: mod_base = OTHER; note = 2'-O-methyluridine-3'-phosphate
  modified_base 6: mod_base = OTHER; note = 2'-deoxy-2'-fluorocytidine-3'-phosphate
  modified_base 7: mod_base = OTHER; note = 2'-O-methyluridine-3'-phosphate
  modified_base 8: mod_base = OTHER; note = 2'-O-methylcytidine-3'-phosphate
  modified_base 9: mod_base = OTHER; note = 2'-O-methylguanosine-3'-phosphate
  modified_base 10: mod_base = OTHER; note = 2'-O-methyladenosine-3'-phosphate
  modified_base 11: mod_base = OTHER; note = 2'-O-methyluridine-3'-phosphate
  modified_base 12: mod_base = OTHER; note = 2'-O-methylguanosine-3'-phosphate
  modified_base 13: mod_base = OTHER; note = 2'-O-methyladenosine-3'-phosphate
  modified_base 14: mod_base = OTHER; note = 2'-deoxy-2'-fluoroguanosine-3'-phosphate
  modified_base 15: mod_base = OTHER; note = 2'-O-methylcytidine-3'-phosphate
  modified_base 16: mod_base = OTHER; note = 2'-deoxy-2'-fluoroadenosine-3'-phosphate
  modified_base 17: mod_base = OTHER; note = 2'-O-methyladenosine-3'-phosphate
  modified_base 18: mod_base = OTHER; note = 2'-O-methyluridine-3'-phosphate
  modified_base 19: mod_base = OTHER; note = 2'-O-methyladenosine-3'-phosphate
  modified_base 20: mod_base = OTHER; note = 2'-O-methylguanosine-3'-phosphate
  modified_base 21: mod_base = OTHER; note = 2'-O-methylcytidine-3'-phosphate
  modified_base 22: mod_base = OTHER; note = 2'-O-methyladenosine-3'-phosphate
  modified_base 23: mod_base = OTHER; note = 2'-O-methylguanosine
tatgtctcgatgagcaatagcag

SEQ ID NO: 4768 - RNA, 23 nt, synthetic construct
  source 1..23: mol_type = other RNA
  modified_base 1: mod_base = OTHER; note = 2'-O-methyluridine-3'-phosphate 5'-(E)-Vinylphosphonate
  modified_base 2: mod_base = OTHER; note = 2'-deoxy-2'-fluorouridine-3'-phosphate
  modified_base 3: mod_base = OTHER; note = 2'-O-methyladenosine-3'-phosphate
  modified_base 4: mod_base = OTHER; note = 2'-O-methyluridine-3'-phosphate
  modified_base 5: mod_base = OTHER; note = 2'-O-methylguanosine-3'-phosphate
  modified_base 6: mod_base = OTHER; note = 2'-deoxy-2'-fluorouridine-3'-phosphate
  modified_base 7: mod_base = OTHER; note = 2'-O-methylcytidine-3'-phosphate
  modified_base 8: mod_base = OTHER; note = 2'-O-methyluridine-3'-phosphate
  modified_base 9: mod_base = OTHER; note = 2'-O-methylcytidine-3'-phosphate
  modified_base 10: mod_base = OTHER; note = 2'-O-methylguanosine-3'-phosphate
  modified_base 11: mod_base = OTHER; note = 2'-O-methyladenosine-3'-phosphate
  modified_base 12: mod_base = OTHER; note = 2'-O-methyluridine-3'-phosphate
  modified_base 13: mod_base = OTHER; note = 2'-O-methylguanosine-3'-phosphate
  modified_base 14: mod_base = OTHER; note = 2'-deoxy-2'-fluoroadenosine-3'-phosphate
  modified_base 15: mod_base = OTHER; note = 2'-O-methylguanosine-3'-phosphate
  modified_base 16: mod_base = OTHER; note = 2'-deoxy-2'-fluorocytidine-3'-phosphate
  modified_base 17: mod_base = OTHER; note = 2'-O-methyladenosine-3'-phosphate
  modified_base 18: mod_base = OTHER; note = 2'-O-methyladenosine-3'-phosphate
  modified_base 19: mod_base = OTHER; note = 2'-O-methyluridine-3'-phosphate
  modified_base 20: mod_base = OTHER; note = 2'-O-methyladenosine-3'-phosphate
  modified_base 21: mod_base = OTHER; note = 2'-O-methylguanosine-3'-phosphate
  modified_base 22: mod_base = OTHER; note = 2'-O-methylcytidine-3'-phosphate
  modified_base 23: mod_base = OTHER; note = 2'-O-methyladenosine
ttatgtctcgatgagcaatagca

SEQ ID NO: 4769 - RNA, 23 nt, synthetic construct
  source 1..23: mol_type = other RNA
  modified_base 1: mod_base = OTHER; note = 2'-O-methyluridine-3'-phosphate 5'-(E)-Vinylphosphonate
  modified_base 2: mod_base = OTHER; note = 2'-deoxy-2'-fluorouridine-3'-phosphate
  modified_base 3: mod_base = OTHER; note = 2'-O-methyluridine-3'-phosphate
  modified_base 4: mod_base = OTHER; note = 2'-O-methyladenosine-3'-phosphate
  modified_base 5: mod_base = OTHER; note = 2'-O-methyluridine-3'-phosphate
  modified_base 6: mod_base = OTHER; note = 2'-deoxy-2'-fluoroguanosine-3'-phosphate
  modified_base 7: mod_base = OTHER; note = 2'-O-methyluridine-3'-phosphate
  modified_base 8: mod_base = OTHER; note = 2'-O-methylcytidine-3'-phosphate
  modified_base 9: mod_base = OTHER; note = 2'-O-methyluridine-3'-phosphate
  modified_base 10: mod_base = OTHER; note = 2'-O-methylcytidine-3'-phosphate
  modified_base 11: mod_base = OTHER; note = 2'-O-methylguanosine-3'-phosphate
  modified_base 12: mod_base = OTHER; note = 2'-O-methyladenosine-3'-phosphate
  modified_base 13: mod_base = OTHER; note = 2'-O-methyluridine-3'-phosphate
  modified_base 14: mod_base = OTHER; note = 2'-deoxy-2'-fluoroguanosine-3'-phosphate
  modified_base 15: mod_base = OTHER; note = 2'-O-methyladenosine-3'-phosphate
  modified_base 16: mod_base = OTHER; note = 2'-deoxy-2'-fluoroguanosine-3'-phosphate
  modified_base 17: mod_base = OTHER; note = 2'-O-methylcytidine-3'-phosphate
  modified_base 18: mod_base = OTHER; note = 2'-O-methyladenosine-3'-phosphate
  modified_base 19: mod_base = OTHER; note = 2'-O-methyladenosine-3'-phosphate
  modified_base 20: mod_base = OTHER; note = 2'-O-methyluridine-3'-phosphate
  modified_base 21: mod_base = OTHER; note = 2'-O-methyladenosine-3'-phosphate
  modified_base 22: mod_base = OTHER; note = 2'-O-methylguanosine-3'-phosphate
  modified_base 23: mod_base = OTHER; note = 2'-O-methylcytidine
tttatgtctcgatgagcaatagc

SEQ ID NO: 4770 - RNA, 23 nt, synthetic construct
  source 1..23: mol_type = other RNA
  modified_base 1: mod_base = OTHER; note = 2'-O-methyluridine-3'-phosphate 5'-(E)-Vinylphosphonate
  modified_base 2: mod_base = OTHER; note = 2'-deoxy-2'-fluorouridine-3'-phosphate
  modified_base 3: mod_base = OTHER; note = 2'-O-methyluridine-3'-phosphate
  modified_base 4: mod_base = OTHER; note = 2'-O-methyluridine-3'-phosphate
  modified_base 5: mod_base = OTHER; note = 2'-O-methyladenosine-3'-phosphate
  modified_base 6: mod_base = OTHER; note = 2'-deoxy-2'-fluorouridine-3'-phosphate
  modified_base 7: mod_base = OTHER; note = 2'-O-methylguanosine-3'-phosphate
  modified_base 8: mod_base = OTHER; note = 2'-O-methyluridine-3'-phosphate
  modified_base 9: mod_base = OTHER; note = 2'-O-methylcytidine-3'-phosphate
  modified_base 10: mod_base = OTHER; note = 2'-O-methyluridine-3'-phosphate
  modified_base 11: mod_base = OTHER; note = 2'-O-methylcytidine-3'-phosphate
  modified_base 12: mod_base = OTHER; note = 2'-O-methylguanosine-3'-phosphate
  modified_base 13: mod_base = OTHER; note = 2'-O-methyladenosine-3'-phosphate
  modified_base 14: mod_base = OTHER; note = 2'-deoxy-2'-fluorouridine-3'-phosphate
  modified_base 15: mod_base = OTHER; note = 2'-O-methylguanosine-3'-phosphate
  modified_base 16: mod_base = OTHER; note = 2'-deoxy-2'-fluoroadenosine-3'-phosphate
  modified_base 17: mod_base = OTHER; note = 2'-O-methylguanosine-3'-phosphate
  modified_base 18: mod_base = OTHER; note = 2'-O-methylcytidine-3'-phosphate
  modified_base 19: mod_base = OTHER; note = 2'-O-methyladenosine-3'-phosphate
  modified_base 20: mod_base = OTHER; note = 2'-O-methyladenosine-3'-phosphate
  modified_base 21: mod_base = OTHER; note = 2'-O-methyluridine-3'-phosphate
  modified_base 22: mod_base = OTHER; note = 2'-O-methyladenosine-3'-phosphate
  modified_base 23: mod_base = OTHER; note = 2'-O-methylguanosine
ttttatgtctcgatgagcaatag

SEQ ID NO: 4771 - RNA, 23 nt, synthetic construct
  source 1..23: mol_type = other RNA
  modified_base 1: mod_base = OTHER; note = 2'-O-methyluridine-3'-phosphate 5'-(E)-Vinylphosphonate
  modified_base 2: mod_base = OTHER; note = 2'-deoxy-2'-fluorouridine-3'-phosphate
  modified_base 3: mod_base = OTHER; note = 2'-O-methyluridine-3'-phosphate
  modified_base 4: mod_base = OTHER; note = 2'-O-methyluridine-3'-phosphate
  modified_base 5: mod_base = OTHER; note = 2'-O-methyluridine-3'-phosphate
  modified_base 6: mod_base = OTHER; note = 2'-deoxy-2'-fluoroadenosine-3'-phosphate
  modified_base 7: mod_base = OTHER; note = 2'-O-methyluridine-3'-phosphate
  modified_base 8: mod_base = OTHER; note = 2'-O-methylguanosine-3'-phosphate
  modified_base 9: mod_base = OTHER; note = 2'-O-methyluridine-3'-phosphate
  modified_base 10: mod_base = OTHER; note = 2'-O-methylcytidine-3'-phosphate
  modified_base 11: mod_base = OTHER; note = 2'-O-methyluridine-3'-phosphate
  modified_base 12: mod_base = OTHER; note = 2'-O-methylcytidine-3'-phosphate
  modified_base 13: mod_base = OTHER; note = 2'-O-methylguanosine-3'-phosphate
  modified_base 14: mod_base = OTHER; note = 2'-deoxy-2'-fluoroadenosine-3'-phosphate
  modified_base 15: mod_base = OTHER; note = 2'-O-methyluridine-3'-phosphate
  modified_base 16: mod_base = OTHER; note = 2'-deoxy-2'-fluoroguanosine-3'-phosphate
  modified_base 17: mod_base = OTHER; note = 2'-O-methyladenosine-3'-phosphate
  modified_base 18: mod_base = OTHER; note = 2'-O-methylguanosine-3'-phosphate
  modified_base 19: mod_base = OTHER; note = 2'-O-methylcytidine-3'-phosphate
  modified_base 20: mod_base = OTHER; note = 2'-O-methyladenosine-3'-phosphate
  modified_base 21: mod_base = OTHER; note = 2'-O-methyladenosine-3'-phosphate
  modified_base 22: mod_base = OTHER; note = 2'-O-methyluridine-3'-phosphate
  modified_base 23: mod_base = OTHER; note = 2'-O-methyladenosine
tttttatgtctcgatgagcaata

SEQ ID NO: 4772 - RNA, 23 nt, synthetic construct
  source 1..23: mol_type = other RNA
  modified_base 1: mod_base = OTHER; note = 2'-O-methyluridine-3'-phosphate 5'-(E)-Vinylphosphonate
  modified_base 2: mod_base = OTHER; note = 2'-deoxy-2'-fluoroadenosine-3'-phosphate
  modified_base 3: mod_base = OTHER; note = 2'-O-methyluridine-3'-phosphate
  modified_base 4: mod_base = OTHER; note = 2'-O-methyluridine-3'-phosphate
  modified_base 5: mod_base = OTHER; note = 2'-O-methyluridine-3'-phosphate
  modified_base 6: mod_base = OTHER; note = 2'-deoxy-2'-fluorouridine-3'-phosphate
  modified_base 7: mod_base = OTHER; note = 2'-O-methyladenosine-3'-phosphate
  modified_base 8: mod_base = OTHER; note = 2'-O-methyluridine-3'-phosphate
  modified_base 9: mod_base = OTHER; note = 2'-O-methylguanosine-3'-phosphate
  modified_base 10: mod_base = OTHER; note = 2'-O-methyluridine-3'-phosphate
  modified_base 11: mod_base = OTHER; note = 2'-O-methylcytidine-3'-phosphate
  modified_base 12: mod_base = OTHER; note = 2'-O-methyluridine-3'-phosphate
  modified_base 13: mod_base = OTHER; note = 2'-O-methylcytidine-3'-phosphate
  modified_base 14: mod_base = OTHER; note = 2'-deoxy-2'-fluoroguanosine-3'-phosphate
  modified_base 15: mod_base = OTHER; note = 2'-O-methyladenosine-3'-phosphate
  modified_base 16: mod_base = OTHER; note = 2'-deoxy-2'-fluorouridine-3'-phosphate
  modified_base 17: mod_base = OTHER; note = 2'-O-methylguanosine-3'-phosphate
  modified_base 18: mod_base = OTHER; note = 2'-O-methyladenosine-3'-phosphate
  modified_base 19: mod_base = OTHER; note = 2'-O-methylguanosine-3'-phosphate
  modified_base 20: mod_base = OTHER; note = 2'-O-methylcytidine-3'-phosphate
  modified_base 21: mod_base = OTHER; note = 2'-O-methyladenosine-3'-phosphate
  modified_base 22: mod_base = OTHER; note = 2'-O-methyladenosine-3'-phosphate
  modified_base 23: mod_base = OTHER; note = 2'-O-methyluridine
tattttatgtctcgatgagcaat

SEQ ID NO: 4773 - RNA, 23 nt, synthetic construct
  source 1..23: mol_type = other RNA
  modified_base 1: mod_base = OTHER; note = 2'-O-methyluridine-3'-phosphate 5'-(E)-Vinylphosphonate
  modified_base 2: mod_base = OTHER; note = 2'-deoxy-2'-fluoroguanosine-3'-phosphate
  modified_base 3: mod_base = OTHER; note = 2'-O-methyladenosine-3'-phosphate
  modified_base 4: mod_base = OTHER; note = 2'-O-methyluridine-3'-phosphate
  modified_base 5: mod_base = OTHER; note = 2'-O-methyluridine-3'-phosphate
  modified_base 6: mod_base = OTHER; note = 2'-deoxy-2'-fluorouridine-3'-phosphate
  modified_base 7: mod_base = OTHER; note = 2'-O-methyluridine-3'-phosphate
  modified_base 8: mod_base = OTHER; note = 2'-O-methyladenosine-3'-phosphate
  modified_base 9: mod_base = OTHER; note = 2'-O-methyluridine-3'-phosphate
  modified_base 10: mod_base = OTHER; note = 2'-O-methylguanosine-3'-phosphate
  modified_base 11: mod_base = OTHER; note = 2'-O-methyluridine-3'-phosphate
  modified_base 12: mod_base = OTHER; note = 2'-O-methylcytidine-3'-phosphate
  modified_base 13: mod_base = OTHER; note = 2'-O-methyluridine-3'-phosphate
  modified_base 14: mod_base = OTHER; note = 2'-deoxy-2'-fluorocytidine-3'-phosphate
  modified_base 15: mod_base = OTHER; note = 2'-O-methylguanosine-3'-phosphate
  modified_base 16: mod_base = OTHER; note = 2'-deoxy-2'-fluoroadenosine-3'-phosphate
  modified_base 17: mod_base = OTHER; note = 2'-O-methyluridine-3'-phosphate
  modified_base 18: mod_base = OTHER; note = 2'-O-methylguanosine-3'-phosphate
  modified_base 19: mod_base = OTHER; note = 2'-O-methyladenosine-3'-phosphate
  modified_base 20: mod_base = OTHER; note = 2'-O-methylguanosine-3'-phosphate
  modified_base 21: mod_base = OTHER; note = 2'-O-methylcytidine-3'-phosphate
  modified_base 22: mod_base = OTHER; note = 2'-O-methyladenosine-3'-phosphate
  modified_base 23: mod_base = OTHER; note = 2'-O-methyladenosine
tgattttatgtctcgatgagcaa

SEQ ID NO: 4774 - RNA, 23 nt, synthetic construct
  source 1..23: mol_type = other RNA
  modified_base 1: mod_base = OTHER; note = 2'-O-methyluridine-3'-phosphate 5'-(E)-Vinylphosphonate
  modified_base 2: mod_base = OTHER; note = 2'-deoxy-2'-fluorouridine-3'-phosphate
  modified_base 3: mod_base = OTHER; note = 2'-O-methylguanosine-3'-phosphate
  modified_base 4: mod_base = OTHER; note = 2'-O-methyladenosine-3'-phosphate
  modified_base 5: mod_base = OTHER; note = 2'-O-methyluridine-3'-phosphate
  modified_base 6: mod_base = OTHER; note = 2'-deoxy-2'-fluorouridine-3'-phosphate
  modified_base 7: mod_base = OTHER; note = 2'-O-methyluridine-3'-phosphate
  modified_base 8: mod_base = OTHER; note = 2'-O-methyluridine-3'-phosphate
  modified_base 9: mod_base = OTHER; note = 2'-O-methyladenosine-3'-phosphate
  modified_base 10: mod_base = OTHER; note = 2'-O-methyluridine-3'-phosphate
  modified_base 11: mod_base = OTHER; note = 2'-O-methylguanosine-3'-phosphate
  modified_base 12: mod_base = OTHER; note = 2'-O-methyluridine-3'-phosphate
  modified_base 13: mod_base = OTHER; note = 2'-O-methylcytidine-3'-phosphate
  modified_base 14: mod_base = OTHER; note = 2'-deoxy-2'-fluorouridine-3'-phosphate
  modified_base 15: mod_base = OTHER; note = 2'-O-methylcytidine-3'-phosphate
  modified_base 16: mod_base = OTHER; note = 2'-deoxy-2'-fluoroguanosine-3'-phosphate
  modified_base 17: mod_base = OTHER; note = 2'-O-methyladenosine-3'-phosphate
  modified_base 18: mod_base = OTHER; note = 2'-O-methyluridine-3'-phosphate
  modified_base 19: mod_base = OTHER; note = 2'-O-methylguanosine-3'-phosphate
  modified_base 20: mod_base = OTHER; note = 2'-O-methyladenosine-3'-phosphate
  modified_base 21: mod_base = OTHER; note = 2'-O-methylguanosine-3'-phosphate
  modified_base 22: mod_base = OTHER; note = 2'-O-methylcytidine-3'-phosphate
  modified_base 23: mod_base = OTHER; note = 2'-O-methyladenosine
ttgattttatgtctcgatgagca

SEQ ID NO: 4775 - RNA, 23 nt, synthetic construct
  source 1..23: mol_type = other RNA
  modified_base 1: mod_base = OTHER; note = 2'-O-methyluridine-3'-phosphate 5'-(E)-Vinylphosphonate
  modified_base 2: mod_base = OTHER; note = 2'-deoxy-2'-fluorouridine-3'-phosphate
  modified_base 3: mod_base = OTHER; note = 2'-O-methyluridine-3'-phosphate
  modified_base 4: mod_base = OTHER; note = 2'-O-methylguanosine-3'-phosphate
  modified_base 5: mod_base = OTHER; note = 2'-O-methyladenosine-3'-phosphate
  modified_base 6: mod_base = OTHER; note = 2'-deoxy-2'-fluorouridine-3'-phosphate
  modified_base 7: mod_base = OTHER; note = 2'-O-methyluridine-3'-phosphate
  modified_base 8: mod_base = OTHER; note = 2'-O-methyluridine-3'-phosphate
  modified_base 9: mod_base = OTHER; note = 2'-O-methyluridine-3'-phosphate
  modified_base 10: mod_base = OTHER; note = 2'-O-methyladenosine-3'-phosphate
  modified_base 11: mod_base = OTHER; note = 2'-O-methyluridine-3'-phosphate
  modified_base 12: mod_base = OTHER; note = 2'-O-methylguanosine-3'-phosphate
  modified_base 13: mod_base = OTHER; note = 2'-O-methyluridine-3'-phosphate
  modified_base 14: mod_base = OTHER; note = 2'-deoxy-2'-fluorocytidine-3'-phosphate
  modified_base 15: mod_base = OTHER; note = 2'-O-methyluridine-3'-phosphate
  modified_base 16: mod_base = OTHER; note = 2'-deoxy-2'-fluorocytidine-3'-phosphate
  modified_base 17: mod_base = OTHER; note = 2'-O-methylguanosine-3'-phosphate
  modified_base 18: mod_base = OTHER; note = 2'-O-methyladenosine-3'-phosphate
  modified_base 19: mod_base = OTHER; note = 2'-O-methyluridine-3'-phosphate
  modified_base 20: mod_base = OTHER; note = 2'-O-methylguanosine-3'-phosphate
  modified_base 21: mod_base = OTHER; note = 2'-O-methyladenosine-3'-phosphate
  modified_base 22: mod_base = OTHER; note = 2'-O-methylguanosine-3'-phosphate
  modified_base 23: mod_base = OTHER; note = 2'-O-methylcytidine
tttgattttatgtctcgatgagc

SEQ ID NO: 4776 - RNA, 23 nt, synthetic construct
  source 1..23: mol_type = other RNA
  modified_base 1: mod_base = OTHER; note = 2'-O-methyluridine-3'-phosphate 5'-(E)-Vinylphosphonate
  modified_base 2: mod_base = OTHER; note = 2'-deoxy-2'-fluorouridine-3'-phosphate
  modified_base 3: mod_base = OTHER; note = 2'-O-methyluridine-3'-phosphate
  modified_base 4: mod_base = OTHER; note = 2'-O-methyluridine-3'-phosphate
  modified_base 5: mod_base = OTHER; note = 2'-O-methylguanosine-3'-phosphate
  modified_base 6: mod_base = OTHER; note = 2'-deoxy-2'-fluoroadenosine-3'-phosphate
  modified_base 7: mod_base = OTHER; note = 2'-O-methyluridine-3'-phosphate
  modified_base 8: mod_base = OTHER; note = 2'-O-methyluridine-3'-phosphate
  modified_base 9: mod_base = OTHER; note = 2'-O-methyluridine-3'-phosphate
  modified_base 10: mod_base = OTHER; note = 2'-O-methyluridine-3'-phosphate
  modified_base 11: mod_base = OTHER; note = 2'-O-methyladenosine-3'-phosphate
  modified_base 12: mod_base = OTHER; note = 2'-O-methyluridine-3'-phosphate
  modified_base 13: mod_base = OTHER; note = 2'-O-methylguanosine-3'-phosphate
  modified_base 14: mod_base = OTHER; note = 2'-deoxy-2'-fluorouridine-3'-phosphate
  modified_base 15: mod_base = OTHER; note = 2'-O-methylcytidine-3'-phosphate
  modified_base 16: mod_base = OTHER; note = 2'-deoxy-2'-fluorouridine-3'-phosphate
  modified_base 17: mod_base = OTHER; note = 2'-O-methylcytidine-3'-phosphate
  modified_base 18: mod_base = OTHER; note = 2'-O-methylguanosine-3'-phosphate
  modified_base 19: mod_base = OTHER; note = 2'-O-methyladenosine-3'-phosphate
  modified_base 20: mod_base = OTHER; note = 2'-O-methyluridine-3'-phosphate
  modified_base 21: mod_base = OTHER; note = 2'-O-methylguanosine-3'-phosphate
  modified_base 22: mod_base = OTHER; note = 2'-O-methyladenosine-3'-phosphate
  modified_base 23: mod_base = OTHER; note = 2'-O-methylguanosine
ttttgattttatgtctcgatgag

SEQ ID NO: 4777 - RNA, 23 nt, synthetic construct
  source 1..23: mol_type = other RNA
  modified_base 1: mod_base = OTHER; note = 2'-O-methyluridine-3'-phosphate 5'-(E)-Vinylphosphonate
  modified_base 2: mod_base = OTHER; note = 2'-deoxy-2'-fluorocytidine-3'-phosphate
  modified_base 3: mod_base = OTHER; note = 2'-O-methyluridine-3'-phosphate
  modified_base 4: mod_base = OTHER; note = 2'-O-methyluridine-3'-phosphate
  modified_base 5: mod_base = OTHER; note = 2'-O-methyluridine-3'-phosphate
  modified_base 6: mod_base = OTHER; note = 2'-deoxy-2'-fluoroguanosine-3'-phosphate
  modified_base 7: mod_base = OTHER; note = 2'-O-methyladenosine-3'-phosphate
  modified_base 8: mod_base = OTHER; note = 2'-O-methyluridine-3'-phosphate
  modified_base 9: mod_base = OTHER; note = 2'-O-methyluridine-3'-phosphate
  modified_base 10: mod_base = OTHER; note = 2'-O-methyluridine-3'-phosphate
  modified_base 11: mod_base = OTHER; note = 2'-O-methyluridine-3'-phosphate
  modified_base 12: mod_base = OTHER; note = 2'-O-methyladenosine-3'-phosphate
  modified_base 13: mod_base = OTHER; note = 2'-O-methyluridine-3'-phosphate
  modified_base 14: mod_base = OTHER; note = 2'-deoxy-2'-fluoroguanosine-3'-phosphate
  modified_base 15: mod_base = OTHER; note = 2'-O-methyluridine-3'-phosphate
  modified_base 16: mod_base = OTHER; note = 2'-deoxy-2'-fluorocytidine-3'-phosphate
  modified_base 17: mod_base = OTHER; note = 2'-O-methyluridine-3'-phosphate
  modified_base 18: mod_base = OTHER; note = 2'-O-methylcytidine-3'-phosphate
  modified_base 19: mod_base = OTHER; note = 2'-O-methylguanosine-3'-phosphate
  modified_base 20: mod_base = OTHER; note = 2'-O-methyladenosine-3'-phosphate
  modified_base 21: mod_base = OTHER; note = 2'-O-methyluridine-3'-phosphate
  modified_base 22: mod_base = OTHER; note = 2'-O-methylguanosine-3'-phosphate
  modified_base 23: mod_base = OTHER; note = 2'-O-methyladenosine
tctttgattttatgtctcgatga

SEQ ID NO: 4778 - RNA, 23 nt, synthetic construct
  source 1..23: mol_type = other RNA
  modified_base 1: mod_base = OTHER; note = 2'-O-methyluridine-3'-phosphate 5'-(E)-Vinylphosphonate
  modified_base 2: mod_base = OTHER; note = 2'-deoxy-2'-fluorouridine-3'-phosphate
  modified_base 3: mod_base = OTHER; note = 2'-O-methylcytidine-3'-phosphate
  modified_base 4: mod_base = OTHER; note = 2'-O-methyluridine-3'-phosphate
  modified_base 5: mod_base = OTHER; note = 2'-O-methyluridine-3'-phosphate
  modified_base 6: mod_base = OTHER; note = 2'-deoxy-2'-fluorouridine-3'-phosphate
  modified_base 7: mod_base = OTHER; note = 2'-O-methylguanosine-3'-phosphate
  modified_base 8: mod_base = OTHER; note = 2'-O-methyladenosine-3'-phosphate
  modified_base 9: mod_base = OTHER; note = 2'-O-methyluridine-3'-phosphate
  modified_base 10: mod_base = OTHER; note = 2'-O-methyluridine-3'-phosphate
  modified_base 11: mod_base = OTHER; note = 2'-O-methyluridine-3'-phosphate
  modified_base 12: mod_base = OTHER; note = 2'-O-methyluridine-3'-phosphate
  modified_base 13: mod_base = OTHER; note = 2'-O-methyladenosine-3'-phosphate
  modified_base 14: mod_base = OTHER; note = 2'-deoxy-2'-fluorouridine-3'-phosphate
  modified_base 15: mod_base = OTHER; note = 2'-O-methylguanosine-3'-phosphate
  modified_base 16: mod_base = OTHER; note = 2'-deoxy-2'-fluorouridine-3'-phosphate
  modified_base 17: mod_base = OTHER; note = 2'-O-methylcytidine-3'-phosphate
  modified_base 18: mod_base = OTHER; note = 2'-O-methyluridine-3'-phosphate
  modified_base 19: mod_base = OTHER; note = 2'-O-methylcytidine-3'-phosphate
  modified_base 20: mod_base = OTHER; note = 2'-O-methylguanosine-3'-phosphate
  modified_base 21: mod_base = OTHER; note = 2'-O-methyladenosine-3'-phosphate
  modified_base 22: mod_base = OTHER; note = 2'-O-methyluridine-3'-phosphate
  modified_base 23: mod_base = OTHER; note = 2'-O-methylguanosine
ttctttgattttatgtctcgatg

SEQ ID NO: 4779 - RNA, 23 nt, synthetic construct
  source 1..23: mol_type = other RNA
  modified_base 1: mod_base = OTHER; note = 2'-O-methyluridine-3'-phosphate 5'-(E)-Vinylphosphonate
  modified_base 2: mod_base = OTHER; note = 2'-deoxy-2'-fluorouridine-3'-phosphate
  modified_base 3: mod_base = OTHER; note = 2'-O-methyluridine-3'-phosphate
  modified_base 4: mod_base = OTHER; note = 2'-O-methylcytidine-3'-phosphate
  modified_base 5: mod_base = OTHER; note = 2'-O-methyluridine-3'-phosphate
  modified_base 6: mod_base = OTHER; note = 2'-deoxy-2'-fluorouridine-3'-phosphate
  modified_base 7: mod_base = OTHER; note = 2'-O-methyluridine-3'-phosphate
  modified_base 8: mod_base = OTHER; note = 2'-O-methylguanosine-3'-phosphate
  modified_base 9: mod_base = OTHER; note = 2'-O-methyladenosine-3'-phosphate
  modified_base 10: mod_base = OTHER; note = 2'-O-methyluridine-3'-phosphate
  modified_base 11: mod_base = OTHER; note = 2'-O-methyluridine-3'-phosphate
  modified_base 12: mod_base = OTHER; note = 2'-O-methyluridine-3'-phosphate
  modified_base 13: mod_base = OTHER; note = 2'-O-methyluridine-3'-phosphate
  modified_base 14: mod_base = OTHER; note = 2'-deoxy-2'-fluoroadenosine-3'-phosphate
  modified_base 15: mod_base = OTHER; note = 2'-O-methyluridine-3'-phosphate
  modified_base 16: mod_base = OTHER; note = 2'-deoxy-2'-fluoroguanosine-3'-phosphate
  modified_base 17: mod_base = OTHER; note = 2'-O-methyluridine-3'-phosphate
  modified_base 18: mod_base = OTHER; note = 2'-O-methylcytidine-3'-phosphate
  modified_base 19: mod_base = OTHER; note = 2'-O-methyluridine-3'-phosphate
  modified_base 20: mod_base = OTHER; note = 2'-O-methylcytidine-3'-phosphate
  modified_base 21: mod_base = OTHER; note = 2'-O-methylguanosine-3'-phosphate
  modified_base 22: mod_base = OTHER; note = 2'-O-methyladenosine-3'-phosphate
  modified_base 23: mod_base = OTHER; note = 2'-O-methyluridine
tttctttgattttatgtctcgat

SEQ ID NO: 4780 - RNA, 23 nt, synthetic construct
  source 1..23: mol_type = other RNA
  modified_base 1: mod_base = OTHER; note = 2'-O-methyluridine-3'-phosphate 5'-(E)-Vinylphosphonate
  modified_base 2: mod_base = OTHER; note = 2'-deoxy-2'-fluoroadenosine-3'-phosphate
  modified_base 3: mod_base = OTHER; note = 2'-O-methyluridine-3'-phosphate
  modified_base 4: mod_base = OTHER; note = 2'-O-methyluridine-3'-phosphate
  modified_base 5: mod_base = OTHER; note = 2'-O-methylcytidine-3'-phosphate
  modified_base 6: mod_base = OTHER; note = 2'-deoxy-2'-fluorouridine-3'-phosphate
  modified_base 7: mod_base = OTHER; note = 2'-O-methyluridine-3'-phosphate
  modified_base 8: mod_base = OTHER; note = 2'-O-methyluridine-3'-phosphate
  modified_base 9: mod_base = OTHER; note = 2'-O-methylguanosine-3'-phosphate
  modified_base 10: mod_base = OTHER; note = 2'-O-methyladenosine-3'-phosphate
  modified_base 11: mod_base = OTHER; note = 2'-O-methyluridine-3'-phosphate
  modified_base 12: mod_base = OTHER; note = 2'-O-methyluridine-3'-phosphate
  modified_base 13: mod_base = OTHER; note = 2'-O-methyluridine-3'-phosphate
  modified_base 14: mod_base = OTHER; note = 2'-deoxy-2'-fluorouridine-3'-phosphate
  modified_base 15: mod_base = OTHER; note = 2'-O-methyladenosine-3'-phosphate
  modified_base 16: mod_base = OTHER; note = 2'-deoxy-2'-fluorouridine-3'-phosphate
  modified_base 17: mod_base = OTHER; note = 2'-O-methylguanosine-3'-phosphate
  modified_base 18: mod_base = OTHER; note = 2'-O-methyluridine-3'-phosphate
  modified_base 19: mod_base = OTHER; note = 2'-O-methylcytidine-3'-phosphate
  modified_base 20: mod_base = OTHER; note = 2'-O-methyluridine-3'-phosphate
  modified_base 21: mod_base = OTHER; note = 2'-O-methylcytidine-3'-phosphate
  modified_base 22: mod_base = OTHER; note = 2'-O-methylguanosine-3'-phosphate
  modified_base 23: mod_base = OTHER; note = 2'-O-methyladenosine
tattctttgattttatgtctcga

SEQ ID NO: 4781 - RNA, 23 nt, synthetic construct
  source 1..23: mol_type = other RNA
  modified_base 1: mod_base = OTHER; note = 2'-O-methyluridine-3'-phosphate 5'-(E)-Vinylphosphonate
  modified_base 2: mod_base = OTHER; note = 2'-deoxy-2'-fluorouridine-3'-phosphate
  modified_base 3: mod_base = OTHER; note = 2'-O-methyladenosine-3'-phosphate
  modified_base 4: mod_base = OTHER; note = 2'-O-methyluridine-3'-phosphate
  modified_base 5: mod_base = OTHER; note = 2'-O-methyluridine-3'-phosphate
  modified_base 6: mod_base = OTHER; note = 2'-deoxy-2'-fluorocytidine-3'-phosphate
  modified_base 7: mod_base = OTHER; note = 2'-O-methyluridine-3'-phosphate
  modified_base 8: mod_base = OTHER; note = 2'-O-methyluridine-3'-phosphate
  modified_base 9: mod_base = OTHER; note = 2'-O-methyluridine-3'-phosphate
  modified_base 10: mod_base = OTHER; note = 2'-O-methylguanosine-3'-phosphate
  modified_base 11: mod_base = OTHER; note = 2'-O-methyladenosine-3'-phosphate
  modified_base 12: mod_base = OTHER; note = 2'-O-methyluridine-3'-phosphate
  modified_base 13: mod_base = OTHER; note = 2'-O-methyluridine-3'-phosphate
  modified_base 14: mod_base = OTHER; note = 2'-deoxy-2'-fluorouridine-3'-phosphate
  modified_base 15: mod_base = OTHER; note = 2'-O-methyluridine-3'-phosphate
  modified_base 16: mod_base = OTHER; note = 2'-deoxy-2'-fluoroadenosine-3'-phosphate
  modified_base 17: mod_base = OTHER; note = 2'-O-methyluridine-3'-phosphate
  modified_base 18: mod_base = OTHER; note = 2'-O-methylguanosine-3'-phosphate
  modified_base 19: mod_base = OTHER; note = 2'-O-methyluridine-3'-phosphate
  modified_base 20: mod_base = OTHER; note = 2'-O-methylcytidine-3'-phosphate
  modified_base 21: mod_base = OTHER; note = 2'-O-methyluridine-3'-phosphate
  modified_base 22: mod_base = OTHER; note = 2'-O-methylcytidine-3'-phosphate
  modified_base 23: mod_base = OTHER; note = 2'-O-methylguanosine
ttattctttgattttatgtctcg

SEQ ID NO: 4782 - RNA, 23 nt, synthetic construct
  source 1..23: mol_type = other RNA
  modified_base 1: mod_base = OTHER; note = 2'-O-methyluridine-3'-phosphate 5'-(E)-Vinylphosphonate
  modified_base 2: mod_base = OTHER; note = 2'-deoxy-2'-fluorocytidine-3'-phosphate
  modified_base 3: mod_base = OTHER; note = 2'-O-methyladenosine-3'-phosphate
  modified_base 4: mod_base = OTHER; note = 2'-O-methylcytidine-3'-phosphate
  modified_base 5: mod_base = OTHER; note = 2'-O-methyluridine-3'-phosphate
  modified_base 6: mod_base = OTHER; note = 2'-deoxy-2'-fluorouridine-3'-phosphate
  modified_base 7: mod_base = OTHER; note = 2'-O-methyluridine-3'-phosphate
  modified_base 8: mod_base = OTHER; note = 2'-O-methyluridine-3'-phosphate
  modified_base 9: mod_base = OTHER; note = 2'-O-methyluridine-3'-phosphate
  modified_base 10: mod_base = OTHER; note = 2'-O-methylcytidine-3'-phosphate
  modified_base 11: mod_base = OTHER; note = 2'-O-methyladenosine-3'-phosphate
  modified_base 12: mod_base = OTHER; note = 2'-O-methylcytidine-3'-phosphate
  modified_base 13: mod_base = OTHER; note = 2'-O-methyluridine-3'-phosphate
  modified_base 14: mod_base = OTHER; note = 2'-deoxy-2'-fluoroadenosine-3'-phosphate
  modified_base 15: mod_base = OTHER; note = 2'-O-methyladenosine-3'-phosphate
  modified_base 16: mod_base = OTHER; note = 2'-deoxy-2'-fluoroguanosine-3'-phosphate
  modified_base 17: mod_base = OTHER; note = 2'-O-methyladenosine-3'-phosphate
  modified_base 18: mod_base = OTHER; note = 2'-O-methyluridine-3'-phosphate
  modified_base 19: mod_base = OTHER; note = 2'-O-methyladenosine-3'-phosphate
  modified_base 20: mod_base = OTHER; note = 2'-O-methyluridine-3'-phosphate
  modified_base 21: mod_base = OTHER; note = 2'-O-methyluridine-3'-phosphate
  modified_base 22: mod_base = OTHER; note = 2'-O-methylcytidine-3'-phosphate
  modified_base 23: mod_base = OTHER; note = 2'-O-methyluridine
tcactttttcactaagatattct

SEQ ID NO: 4783 - RNA, 23 nt, synthetic construct
  source 1..23: mol_type = other RNA
  modified_base 1: mod_base = OTHER; note = 2'-O-methyluridine-3'-phosphate 5'-(E)-Vinylphosphonate
  modified_base 2: mod_base = OTHER; note = 2'-deoxy-2'-fluoroadenosine-3'-phosphate
  modified_base 3: mod_base = OTHER; note = 2'-O-methylcytidine-3'-phosphate
  modified_base 4: mod_base = OTHER; note = 2'-O-methyladenosine-3'-phosphate
  modified_base 5: mod_base = OTHER; note = 2'-O-methylcytidine-3'-phosphate
  modified_base 6: mod_base = OTHER; note = 2'-deoxy-2'-fluorouridine-3'-phosphate
  modified_base 7: mod_base = OTHER; note = 2'-O-methyluridine-3'-phosphate
  modified_base 8: mod_base = OTHER; note = 2'-O-methyluridine-3'-phosphate
  modified_base 9: mod_base = OTHER; note = 2'-O-methyluridine-3'-phosphate
  modified_base 10: mod_base = OTHER; note = 2'-O-methyluridine-3'-phosphate
  modified_base 11: mod_base = OTHER; note = 2'-O-methylcytidine-3'-phosphate
  modified_base 12: mod_base = OTHER; note = 2'-O-methyladenosine-3'-phosphate
  modified_base 13: mod_base = OTHER; note = 2'-O-methylcytidine-3'-phosphate
  modified_base 14: mod_base = OTHER; note = 2'-deoxy-2'-fluorouridine-3'-phosphate
  modified_base 15: mod_base = OTHER; note = 2'-O-methyladenosine-3'-phosphate
  modified_base 16: mod_base = OTHER; note = 2'-deoxy-2'-fluoroadenosine-3'-phosphate
  modified_base 17: mod_base = OTHER; note = 2'-O-methylguanosine-3'-phosphate
  modified_base 18: mod_base = OTHER; note = 2'-O-methyladenosine-3'-phosphate
  modified_base 19: mod_base = OTHER; note = 2'-O-methyluridine-3'-phosphate
  modified_base 20: mod_base = OTHER; note = 2'-O-methyladenosine-3'-phosphate
  modified_base 21: mod_base = OTHER; note = 2'-O-methyluridine-3'-phosphate
  modified_base 22: mod_base = OTHER; note = 2'-O-methyluridine-3'-phosphate
  modified_base 23: mod_base = OTHER; note = 2'-O-methylcytidine
tacactttttcactaagatattc

SEQ ID NO: 4784 - RNA, 23 nt, synthetic construct
  source 1..23: mol_type = other RNA
  modified_base 1: mod_base = OTHER; note = 2'-O-methyluridine-3'-phosphate 5'-(E)-Vinylphosphonate
  modified_base 2: mod_base = OTHER; note = 2'-deoxy-2'-fluorocytidine-3'-phosphate
  modified_base 3: mod_base = OTHER; note = 2'-O-methyladenosine-3'-phosphate
  modified_base 4: mod_base = OTHER; note = 2'-O-methylcytidine-3'-phosphate
  modified_base 5: mod_base = OTHER; note = 2'-O-methyladenosine-3'-phosphate
  modified_base 6: mod_base = OTHER; note = 2'-deoxy-2'-fluorocytidine-3'-phosphate
  modified_base 7: mod_base = OTHER; note = 2'-O-methyluridine-3'-phosphate
  modified_base 8: mod_base = OTHER; note = 2'-O-methyluridine-3'-phosphate
  modified_base 9: mod_base = OTHER; note = 2'-O-methyluridine-3'-phosphate
  modified_base 10: mod_base = OTHER; note = 2'-O-methyluridine-3'-phosphate
  modified_base 11: mod_base = OTHER; note = 2'-O-methyluridine-3'-phosphate
  modified_base 12: mod_base = OTHER; note = 2'-O-methylcytidine-3'-phosphate
  modified_base 13: mod_base = OTHER; note = 2'-O-methyladenosine-3'-phosphate
  modified_base 14: mod_base = OTHER; note = 2'-deoxy-2'-fluorocytidine-3'-phosphate
  modified_base 15: mod_base = OTHER; note = 2'-O-methyluridine-3'-phosphate
  modified_base 16: mod_base = OTHER; note = 2'-deoxy-2'-fluoroadenosine-3'-phosphate
  modified_base 17: mod_base = OTHER; note = 2'-O-methyladenosine-3'-phosphate
  modified_base 18: mod_base = OTHER; note = 2'-O-methylguanosine-3'-phosphate
  modified_base 19: mod_base = OTHER; note = 2'-O-methyladenosine-3'-phosphate
  modified_base 20: mod_base = OTHER; note = 2'-O-methyluridine-3'-phosphate
  modified_base 21: mod_base = OTHER; note = 2'-O-methyladenosine-3'-phosphate
  modified_base 22: mod_base = OTHER; note = 2'-O-methyluridine-3'-phosphate
  modified_base 23: mod_base = OTHER; note = 2'-O-methyluridine
tcacactttttcactaagatatt

SEQ ID NO: 4785 - RNA, 23 nt, synthetic construct
  source 1..23: mol_type = other RNA
  modified_base 1: mod_base = OTHER; note = 2'-O-methyluridine-3'-phosphate 5'-(E)-Vinylphosphonate
  modified_base 2: mod_base = OTHER; note = 2'-deoxy-2'-fluorouridine-3'-phosphate
  modified_base 3: mod_base = OTHER; note = 2'-O-methylcytidine-3'-phosphate
  modified_base 4: mod_base = OTHER; note = 2'-O-methyladenosine-3'-phosphate
  modified_base 5: mod_base = OTHER; note = 2'-O-methylcytidine-3'-phosphate
  modified_base 6: mod_base = OTHER; note = 2'-deoxy-2'-fluoroadenosine-3'-phosphate
  modified_base 7: mod_base = OTHER; note = 2'-O-methylcytidine-3'-phosphate
  modified_base 8: mod_base = OTHER; note = 2'-O-methyluridine-3'-phosphate
  modified_base 9: mod_base = OTHER; note = 2'-O-methyluridine-3'-phosphate
  modified_base 10: mod_base = OTHER; note = 2'-O-methyluridine-3'-phosphate
  modified_base 11: mod_base = OTHER; note = 2'-O-methyluridine-3'-phosphate
  modified_base 12: mod_base = OTHER; note = 2'-O-methyluridine-3'-phosphate
  modified_base 13: mod_base = OTHER; note = 2'-O-methylcytidine-3'-phosphate
  modified_base 14: mod_base = OTHER; note = 2'-deoxy-2'-fluoroadenosine-3'-phosphate
  modified_base 15: mod_base = OTHER; note = 2'-O-methylcytidine-3'-phosphate
  modified_base 16: mod_base = OTHER; note = 2'-deoxy-2'-fluorouridine-3'-phosphate
  modified_base 17: mod_base = OTHER; note = 2'-O-methyladenosine-3'-phosphate
  modified_base 18: mod_base = OTHER; note = 2'-O-methyladenosine-3'-phosphate
  modified_base 19: mod_base = OTHER; note = 2'-O-methylguanosine-3'-phosphate
  modified_base 20: mod_base = OTHER; note = 2'-O-methyladenosine-3'-phosphate
  modified_base 21: mod_base = OTHER; note = 2'-O-methyluridine-3'-phosphate
  modified_base 22: mod_base = OTHER; note = 2'-O-methyladenosine-3'-phosphate
  modified_base 23: mod_base = OTHER; note = 2'-O-methyluridine
ttcacactttttcactaagatat

SEQ ID NO: 4786 - RNA, 23 nt, synthetic construct
  source 1..23: mol_type = other RNA
  modified_base 1: mod_base = OTHER; note = 2'-O-methyluridine-3'-phosphate 5'-(E)-Vinylphosphonate
  modified_base 2: mod_base = OTHER; note = 2'-deoxy-2'-fluorouridine-3'-phosphate
  modified_base 3: mod_base = OTHER; note = 2'-O-methyluridine-3'-phosphate
  modified_base 4: mod_base = OTHER; note = 2'-O-methylcytidine-3'-phosphate
  modified_base 5: mod_base = OTHER; note = 2'-O-methyladenosine-3'-phosphate
  modified_base 6: mod_base = OTHER; note = 2'-deoxy-2'-fluorocytidine-3'-phosphate
  modified_base 7: mod_base = OTHER; note = 2'-O-methyladenosine-3'-phosphate
  modified_base 8: mod_base = OTHER; note = 2'-O-methylcytidine-3'-phosphate
  modified_base 9: mod_base = OTHER; note = 2'-O-methyluridine-3'-phosphate
  modified_base 10: mod_base = OTHER; note = 2'-O-methyluridine-3'-phosphate
  modified_base 11: mod_base = OTHER; note = 2'-O-methyluridine-3'-phosphate
  modified_base 12: mod_base = OTHER; note = 2'-O-methyluridine-3'-phosphate
  modified_base 13: mod_base = OTHER; note = 2'-O-methyluridine-3'-phosphate
  modified_base 14: mod_base = OTHER; note = 2'-deoxy-2'-fluorocytidine-3'-phosphate
  modified_base 15: mod_base = OTHER; note = 2'-O-methyladenosine-3'-phosphate
  modified_base 16: mod_base = OTHER; note = 2'-deoxy-2'-fluorocytidine-3'-phosphate
  modified_base 17: mod_base = OTHER; note = 2'-O-methyluridine-3'-phosphate
  modified_base 18: mod_base = OTHER; note = 2'-O-methyladenosine-3'-phosphate
  modified_base 19: mod_base = OTHER; note = 2'-O-methyladenosine-3'-phosphate
  modified_base 20: mod_base = OTHER; note = 2'-O-methylguanosine-3'-phosphate
  modified_base 21: mod_base = OTHER; note = 2'-O-methyladenosine-3'-phosphate
  modified_base 22: mod_base = OTHER; note = 2'-O-methyluridine-3'-phosphate
  modified_base 23: mod_base = OTHER; note = 2'-O-methyladenosine
tttcacactttttcactaagata

SEQ ID NO: 4787 - RNA, 23 nt, synthetic construct
  source 1..23: mol_type = other RNA
  modified_base 1: mod_base = OTHER; note = 2'-O-methyluridine-3'-phosphate 5'-(E)-Vinylphosphonate
  modified_base 2: mod_base = OTHER; note = 2'-deoxy-2'-fluorouridine-3'-phosphate
  modified_base 3: mod_base = OTHER; note = 2'-O-methyluridine-3'-phosphate
  modified_base 4: mod_base = OTHER; note = 2'-O-methyluridine-3'-phosphate
  modified_base 5: mod_base = OTHER; note = 2'-O-methylcytidine-3'-phosphate
  modified_base 6: mod_base = OTHER; note = 2'-deoxy-2'-fluoroadenosine-3'-phosphate
  modified_base 7: mod_base = OTHER; note = 2'-O-methylcytidine-3'-phosphate
  modified_base 8: mod_base = OTHER; note = 2'-O-methyladenosine-3'-phosphate
  modified_base 9: mod_base = OTHER; note = 2'-O-methylcytidine-3'-phosphate
  modified_base 10: mod_base = OTHER; note = 2'-O-methyluridine-3'-phosphate
  modified_base 11: mod_base = OTHER; note = 2'-O-methyluridine-3'-phosphate
  modified_base 12: mod_base = OTHER; note = 2'-O-methyluridine-3'-phosphate
  modified_base 13: mod_base = OTHER; note = 2'-O-methyluridine-3'-phosphate
  modified_base 14: mod_base = OTHER; note = 2'-deoxy-2'-fluorouridine-3'-phosphate
  modified_base 15: mod_base = OTHER; note = 2'-O-methylcytidine-3'-phosphate
  modified_base 16: mod_base = OTHER; note = 2'-deoxy-2'-fluoroadenosine-3'-phosphate
  modified_base 17: mod_base = OTHER; note = 2'-O-methylcytidine-3'-phosphate
  modified_base 18: mod_base = OTHER; note = 2'-O-methyluridine-3'-phosphate
  modified_base 19: mod_base = OTHER; note = 2'-O-methyladenosine-3'-phosphate
  modified_base 20: mod_base = OTHER; note = 2'-O-methyladenosine-3'-phosphate
  modified_base 21: mod_base = OTHER; note = 2'-O-methylguanosine-3'-phosphate
  modified_base 22: mod_base = OTHER; note = 2'-O-methyladenosine-3'-phosphate
  modified_base 23: mod_base = OTHER; note = 2'-O-methyluridine
ttttcacactttttcactaagat

SEQ ID NO: 4788 - RNA, 23 nt, synthetic construct
  source 1..23: mol_type = other RNA
  modified_base 1: mod_base = OTHER; note = 2'-O-methyluridine-3'-phosphate 5'-(E)-Vinylphosphonate
  modified_base 2: mod_base = OTHER; note = 2'-deoxy-2'-fluoroguanosine-3'-phosphate
  modified_base 3: mod_base = OTHER; note = 2'-O-methyluridine-3'-phosphate
  modified_base 4: mod_base = OTHER; note = 2'-O-methyluridine-3'-phosphate
  modified_base 5: mod_base = OTHER; note = 2'-O-methyluridine-3'-phosphate
  modified_base 6: mod_base = OTHER; note = 2'-deoxy-2'-fluorocytidine-3'-phosphate
  modified_base 7: mod_base = OTHER; note = 2'-O-methyladenosine-3'-phosphate
  modified_base 8: mod_base = OTHER; note = 2'-O-methylcytidine-3'-phosphate
  modified_base 9: mod_base = OTHER; note = 2'-O-methyladenosine-3'-phosphate
  modified_base 10: mod_base = OTHER; note = 2'-O-methylcytidine-3'-phosphate
  modified_base 11: mod_base = OTHER; note = 2'-O-methyluridine-3'-phosphate
  modified_base 12: mod_base = OTHER; note = 2'-O-methyluridine-3'-phosphate
  modified_base 13: mod_base = OTHER; note = 2'-O-methyluridine-3'-phosphate
  modified_base 14: mod_base = OTHER; note = 2'-deoxy-2'-fluorouridine-3'-phosphate
  modified_base 15: mod_base = OTHER; note = 2'-O-methyluridine-3'-phosphate
  modified_base 16: mod_base = OTHER; note = 2'-deoxy-2'-fluorocytidine-3'-phosphate
  modified_base 17: mod_base = OTHER; note = 2'-O-methyladenosine-3'-phosphate
  modified_base 18: mod_base = OTHER; note = 2'-O-methylcytidine-3'-phosphate
  modified_base 19: mod_base = OTHER; note = 2'-O-methyluridine-3'-phosphate
  modified_base 20: mod_base = OTHER; note = 2'-O-methyladenosine-3'-phosphate
  modified_base 21: mod_base = OTHER; note = 2'-O-methyladenosine-3'-phosphate
  modified_base 22: mod_base = OTHER; note = 2'-O-methylguanosine-3'-phosphate
  modified_base 23: mod_base = OTHER; note = 2'-O-methyladenosine
tgtttcacactttttcactaaga

SEQ ID NO: 4789 - RNA, 23 nt, synthetic construct
  source 1..23: mol_type = other RNA
  modified_base 1: mod_base = OTHER; note = 2'-O-methyluridine-3'-phosphate 5'-(E)-Vinylphosphonate
  modified_base 2: mod_base = OTHER; note = 2'-deoxy-2'-fluoroadenosine-3'-phosphate
  modified_base 3: mod_base = OTHER; note = 2'-O-methylguanosine-3'-phosphate
  modified_base 4: mod_base = OTHER; note = 2'-O-methyluridine-3'-phosphate
  modified_base 5: mod_base = OTHER; note = 2'-O-methyluridine-3'-phosphate
  modified_base 6: mod_base = OTHER; note = 2'-deoxy-2'-fluorouridine-3'-phosphate
  modified_base 7: mod_base = OTHER; note = 2'-O-methylcytidine-3'-phosphate
  modified_base 8: mod_base = OTHER; note = 2'-O-methyladenosine-3'-phosphate
  modified_base 9: mod_base = OTHER; note = 2'-O-methylcytidine-3'-phosphate
  modified_base 10: mod_base = OTHER; note = 2'-O-methyladenosine-3'-phosphate
  modified_base 11: mod_base = OTHER; note = 2'-O-methylcytidine-3'-phosphate
  modified_base 12: mod_base = OTHER; note = 2'-O-methyluridine-3'-phosphate
  modified_base 13: mod_base = OTHER; note = 2'-O-methyluridine-3'-phosphate
  modified_base 14: mod_base = OTHER; note = 2'-deoxy-2'-fluorouridine-3'-phosphate
  modified_base 15: mod_base = OTHER; note = 2'-O-methyluridine-3'-phosphate
  modified_base 16: mod_base = OTHER; note = 2'-deoxy-2'-fluorouridine-3'-phosphate
  modified_base 17: mod_base = OTHER; note = 2'-O-methylcytidine-3'-phosphate
  modified_base 18: mod_base = OTHER; note = 2'-O-methyladenosine-3'-phosphate
  modified_base 19: mod_base = OTHER; note = 2'-O-methylcytidine-3'-phosphate
  modified_base 20: mod_base = OTHER; note = 2'-O-methyluridine-3'-phosphate
  modified_base 21: mod_base = OTHER; note = 2'-O-methyladenosine-3'-phosphate
  modified_base 22: mod_base = OTHER; note = 2'-O-methyladenosine-3'-phosphate
  modified_base 23: mod_base = OTHER; note = 2'-O-methylguanosine
tagtttcacactttttcactaag

SEQ ID NO: 4790 - RNA, 23 nt, synthetic construct
  source 1..23: mol_type = other RNA
  modified_base 1: mod_base = OTHER; note = 2'-O-methyluridine-3'-phosphate 5'-(E)-Vinylphosphonate
  modified_base 2: mod_base = OTHER; note = 2'-deoxy-2'-fluoroadenosine-3'-phosphate
  modified_base 3: mod_base = OTHER; note = 2'-O-methyladenosine-3'-phosphate
  modified_base 4: mod_base = OTHER; note = 2'-O-methylguanosine-3'-phosphate
  modified_base 5: mod_base = OTHER; note = 2'-O-methyluridine-3'-phosphate
  modified_base 6: mod_base = OTHER; note = 2'-deoxy-2'-fluorouridine-3'-phosphate
  modified_base 7: mod_base = OTHER; note = 2'-O-methyluridine-3'-phosphate
  modified_base 8: mod_base = OTHER; note = 2'-O-methylcytidine-3'-phosphate
  modified_base 9: mod_base = OTHER; note = 2'-O-methyladenosine-3'-phosphate
  modified_base 10: mod_base = OTHER; note = 2'-O-methylcytidine-3'-phosphate
  modified_base 11: mod_base = OTHER; note = 2'-O-methyladenosine-3'-phosphate
  modified_base 12: mod_base = OTHER; note = 2'-O-methylcytidine-3'-phosphate
  modified_base 13: mod_base = OTHER; note = 2'-O-methyluridine-3'-phosphate
  modified_base 14: mod_base = OTHER; note = 2'-deoxy-2'-fluorouridine-3'-phosphate
  modified_base 15: mod_base = OTHER; note = 2'-O-methyluridine-3'-phosphate
  modified_base 16: mod_base = OTHER; note = 2'-deoxy-2'-fluorouridine-3'-phosphate
  modified_base 17: mod_base = OTHER; note = 2'-O-methyluridine-3'-phosphate
  modified_base 18: mod_base = OTHER; note = 2'-O-methylcytidine-3'-phosphate
  modified_base 19: mod_base = OTHER; note = 2'-O-methyladenosine-3'-phosphate
  modified_base 20: mod_base = OTHER; note = 2'-O-methylcytidine-3'-phosphate
  modified_base 21: mod_base = OTHER; note = 2'-O-methyluridine-3'-phosphate
  modified_base 22: mod_base = OTHER; note = 2'-O-methyladenosine-3'-phosphate
  modified_base 23: mod_base = OTHER; note = 2'-O-methyladenosine
taagtttcacactttttcactaa

SEQ ID NO: 4791 - RNA, 23 nt, synthetic construct
  source 1..23: mol_type = other RNA
  modified_base 1: mod_base = OTHER; note = 2'-O-methyluridine-3'-phosphate 5'-(E)-Vinylphosphonate
  modified_base 2: mod_base = OTHER; note = 2'-deoxy-2'-fluorocytidine-3'-phosphate
  modified_base 3: mod_base = OTHER; note = 2'-O-methyladenosine-3'-phosphate
  modified_base 4: mod_base = OTHER; note = 2'-O-methyladenosine-3'-phosphate
  modified_base 5: mod_base = OTHER; note = 2'-O-methylguanosine-3'-phosphate
  modified_base 6: mod_base = OTHER; note = 2'-deoxy-2'-fluorouridine-3'-phosphate
  modified_base 7: mod_base = OTHER; note = 2'-O-methyluridine-3'-phosphate
  modified_base 8: mod_base = OTHER; note = 2'-O-methyluridine-3'-phosphate
  modified_base 9: mod_base = OTHER; note = 2'-O-methylcytidine-3'-phosphate
  modified_base 10: mod_base = OTHER; note = 2'-O-methyladenosine-3'-phosphate
  modified_base 11: mod_base = OTHER; note = 2'-O-methylcytidine-3'-phosphate
  modified_base 12: mod_base = OTHER; note = 2'-O-methyladenosine-3'-phosphate
  modified_base 13: mod_base = OTHER; note = 2'-O-methylcytidine-3'-phosphate
  modified_base 14: mod_base = OTHER; note = 2'-deoxy-2'-fluorouridine-3'-phosphate
  modified_base 15: mod_base = OTHER; note = 2'-O-methyluridine-3'-phosphate
  modified_base 16: mod_base = OTHER; note = 2'-deoxy-2'-fluorouridine-3'-phosphate
  modified_base 17: mod_base = OTHER; note = 2'-O-methyluridine-3'-phosphate
  modified_base 18: mod_base = OTHER; note = 2'-O-methyluridine-3'-phosphate
  modified_base 19: mod_base = OTHER; note = 2'-O-methylcytidine-3'-phosphate
  modified_base 20: mod_base = OTHER; note = 2'-O-methyladenosine-3'-phosphate
  modified_base 21: mod_base = OTHER; note = 2'-O-methylcytidine-3'-phosphate
  modified_base 22: mod_base = OTHER; note = 2'-O-methyluridine-3'-phosphate
  modified_base 23: mod_base = OTHER; note = 2'-O-methyladenosine
tcaagtttcacactttttcacta

SEQ ID NO: 4792 - RNA, 23 nt, synthetic construct
  source 1..23: mol_type = other RNA
  modified_base 1: mod_base = OTHER; note = 2'-O-methyluridine-3'-phosphate 5'-(E)-Vinylphosphonate
  modified_base 2: mod_base = OTHER; note = 2'-deoxy-2'-fluoroadenosine-3'-phosphate
  modified_base 3: mod_base = OTHER; note = 2'-O-methylcytidine-3'-phosphate
  modified_base 4: mod_base = OTHER; note = 2'-O-methyladenosine-3'-phosphate
  modified_base 5: mod_base = OTHER; note = 2'-O-methyladenosine-3'-phosphate
  modified_base 6: mod_base = OTHER; note = 2'-deoxy-2'-fluoroguanosine-3'-phosphate
  modified_base 7: mod_base = OTHER; note = 2'-O-methyluridine-3'-phosphate
  modified_base 8: mod_base = OTHER; note = 2'-O-methyluridine-3'-phosphate
  modified_base 9: mod_base = OTHER; note = 2'-O-methyluridine-3'-phosphate
  modified_base 10: mod_base = OTHER; note = 2'-O-methylcytidine-3'-phosphate
  modified_base 11: mod_base = OTHER; note = 2'-O-methyladenosine-3'-phosphate
  modified_base 12: mod_base = OTHER; note = 2'-O-methylcytidine-3'-phosphate
  modified_base 13: mod_base = OTHER; note = 2'-O-methyladenosine-3'-phosphate
  modified_base 14: mod_base = OTHER; note = 2'-deoxy-2'-fluorocytidine-3'-phosphate
  modified_base 15: mod_base = OTHER; note = 2'-O-methyluridine-3'-phosphate
  modified_base 16: mod_base = OTHER; note = 2'-deoxy-2'-fluorouridine-3'-phosphate
  modified_base 17: mod_base = OTHER; note = 2'-O-methyluridine-3'-phosphate
  modified_base 18: mod_base = OTHER; note = 2'-O-methyluridine-3'-phosphate
  modified_base 19: mod_base = OTHER; note = 2'-O-methyluridine-3'-phosphate
  modified_base 20: mod_base = OTHER; note = 2'-O-methylcytidine-3'-phosphate
  modified_base 21: mod_base = OTHER; note = 2'-O-methyladenosine-3'-phosphate
  modified_base 22: mod_base = OTHER; note = 2'-O-methylcytidine-3'-phosphate
  modified_base 23: mod_base = OTHER; note = 2'-O-methyluridine
tacaagtttcacactttttcact

SEQ ID NO: 4793 - RNA, 23 nt, synthetic construct
  source 1..23: mol_type = other RNA
  modified_base 1: mod_base = OTHER; note = 2'-O-methyluridine-3'-phosphate 5'-(E)-Vinylphosphonate
  modified_base 2: mod_base = OTHER; note = 2'-deoxy-2'-fluorocytidine-3'-phosphate
  modified_base 3: mod_base = OTHER; note = 2'-O-methyladenosine-3'-phosphate
  modified_base 4: mod_base = OTHER; note = 2'-O-methylcytidine-3'-phosphate
  modified_base 5: mod_base = OTHER; note = 2'-O-methyladenosine-3'-phosphate
  modified_base 6: mod_base = OTHER; note = 2'-deoxy-2'-fluoroadenosine-3'-phosphate
  modified_base 7: mod_base = OTHER; note = 2'-O-methylguanosine-3'-phosphate
  modified_base 8: mod_base = OTHER; note = 2'-O-methyluridine-3'-phosphate
  modified_base 9: mod_base = OTHER; note = 2'-O-methyluridine-3'-phosphate
  modified_base 10: mod_base = OTHER; note = 2'-O-methyluridine-3'-phosphate
  modified_base 11: mod_base = OTHER; note = 2'-O-methylcytidine-3'-phosphate
  modified_base 12: mod_base = OTHER; note = 2'-O-methyladenosine-3'-phosphate
  modified_base 13: mod_base = OTHER; note = 2'-O-methylcytidine-3'-phosphate
  modified_base 14: mod_base = OTHER; note = 2'-deoxy-2'-fluoroadenosine-3'-phosphate
  modified_base 15: mod_base = OTHER; note = 2'-O-methylcytidine-3'-phosphate
  modified_base 16: mod_base = OTHER; note = 2'-deoxy-2'-fluorouridine-3'-phosphate
  modified_base 17: mod_base = OTHER; note = 2'-O-methyluridine-3'-phosphate
  modified_base 18: mod_base = OTHER; note = 2'-O-methyluridine-3'-phosphate
  modified_base 19: mod_base = OTHER; note = 2'-O-methyluridine-3'-phosphate
  modified_base 20: mod_base = OTHER; note = 2'-O-methyluridine-3'-phosphate
  modified_base 21: mod_base = OTHER; note = 2'-O-methylcytidine-3'-phosphate
  modified_base 22: mod_base = OTHER; note = 2'-O-methyladenosine-3'-phosphate
  modified_base 23: mod_base = OTHER; note = 2'-O-methylcytidine
tcacaagtttcacactttttcac

SEQ ID NO: 4794 - RNA, 23 nt, synthetic construct
  source 1..23: mol_type = other RNA
  modified_base 1: mod_base = OTHER; note = 2'-O-methyluridine-3'-phosphate 5'-(E)-Vinylphosphonate
  modified_base 2: mod_base = OTHER; note = 2'-deoxy-2'-fluoroguanosine-3'-phosphate
  modified_base 3: mod_base = OTHER; note = 2'-O-methylcytidine-3'-phosphate
  modified_base 4: mod_base = OTHER; note = 2'-O-methyladenosine-3'-phosphate
  modified_base 5: mod_base = OTHER; note = 2'-O-methylcytidine-3'-phosphate
  modified_base 6: mod_base = OTHER; note = 2'-deoxy-2'-fluoroadenosine-3'-phosphate
  modified_base 7: mod_base = OTHER; note = 2'-O-methyladenosine-3'-phosphate
  modified_base 8: mod_base = OTHER; note = 2'-O-methylguanosine-3'-phosphate
  modified_base 9: mod_base = OTHER; note = 2'-O-methyluridine-3'-phosphate
  modified_base 10: mod_base = OTHER; note = 2'-O-methyluridine-3'-phosphate
  modified_base 11: mod_base = OTHER; note = 2'-O-methyluridine-3'-phosphate
  modified_base 12: mod_base = OTHER; note = 2'-O-methylcytidine-3'-phosphate
  modified_base 13: mod_base = OTHER; note = 2'-O-methyladenosine-3'-phosphate
  modified_base 14: mod_base = OTHER; note = 2'-deoxy-2'-fluorocytidine-3'-phosphate
  modified_base 15: mod_base = OTHER; note = 2'-O-methyladenosine-3'-phosphate
  modified_base 16: mod_base = OTHER; note = 2'-deoxy-2'-fluorocytidine-3'-phosphate
  modified_base 17: mod_base = OTHER; note = 2'-O-methyluridine-3'-phosphate
  modified_base 18: mod_base = OTHER; note = 2'-O-methyluridine-3'-phosphate
  modified_base 19: mod_base = OTHER; note = 2'-O-methyluridine-3'-phosphate
  modified_base 20: mod_base = OTHER; note = 2'-O-methyluridine-3'-phosphate
  modified_base 21: mod_base = OTHER; note = 2'-O-methyluridine-3'-phosphate
  modified_base 22: mod_base = OTHER; note = 2'-O-methylcytidine-3'-phosphate
  modified_base 23: mod_base = OTHER; note = 2'-O-methyladenosine
tgcacaagtttcacactttttca

SEQ ID NO: 4795 - RNA, 23 nt, synthetic construct
  source 1..23: mol_type = other RNA
  modified_base 1: mod_base = OTHER; note = 2'-O-methyluridine-3'-phosphate 5'-(E)-Vinylphosphonate
  modified_base 2: mod_base = OTHER; note = 2'-deoxy-2'-fluoroguanosine-3'-phosphate
  modified_base 3: mod_base = OTHER; note = 2'-O-methylguanosine-3'-phosphate
  modified_base 4: mod_base = OTHER; note = 2'-O-methylcytidine-3'-phosphate
  modified_base 5: mod_base = OTHER; note = 2'-O-methyladenosine-3'-phosphate
  modified_base 6: mod_base = OTHER; note = 2'-deoxy-2'-fluorocytidine-3'-phosphate
  modified_base 7: mod_base = OTHER; note = 2'-O-methyladenosine-3'-phosphate
  modified_base 8: mod_base = OTHER; note = 2'-O-methyladenosine-3'-phosphate
  modified_base 9: mod_base = OTHER; note = 2'-O-methylguanosine-3'-phosphate
  modified_base 10: mod_base = OTHER; note = 2'-O-methyluridine-3'-phosphate
  modified_base 11: mod_base = OTHER; note = 2'-O-methyluridine-3'-phosphate
  modified_base 12: mod_base = OTHER; note = 2'-O-methyluridine-3'-phosphate
  modified_base 13: mod_base = OTHER; note = 2'-O-methylcytidine-3'-phosphate
  modified_base 14: mod_base = OTHER; note = 2'-deoxy-2'-fluoroadenosine-3'-phosphate
  modified_base 15: mod_base = OTHER; note = 2'-O-methylcytidine-3'-phosphate
  modified_base 16: mod_base = OTHER; note = 2'-deoxy-2'-fluoroadenosine-3'-phosphate
  modified_base 17: mod_base = OTHER; note = 2'-O-methylcytidine-3'-phosphate
  modified_base 18: mod_base = OTHER; note = 2'-O-methyluridine-3'-phosphate
  modified_base 19: mod_base = OTHER; note = 2'-O-methyluridine-3'-phosphate
  modified_base 20: mod_base = OTHER; note = 2'-O-methyluridine-3'-phosphate
  modified_base 21: mod_base = OTHER; note = 2'-O-methyluridine-3'-phosphate
  modified_base 22: mod_base = OTHER; note = 2'-O-methyluridine-3'-phosphate
  modified_base 23: mod_base = OTHER; note = 2'-O-methylcytidine
tggcacaagtttcacactttttc

SEQ ID NO: 4796 - RNA, 23 nt, synthetic construct
  source 1..23: mol_type = other RNA
  modified_base 1: mod_base = OTHER; note = 2'-O-methyluridine-3'-phosphate 5'-(E)-Vinylphosphonate
  modified_base 2: mod_base = OTHER; note = 2'-deoxy-2'-fluoroadenosine-3'-phosphate
  modified_base 3: mod_base = OTHER; note = 2'-O-methyluridine-3'-phosphate
  modified_base 4: mod_base = OTHER; note = 2'-O-methylguanosine-3'-phosphate
  modified_base 5: mod_base = OTHER; note = 2'-O-methylguanosine-3'-phosphate
  modified_base 6: mod_base = OTHER; note = 2'-deoxy-2'-fluorocytidine-3'-phosphate
  modified_base 7: mod_base = OTHER; note = 2'-O-methyladenosine-3'-phosphate
  modified_base 8: mod_base = OTHER; note = 2'-O-methylcytidine-3'-phosphate
  modified_base 9: mod_base = OTHER; note = 2'-O-methyladenosine-3'-phosphate
  modified_base 10: mod_base = OTHER; note = 2'-O-methyladenosine-3'-phosphate
  modified_base 11: mod_base = OTHER; note = 2'-O-methylguanosine-3'-phosphate
  modified_base 12: mod_base = OTHER; note = 2'-O-methyluridine-3'-phosphate
  modified_base 13: mod_base = OTHER; note = 2'-O-methyluridine-3'-phosphate
  modified_base 14: mod_base = OTHER; note = 2'-deoxy-2'-fluorouridine-3'-phosphate
  modified_base 15: mod_base = OTHER; note = 2'-O-methylcytidine-3'-phosphate
  modified_base 16: mod_base = OTHER; note = 2'-deoxy-2'-fluoroadenosine-3'-phosphate
  modified_base 17: mod_base = OTHER; note = 2'-O-methylcytidine-3'-phosphate
  modified_base 18: mod_base = OTHER; note = 2'-O-methyladenosine-3'-phosphate
  modified_base 19: mod_base = OTHER; note = 2'-O-methylcytidine-3'-phosphate
  modified_base 20: mod_base = OTHER; note = 2'-O-methyluridine-3'-phosphate
  modified_base 21: mod_base = OTHER; note = 2'-O-methyluridine-3'-phosphate
  modified_base 22: mod_base = OTHER; note = 2'-O-methyluridine-3'-phosphate
  modified_base 23: mod_base = OTHER; note = 2'-O-methyluridine
tatggcacaagtttcacactttt

SEQ ID NO: 4797 - RNA, 23 nt, synthetic construct
  source 1..23: mol_type = other RNA
  modified_base 1: mod_base = OTHER; note = 2'-O-methyluridine-3'-phosphate 5'-(E)-Vinylphosphonate
  modified_base 2: mod_base = OTHER; note = 2'-deoxy-2'-fluorouridine-3'-phosphate
  modified_base 3: mod_base = OTHER; note = 2'-O-methyladenosine-3'-phosphate
  modified_base 4: mod_base = OTHER; note = 2'-O-methyluridine-3'-phosphate
  modified_base 5: mod_base = OTHER; note = 2'-O-methylguanosine-3'-phosphate
  modified_base 6: mod_base = OTHER; note = 2'-deoxy-2'-fluoroguanosine-3'-phosphate
  modified_base 7: mod_base = OTHER; note = 2'-O-methylcytidine-3'-phosphate
  modified_base 8: mod_base = OTHER; note = 2'-O-methyladenosine-3'-phosphate
  modified_base 9: mod_base = OTHER; note = 2'-O-methylcytidine-3'-phosphate
  modified_base 10: mod_base = OTHER; note = 2'-O-methyladenosine-3'-phosphate
  modified_base 11: mod_base = OTHER; note = 2'-O-methyladenosine-3'-phosphate
  modified_base 12: mod_base = OTHER; note = 2'-O-methylguanosine-3'-phosphate
  modified_base 13: mod_base = OTHER; note = 2'-O-methyluridine-3'-phosphate
  modified_base 14: mod_base = OTHER; note = 2'-deoxy-2'-fluorouridine-3'-phosphate
  modified_base 15: mod_base = OTHER; note = 2'-O-methyluridine-3'-phosphate
  modified_base 16: mod_base = OTHER; note = 2'-deoxy-2'-fluorocytidine-3'-phosphate
  modified_base 17: mod_base = OTHER; note = 2'-O-methyladenosine-3'-phosphate
  modified_base 18: mod_base = OTHER; note = 2'-O-methylcytidine-3'-phosphate
  modified_base 19: mod_base = OTHER; note = 2'-O-methyladenosine-3'-phosphate
  modified_base 20: mod_base = OTHER; note = 2'-O-methylcytidine-3'-phosphate
  modified_base 21: mod_base = OTHER; note = 2'-O-methyluridine-3'-phosphate
  modified_base 22: mod_base = OTHER; note = 2'-O-methyluridine-3'-phosphate
  modified_base 23: mod_base = OTHER; note = 2'-O-methyluridine
ttatggcacaagtttcacacttt

SEQ ID NO: 4798 - RNA, 23 nt, synthetic construct
  source 1..23: mol_type = other RNA
  modified_base 1: mod_base = OTHER; note = 2'-O-methyluridine-3'-phosphate 5'-(E)-Vinylphosphonate
  modified_base 2: mod_base = OTHER; note = 2'-deoxy-2'-fluoroadenosine-3'-phosphate
  modified_base 3: mod_base = OTHER; note = 2'-O-methyluridine-3'-phosphate
  modified_base 4: mod_base = OTHER; note = 2'-O-methyluridine-3'-phosphate
  modified_base 5: mod_base = OTHER; note = 2'-O-methylguanosine-3'-phosphate
  modified_base 6: mod_base = OTHER; note = 2'-deoxy-2'-fluoroadenosine-3'-phosphate
  modified_base 7: mod_base = OTHER; note = 2'-O-methyladenosine-3'-phosphate
  modified_base 8: mod_base = OTHER; note = 2'-O-methyluridine-3'-phosphate
  modified_base 9: mod_base = OTHER; note = 2'-O-methylcytidine-3'-phosphate
  modified_base 10: mod_base = OTHER; note = 2'-O-methyladenosine-3'-phosphate
  modified_base 11: mod_base = OTHER; note = 2'-O-methyluridine-3'-phosphate
  modified_base 12: mod_base = OTHER; note = 2'-O-methylguanosine-3'-phosphate
  modified_base 13: mod_base = OTHER; note = 2'-O-methylcytidine-3'-phosphate
  modified_base 14: mod_base = OTHER; note = 2'-deoxy-2'-fluorouridine-3'-phosphate
  modified_base 15: mod_base = OTHER; note = 2'-O-methyluridine-3'-phosphate
  modified_base 16: mod_base = OTHER; note = 2'-deoxy-2'-fluorocytidine-3'-phosphate
  modified_base 17: mod_base = OTHER; note = 2'-O-methyladenosine-3'-phosphate
  modified_base 18: mod_base = OTHER; note = 2'-O-methylcytidine-3'-phosphate
  modified_base 19: mod_base = OTHER; note = 2'-O-methyladenosine-3'-phosphate
  modified_base 20: mod_base = OTHER; note = 2'-O-methylguanosine-3'-phosphate
  modified_base 21: mod_base = OTHER; note = 2'-O-methylcytidine-3'-phosphate
  modified_base 22: mod_base = OTHER; note = 2'-O-methylcytidine-3'-phosphate
  modified_base 23: mod_base = OTHER; note = 2'-O-methyladenosine
tattgaatcatgcttcacagcca

SEQ ID NO: 4799 - RNA, 23 nt, synthetic construct
  source 1..23: mol_type = other RNA
  modified_base 1: mod_base = OTHER; note = 2'-O-methyluridine-3'-phosphate 5'-(E)-Vinylphosphonate
  modified_base 2: mod_base = OTHER; note = 2'-deoxy-2'-fluorouridine-3'-phosphate
  modified_base 3: mod_base = OTHER; note = 2'-O-methyladenosine-3'-phosphate
  modified_base 4: mod_base = OTHER; note = 2'-O-methyluridine-3'-phosphate
  modified_base 5: mod_base = OTHER; note = 2'-O-methyluridine-3'-phosphate
  modified_base 6: mod_base = OTHER; note = 2'-deoxy-2'-fluoroguanosine-3'-phosphate
  modified_base 7: mod_base = OTHER; note = 2'-O-methyladenosine-3'-phosphate
  modified_base 8: mod_base = OTHER; note = 2'-O-methyladenosine-3'-phosphate
  modified_base 9: mod_base = OTHER; note = 2'-O-methyluridine-3'-phosphate
  modified_base 10: mod_base = OTHER; note = 2'-O-methylcytidine-3'-phosphate
  modified_base 11: mod_base = OTHER; note = 2'-O-methyladenosine-3'-phosphate
  modified_base 12: mod_base = OTHER; note = 2'-O-methyluridine-3'-phosphate
  modified_base 13: mod_base = OTHER; note = 2'-O-methylguanosine-3'-phosphate
  modified_base 14: mod_base = OTHER; note = 2'-deoxy-2'-fluorocytidine-3'-phosphate
  modified_base 15: mod_base = OTHER; note = 2'-O-methyluridine-3'-phosphate
  modified_base 16: mod_base = OTHER; note = 2'-deoxy-2'-fluorouridine-3'-phosphate
  modified_base 17: mod_base = OTHER; note = 2'-O-methylcytidine-3'-phosphate
  modified_base 18: mod_base = OTHER; note = 2'-O-methyladenosine-3'-phosphate
  modified_base 19: mod_base = OTHER; note = 2'-O-methylcytidine-3'-phosphate
  modified_base 20: mod_base = OTHER; note = 2'-O-methyladenosine-3'-phosphate
  modified_base 21: mod_base = OTHER; note = 2'-O-methylguanosine-3'-phosphate
  modified_base 22: mod_base = OTHER; note = 2'-O-methylcytidine-3'-phosphate
  modified_base 23: mod_base = OTHER; note = 2'-O-methylcytidine
ttattgaatcatgcttcacagcc

SEQ ID NO: 4800 - RNA, 23 nt, synthetic construct
  source 1..23: mol_type = other RNA
  modified_base 1: mod_base = OTHER; note = 2'-O-methyluridine-3'-phosphate 5'-(E)-Vinylphosphonate
  modified_base 2: mod_base = OTHER; note = 2'-deoxy-2'-fluoroadenosine-3'-phosphate
  modified_base 3: mod_base = OTHER; note = 2'-O-methylguanosine-3'-phosphate
  modified_base 4: mod_base = OTHER; note = 2'-O-methyluridine-3'-phosphate
  modified_base 5: mod_base = OTHER; note = 2'-O-methyladenosine-3'-phosphate
  modified_base 6: mod_base = OTHER; note = 2'-deoxy-2'-fluorouridine-3'-phosphate
  modified_base 7: mod_base = OTHER; note = 2'-O-methyluridine-3'-phosphate
  modified_base 8: mod_base = OTHER; note = 2'-O-methylguanosine-3'-phosphate
  modified_base 9: mod_base = OTHER; note = 2'-O-methyladenosine-3'-phosphate
  modified_base 10: mod_base = OTHER; note = 2'-O-methyladenosine-3'-phosphate
  modified_base 11: mod_base = OTHER; note = 2'-O-methyluridine-3'-phosphate
  modified_base 12: mod_base = OTHER; note = 2'-O-methylcytidine-3'-phosphate
  modified_base 13: mod_base = OTHER; note = 2'-O-methyladenosine-3'-phosphate
  modified_base 14: mod_base = OTHER; note = 2'-deoxy-2'-fluorouridine-3'-phosphate
  modified_base 15: mod_base = OTHER; note = 2'-O-methylguanosine-3'-phosphate
  modified_base 16: mod_base = OTHER; note = 2'-deoxy-2'-fluorocytidine-3'-phosphate
  modified_base 17: mod_base = OTHER; note = 2'-O-methyluridine-3'-phosphate
  modified_base 18: mod_base = OTHER; note = 2'-O-methyluridine-3'-phosphate
  modified_base 19: mod_base = OTHER; note = 2'-O-methylcytidine-3'-phosphate
  modified_base 20: mod_base = OTHER; note = 2'-O-methyladenosine-3'-phosphate
  modified_base 21: mod_base = OTHER; note = 2'-O-methylcytidine-3'-phosphate
  modified_base 22: mod_base = OTHER; note = 2'-O-methyladenosine-3'-phosphate
  modified_base 23: mod_base = OTHER; note = 2'-O-methylguanosine
tagtattgaatcatgcttcacag

SEQ ID NO: 4801 - RNA, 23 nt, synthetic construct
  source 1..23: mol_type = other RNA
  modified_base 1: mod_base = OTHER; note = 2'-O-methyluridine-3'-phosphate 5'-(E)-Vinylphosphonate
  modified_base 2: mod_base = OTHER; note = 2'-deoxy-2'-fluorocytidine-3'-phosphate
  modified_base 3: mod_base = OTHER; note = 2'-O-methyladenosine-3'-phosphate
  modified_base 4: mod_base = OTHER; note = 2'-O-methylguanosine-3'-phosphate
  modified_base 5: mod_base = OTHER; note = 2'-O-methyluridine-3'-phosphate
  modified_base 6: mod_base = OTHER; note = 2'-deoxy-2'-fluoroadenosine-3'-phosphate
  modified_base 7: mod_base = OTHER; note = 2'-O-methyluridine-3'-phosphate
  modified_base 8: mod_base = OTHER; note = 2'-O-methyluridine-3'-phosphate
  modified_base 9: mod_base = OTHER; note = 2'-O-methylguanosine-3'-phosphate
  modified_base 10: mod_base = OTHER; note = 2'-O-methyladenosine-3'-phosphate
  modified_base 11: mod_base = OTHER; note = 2'-O-methyladenosine-3'-phosphate
  modified_base 12: mod_base = OTHER; note = 2'-O-methyluridine-3'-phosphate
  modified_base 13: mod_base = OTHER; note = 2'-O-methylcytidine-3'-phosphate
  modified_base 14: mod_base = OTHER; note = 2'-deoxy-2'-fluoroadenosine-3'-phosphate
  modified_base 15: mod_base = OTHER; note = 2'-O-methyluridine-3'-phosphate
  modified_base 16: mod_base = OTHER; note = 2'-deoxy-2'-fluoroguanosine-3'-phosphate
  modified_base 17: mod_base = OTHER; note = 2'-O-methylcytidine-3'-phosphate
  modified_base 18: mod_base = OTHER; note = 2'-O-methyluridine-3'-phosphate
  modified_base 19: mod_base = OTHER; note = 2'-O-methyluridine-3'-phosphate
  modified_base 20: mod_base = OTHER; note = 2'-O-methylcytidine-3'-phosphate
  modified_base 21: mod_base = OTHER; note = 2'-O-methyladenosine-3'-phosphate
  modified_base 22: mod_base = OTHER; note = 2'-O-methylcytidine-3'-phosphate
  modified_base 23: mod_base = OTHER; note = 2'-O-methyladenosine
tcagtattgaatcatgcttcaca

SEQ ID NO: 4802 - RNA, 23 nt, synthetic construct
  source 1..23: mol_type = other RNA
  modified_base 1: mod_base = OTHER; note = 2'-O-methyluridine-3'-phosphate 5'-(E)-Vinylphosphonate
  modified_base 2: mod_base = OTHER; note = 2'-deoxy-2'-fluorouridine-3'-phosphate
  modified_base 3: mod_base = OTHER; note = 2'-O-methylguanosine-3'-phosphate
  modified_base 4: mod_base = OTHER; note = 2'-O-methyluridine-3'-phosphate
  modified_base 5: mod_base = OTHER; note = 2'-O-methyluridine-3'-phosphate
  modified_base 6: mod_base = OTHER; note = 2'-deoxy-2'-fluorocytidine-3'-phosphate
  modified_base 7: mod_base = OTHER; note = 2'-O-methyladenosine-3'-phosphate
  modified_base 8: mod_base = OTHER; note = 2'-O-methylguanosine-3'-phosphate
  modified_base 9: mod_base = OTHER; note = 2'-O-methyluridine-3'-phosphate
  modified_base 10: mod_base = OTHER; note = 2'-O-methyladenosine-3'-phosphate
  modified_base 11: mod_base = OTHER; note = 2'-O-methyluridine-3'-phosphate
  modified_base 12: mod_base = OTHER; note = 2'-O-methyluridine-3'-phosphate
  modified_base 13: mod_base = OTHER; note = 2'-O-methylguanosine-3'-phosphate
  modified_base 14: mod_base = OTHER; note = 2'-deoxy-2'-fluoroadenosine-3'-phosphate
  modified_base 15: mod_base = OTHER; note = 2'-O-methyladenosine-3'-phosphate
  modified_base 16: mod_base = OTHER; note = 2'-deoxy-2'-fluorouridine-3'-phosphate
  modified_base 17: mod_base = OTHER; note = 2'-O-methylcytidine-3'-phosphate
  modified_base 18: mod_base = OTHER; note = 2'-O-methyladenosine-3'-phosphate
  modified_base 19: mod_base = OTHER; note = 2'-O-methyluridine-3'-phosphate
  modified_base 20: mod_base = OTHER; note = 2'-O-methylguanosine-3'-phosphate
  modified_base 21: mod_base = OTHER; note = 2'-O-methylcytidine-3'-phosphate
  modified_base 22: mod_base = OTHER; note = 2'-O-methyluridine-3'-phosphate
  modified_base 23: mod_base = OTHER; note = 2'-O-methyluridine
ttgttcagtattgaatcatgctt

SEQ ID NO: 4803 - RNA, 23 nt, synthetic construct
  source 1..23: mol_type = other RNA
  modified_base 1: mod_base = OTHER; note = 2'-O-methyluridine-3'-phosphate 5'-(E)-Vinylphosphonate
  modified_base 2: mod_base = OTHER; note = 2'-deoxy-2'-fluoroadenosine-3'-phosphate
  modified_base 3: mod_base = OTHER; note = 2'-O-methylguanosine-3'-phosphate
  modified_base 4: mod_base = OTHER; note = 2'-O-methyluridine-3'-phosphate
  modified_base 5: mod_base = OTHER; note = 2'-O-methylguanosine-3'-phosphate
  modified_base 6: mod_base = OTHER; note = 2'-deoxy-2'-fluorouridine-3'-phosphate
  modified_base 7: mod_base = OTHER; note = 2'-O-methyluridine-3'-phosphate
  modified_base 8: mod_base = OTHER; note = 2'-O-methylcytidine-3'-phosphate
  modified_base 9: mod_base = OTHER; note = 2'-O-methyladenosine-3'-phosphate
  modified_base 10: mod_base = OTHER; note = 2'-O-methylguanosine-3'-phosphate
  modified_base 11: mod_base = OTHER; note = 2'-O-methyluridine-3'-phosphate
  modified_base 12: mod_base = OTHER; note = 2'-O-methyladenosine-3'-phosphate
  modified_base 13: mod_base = OTHER; note = 2'-O-methyluridine-3'-phosphate
  modified_base 14: mod_base = OTHER; note = 2'-deoxy-2'-fluorouridine-3'-phosphate
  modified_base 15: mod_base = OTHER; note = 2'-O-methylguanosine-3'-phosphate
  modified_base 16: mod_base = OTHER; note = 2'-deoxy-2'-fluoroadenosine-3'-phosphate
  modified_base 17: mod_base = OTHER; note = 2'-O-methyladenosine-3'-phosphate
  modified_base 18: mod_base = OTHER; note = 2'-O-methyluridine-3'-phosphate
  modified_base 19: mod_base = OTHER; note = 2'-O-methylcytidine-3'-phosphate
  modified_base 20: mod_base = OTHER; note = 2'-O-methyladenosine-3'-phosphate
  modified_base 21: mod_base = OTHER; note = 2'-O-methyluridine-3'-phosphate
  modified_base 22: mod_base = OTHER; note = 2'-O-methylguanosine-3'-phosphate
  modified_base 23: mod_base = OTHER; note = 2'-O-methylcytidine
tagtgttcagtattgaatcatgc

SEQ ID NO: 4804 - RNA, 23 nt, synthetic construct
  source 1..23: mol_type = other RNA
  modified_base 1: mod_base = OTHER; note = 2'-O-methyluridine-3'-phosphate 5'-(E)-Vinylphosphonate
  modified_base 2: mod_base = OTHER; note = 2'-deoxy-2'-fluorouridine-3'-phosphate
  modified_base 3: mod_base = OTHER; note = 2'-O-methyladenosine-3'-phosphate
  modified_base 4: mod_base = OTHER; note = 2'-O-methylguanosine-3'-phosphate
  modified_base 5: mod_base = OTHER; note = 2'-O-methyluridine-3'-phosphate
  modified_base 6: mod_base = OTHER; note = 2'-deoxy-2'-fluoroguanosine-3'-phosphate
  modified_base 7: mod_base = OTHER; note = 2'-O-methyluridine-3'-phosphate
  modified_base 8: mod_base = OTHER; note = 2'-O-methyluridine-3'-phosphate
  modified_base 9: mod_base = OTHER; note = 2'-O-methylcytidine-3'-phosphate
  modified_base 10: mod_base = OTHER; note = 2'-O-methyladenosine-3'-phosphate
  modified_base 11: mod_base = OTHER; note = 2'-O-methylguanosine-3'-phosphate
  modified_base 12: mod_base = OTHER; note = 2'-O-methyluridine-3'-phosphate
  modified_base 13: mod_base = OTHER; note = 2'-O-methyladenosine-3'-phosphate
  modified_base 14: mod_base = OTHER; note = 2'-deoxy-2'-fluorouridine-3'-phosphate
  modified_base 15: mod_base = OTHER; note = 2'-O-methyluridine-3'-phosphate
  modified_base 16: mod_base = OTHER; note = 2'-deoxy-2'-fluoroguanosine-3'-phosphate
  modified_base 17: mod_base = OTHER; note = 2'-O-methyladenosine-3'-phosphate
  modified_base 18: mod_base = OTHER; note = 2'-O-methyladenosine-3'-phosphate
  modified_base 19: mod_base = OTHER; note = 2'-O-methyluridine-3'-phosphate
  modified_base 20: mod_base = OTHER; note = 2'-O-methylcytidine-3'-phosphate
  modified_base 21: mod_base = OTHER; note = 2'-O-methyladenosine-3'-phosphate
  modified_base 22: mod_base = OTHER; note = 2'-O-methyluridine-3'-phosphate
  modified_base 23: mod_base = OTHER; note = 2'-O-methylguanosine
ttagtgttcagtattgaatcatg

SEQ ID NO: 4805 - RNA, 23 nt, synthetic construct
  source 1..23: mol_type = other RNA
  modified_base 1: mod_base = OTHER; note = 2'-O-methyluridine-3'-phosphate 5'-(E)-Vinylphosphonate
  modified_base 2: mod_base = OTHER; note = 2'-deoxy-2'-fluoroadenosine-3'-phosphate
  modified_base 3: mod_base = OTHER; note = 2'-O-methyluridine-3'-phosphate
  modified_base 4: mod_base = OTHER; note = 2'-O-methylguanosine-3'-phosphate
  modified_base 5: mod_base = OTHER; note = 2'-O-methyluridine-3'-phosphate
  modified_base 6: mod_base = OTHER; note = 2'-deoxy-2'-fluorocytidine-3'-phosphate
  modified_base 7: mod_base = OTHER; note = 2'-O-methylguanosine-3'-phosphate
  modified_base 8: mod_base = OTHER; note = 2'-O-methyladenosine-3'-phosphate
  modified_base 9: mod_base = OTHER; note = 2'-O-methyluridine-3'-phosphate
  modified_base 10: mod_base = OTHER; note = 2'-O-methyladenosine-3'-phosphate
  modified_base 11: mod_base = OTHER; note = 2'-O-methylguanosine-3'-phosphate
  modified_base 12: mod_base = OTHER; note = 2'-O-methyluridine-3'-phosphate
  modified_base 13: mod_base = OTHER; note = 2'-O-methylguanosine-3'-phosphate
  modified_base 14: mod_base = OTHER; note = 2'-deoxy-2'-fluorouridine-3'-phosphate
  modified_base 15: mod_base = OTHER; note = 2'-O-methyluridine-3'-phosphate
  modified_base 16: mod_base = OTHER; note = 2'-deoxy-2'-fluorocytidine-3'-phosphate
  modified_base 17: mod_base = OTHER; note = 2'-O-methyladenosine-3'-phosphate
  modified_base 18: mod_base = OTHER; note = 2'-O-methylguanosine-3'-phosphate
  modified_base 19: mod_base = OTHER; note = 2'-O-methyluridine-3'-phosphate
  modified_base 20: mod_base = OTHER; note = 2'-O-methyladenosine-3'-phosphate
  modified_base 21: mod_base = OTHER; note = 2'-O-methyluridine-3'-phosphate
  modified_base 22: mod_base = OTHER; note = 2'-O-methyluridine-3'-phosphate
  modified_base 23: mod_base = OTHER; note = 2'-O-methylguanosine
tatgtcgatagtgttcagtattg

SEQ ID NO: 4806 - RNA, 23 nt, synthetic construct
  source 1..23: mol_type = other RNA
  modified_base 1: mod_base = OTHER; note = 2'-O-methyluridine-3'-phosphate 5'-(E)-Vinylphosphonate
  modified_base 2: mod_base = OTHER; note = 2'-deoxy-2'-fluoroguanosine-3'-phosphate
  modified_base 3: mod_base = OTHER; note = 2'-O-methyluridine-3'-phosphate
  modified_base 4: mod_base = OTHER; note = 2'-O-methyladenosine-3'-phosphate
  modified_base 5: mod_base = OTHER; note = 2'-O-methyluridine-3'-phosphate
  modified_base 6: mod_base = OTHER; note = 2'-deoxy-2'-fluoroguanosine-3'-phosphate
  modified_base 7: mod_base = OTHER; note = 2'-O-methyluridine-3'-phosphate
  modified_base 8: mod_base = OTHER; note = 2'-O-methylcytidine-3'-phosphate
  modified_base 9: mod_base = OTHER; note = 2'-O-methylguanosine-3'-phosphate
  modified_base 10: mod_base = OTHER; note = 2'-O-methyladenosine-3'-phosphate
  modified_base 11: mod_base = OTHER; note = 2'-O-methyluridine-3'-phosphate
  modified_base 12: mod_base = OTHER; note = 2'-O-methyladenosine-3'-phosphate
  modified_base 13: mod_base = OTHER; note = 2'-O-methylguanosine-3'-phosphate
  modified_base 14: mod_base = OTHER; note = 2'-deoxy-2'-fluorouridine-3'-phosphate
  modified_base 15: mod_base = OTHER; note = 2'-O-methylguanosine-3'-phosphate
  modified_base 16: mod_base = OTHER; note = 2'-deoxy-2'-fluorouridine-3'-phosphate
  modified_base 17: mod_base = OTHER; note = 2'-O-methyluridine-3'-phosphate
  modified_base 18: mod_base = OTHER; note = 2'-O-methylcytidine-3'-phosphate
  modified_base 19: mod_base = OTHER; note = 2'-O-methyladenosine-3'-phosphate
  modified_base 20: mod_base = OTHER; note = 2'-O-methylguanosine-3'-phosphate
  modified_base 21: mod_base = OTHER; note = 2'-O-methyluridine-3'-phosphate
  modified_base 22: mod_base = OTHER; note = 2'-O-methyladenosine-3'-phosphate
  modified_base 23: mod_base = OTHER; note = 2'-O-methyluridine
tgtatgtcgatagtgttcagtat

SEQ ID NO: 4807 - RNA, 23 nt, synthetic construct
  source 1..23: mol_type = other RNA
  modified_base 1: mod_base = OTHER; note = 2'-O-methyluridine-3'-phosphate 5'-(E)-Vinylphosphonate
  modified_base 2: mod_base = OTHER; note = 2'-deoxy-2'-fluoroadenosine-3'-phosphate
  modified_base 3: mod_base = OTHER; note = 2'-O-methylcytidine-3'-phosphate
  modified_base 4: mod_base = OTHER; note = 2'-O-methyluridine-3'-phosphate
  modified_base 5: mod_base = OTHER; note = 2'-O-methyluridine-3'-phosphate
  modified_base 6: mod_base = OTHER; note = 2'-deoxy-2'-fluorouridine-3'-phosphate
  modified_base 7: mod_base = OTHER; note = 2'-O-methyladenosine-3'-phosphate
  modified_base 8: mod_base = OTHER; note = 2'-O-methylguanosine-3'-phosphate
  modified_base 9: mod_base = OTHER; note = 2'-O-methylguanosine-3'-phosphate
  modified_base 10: mod_base = OTHER; note = 2'-O-methyladenosine-3'-phosphate
  modified_base 11: mod_base = OTHER; note = 2'-O-methyluridine-3'-phosphate
  modified_base 12: mod_base = OTHER; note = 2'-O-methyluridine-3'-phosphate
  modified_base 13: mod_base = OTHER; note = 2'-O-methylcytidine-3'-phosphate
  modified_base 14: mod_base = OTHER; note = 2'-deoxy-2'-fluorouridine-3'-phosphate
  modified_base 15: mod_base = OTHER; note = 2'-O-methylguanosine-3'-phosphate
  modified_base 16: mod_base = OTHER; note = 2'-deoxy-2'-fluoroadenosine-3'-phosphate
  modified_base 17: mod_base = OTHER; note = 2'-O-methylguanosine-3'-phosphate
  modified_base 18: mod_base = OTHER; note = 2'-O-methylguanosine-3'-phosphate
  modified_base 19: mod_base = OTHER; note = 2'-O-methyluridine-3'-phosphate
  modified_base 20: mod_base = OTHER; note = 2'-O-methyladenosine-3'-phosphate
  modified_base 21: mod_base = OTHER; note = 2'-O-methyluridine-3'-phosphate
  modified_base 22: mod_base = OTHER; note = 2'-O-methylguanosine-3'-phosphate
  modified_base 23: mod_base = OTHER; note = 2'-O-methyluridine
tactttaggattctgaggtatgt

SEQ ID NO: 4808 - RNA, 23 nt, synthetic construct
  source 1..23: mol_type = other RNA
  modified_base 1: mod_base = OTHER; note = 2'-O-methyluridine-3'-phosphate 5'-(E)-Vinylphosphonate
  modified_base 2: mod_base = OTHER; note = 2'-deoxy-2'-fluoroadenosine-3'-phosphate
  modified_base 3: mod_base = OTHER; note = 2'-O-methylguanosine-3'-phosphate
  modified_base 4: mod_base = OTHER; note = 2'-O-methylcytidine-3'-phosphate
  modified_base 5: mod_base = OTHER; note = 2'-O-methyladenosine-3'-phosphate
  modified_base 6: mod_base = OTHER; note = 2'-deoxy-2'-fluorouridine-3'-phosphate
  modified_base 7: mod_base = OTHER; note = 2'-O-methyluridine-3'-phosphate
  modified_base 8: mod_base = OTHER; note = 2'-O-methyluridine-3'-phosphate
  modified_base 9: mod_base = OTHER; note = 2'-O-methylcytidine-3'-phosphate
  modified_base 10: mod_base = OTHER; note = 2'-O-methyladenosine-3'-phosphate
  modified_base 11: mod_base = OTHER; note = 2'-O-methylguanosine-3'-phosphate
  modified_base 12: mod_base = OTHER; note = 2'-O-methylguanosine-3'-phosphate
  modified_base 13: mod_base = OTHER; note = 2'-O-methyladenosine-3'-phosphate
  modified_base 14: mod_base = OTHER; note = 2'-deoxy-2'-fluoroguanosine-3'-phosphate
  modified_base 15: mod_base = OTHER; note = 2'-O-methylcytidine-3'-phosphate
  modified_base 16: mod_base = OTHER; note = 2'-deoxy-2'-fluorocytidine-3'-phosphate
  modified_base 17: mod_base = OTHER; note = 2'-O-methyladenosine-3'-phosphate
  modified_base 18: mod_base = OTHER; note = 2'-O-methyluridine-3'-phosphate
  modified_base 19: mod_base = OTHER; note = 2'-O-methyladenosine-3'-phosphate
  modified_base 20: mod_base = OTHER; note = 2'-O-methyluridine-3'-phosphate
  modified_base 21: mod_base = OTHER; note = 2'-O-methyladenosine-3'-phosphate
  modified_base 22: mod_base = OTHER; note = 2'-O-methylcytidine-3'-phosphate
  modified_base 23: mod_base = OTHER; note = 2'-O-methylcytidine
tagcatttcaggagccatatacc

SEQ ID NO: 4809 - RNA, 23 nt, synthetic construct
  source 1..23: mol_type = other RNA
  modified_base 1: mod_base = OTHER; note = 2'-O-methyluridine-3'-phosphate 5'-(E)-Vinylphosphonate
  modified_base 2: mod_base = OTHER; note = 2'-deoxy-2'-fluoroadenosine-3'-phosphate
  modified_base 3: mod_base = OTHER; note = 2'-O-methyluridine-3'-phosphate
  modified_base 4: mod_base = OTHER; note = 2'-O-methylcytidine-3'-phosphate
  modified_base 5: mod_base = OTHER; note = 2'-O-methyladenosine-3'-phosphate
  modified_base 6: mod_base = OTHER; note = 2'-deoxy-2'-fluoroadenosine-3'-phosphate
  modified_base 7: mod_base = OTHER; note = 2'-O-methylguanosine-3'-phosphate
  modified_base 8: mod_base = OTHER; note = 2'-O-methylcytidine-3'-phosphate
  modified_base 9: mod_base = OTHER; note = 2'-O-methyladenosine-3'-phosphate
  modified_base 10: mod_base = OTHER; note = 2'-O-methyluridine-3'-phosphate
  modified_base 11: mod_base = OTHER; note = 2'-O-methyluridine-3'-phosphate
  modified_base 12: mod_base = OTHER; note = 2'-O-methyluridine-3'-phosphate
  modified_base 13: mod_base = OTHER; note = 2'-O-methylcytidine-3'-phosphate
  modified_base 14: mod_base = OTHER; note = 2'-deoxy-2'-fluoroadenosine-3'-phosphate
  modified_base 15: mod_base = OTHER; note = 2'-O-methylguanosine-3'-phosphate
  modified_base 16: mod_base = OTHER; note = 2'-deoxy-2'-fluoroguanosine-3'-phosphate
  modified_base 17: mod_base = OTHER; note = 2'-O-methyladenosine-3'-phosphate
  modified_base 18: mod_base = OTHER; note = 2'-O-methylguanosine-3'-phosphate
  modified_base 19: mod_base = OTHER; note = 2'-O-methylcytidine-3'-phosphate
  modified_base 20: mod_base = OTHER; note = 2'-O-methylcytidine-3'-phosphate
  modified_base 21: mod_base = OTHER; note = 2'-O-methyladenosine-3'-phosphate
  modified_base 22: mod_base = OTHER; note = 2'-O-methyluridine-3'-phosphate
  modified_base 23: mod_base = OTHER; note = 2'-O-methyladenosine
tatcaagcatttcaggagccata

SEQ ID NO: 4810 - RNA, 23 nt, synthetic construct
  source 1..23: mol_type = other RNA
  modified_base 1: mod_base = OTHER; note = 2'-O-methyluridine-3'-phosphate 5'-(E)-Vinylphosphonate
  modified_base 2: mod_base = OTHER; note = 2'-deoxy-2'-fluorocytidine-3'-phosphate
  modified_base 3: mod_base = OTHER; note = 2'-O-methyladenosine-3'-phosphate
  modified_base 4: mod_base = OTHER; note = 2'-O-methyluridine-3'-phosphate
  modified_base 5: mod_base = OTHER; note = 2'-O-methylcytidine-3'-phosphate
  modified_base 6: mod_base = OTHER; note = 2'-deoxy-2'-fluoroadenosine-3'-phosphate
  modified_base 7: mod_base = OTHER; note = 2'-O-methyladenosine-3'-phosphate
  modified_base 8: mod_base = OTHER; note = 2'-O-methylguanosine-3'-phosphate
  modified_base 9: mod_base = OTHER; note = 2'-O-methylcytidine-3'-phosphate
  modified_base 10: mod_base = OTHER; note = 2'-O-methyladenosine-3'-phosphate
  modified_base 11: mod_base = OTHER; note = 2'-O-methyluridine-3'-phosphate
  modified_base 12: mod_base = OTHER; note = 2'-O-methyluridine-3'-phosphate
  modified_base 13: mod_base = OTHER; note = 2'-O-methyluridine-3'-phosphate
  modified_base 14: mod_base = OTHER; note = 2'-deoxy-2'-fluorocytidine-3'-phosphate
  modified_base 15: mod_base = OTHER; note = 2'-O-methyladenosine-3'-phosphate
  modified_base 16: mod_base = OTHER; note = 2'-deoxy-2'-fluoroguanosine-3'-phosphate
  modified_base 17: mod_base = OTHER; note = 2'-O-methylguanosine-3'-phosphate
  modified_base 18: mod_base = OTHER; note = 2'-O-methyladenosine-3'-phosphate
  modified_base 19: mod_base = OTHER; note = 2'-O-methylguanosine-3'-phosphate
  modified_base 20: mod_base = OTHER; note = 2'-O-methylcytidine-3'-phosphate
  modified_base 21: mod_base = OTHER; note = 2'-O-methylcytidine-3'-phosphate
  modified_base 22: mod_base = OTHER; note = 2'-O-methyladenosine-3'-phosphate
  modified_base 23: mod_base = OTHER; note = 2'-O-methyluridine
tcatcaagcatttcaggagccat

SEQ ID NO: 4811 - RNA, 23 nt, synthetic construct
  source 1..23: mol_type = other RNA
  modified_base 1: mod_base = OTHER; note = 2'-O-methyluridine-3'-phosphate 5'-(E)-Vinylphosphonate
  modified_base 2: mod_base = OTHER; note = 2'-deoxy-2'-fluorouridine-3'-phosphate
  modified_base 3: mod_base = OTHER; note = 2'-O-methylcytidine-3'-phosphate
  modified_base 4: mod_base = OTHER; note = 2'-O-methyladenosine-3'-phosphate
  modified_base 5: mod_base = OTHER; note = 2'-O-methyluridine-3'-phosphate
  modified_base 6: mod_base = OTHER; note = 2'-deoxy-2'-fluorocytidine-3'-phosphate
  modified_base 7: mod_base = OTHER; note = 2'-O-methyladenosine-3'-phosphate
  modified_base 8: mod_base = OTHER; note = 2'-O-methyladenosine-3'-phosphate
  modified_base 9: mod_base = OTHER; note = 2'-O-methylguanosine-3'-phosphate
  modified_base 10: mod_base = OTHER; note = 2'-O-methylcytidine-3'-phosphate
  modified_base 11: mod_base = OTHER; note = 2'-O-methyladenosine-3'-phosphate
  modified_base 12: mod_base = OTHER; note = 2'-O-methyluridine-3'-phosphate
  modified_base 13: mod_base = OTHER; note = 2'-O-methyluridine-3'-phosphate
  modified_base 14: mod_base = OTHER; note = 2'-deoxy-2'-fluorouridine-3'-phosphate
  modified_base 15: mod_base = OTHER; note = 2'-O-methylcytidine-3'-phosphate
  modified_base 16: mod_base = OTHER; note = 2'-deoxy-2'-fluoroadenosine-3'-phosphate
  modified_base 17: mod_base = OTHER; note = 2'-O-methylguanosine-3'-phosphate
  modified_base 18: mod_base = OTHER; note = 2'-O-methylguanosine-3'-phosphate
  modified_base 19: mod_base = OTHER; note = 2'-O-methyladenosine-3'-phosphate
  modified_base 20: mod_base = OTHER; note = 2'-O-methylguanosine-3'-phosphate
  modified_base 21: mod_base = OTHER; note = 2'-O-methylcytidine-3'-phosphate
  modified_base 22: mod_base = OTHER; note = 2'-O-methylcytidine-3'-phosphate
  modified_base 23: mod_base = OTHER; note = 2'-O-methyladenosine
ttcatcaagcatttcaggagcca

SEQ ID NO: 4812 - RNA, 23 nt, synthetic construct
  source 1..23: mol_type = other RNA
  modified_base 1: mod_base = OTHER; note = 2'-O-methyluridine-3'-phosphate 5'-(E)-Vinylphosphonate
  modified_base 2: mod_base = OTHER; note = 2'-deoxy-2'-fluoroadenosine-3'-phosphate
  modified_base 3: mod_base = OTHER; note = 2'-O-methyluridine-3'-phosphate
  modified_base 4: mod_base = OTHER; note = 2'-O-methylcytidine-3'-phosphate
  modified_base 5: mod_base = OTHER; note = 2'-O-methyladenosine-3'-phosphate
  modified_base 6: mod_base = OTHER; note = 2'-deoxy-2'-fluorouridine-3'-phosphate
  modified_base 7: mod_base = OTHER; note = 2'-O-methylcytidine-3'-phosphate
  modified_base 8: mod_base = OTHER; note = 2'-O-methyladenosine-3'-phosphate
  modified_base 9: mod_base = OTHER; note = 2'-O-methyladenosine-3'-phosphate
  modified_base 10: mod_base = OTHER; note = 2'-O-methylguanosine-3'-phosphate
  modified_base 11: mod_base = OTHER; note = 2'-O-methylcytidine-3'-phosphate
  modified_base 12: mod_base = OTHER; note = 2'-O-methyladenosine-3'-phosphate
  modified_base 13: mod_base = OTHER; note = 2'-O-methyluridine-3'-phosphate
  modified_base 14: mod_base = OTHER; note = 2'-deoxy-2'-fluorouridine-3'-phosphate
  modified_base 15: mod_base = OTHER; note = 2'-O-methyluridine-3'-phosphate
  modified_base 16: mod_base = OTHER; note = 2'-deoxy-2'-fluorocytidine-3'-phosphate
  modified_base 17: mod_base = OTHER; note = 2'-O-methyladenosine-3'-phosphate
  modified_base 18: mod_base = OTHER; note = 2'-O-methylguanosine-3'-phosphate
  modified_base 19: mod_base = OTHER; note = 2'-O-methylguanosine-3'-phosphate
  modified_base 20: mod_base = OTHER; note = 2'-O-methyladenosine-3'-phosphate
  modified_base 21: mod_base = OTHER; note = 2'-O-methylguanosine-3'-phosphate
  modified_base 22: mod_base = OTHER; note = 2'-O-methylcytidine-3'-phosphate
  modified_base 23: mod_base = OTHER; note = 2'-O-methylcytidine
tatcatcaagcatttcaggagcc

SEQ ID NO: 4813 - RNA, 23 nt, synthetic construct
  source 1..23: mol_type = other RNA
  modified_base 1: mod_base = OTHER; note = 2'-O-methyluridine-3'-phosphate 5'-(E)-Vinylphosphonate
  modified_base 2: mod_base = OTHER; note = 2'-deoxy-2'-fluorouridine-3'-phosphate
  modified_base 3: mod_base = OTHER; note = 2'-O-methyladenosine-3'-phosphate
  modified_base 4: mod_base = OTHER; note = 2'-O-methyluridine-3'-phosphate
  modified_base 5: mod_base = OTHER; note = 2'-O-methylcytidine-3'-phosphate
  modified_base 6: mod_base = OTHER; note = 2'-deoxy-2'-fluoroadenosine-3'-phosphate
  modified_base 7: mod_base = OTHER; note = 2'-O-methyluridine-3'-phosphate
  modified_base 8: mod_base = OTHER; note = 2'-O-methylcytidine-3'-phosphate
  modified_base 9: mod_base = OTHER; note = 2'-O-methyladenosine-3'-phosphate
  modified_base 10: mod_base = OTHER; note = 2'-O-methyladenosine-3'-phosphate
  modified_base 11: mod_base = OTHER; note = 2'-O-methylguanosine-3'-phosphate
  modified_base 12: mod_base = OTHER; note = 2'-O-methylcytidine-3'-phosphate
  modified_base 13: mod_base = OTHER; note = 2'-O-methyladenosine-3'-phosphate
  modified_base 14: mod_base = OTHER; note = 2'-deoxy-2'-fluorouridine-3'-phosphate
  modified_base 15: mod_base = OTHER; note = 2'-O-methyluridine-3'-phosphate
  modified_base 16: mod_base = OTHER; note = 2'-deoxy-2'-fluorouridine-3'-phosphate
  modified_base 17: mod_base = OTHER; note = 2'-O-methylcytidine-3'-phosphate
  modified_base 18: mod_base = OTHER; note = 2'-O-methyladenosine-3'-phosphate
  modified_base 19: mod_base = OTHER; note = 2'-O-methylguanosine-3'-phosphate
  modified_base 20: mod_base = OTHER; note = 2'-O-methylguanosine-3'-phosphate
  modified_base 21: mod_base = OTHER; note = 2'-O-methyladenosine-3'-phosphate
  modified_base 22: mod_base = OTHER; note = 2'-O-methylguanosine-3'-phosphate
  modified_base 23: mod_base = OTHER; note = 2'-O-methylcytidine
ttatcatcaagcatttcaggagc

SEQ ID NO: 4814 - RNA, 23 nt, synthetic construct
  source 1..23: mol_type = other RNA
  modified_base 1: mod_base = OTHER; note = 2'-O-methyluridine-3'-phosphate 5'-(E)-Vinylphosphonate
  modified_base 2: mod_base = OTHER; note = 2'-deoxy-2'-fluoroguanosine-3'-phosphate
  modified_base 3: mod_base = OTHER; note = 2'-O-methyluridine-3'-phosphate
  modified_base 4: mod_base = OTHER; note = 2'-O-methyladenosine-3'-phosphate
  modified_base 5: mod_base = OTHER; note = 2'-O-methyluridine-3'-phosphate
  modified_base 6: mod_base = OTHER; note = 2'-deoxy-2'-fluorocytidine-3'-phosphate
  modified_base 7: mod_base = OTHER; note = 2'-O-methyladenosine-3'-phosphate
  modified_base 8: mod_base = OTHER; note = 2'-O-methyluridine-3'-phosphate
  modified_base 9: mod_base = OTHER; note = 2'-O-methylcytidine-3'-phosphate
  modified_base 10: mod_base = OTHER; note = 2'-O-methyladenosine-3'-phosphate
  modified_base 11: mod_base = OTHER; note = 2'-O-methyladenosine-3'-phosphate
  modified_base 12: mod_base = OTHER; note = 2'-O-methylguanosine-3'-phosphate
  modified_base 13: mod_base = OTHER; note = 2'-O-methylcytidine-3'-phosphate
  modified_base 14: mod_base = OTHER; note = 2'-deoxy-2'-fluoroadenosine-3'-phosphate
  modified_base 15: mod_base = OTHER; note = 2'-O-methyluridine-3'-phosphate
  modified_base 16: mod_base = OTHER; note = 2'-deoxy-2'-fluorouridine-3'-phosphate
  modified_base 17: mod_base = OTHER; note = 2'-O-methyluridine-3'-phosphate
  modified_base 18: mod_base = OTHER; note = 2'-O-methylcytidine-3'-phosphate
  modified_base 19: mod_base = OTHER; note = 2'-O-methyladenosine-3'-phosphate
  modified_base 20: mod_base = OTHER; note = 2'-O-methylguanosine-3'-phosphate
  modified_base 21: mod_base = OTHER; note = 2'-O-methylguanosine-3'-phosphate
  modified_base 22: mod_base = OTHER; note = 2'-O-methyladenosine-3'-phosphate
  modified_base 23: mod_base = OTHER; note = 2'-O-methylguanosine
tgtatcatcaagcatttcaggag

SEQ ID NO: 4815 - RNA, 23 nt, synthetic construct
  source 1..23: mol_type = other RNA
  modified_base 1: mod_base = OTHER; note = 2'-O-methyluridine-3'-phosphate 5'-(E)-Vinylphosphonate
  modified_base 2: mod_base = OTHER; note = 2'-deoxy-2'-fluorouridine-3'-phosphate
  modified_base 3: mod_base = OTHER; note = 2'-O-methylguanosine-3'-phosphate
  modified_base 4: mod_base = OTHER; note = 2'-O-methyluridine-3'-phosphate
  modified_base 5: mod_base = OTHER; note = 2'-O-methyladenosine-3'-phosphate
  modified_base 6: mod_base = OTHER; note = 2'-deoxy-2'-fluorouridine-3'-phosphate
  modified_base 7: mod_base = OTHER; note = 2'-O-methylcytidine-3'-phosphate
  modified_base 8: mod_base = OTHER; note = 2'-O-methyladenosine-3'-phosphate
  modified_base 9: mod_base = OTHER; note = 2'-O-methyluridine-3'-phosphate
  modified_base 10: mod_base = OTHER; note = 2'-O-methylcytidine-3'-phosphate
  modified_base 11: mod_base = OTHER; note = 2'-O-methyladenosine-3'-phosphate
  modified_base 12: mod_base = OTHER; note = 2'-O-methyladenosine-3'-phosphate
  modified_base 13: mod_base = OTHER; note = 2'-O-methylguanosine-3'-phosphate
  modified_base 14: mod_base = OTHER; note = 2'-deoxy-2'-fluorocytidine-3'-phosphate
  modified_base 15: mod_base = OTHER; note = 2'-O-methyladenosine-3'-phosphate
  modified_base 16: mod_base = OTHER; note = 2'-deoxy-2'-fluorouridine-3'-phosphate
  modified_base 17: mod_base = OTHER; note = 2'-O-methyluridine-3'-phosphate
  modified_base 18: mod_base = OTHER; note = 2'-O-methyluridine-3'-phosphate
  modified_base 19: mod_base = OTHER; note = 2'-O-methylcytidine-3'-phosphate
  modified_base 20: mod_base = OTHER; note = 2'-O-methyladenosine-3'-phosphate
  modified_base 21: mod_base = OTHER; note = 2'-O-methylguanosine-3'-phosphate
  modified_base 22: mod_base = OTHER; note = 2'-O-methylguanosine-3'-phosphate
  modified_base 23: mod_base = OTHER; note = 2'-O-methyladenosine
ttgtatcatcaagcatttcagga

SEQ ID NO: 4816 - RNA, 23 nt, synthetic construct
  source 1..23: mol_type = other RNA
  modified_base 1: mod_base = OTHER; note = 2'-O-methyluridine-3'-phosphate 5'-(E)-Vinylphosphonate
  modified_base 2: mod_base = OTHER; note = 2'-deoxy-2'-fluorouridine-3'-phosphate
  modified_base 3: mod_base = OTHER; note = 2'-O-methyluridine-3'-phosphate
  modified_base 4: mod_base = OTHER; note = 2'-O-methylguanosine-3'-phosphate
  modified_base 5: mod_base = OTHER; note = 2'-O-methyluridine-3'-phosphate
  modified_base 6: mod_base = OTHER; note = 2'-deoxy-2'-fluoroadenosine-3'-phosphate
  modified_base 7: mod_base = OTHER; note = 2'-O-methyluridine-3'-phosphate
  modified_base 8: mod_base = OTHER; note = 2'-O-methylcytidine-3'-phosphate
  modified_base 9: mod_base = OTHER; note = 2'-O-methyladenosine-3'-phosphate
  modified_base 10: mod_base = OTHER; note = 2'-O-methyluridine-3'-phosphate
  modified_base 11: mod_base = OTHER; note = 2'-O-methylcytidine-3'-phosphate
  modified_base 12: mod_base = OTHER; note = 2'-O-methyladenosine-3'-phosphate
  modified_base 13: mod_base = OTHER; note = 2'-O-methyladenosine-3'-phosphate
  modified_base 14: mod_base = OTHER; note = 2'-deoxy-2'-fluoroguanosine-3'-phosphate
  modified_base 15: mod_base = OTHER; note = 2'-O-methylcytidine-3'-phosphate
  modified_base 16: mod_base = OTHER; note = 2'-deoxy-2'-fluoroadenosine-3'-phosphate
  modified_base 17: mod_base = OTHER; note = 2'-O-methyluridine-3'-phosphate
  modified_base 18: mod_base = OTHER; note = 2'-O-methyluridine-3'-phosphate
  modified_base 19: mod_base = OTHER; note = 2'-O-methyluridine-3'-phosphate
  modified_base 20: mod_base = OTHER; note = 2'-O-methylcytidine-3'-phosphate
  modified_base 21: mod_base = OTHER; note = 2'-O-methyladenosine-3'-phosphate
  modified_base 22: mod_base = OTHER; note = 2'-O-methylguanosine-3'-phosphate
  modified_base 23: mod_base = OTHER; note = 2'-O-methylguanosine
tttgtatcatcaagcatttcagg

SEQ ID NO: 4817 - RNA, 23 nt, synthetic construct
  source 1..23: mol_type = other RNA
  modified_base 1: mod_base = OTHER; note = 2'-O-methyluridine-3'-phosphate 5'-(E)-Vinylphosphonate
  modified_base 2: mod_base = OTHER; note = 2'-deoxy-2'-fluoroadenosine-3'-phosphate
  modified_base 3: mod_base = OTHER; note = 2'-O-methyluridine-3'-phosphate
  modified_base 4: mod_base = OTHER; note = 2'-O-methyluridine-3'-phosphate
  modified_base 5: mod_base = OTHER; note = 2'-O-methylguanosine-3'-phosphate
  modified_base 6: mod_base = OTHER; note = 2'-deoxy-2'-fluorouridine-3'-phosphate
  modified_base 7: mod_base = OTHER; note = 2'-O-methyladenosine-3'-phosphate
  modified_base 8: mod_base = OTHER; note = 2'-O-methyluridine-3'-phosphate
  modified_base 9: mod_base = OTHER; note = 2'-O-methylcytidine-3'-phosphate
  modified_base 10: mod_base = OTHER; note = 2'-O-methyladenosine-3'-phosphate
  modified_base 11: mod_base = OTHER; note = 2'-O-methyluridine-3'-phosphate
  modified_base 12: mod_base = OTHER; note = 2'-O-methylcytidine-3'-phosphate
  modified_base 13: mod_base = OTHER; note = 2'-O-methyladenosine-3'-phosphate
  modified_base 14: mod_base = OTHER; note = 2'-deoxy-2'-fluoroadenosine-3'-phosphate
  modified_base 15: mod_base = OTHER; note = 2'-O-methylguanosine-3'-phosphate
  modified_base 16: mod_base = OTHER; note = 2'-deoxy-2'-fluorocytidine-3'-phosphate
  modified_base 17: mod_base = OTHER; note = 2'-O-methyladenosine-3'-phosphate
  modified_base 18: mod_base = OTHER; note = 2'-O-methyluridine-3'-phosphate
  modified_base 19: mod_base = OTHER; note = 2'-O-methyluridine-3'-phosphate
  modified_base 20: mod_base = OTHER; note = 2'-O-methyluridine-3'-phosphate
  modified_base 21: mod_base = OTHER; note = 2'-O-methylcytidine-3'-phosphate
  modified_base 22: mod_base = OTHER; note = 2'-O-methyladenosine-3'-phosphate
  modified_base 23: mod_base = OTHER; note = 2'-O-methylguanosine
tattgtatcatcaagcatttcag

SEQ ID NO: 4818 - RNA, 23 nt, synthetic construct
  source 1..23: mol_type = other RNA
  modified_base 1: mod_base = OTHER; note = 2'-O-methyluridine-3'-phosphate 5'-(E)-Vinylphosphonate
  modified_base 2: mod_base = OTHER; note = 2'-deoxy-2'-fluorocytidine-3'-phosphate
  modified_base 3: mod_base = OTHER; note = 2'-O-methyladenosine-3'-phosphate
  modified_base 4: mod_base = OTHER; note = 2'-O-methyluridine-3'-phosphate
  modified_base 5: mod_base = OTHER; note = 2'-O-methyluridine-3'-phosphate
  modified_base 6: mod_base = OTHER; note = 2'-deoxy-2'-fluoroguanosine-3'-phosphate
  modified_base 7: mod_base = OTHER; note = 2'-O-methyluridine-3'-phosphate
  modified_base 8: mod_base = OTHER; note = 2'-O-methyladenosine-3'-phosphate
  modified_base 9: mod_base = OTHER; note = 2'-O-methyluridine-3'-phosphate
  modified_base 10: mod_base = OTHER; note = 2'-O-methylcytidine-3'-phosphate
  modified_base 11: mod_base = OTHER; note = 2'-O-methyladenosine-3'-phosphate
  modified_base 12: mod_base = OTHER; note = 2'-O-methyluridine-3'-phosphate
  modified_base 13: mod_base = OTHER; note = 2'-O-methylcytidine-3'-phosphate
  modified_base 14: mod_base = OTHER; note = 2'-deoxy-2'-fluoroadenosine-3'-phosphate
  modified_base 15: mod_base = OTHER; note = 2'-O-methyladenosine-3'-phosphate
  modified_base 16: mod_base = OTHER; note = 2'-deoxy-2'-fluoroguanosine-3'-phosphate
  modified_base 17: mod_base = OTHER; note = 2'-O-methylcytidine-3'-phosphate
  modified_base 18: mod_base = OTHER; note = 2'-O-methyladenosine-3'-phosphate
  modified_base 19: mod_base = OTHER; note = 2'-O-methyluridine-3'-phosphate
  modified_base 20: mod_base = OTHER; note = 2'-O-methyluridine-3'-phosphate
  modified_base 21: mod_base = OTHER; note = 2'-O-methyluridine-3'-phosphate
  modified_base 22: mod_base = OTHER; note = 2'-O-methylcytidine-3'-phosphate
  modified_base 23: mod_base = OTHER; note = 2'-O-methyladenosine
tcattgtatcatcaagcatttca

SEQ ID NO: 4819 - RNA, 23 nt, synthetic construct
  source 1..23: mol_type = other RNA
  modified_base 1: mod_base = OTHER; note = 2'-O-methyluridine-3'-phosphate 5'-(E)-Vinylphosphonate
  modified_base 2: mod_base = OTHER; note = 2'-deoxy-2'-fluorouridine-3'-phosphate
  modified_base 3: mod_base = OTHER; note = 2'-O-methylcytidine-3'-phosphate
  modified_base 4: mod_base = OTHER; note = 2'-O-methyladenosine-3'-phosphate
  modified_base 5: mod_base = OTHER; note = 2'-O-methyluridine-3'-phosphate
  modified_base 6: mod_base = OTHER; note = 2'-deoxy-2'-fluorouridine-3'-phosphate
  modified_base 7: mod_base = OTHER; note = 2'-O-methylguanosine-3'-phosphate
  modified_base 8: mod_base = OTHER; note = 2'-O-methyluridine-3'-phosphate
  modified_base 9: mod_base = OTHER; note = 2'-O-methyladenosine-3'-phosphate
  modified_base 10: mod_base = OTHER; note = 2'-O-methyluridine-3'-phosphate
  modified_base 11: mod_base = OTHER; note = 2'-O-methylcytidine-3'-phosphate
  modified_base 12: mod_base = OTHER; note = 2'-O-methyladenosine-3'-phosphate
  modified_base 13: mod_base = OTHER; note = 2'-O-methyluridine-3'-phosphate
  modified_base 14: mod_base = OTHER; note = 2'-deoxy-2'-fluorocytidine-3'-phosphate
  modified_base 15: mod_base = OTHER; note = 2'-O-methyladenosine-3'-phosphate
  modified_base 16: mod_base = OTHER; note = 2'-deoxy-2'-fluoroadenosine-3'-phosphate
  modified_base 17: mod_base = OTHER; note = 2'-O-methylguanosine-3'-phosphate
  modified_base 18: mod_base = OTHER; note = 2'-O-methylcytidine-3'-phosphate
  modified_base 19: mod_base = OTHER; note = 2'-O-methyladenosine-3'-phosphate
  modified_base 20: mod_base = OTHER; note = 2'-O-methyluridine-3'-phosphate
  modified_base 21: mod_base = OTHER; note = 2'-O-methyluridine-3'-phosphate
  modified_base 22: mod_base = OTHER; note = 2'-O-methyluridine-3'-phosphate
  modified_base 23: mod_base = OTHER; note = 2'-O-methylcytidine
ttcattgtatcatcaagcatttc

SEQ ID NO: 4820 - RNA, 23 nt, synthetic construct
  source 1..23: mol_type = other RNA
  modified_base 1: mod_base = OTHER; note = 2'-O-methyluridine-3'-phosphate 5'-(E)-Vinylphosphonate
  modified_base 2: mod_base = OTHER; note = 2'-deoxy-2'-fluorouridine-3'-phosphate
  modified_base 3: mod_base = OTHER; note = 2'-O-methyluridine-3'-phosphate
  modified_base 4: mod_base = OTHER; note = 2'-O-methylcytidine-3'-phosphate
  modified_base 5: mod_base = OTHER; note = 2'-O-methyladenosine-3'-phosphate
  modified_base 6: mod_base = OTHER; note = 2'-deoxy-2'-fluorouridine-3'-phosphate
  modified_base 7: mod_base = OTHER; note = 2'-O-methyluridine-3'-phosphate
  modified_base 8: mod_base = OTHER; note = 2'-O-methylguanosine-3'-phosphate
  modified_base 9: mod_base = OTHER; note = 2'-O-methyluridine-3'-phosphate
  modified_base 10: mod_base = OTHER; note = 2'-O-methyladenosine-3'-phosphate
  modified_base 11: mod_base = OTHER; note = 2'-O-methyluridine-3'-phosphate
  modified_base 12: mod_base = OTHER; note = 2'-O-methylcytidine-3'-phosphate
  modified_base 13: mod_base = OTHER; note = 2'-O-methyladenosine-3'-phosphate
  modified_base 14: mod_base = OTHER; note = 2'-deoxy-2'-fluorouridine-3'-phosphate
  modified_base 15: mod_base = OTHER; note = 2'-O-methylcytidine-3'-phosphate
  modified_base 16: mod_base = OTHER; note = 2'-deoxy-2'-fluoroadenosine-3'-phosphate
  modified_base 17: mod_base = OTHER; note = 2'-O-methyladenosine-3'-phosphate
  modified_base 18: mod_base = OTHER; note = 2'-O-methylguanosine-3'-phosphate
  modified_base 19: mod_base = OTHER; note = 2'-O-methylcytidine-3'-phosphate
  modified_base 20: mod_base = OTHER; note = 2'-O-methyladenosine-3'-phosphate
  modified_base 21: mod_base = OTHER; note = 2'-O-methyluridine-3'-phosphate
  modified_base 22: mod_base = OTHER; note = 2'-O-methyluridine-3'-phosphate
  modified_base 23: mod_base = OTHER; note = 2'-O-methyluridine
tttcattgtatcatcaagcattt

SEQ ID NO: 4821 - RNA, 23 nt, synthetic construct
  source 1..23: mol_type = other RNA
  modified_base 1: mod_base = OTHER; note = 2'-O-methyluridine-3'-phosphate 5'-(E)-Vinylphosphonate
  modified_base 2: mod_base = OTHER; note = 2'-deoxy-2'-fluoroadenosine-3'-phosphate
  modified_base 3: mod_base = OTHER; note = 2'-O-methyluridine-3'-phosphate
  modified_base 4: mod_base = OTHER; note = 2'-O-methyluridine-3'-phosphate
  modified_base 5: mod_base = OTHER; note = 2'-O-methylcytidine-3'-phosphate
  modified_base 6: mod_base = OTHER; note = 2'-deoxy-2'-fluoroadenosine-3'-phosphate
  modified_base 7: mod_base = OTHER; note = 2'-O-methyluridine-3'-phosphate
  modified_base 8: mod_base = OTHER; note = 2'-O-methyluridine-3'-phosphate
  modified_base 9: mod_base = OTHER; note = 2'-O-methylguanosine-3'-phosphate
  modified_base 10: mod_base = OTHER; note = 2'-O-methyluridine-3'-phosphate
  modified_base 11: mod_base = OTHER; note = 2'-O-methyladenosine-3'-phosphate
  modified_base 12: mod_base = OTHER; note = 2'-O-methyluridine-3'-phosphate
  modified_base 13: mod_base = OTHER; note = 2'-O-methylcytidine-3'-phosphate
  modified_base 14: mod_base = OTHER; note = 2'-deoxy-2'-fluoroadenosine-3'-phosphate
  modified_base 15: mod_base = OTHER; note = 2'-O-methyluridine-3'-phosphate
  modified_base 16: mod_base = OTHER; note = 2'-deoxy-2'-fluorocytidine-3'-phosphate
  modified_base 17: mod_base = OTHER; note = 2'-O-methyladenosine-3'-phosphate
  modified_base 18: mod_base = OTHER; note = 2'-O-methyladenosine-3'-phosphate
  modified_base 19: mod_base = OTHER; note = 2'-O-methylguanosine-3'-phosphate
  modified_base 20: mod_base = OTHER; note = 2'-O-methylcytidine-3'-phosphate
  modified_base 21: mod_base = OTHER; note = 2'-O-methyladenosine-3'-phosphate
  modified_base 22: mod_base = OTHER; note = 2'-O-methyluridine-3'-phosphate
  modified_base 23: mod_base = OTHER; note = 2'-O-methyluridine
tattcattgtatcatcaagcatt

SEQ ID NO: 4822 - RNA, 23 nt, synthetic construct
  source 1..23: mol_type = other RNA
  modified_base 1: mod_base = OTHER; note = 2'-O-methyluridine-3'-phosphate 5'-(E)-Vinylphosphonate
  modified_base 2: mod_base = OTHER; note = 2'-deoxy-2'-fluorocytidine-3'-phosphate
  modified_base 3: mod_base = OTHER; note = 2'-O-methyladenosine-3'-phosphate
  modified_base 4: mod_base = OTHER; note = 2'-O-methyluridine-3'-phosphate
  modified_base 5: mod_base = OTHER; note = 2'-O-methyluridine-3'-phosphate
  modified_base 6: mod_base = OTHER; note = 2'-deoxy-2'-fluorocytidine-3'-phosphate
  modified_base 7: mod_base = OTHER; note = 2'-O-methyladenosine-3'-phosphate
  modified_base 8: mod_base = OTHER; note = 2'-O-methyluridine-3'-phosphate
  modified_base 9: mod_base = OTHER; note = 2'-O-methyluridine-3'-phosphate
  modified_base 10: mod_base = OTHER; note = 2'-O-methylguanosine-3'-phosphate
  modified_base 11: mod_base = OTHER; note = 2'-O-methyluridine-3'-phosphate
  modified_base 12: mod_base = OTHER; note = 2'-O-methyladenosine-3'-phosphate
  modified_base 13: mod_base = OTHER; note = 2'-O-methyluridine-3'-phosphate
  modified_base 14: mod_base = OTHER; note = 2'-deoxy-2'-fluorocytidine-3'-phosphate
  modified_base 15: mod_base = OTHER; note = 2'-O-methyladenosine-3'-phosphate
  modified_base 16: mod_base = OTHER; note = 2'-deoxy-2'-fluorouridine-3'-phosphate
  modified_base 17: mod_base = OTHER; note = 2'-O-methylcytidine-3'-phosphate
  modified_base 18: mod_base = OTHER; note = 2'-O-methyladenosine-3'-phosphate
  modified_base 19: mod_base = OTHER; note = 2'-O-methyladenosine-3'-phosphate
  modified_base 20: mod_base = OTHER; note = 2'-O-methylguanosine-3'-phosphate
  modified_base 21: mod_base = OTHER; note = 2'-O-methylcytidine-3'-phosphate
  modified_base 22: mod_base = OTHER; note = 2'-O-methyladenosine-3'-phosphate
  modified_base 23: mod_base = OTHER; note = 2'-O-methyluridine
tcattcattgtatcatcaagcat

SEQ ID NO: 4823 - RNA, 23 nt, synthetic construct
  source 1..23: mol_type = other RNA
  modified_base 1: mod_base = OTHER; note = 2'-O-methyluridine-3'-phosphate 5'-(E)-Vinylphosphonate
  modified_base 2: mod_base = OTHER; note = 2'-deoxy-2'-fluoroadenosine-3'-phosphate
  modified_base 3: mod_base = OTHER; note = 2'-O-methylcytidine-3'-phosphate
  modified_base 4: mod_base = OTHER; note = 2'-O-methyladenosine-3'-phosphate
  modified_base 5: mod_base = OTHER; note = 2'-O-methyluridine-3'-phosphate
  modified_base 6: mod_base = OTHER; note = 2'-deoxy-2'-fluorouridine-3'-phosphate
  modified_base 7: mod_base = OTHER; note = 2'-O-methylcytidine-3'-phosphate
  modified_base 8: mod_base = OTHER; note = 2'-O-methyladenosine-3'-phosphate
  modified_base 9: mod_base = OTHER; note = 2'-O-methyluridine-3'-phosphate
  modified_base 10: mod_base = OTHER; note = 2'-O-methyluridine-3'-phosphate
  modified_base 11: mod_base = OTHER; note = 2'-O-methylguanosine-3'-phosphate
  modified_base 12: mod_base = OTHER; note = 2'-O-methyluridine-3'-phosphate
  modified_base 13: mod_base = OTHER; note = 2'-O-methyladenosine-3'-phosphate
  modified_base 14: mod_base = OTHER; note = 2'-deoxy-2'-fluorouridine-3'-phosphate
  modified_base 15: mod_base = OTHER; note = 2'-O-methylcytidine-3'-phosphate
  modified_base 16: mod_base = OTHER; note = 2'-deoxy-2'-fluoroadenosine-3'-phosphate
  modified_base 17: mod_base = OTHER; note = 2'-O-methyluridine-3'-phosphate
  modified_base 18: mod_base = OTHER; note = 2'-O-methylcytidine-3'-phosphate
  modified_base 19: mod_base = OTHER; note = 2'-O-methyladenosine-3'-phosphate
  modified_base 20: mod_base = OTHER; note = 2'-O-methyladenosine-3'-phosphate
  modified_base 21: mod_base = OTHER; note = 2'-O-methylguanosine-3'-phosphate
  modified_base 22: mod_base = OTHER; note = 2'-O-methylcytidine-3'-phosphate
  modified_base 23: mod_base = OTHER; note = 2'-O-methyladenosine
tacattcattgtatcatcaagca

SEQ ID NO: 4824 - RNA, 23 nt, synthetic construct
  source 1..23: mol_type = other RNA
  modified_base 1: mod_base = OTHER; note = 2'-O-methyluridine-3'-phosphate 5'-(E)-Vinylphosphonate
  modified_base 2: mod_base = OTHER; note = 2'-deoxy-2'-fluorocytidine-3'-phosphate
  modified_base 3: mod_base = OTHER; note = 2'-O-methyladenosine-3'-phosphate
  modified_base 4: mod_base = OTHER; note = 2'-O-methylcytidine-3'-phosphate
  modified_base 5: mod_base = OTHER; note = 2'-O-methyladenosine-3'-phosphate
  modified_base 6: mod_base = OTHER; note = 2'-deoxy-2'-fluorouridine-3'-phosphate
  modified_base 7: mod_base = OTHER; note = 2'-O-methyluridine-3'-phosphate
  modified_base 8: mod_base = OTHER; note = 2'-O-methylcytidine-3'-phosphate
  modified_base 9: mod_base = OTHER; note = 2'-O-methyladenosine-3'-phosphate
  modified_base 10: mod_base = OTHER; note = 2'-O-methyluridine-3'-phosphate
  modified_base 11: mod_base = OTHER; note = 2'-O-methyluridine-3'-phosphate
  modified_base 12: mod_base = OTHER; note = 2'-O-methylguanosine-3'-phosphate
  modified_base 13: mod_base = OTHER; note = 2'-O-methyluridine-3'-phosphate
  modified_base 14: mod_base = OTHER; note = 2'-deoxy-2'-fluoroadenosine-3'-phosphate
  modified_base 15: mod_base = OTHER; note = 2'-O-methyluridine-3'-phosphate
  modified_base 16: mod_base = OTHER; note = 2'-deoxy-2'-fluorocytidine-3'-phosphate
  modified_base 17: mod_base = OTHER; note = 2'-O-methyladenosine-3'-phosphate
  modified_base 18: mod_base = OTHER; note = 2'-O-methyluridine-3'-phosphate
  modified_base 19: mod_base = OTHER; note = 2'-O-methylcytidine-3'-phosphate
  modified_base 20: mod_base = OTHER; note = 2'-O-methyladenosine-3'-phosphate
  modified_base 21: mod_base = OTHER; note = 2'-O-methyladenosine-3'-phosphate
  modified_base 22: mod_base = OTHER; note = 2'-O-methylguanosine-3'-phosphate
  modified_base 23: mod_base = OTHER; note = 2'-O-methylcytidine
tcacattcattgtatcatcaagc

SEQ ID NO: 4825 - RNA, 23 nt, synthetic construct
  source 1..23: mol_type = other RNA
  modified_base 1: mod_base = OTHER; note = 2'-O-methyluridine-3'-phosphate 5'-(E)-Vinylphosphonate
  modified_base 2: mod_base = OTHER; note = 2'-deoxy-2'-fluorouridine-3'-phosphate
  modified_base 3: mod_base = OTHER; note = 2'-O-methylcytidine-3'-phosphate
  modified_base 4: mod_base = OTHER; note = 2'-O-methyladenosine-3'-phosphate
  modified_base 5: mod_base = OTHER; note = 2'-O-methylcytidine-3'-phosphate
  modified_base 6: mod_base = OTHER; note = 2'-deoxy-2'-fluoroadenosine-3'-phosphate
  modified_base 7: mod_base = OTHER; note = 2'-O-methyluridine-3'-phosphate
  modified_base 8: mod_base = OTHER; note = 2'-O-methyluridine-3'-phosphate
  modified_base 9: mod_base = OTHER; note = 2'-O-methylcytidine-3'-phosphate
  modified_base 10: mod_base = OTHER; note = 2'-O-methyladenosine-3'-phosphate
  modified_base 11: mod_base = OTHER; note = 2'-O-methyluridine-3'-phosphate
  modified_base 12: mod_base = OTHER; note = 2'-O-methyluridine-3'-phosphate
  modified_base 13: mod_base = OTHER; note = 2'-O-methylguanosine-3'-phosphate
  modified_base 14: mod_base = OTHER; note = 2'-deoxy-2'-fluorouridine-3'-phosphate
  modified_base 15: mod_base = OTHER; note = 2'-O-methyladenosine-3'-phosphate
  modified_base 16: mod_base = OTHER; note = 2'-deoxy-2'-fluorouridine-3'-phosphate
  modified_base 17: mod_base = OTHER; note = 2'-O-methylcytidine-3'-phosphate
  modified_base 18: mod_base = OTHER; note = 2'-O-methyladenosine-3'-phosphate
  modified_base 19: mod_base = OTHER; note = 2'-O-methyluridine-3'-phosphate
  modified_base 20: mod_base = OTHER; note = 2'-O-methylcytidine-3'-phosphate
  modified_base 21: mod_base = OTHER; note = 2'-O-methyladenosine-3'-phosphate
  modified_base 22: mod_base = OTHER; note = 2'-O-methyladenosine-3'-phosphate
  modified_base 23: mod_base = OTHER; note = 2'-O-methylguanosine
ttcacattcattgtatcatcaag

SEQ ID NO: 4826 - RNA, 23 nt, synthetic construct
  source 1..23: mol_type = other RNA
  modified_base 1: mod_base = OTHER; note = 2'-O-methyluridine-3'-phosphate 5'-(E)-Vinylphosphonate
  modified_base 2: mod_base = OTHER; note = 2'-deoxy-2'-fluorouridine-3'-phosphate
  modified_base 3: mod_base = OTHER; note = 2'-O-methyluridine-3'-phosphate
  modified_base 4: mod_base = OTHER; note = 2'-O-methylcytidine-3'-phosphate
  modified_base 5: mod_base = OTHER; note = 2'-O-methyladenosine-3'-phosphate
  modified_base 6: mod_base = OTHER; note = 2'-deoxy-2'-fluorocytidine-3'-phosphate
  modified_base 7: mod_base = OTHER; note = 2'-O-methyladenosine-3'-phosphate
  modified_base 8: mod_base = OTHER; note = 2'-O-methyluridine-3'-phosphate
  modified_base 9: mod_base = OTHER; note = 2'-O-methyluridine-3'-phosphate
  modified_base 10: mod_base = OTHER; note = 2'-O-methylcytidine-3'-phosphate
  modified_base 11: mod_base = OTHER; note = 2'-O-methyladenosine-3'-phosphate
  modified_base 12: mod_base = OTHER; note = 2'-O-methyluridine-3'-phosphate
  modified_base 13: mod_base = OTHER; note = 2'-O-methyluridine-3'-phosphate
  modified_base 14: mod_base = OTHER; note = 2'-deoxy-2'-fluoroguanosine-3'-phosphate
  modified_base 15: mod_base = OTHER; note = 2'-O-methyluridine-3'-phosphate
  modified_base 16: mod_base = OTHER; note = 2'-deoxy-2'-fluoroadenosine-3'-phosphate
  modified_base 17: mod_base = OTHER; note = 2'-O-methyluridine-3'-phosphate
  modified_base 18: mod_base = OTHER; note = 2'-O-methylcytidine-3'-phosphate
  modified_base 19: mod_base = OTHER; note = 2'-O-methyladenosine-3'-phosphate
  modified_base 20: mod_base = OTHER; note = 2'-O-methyluridine-3'-phosphate
  modified_base 21: mod_base = OTHER; note = 2'-O-methylcytidine-3'-phosphate
  modified_base 22: mod_base = OTHER; note = 2'-O-methyladenosine-3'-phosphate
  modified_base 23: mod_base = OTHER; note = 2'-O-methyladenosine
tttcacattcattgtatcatcaa

SEQ ID NO: 4827 - RNA, 23 nt, synthetic construct
  source 1..23: mol_type = other RNA
  modified_base 1: mod_base = OTHER; note = 2'-O-methyluridine-3'-phosphate 5'-(E)-Vinylphosphonate
  modified_base 2: mod_base = OTHER; note = 2'-deoxy-2'-fluoroadenosine-3'-phosphate
  modified_base 3: mod_base = OTHER; note = 2'-O-methyluridine-3'-phosphate
  modified_base 4: mod_base = OTHER; note = 2'-O-methyluridine-3'-phosphate
  modified_base 5: mod_base = OTHER; note = 2'-O-methylcytidine-3'-phosphate
  modified_base 6: mod_base = OTHER; note = 2'-deoxy-2'-fluoroadenosine-3'-phosphate
  modified_base 7: mod_base = OTHER; note = 2'-O-methylcytidine-3'-phosphate
  modified_base 8: mod_base = OTHER; note = 2'-O-methyladenosine-3'-phosphate
  modified_base 9: mod_base = OTHER; note = 2'-O-methyluridine-3'-phosphate
  modified_base 10: mod_base = OTHER; note = 2'-O-methyluridine-3'-phosphate
  modified_base 11: mod_base = OTHER; note = 2'-O-methylcytidine-3'-phosphate
  modified_base 12: mod_base = OTHER; note = 2'-O-methyladenosine-3'-phosphate
  modified_base 13: mod_base = OTHER; note = 2'-O-methyluridine-3'-phosphate
  modified_base 14: mod_base = OTHER; note = 2'-deoxy-2'-fluorouridine-3'-phosphate
  modified_base 15: mod_base = OTHER; note = 2'-O-methylguanosine-3'-phosphate
  modified_base 16: mod_base = OTHER; note = 2'-deoxy-2'-fluorouridine-3'-phosphate
  modified_base 17: mod_base = OTHER; note = 2'-O-methyladenosine-3'-phosphate
  modified_base 18: mod_base = OTHER; note = 2'-O-methyluridine-3'-phosphate
  modified_base 19: mod_base = OTHER; note = 2'-O-methylcytidine-3'-phosphate
  modified_base 20: mod_base = OTHER; note = 2'-O-methyladenosine-3'-phosphate
  modified_base 21: mod_base = OTHER; note = 2'-O-methyluridine-3'-phosphate
  modified_base 22: mod_base = OTHER; note = 2'-O-methylcytidine-3'-phosphate
  modified_base 23: mod_base = OTHER; note = 2'-O-methyladenosine
tattcacattcattgtatcatca

SEQ ID NO: 4828 - RNA, 23 nt, synthetic construct
  source 1..23: mol_type = other RNA
  modified_base 1: mod_base = OTHER; note = 2'-O-methyluridine-3'-phosphate 5'-(E)-Vinylphosphonate
  modified_base 2: mod_base = OTHER; note = 2'-deoxy-2'-fluorouridine-3'-phosphate
  modified_base 3: mod_base = OTHER; note = 2'-O-methyladenosine-3'-phosphate
  modified_base 4: mod_base = OTHER; note = 2'-O-methyluridine-3'-phosphate
  modified_base 5: mod_base = OTHER; note = 2'-O-methyluridine-3'-phosphate
  modified_base 6: mod_base = OTHER; note = 2'-deoxy-2'-fluorocytidine-3'-phosphate
  modified_base 7: mod_base = OTHER; note = 2'-O-methyladenosine-3'-phosphate
  modified_base 8: mod_base = OTHER; note = 2'-O-methylcytidine-3'-phosphate
  modified_base 9: mod_base = OTHER; note = 2'-O-methyladenosine-3'-phosphate
  modified_base 10: mod_base = OTHER; note = 2'-O-methyluridine-3'-phosphate
  modified_base 11: mod_base = OTHER; note = 2'-O-methyluridine-3'-phosphate
  modified_base 12: mod_base = OTHER; note = 2'-O-methylcytidine-3'-phosphate
  modified_base 13: mod_base = OTHER; note = 2'-O-methyladenosine-3'-phosphate
  modified_base 14: mod_base = OTHER; note = 2'-deoxy-2'-fluorouridine-3'-phosphate
  modified_base 15: mod_base = OTHER; note = 2'-O-methyluridine-3'-phosphate
  modified_base 16: mod_base = OTHER; note = 2'-deoxy-2'-fluoroguanosine-3'-phosphate
  modified_base 17: mod_base = OTHER; note = 2'-O-methyluridine-3'-phosphate
  modified_base 18: mod_base = OTHER; note = 2'-O-methyladenosine-3'-phosphate
  modified_base 19: mod_base = OTHER; note = 2'-O-methyluridine-3'-phosphate
  modified_base 20: mod_base = OTHER; note = 2'-O-methylcytidine-3'-phosphate
  modified_base 21: mod_base = OTHER; note = 2'-O-methyladenosine-3'-phosphate
  modified_base 22: mod_base = OTHER; note = 2'-O-methyluridine-3'-phosphate
  modified_base 23: mod_base = OTHER; note = 2'-O-methylcytidine
ttattcacattcattgtatcatc

SEQ ID NO: 4829 - RNA, 23 nt, synthetic construct
  source 1..23: mol_type = other RNA
  modified_base 1: mod_base = OTHER; note = 2'-O-methyluridine-3'-phosphate 5'-(E)-Vinylphosphonate
  modified_base 2: mod_base = OTHER; note = 2'-deoxy-2'-fluoroguanosine-3'-phosphate
  modified_base 3: mod_base = OTHER; note = 2'-O-methyladenosine-3'-phosphate
  modified_base 4: mod_base = OTHER; note = 2'-O-methyluridine-3'-phosphate
  modified_base 5: mod_base = OTHER; note = 2'-O-methyladenosine-3'-phosphate
  modified_base 6: mod_base = OTHER; note = 2'-deoxy-2'-fluorouridine-3'-phosphate
  modified_base 7: mod_base = OTHER; note = 2'-O-methyluridine-3'-phosphate
  modified_base 8: mod_base = OTHER; note = 2'-O-methylcytidine-3'-phosphate
  modified_base 9: mod_base = OTHER; note = 2'-O-methyladenosine-3'-phosphate
  modified_base 10: mod_base = OTHER; note = 2'-O-methylcytidine-3'-phosphate
  modified_base 11: mod_base = OTHER; note = 2'-O-methyladenosine-3'-phosphate
  modified_base 12: mod_base = OTHER; note = 2'-O-methyluridine-3'-phosphate
  modified_base 13: mod_base = OTHER; note = 2'-O-methyluridine-3'-phosphate
  modified_base 14: mod_base = OTHER; note = 2'-deoxy-2'-fluorocytidine-3'-phosphate
  modified_base 15: mod_base = OTHER; note = 2'-O-methyladenosine-3'-phosphate
  modified_base 16: mod_base = OTHER; note = 2'-deoxy-2'-fluorouridine-3'-phosphate
  modified_base 17: mod_base = OTHER; note = 2'-O-methyluridine-3'-phosphate
  modified_base 18: mod_base = OTHER; note = 2'-O-methylguanosine-3'-phosphate
  modified_base 19: mod_base = OTHER; note = 2'-O-methyluridine-3'-phosphate
  modified_base 20: mod_base = OTHER; note = 2'-O-methyladenosine-3'-phosphate
  modified_base 21: mod_base = OTHER; note = 2'-O-methyluridine-3'-phosphate
  modified_base 22: mod_base = OTHER; note = 2'-O-methylcytidine-3'-phosphate
  modified_base 23: mod_base = OTHER; note = 2'-O-methyladenosine
tgatattcacattcattgtatca

SEQ ID NO: 4830 - RNA, 23 nt, synthetic construct
  source 1..23: mol_type = other RNA
  modified_base 1: mod_base = OTHER; note = 2'-O-methyluridine-3'-phosphate 5'-(E)-Vinylphosphonate
  modified_base 2: mod_base = OTHER; note = 2'-deoxy-2'-fluoroadenosine-3'-phosphate
  modified_base 3: mod_base = OTHER; note = 2'-O-methylguanosine-3'-phosphate
  modified_base 4: mod_base = OTHER; note = 2'-O-methyladenosine-3'-phosphate
  modified_base 5: mod_base = OTHER; note = 2'-O-methyluridine-3'-phosphate
  modified_base 6: mod_base = OTHER; note = 2'-deoxy-2'-fluoroadenosine-3'-phosphate
  modified_base 7: mod_base = OTHER; note = 2'-O-methyluridine-3'-phosphate
  modified_base 8: mod_base = OTHER; note = 2'-O-methyluridine-3'-phosphate
  modified_base 9: mod_base = OTHER; note = 2'-O-methylcytidine-3'-phosphate
  modified_base 10: mod_base = OTHER; note = 2'-O-methyladenosine-3'-phosphate
  modified_base 11: mod_base = OTHER; note = 2'-O-methylcytidine-3'-phosphate
  modified_base 12: mod_base = OTHER; note = 2'-O-methyladenosine-3'-phosphate
  modified_base 13: mod_base = OTHER; note = 2'-O-methyluridine-3'-phosphate
  modified_base 14: mod_base = OTHER; note = 2'-deoxy-2'-fluorouridine-3'-phosphate
  modified_base 15: mod_base = OTHER; note = 2'-O-methylcytidine-3'-phosphate
  modified_base 16: mod_base = OTHER; note = 2'-deoxy-2'-fluoroadenosine-3'-phosphate
  modified_base 17: mod_base = OTHER; note = 2'-O-methyluridine-3'-phosphate
  modified_base 18: mod_base = OTHER; note = 2'-O-methyluridine-3'-phosphate
  modified_base 19: mod_base = OTHER; note = 2'-O-methylguanosine-3'-phosphate
  modified_base 20: mod_base = OTHER; note = 2'-O-methyluridine-3'-phosphate
  modified_base 21: mod_base = OTHER; note = 2'-O-methyladenosine-3'-phosphate
  modified_base 22: mod_base = OTHER; note = 2'-O-methyluridine-3'-phosphate
  modified_base 23: mod_base = OTHER; note = 2'-O-methylcytidine
tagatattcacattcattgtatc

SEQ ID NO: 4831 - RNA, 23 nt, synthetic construct
  source 1..23: mol_type = other RNA
  modified_base 1: mod_base = OTHER; note = 2'-O-methyluridine-3'-phosphate 5'-(E)-Vinylphosphonate
  modified_base 2: mod_base = OTHER; note = 2'-deoxy-2'-fluorocytidine-3'-phosphate
  modified_base 3: mod_base = OTHER; note = 2'-O-methyladenosine-3'-phosphate
  modified_base 4: mod_base = OTHER; note = 2'-O-methyladenosine-3'-phosphate
  modified_base 5: mod_base = OTHER; note = 2'-O-methyladenosine-3'-phosphate
  modified_base 6: mod_base = OTHER; note = 2'-deoxy-2'-fluoroguanosine-3'-phosphate
  modified_base 7: mod_base = OTHER; note = 2'-O-methyladenosine-3'-phosphate
  modified_base 8: mod_base = OTHER; note = 2'-O-methyluridine-3'-phosphate
  modified_base 9: mod_base = OTHER; note = 2'-O-methyladenosine-3'-phosphate
  modified_base 10: mod_base = OTHER; note = 2'-O-methyluridine-3'-phosphate
  modified_base 11: mod_base = OTHER; note = 2'-O-methyluridine-3'-phosphate
  modified_base 12: mod_base = OTHER; note = 2'-O-methylcytidine-3'-phosphate
  modified_base 13: mod_base = OTHER; note = 2'-O-methyladenosine-3'-phosphate
  modified_base 14: mod_base = OTHER; note = 2'-deoxy-2'-fluorocytidine-3'-phosphate
  modified_base 15: mod_base = OTHER; note = 2'-O-methyladenosine-3'-phosphate
  modified_base 16: mod_base = OTHER; note = 2'-deoxy-2'-fluorouridine-3'-phosphate
  modified_base 17: mod_base = OTHER; note = 2'-O-methyluridine-3'-phosphate
  modified_base 18: mod_base = OTHER; note = 2'-O-methylcytidine-3'-phosphate
  modified_base 19: mod_base = OTHER; note = 2'-O-methyladenosine-3'-phosphate
  modified_base 20: mod_base = OTHER; note = 2'-O-methyluridine-3'-phosphate
  modified_base 21: mod_base = OTHER; note = 2'-O-methyluridine-3'-phosphate
  modified_base 22: mod_base = OTHER; note = 2'-O-methylguanosine-3'-phosphate
  modified_base 23: mod_base = OTHER; note = 2'-O-methyluridine
tcaaagatattcacattcattgt

SEQ ID NO: 4832 - RNA, 23 nt, synthetic construct
  source 1..23: mol_type = other RNA
  modified_base 1: mod_base = OTHER; note = 2'-O-methyluridine-3'-phosphate 5'-(E)-Vinylphosphonate
  modified_base 2: mod_base = OTHER; note = 2'-deoxy-2'-fluorouridine-3'-phosphate
  modified_base 3: mod_base = OTHER; note = 2'-O-methylcytidine-3'-phosphate
  modified_base 4: mod_base = OTHER; note = 2'-O-methyladenosine-3'-phosphate
  modified_base 5: mod_base = OTHER; note = 2'-O-methyladenosine-3'-phosphate
  modified_base 6: mod_base = OTHER; note = 2'-deoxy-2'-fluoroadenosine-3'-phosphate
  modified_base 7: mod_base = OTHER; note = 2'-O-methylguanosine-3'-phosphate
  modified_base 8: mod_base = OTHER; note = 2'-O-methyladenosine-3'-phosphate
  modified_base 9: mod_base = OTHER; note = 2'-O-methyluridine-3'-phosphate
  modified_base 10: mod_base = OTHER; note = 2'-O-methyladenosine-3'-phosphate
  modified_base 11: mod_base = OTHER; note = 2'-O-methyluridine-3'-phosphate
  modified_base 12: mod_base = OTHER; note = 2'-O-methyluridine-3'-phosphate
  modified_base 13: mod_base = OTHER; note = 2'-O-methylcytidine-3'-phosphate
  modified_base 14: mod_base = OTHER; note = 2'-deoxy-2'-fluoroadenosine-3'-phosphate
  modified_base 15: mod_base = OTHER; note = 2'-O-methylcytidine-3'-phosphate
  modified_base 16: mod_base = OTHER; note = 2'-deoxy-2'-fluoroadenosine-3'-phosphate
  modified_base 17: mod_base = OTHER; note = 2'-O-methyluridine-3'-phosphate
  modified_base 18: mod_base = OTHER; note = 2'-O-methyluridine-3'-phosphate
  modified_base 19: mod_base = OTHER; note = 2'-O-methylcytidine-3'-phosphate
  modified_base 20: mod_base = OTHER; note = 2'-O-methyladenosine-3'-phosphate
  modified_base 21: mod_base = OTHER; note = 2'-O-methyluridine-3'-phosphate
  modified_base 22: mod_base = OTHER; note = 2'-O-methyluridine-3'-phosphate
  modified_base 23: mod_base = OTHER; note = 2'-O-methylguanosine
ttcaaagatattcacattcattg

SEQ ID NO: 4833 - RNA, 23 nt, synthetic construct
  source 1..23: mol_type = other RNA
  modified_base 1: mod_base = OTHER; note = 2'-O-methyluridine-3'-phosphate 5'-(E)-Vinylphosphonate
  modified_base 2: mod_base = OTHER; note = 2'-deoxy-2'-fluorocytidine-3'-phosphate
  modified_base 3: mod_base = OTHER; note = 2'-O-methyluridine-3'-phosphate
  modified_base 4: mod_base = OTHER; note = 2'-O-methylcytidine-3'-phosphate
  modified_base 5: mod_base = OTHER; note = 2'-O-methyladenosine-3'-phosphate
  modified_base 6: mod_base = OTHER; note = 2'-deoxy-2'-fluoroadenosine-3'-phosphate
  modified_base 7: mod_base = OTHER; note = 2'-O-methyladenosine-3'-phosphate
  modified_base 8: mod_base = OTHER; note = 2'-O-methylguanosine-3'-phosphate
  modified_base 9: mod_base = OTHER; note = 2'-O-methyladenosine-3'-phosphate
  modified_base 10: mod_base = OTHER; note = 2'-O-methyluridine-3'-phosphate
  modified_base 11: mod_base = OTHER; note = 2'-O-methyladenosine-3'-phosphate
  modified_base 12: mod_base = OTHER; note = 2'-O-methyluridine-3'-phosphate
  modified_base 13: mod_base = OTHER; note = 2'-O-methyluridine-3'-phosphate
  modified_base 14: mod_base = OTHER; note = 2'-deoxy-2'-fluorocytidine-3'-phosphate
  modified_base 15: mod_base = OTHER; note = 2'-O-methyladenosine-3'-phosphate
  modified_base 16: mod_base = OTHER; note = 2'-deoxy-2'-fluorocytidine-3'-phosphate
  modified_base 17: mod_base = OTHER; note = 2'-O-methyladenosine-3'-phosphate
  modified_base 18: mod_base = OTHER; note = 2'-O-methyluridine-3'-phosphate
  modified_base 19: mod_base = OTHER; note = 2'-O-methyluridine-3'-phosphate
  modified_base 20: mod_base = OTHER; note = 2'-O-methylcytidine-3'-phosphate
  modified_base 21: mod_base = OTHER; note = 2'-O-methyladenosine-3'-phosphate
  modified_base 22: mod_base = OTHER; note = 2'-O-methyluridine-3'-phosphate
  modified_base 23: mod_base = OTHER; note = 2'-O-methyluridine
tctcaaagatattcacattcatt

SEQ ID NO: 4834 - RNA, 23 nt, synthetic construct
  source 1..23: mol_type = other RNA
  modified_base 1: mod_base = OTHER; note = 2'-O-methyluridine-3'-phosphate 5'-(E)-Vinylphosphonate
  modified_base 2: mod_base = OTHER; note = 2'-deoxy-2'-fluoroadenosine-3'-phosphate
  modified_base 3: mod_base = OTHER; note = 2'-O-methylcytidine-3'-phosphate
  modified_base 4: mod_base = OTHER; note = 2'-O-methyluridine-3'-phosphate
  modified_base 5: mod_base = OTHER; note = 2'-O-methylcytidine-3'-phosphate
  modified_base 6: mod_base = OTHER; note = 2'-deoxy-2'-fluoroadenosine-3'-phosphate
  modified_base 7: mod_base = OTHER; note = 2'-O-methyladenosine-3'-phosphate
  modified_base 8: mod_base = OTHER; note = 2'-O-methyladenosine-3'-phosphate
  modified_base 9: mod_base = OTHER; note = 2'-O-methylguanosine-3'-phosphate
  modified_base 10: mod_base = OTHER; note = 2'-O-methyladenosine-3'-phosphate
  modified_base 11: mod_base = OTHER; note = 2'-O-methyluridine-3'-phosphate
  modified_base 12: mod_base = OTHER; note = 2'-O-methyladenosine-3'-phosphate
  modified_base 13: mod_base = OTHER; note = 2'-O-methyluridine-3'-phosphate
  modified_base 14: mod_base = OTHER; note = 2'-deoxy-2'-fluorouridine-3'-phosphate
  modified_base 15: mod_base = OTHER; note = 2'-O-methylcytidine-3'-phosphate
  modified_base 16: mod_base = OTHER; note = 2'-deoxy-2'-fluoroadenosine-3'-phosphate
  modified_base 17: mod_base = OTHER; note = 2'-O-methylcytidine-3'-phosphate
  modified_base 18: mod_base = OTHER; note = 2'-O-methyladenosine-3'-phosphate
  modified_base 19: mod_base = OTHER; note = 2'-O-methyluridine-3'-phosphate
  modified_base 20: mod_base = OTHER; note = 2'-O-methyluridine-3'-phosphate
  modified_base 21: mod_base = OTHER; note = 2'-O-methylcytidine-3'-phosphate
  modified_base 22: mod_base = OTHER; note = 2'-O-methyladenosine-3'-phosphate
  modified_base 23: mod_base = OTHER; note = 2'-O-methyluridine
tactcaaagatattcacattcat

SEQ ID NO: 4835 - RNA, 23 nt, synthetic construct
  source 1..23: mol_type = other RNA
  modified_base 1: mod_base = OTHER; note = 2'-O-methyluridine-3'-phosphate 5'-(E)-Vinylphosphonate
  modified_base 2: mod_base = OTHER; note = 2'-deoxy-2'-fluoroguanosine-3'-phosphate
  modified_base 3: mod_base = OTHER; note = 2'-O-methyladenosine-3'-phosphate
  modified_base 4: mod_base = OTHER; note = 2'-O-methylcytidine-3'-phosphate
  modified_base 5: mod_base = OTHER; note = 2'-O-methyluridine-3'-phosphate
  modified_base 6: mod_base = OTHER; note = 2'-deoxy-2'-fluorocytidine-3'-phosphate
  modified_base 7: mod_base = OTHER; note = 2'-O-methyladenosine-3'-phosphate
  modified_base 8: mod_base = OTHER; note = 2'-O-methyladenosine-3'-phosphate
  modified_base 9: mod_base = OTHER; note = 2'-O-methyladenosine-3'-phosphate
  modified_base 10: mod_base = OTHER; note = 2'-O-methylguanosine-3'-phosphate
  modified_base 11: mod_base = OTHER; note = 2'-O-methyladenosine-3'-phosphate
  modified_base 12: mod_base = OTHER; note = 2'-O-methyluridine-3'-phosphate
  modified_base 13: mod_base = OTHER; note = 2'-O-methyladenosine-3'-phosphate
  modified_base 14: mod_base = OTHER; note = 2'-deoxy-2'-fluorouridine-3'-phosphate
  modified_base 15: mod_base = OTHER; note = 2'-O-methyluridine-3'-phosphate
  modified_base 16: mod_base = OTHER; note = 2'-deoxy-2'-fluorocytidine-3'-phosphate
  modified_base 17: mod_base = OTHER; note = 2'-O-methyladenosine-3'-phosphate
  modified_base 18: mod_base = OTHER; note = 2'-O-methylcytidine-3'-phosphate
  modified_base 19: mod_base = OTHER; note = 2'-O-methyladenosine-3'-phosphate
  modified_base 20: mod_base = OTHER; note = 2'-O-methyluridine-3'-phosphate
  modified_base 21: mod_base = OTHER; note = 2'-O-methyluridine-3'-phosphate
  modified_base 22: mod_base = OTHER; note = 2'-O-methylcytidine-3'-phosphate
  modified_base 23: mod_base = OTHER; note = 2'-O-methyladenosine
tgactcaaagatattcacattca

SEQ ID NO: 4836 - RNA, 23 nt, synthetic construct
  source 1..23: mol_type = other RNA
  modified_base 1: mod_base = OTHER; note = 2'-O-methyluridine-3'-phosphate 5'-(E)-Vinylphosphonate
  modified_base 2: mod_base = OTHER; note = 2'-deoxy-2'-fluoroguanosine-3'-phosphate
  modified_base 3: mod_base = OTHER; note = 2'-O-methylguanosine-3'-phosphate
  modified_base 4: mod_base = OTHER; note = 2'-O-methyladenosine-3'-phosphate
  modified_base 5: mod_base = OTHER; note = 2'-O-methylcytidine-3'-phosphate
  modified_base 6: mod_base = OTHER; note = 2'-deoxy-2'-fluorouridine-3'-phosphate
  modified_base 7: mod_base = OTHER; note = 2'-O-methylcytidine-3'-phosphate
  modified_base 8: mod_base = OTHER; note = 2'-O-methyladenosine-3'-phosphate
  modified_base 9: mod_base = OTHER; note = 2'-O-methyladenosine-3'-phosphate
  modified_base 10: mod_base = OTHER; note = 2'-O-methyladenosine-3'-phosphate
  modified_base 11: mod_base = OTHER; note = 2'-O-methylguanosine-3'-phosphate
  modified_base 12: mod_base = OTHER; note = 2'-O-methyladenosine-3'-phosphate
  modified_base 13: mod_base = OTHER; note = 2'-O-methyluridine-3'-phosphate
  modified_base 14: mod_base = OTHER; note = 2'-deoxy-2'-fluoroadenosine-3'-phosphate
  modified_base 15: mod_base = OTHER; note = 2'-O-methyluridine-3'-phosphate
  modified_base 16: mod_base = OTHER; note = 2'-deoxy-2'-fluorouridine-3'-phosphate
  modified_base 17: mod_base = OTHER; note = 2'-O-methylcytidine-3'-phosphate
  modified_base 18: mod_base = OTHER; note = 2'-O-methyladenosine-3'-phosphate
  modified_base 19: mod_base = OTHER; note = 2'-O-methylcytidine-3'-phosphate
  modified_base 20: mod_base = OTHER; note = 2'-O-methyladenosine-3'-phosphate
  modified_base 21: mod_base = OTHER; note = 2'-O-methyluridine-3'-phosphate
  modified_base 22: mod_base = OTHER; note = 2'-O-methyluridine-3'-phosphate
  modified_base 23: mod_base = OTHER; note = 2'-O-methylcytidine
tggactcaaagatattcacattc

SEQ ID NO: 4837 - RNA, 23 nt, synthetic construct
  source 1..23: mol_type = other RNA
  modified_base 1: mod_base = OTHER; note = 2'-O-methyluridine-3'-phosphate 5'-(E)-Vinylphosphonate
  modified_base 2: mod_base = OTHER; note = 2'-deoxy-2'-fluoroadenosine-3'-phosphate
  modified_base 3: mod_base = OTHER; note = 2'-O-methylguanosine-3'-phosphate
  modified_base 4: mod_base = OTHER; note = 2'-O-methylguanosine-3'-phosphate
  modified_base 5: mod_base = OTHER; note = 2'-O-methyladenosine-3'-phosphate
  modified_base 6: mod_base = OTHER; note = 2'-deoxy-2'-fluorocytidine-3'-phosphate
  modified_base 7: mod_base = OTHER; note = 2'-O-methyluridine-3'-phosphate
  modified_base 8: mod_base = OTHER; note = 2'-O-methylcytidine-3'-phosphate
  modified_base 9: mod_base = OTHER; note = 2'-O-methyladenosine-3'-phosphate
  modified_base 10: mod_base = OTHER; note = 2'-O-methyladenosine-3'-phosphate
  modified_base 11: mod_base = OTHER; note = 2'-O-methyladenosine-3'-phosphate
  modified_base 12: mod_base = OTHER; note = 2'-O-methylguanosine-3'-phosphate
  modified_base 13: mod_base = OTHER; note = 2'-O-methyladenosine-3'-phosphate
  modified_base 14: mod_base = OTHER; note = 2'-deoxy-2'-fluorouridine-3'-phosphate
  modified_base 15: mod_base = OTHER; note = 2'-O-methyladenosine-3'-phosphate
  modified_base 16: mod_base = OTHER; note = 2'-deoxy-2'-fluorouridine-3'-phosphate
  modified_base 17: mod_base = OTHER; note = 2'-O-methyluridine-3'-phosphate
  modified_base 18: mod_base = OTHER; note = 2'-O-methylcytidine-3'-phosphate
  modified_base 19: mod_base = OTHER; note = 2'-O-methyladenosine-3'-phosphate
  modified_base 20: mod_base = OTHER; note = 2'-O-methylcytidine-3'-phosphate
  modified_base 21: mod_base = OTHER; note = 2'-O-methyladenosine-3'-phosphate
  modified_base 22: mod_base = OTHER; note = 2'-O-methyluridine-3'-phosphate
  modified_base 23: mod_base = OTHER; note = 2'-O-methyluridine
taggactcaaagatattcacatt

SEQ ID NO: 4838 - RNA, 23 nt, synthetic construct
  source 1..23: mol_type = other RNA
  modified_base 1: mod_base = OTHER; note = 2'-O-methyluridine-3'-phosphate 5'-(E)-Vinylphosphonate
  modified_base 2: mod_base = OTHER; note = 2'-deoxy-2'-fluoroadenosine-3'-phosphate
  modified_base 3: mod_base = OTHER; note = 2'-O-methyladenosine-3'-phosphate
  modified_base 4: mod_base = OTHER; note = 2'-O-methylguanosine-3'-phosphate
  modified_base 5: mod_base = OTHER; note = 2'-O-methylguanosine-3'-phosphate
  modified_base 6: mod_base = OTHER; note = 2'-deoxy-2'-fluoroadenosine-3'-phosphate
  modified_base 7: mod_base = OTHER; note = 2'-O-methylcytidine-3'-phosphate
  modified_base 8: mod_base = OTHER; note = 2'-O-methyluridine-3'-phosphate
  modified_base 9: mod_base = OTHER; note = 2'-O-methylcytidine-3'-phosphate
  modified_base 10: mod_base = OTHER; note = 2'-O-methyladenosine-3'-phosphate
  modified_base 11: mod_base = OTHER; note = 2'-O-methyladenosine-3'-phosphate
  modified_base 12: mod_base = OTHER; note = 2'-O-methyladenosine-3'-phosphate
  modified_base 13: mod_base = OTHER; note = 2'-O-methylguanosine-3'-phosphate
  modified_base 14: mod_base = OTHER; note = 2'-deoxy-2'-fluoroadenosine-3'-phosphate
  modified_base 15: mod_base = OTHER; note = 2'-O-methyluridine-3'-phosphate
  modified_base 16: mod_base = OTHER; note = 2'-deoxy-2'-fluoroadenosine-3'-phosphate
  modified_base 17: mod_base = OTHER; note = 2'-O-methyluridine-3'-phosphate
  modified_base 18: mod_base = OTHER; note = 2'-O-methyluridine-3'-phosphate
  modified_base 19: mod_base = OTHER; note = 2'-O-methylcytidine-3'-phosphate
  modified_base 20: mod_base = OTHER; note = 2'-O-methyladenosine-3'-phosphate
  modified_base 21: mod_base = OTHER; note = 2'-O-methylcytidine-3'-phosphate
  modified_base 22: mod_base = OTHER; note = 2'-O-methyladenosine-3'-phosphate
  modified_base 23: mod_base = OTHER; note = 2'-O-methyluridine
taaggactcaaagatattcacat

SEQ ID NO: 4839 - RNA, 23 nt, synthetic construct
  source 1..23: mol_type = other RNA
  modified_base 1: mod_base = OTHER; note = 2'-O-methyluridine-3'-phosphate 5'-(E)-Vinylphosphonate
  modified_base 2: mod_base = OTHER; note = 2'-deoxy-2'-fluoroguanosine-3'-phosphate
  modified_base 3: mod_base = OTHER; note = 2'-O-methyladenosine-3'-phosphate
  modified_base 4: mod_base = OTHER; note = 2'-O-methyladenosine-3'-phosphate
  modified_base 5: mod_base = OTHER; note = 2'-O-methylguanosine-3'-phosphate
  modified_base 6: mod_base = OTHER; note = 2'-deoxy-2'-fluoroguanosine-3'-phosphate
  modified_base 7: mod_base = OTHER; note = 2'-O-methyladenosine-3'-phosphate
  modified_base 8: mod_base = OTHER; note = 2'-O-methylcytidine-3'-phosphate
  modified_base 9: mod_base = OTHER; note = 2'-O-methyluridine-3'-phosphate
  modified_base 10: mod_base = OTHER; note = 2'-O-methylcytidine-3'-phosphate
  modified_base 11: mod_base = OTHER; note = 2'-O-methyladenosine-3'-phosphate
  modified_base 12: mod_base = OTHER; note = 2'-O-methyladenosine-3'-phosphate
  modified_base 13: mod_base = OTHER; note = 2'-O-methyladenosine-3'-phosphate
  modified_base 14: mod_base = OTHER; note = 2'-deoxy-2'-fluoroguanosine-3'-phosphate
  modified_base 15: mod_base = OTHER; note = 2'-O-methyladenosine-3'-phosphate
  modified_base 16: mod_base = OTHER; note = 2'-deoxy-2'-fluorouridine-3'-phosphate
  modified_base 17: mod_base = OTHER; note = 2'-O-methyladenosine-3'-phosphate
  modified_base 18: mod_base = OTHER; note = 2'-O-methyluridine-3'-phosphate
  modified_base 19: mod_base = OTHER; note = 2'-O-methyluridine-3'-phosphate
  modified_base 20: mod_base = OTHER; note = 2'-O-methylcytidine-3'-phosphate
  modified_base 21: mod_base = OTHER; note = 2'-O-methyladenosine-3'-phosphate
  modified_base 22: mod_base = OTHER; note = 2'-O-methylcytidine-3'-phosphate
  modified_base 23: mod_base = OTHER; note = 2'-O-methyladenosine
tgaaggactcaaagatattcaca

SEQ ID NO: 4840 - RNA, 23 nt, synthetic construct
  source 1..23: mol_type = other RNA
  modified_base 1: mod_base = OTHER; note = 2'-O-methyluridine-3'-phosphate 5'-(E)-Vinylphosphonate
  modified_base 2: mod_base = OTHER; note = 2'-deoxy-2'-fluorouridine-3'-phosphate
  modified_base 3: mod_base = OTHER; note = 2'-O-methylguanosine-3'-phosphate
  modified_base 4: mod_base = OTHER; note = 2'-O-methyladenosine-3'-phosphate
  modified_base 5: mod_base = OTHER; note = 2'-O-methyladenosine-3'-phosphate
  modified_base 6: mod_base = OTHER; note = 2'-deoxy-2'-fluoroguanosine-3'-phosphate
  modified_base 7: mod_base = OTHER; note = 2'-O-methylguanosine-3'-phosphate
  modified_base 8: mod_base = OTHER; note = 2'-O-methyladenosine-3'-phosphate
  modified_base 9: mod_base = OTHER; note = 2'-O-methylcytidine-3'-phosphate
  modified_base 10: mod_base = OTHER; note = 2'-O-methyluridine-3'-phosphate
  modified_base 11: mod_base = OTHER; note = 2'-O-methylcytidine-3'-phosphate
  modified_base 12: mod_base = OTHER; note = 2'-O-methyladenosine-3'-phosphate
  modified_base 13: mod_base = OTHER; note = 2'-O-methyladenosine-3'-phosphate
  modified_base 14: mod_base = OTHER; note = 2'-deoxy-2'-fluoroadenosine-3'-phosphate
  modified_base 15: mod_base = OTHER; note = 2'-O-methylguanosine-3'-phosphate
  modified_base 16: mod_base = OTHER; note = 2'-deoxy-2'-fluoroadenosine-3'-phosphate
  modified_base 17: mod_base = OTHER; note = 2'-O-methyluridine-3'-phosphate
  modified_base 18: mod_base = OTHER; note = 2'-O-methyladenosine-3'-phosphate
  modified_base 19: mod_base = OTHER; note = 2'-O-methyluridine-3'-phosphate
  modified_base 20: mod_base = OTHER; note = 2'-O-methyluridine-3'-phosphate
  modified_base 21: mod_base = OTHER; note = 2'-O-methylcytidine-3'-phosphate
  modified_base 22: mod_base = OTHER; note = 2'-O-methyladenosine-3'-phosphate
  modified_base 23: mod_base = OTHER; note = 2'-O-methylcytidine
ttgaaggactcaaagatattcac

SEQ ID NO: 4841 - RNA, 23 nt, synthetic construct
  source 1..23: mol_type = other RNA
  modified_base 1: mod_base = OTHER; note = 2'-O-methyluridine-3'-phosphate 5'-(E)-Vinylphosphonate
  modified_base 2: mod_base = OTHER; note = 2'-deoxy-2'-fluorouridine-3'-phosphate
  modified_base 3: mod_base = OTHER; note = 2'-O-methyluridine-3'-phosphate
  modified_base 4: mod_base = OTHER; note = 2'-O-methylguanosine-3'-phosphate
  modified_base 5: mod_base = OTHER; note = 2'-O-methyladenosine-3'-phosphate
  modified_base 6: mod_base = OTHER; note = 2'-deoxy-2'-fluoroadenosine-3'-phosphate
  modified_base 7: mod_base = OTHER; note = 2'-O-methylguanosine-3'-phosphate
  modified_base 8: mod_base = OTHER; note = 2'-O-methylguanosine-3'-phosphate
  modified_base 9: mod_base = OTHER; note = 2'-O-methyladenosine-3'-phosphate
  modified_base 10: mod_base = OTHER; note = 2'-O-methylcytidine-3'-phosphate
  modified_base 11: mod_base = OTHER; note = 2'-O-methyluridine-3'-phosphate
  modified_base 12: mod_base = OTHER; note = 2'-O-methylcytidine-3'-phosphate
  modified_base 13: mod_base = OTHER; note = 2'-O-methyladenosine-3'-phosphate
  modified_base 14: mod_base = OTHER; note = 2'-deoxy-2'-fluoroadenosine-3'-phosphate
  modified_base 15: mod_base = OTHER; note = 2'-O-methyladenosine-3'-phosphate
  modified_base 16: mod_base = OTHER; note = 2'-deoxy-2'-fluoroguanosine-3'-phosphate
  modified_base 17: mod_base = OTHER; note = 2'-O-methyladenosine-3'-phosphate
  modified_base 18: mod_base = OTHER; note = 2'-O-methyluridine-3'-phosphate
  modified_base 19: mod_base = OTHER; note = 2'-O-methyladenosine-3'-phosphate
  modified_base 20: mod_base = OTHER; note = 2'-O-methyluridine-3'-phosphate
  modified_base 21: mod_base = OTHER; note = 2'-O-methyluridine-3'-phosphate
  modified_base 22: mod_base = OTHER; note = 2'-O-methylcytidine-3'-phosphate
  modified_base 23: mod_base = OTHER; note = 2'-O-methyladenosine
tttgaaggactcaaagatattca

SEQ ID NO: 4842 - RNA, 23 nt, synthetic construct
  source 1..23: mol_type = other RNA
  modified_base 1: mod_base = OTHER; note = 2'-O-methyluridine-3'-phosphate 5'-(E)-Vinylphosphonate
  modified_base 2: mod_base = OTHER; note = 2'-deoxy-2'-fluorouridine-3'-phosphate
  modified_base 3: mod_base = OTHER; note = 2'-O-methyluridine-3'-phosphate
  modified_base 4: mod_base = OTHER; note = 2'-O-methyluridine-3'-phosphate
  modified_base 5: mod_base = OTHER; note = 2'-O-methylguanosine-3'-phosphate
  modified_base 6: mod_base = OTHER; note = 2'-deoxy-2'-fluoroadenosine-3'-phosphate
  modified_base 7: mod_base = OTHER; note = 2'-O-methyladenosine-3'-phosphate
  modified_base 8: mod_base = OTHER; note = 2'-O-methylguanosine-3'-phosphate
  modified_base 9: mod_base = OTHER; note = 2'-O-methylguanosine-3'-phosphate
  modified_base 10: mod_base = OTHER; note = 2'-O-methyladenosine-3'-phosphate
  modified_base 11: mod_base = OTHER; note = 2'-O-methylcytidine-3'-phosphate
  modified_base 12: mod_base = OTHER; note = 2'-O-methyluridine-3'-phosphate
  modified_base 13: mod_base = OTHER; note = 2'-O-methylcytidine-3'-phosphate
  modified_base 14: mod_base = OTHER; note = 2'-deoxy-2'-fluoroadenosine-3'-phosphate
  modified_base 15: mod_base = OTHER; note = 2'-O-methyladenosine-3'-phosphate
  modified_base 16: mod_base = OTHER; note = 2'-deoxy-2'-fluoroadenosine-3'-phosphate
  modified_base 17: mod_base = OTHER; note = 2'-O-methylguanosine-3'-phosphate
  modified_base 18: mod_base = OTHER; note = 2'-O-methyladenosine-3'-phosphate
  modified_base 19: mod_base = OTHER; note = 2'-O-methyluridine-3'-phosphate
  modified_base 20: mod_base = OTHER; note = 2'-O-methyladenosine-3'-phosphate
  modified_base 21: mod_base = OTHER; note = 2'-O-methyluridine-3'-phosphate
  modified_base 22: mod_base = OTHER; note = 2'-O-methyluridine-3'-phosphate
  modified_base 23: mod_base = OTHER; note = 2'-O-methylcytidine
ttttgaaggactcaaagatattc

SEQ ID NO: 4843 - RNA, 23 nt, synthetic construct
  source 1..23: mol_type = other RNA
  modified_base 1: mod_base = OTHER; note = 2'-O-methyluridine-3'-phosphate 5'-(E)-Vinylphosphonate
  modified_base 2: mod_base = OTHER; note = 2'-deoxy-2'-fluoroguanosine-3'-phosphate
  modified_base 3: mod_base = OTHER; note = 2'-O-methyluridine-3'-phosphate
  modified_base 4: mod_base = OTHER; note = 2'-O-methyluridine-3'-phosphate
  modified_base 5: mod_base = OTHER; note = 2'-O-methyluridine-3'-phosphate
  modified_base 6: mod_base = OTHER; note = 2'-deoxy-2'-fluoroguanosine-3'-phosphate
  modified_base 7: mod_base = OTHER; note = 2'-O-methyladenosine-3'-phosphate
  modified_base 8: mod_base = OTHER; note = 2'-O-methyladenosine-3'-phosphate
  modified_base 9: mod_base = OTHER; note = 2'-O-methylguanosine-3'-phosphate
  modified_base 10: mod_base = OTHER; note = 2'-O-methylguanosine-3'-phosphate
  modified_base 11: mod_base = OTHER; note = 2'-O-methyladenosine-3'-phosphate
  modified_base 12: mod_base = OTHER; note = 2'-O-methylcytidine-3'-phosphate
  modified_base 13: mod_base = OTHER; note = 2'-O-methyluridine-3'-phosphate
  modified_base 14: mod_base = OTHER; note = 2'-deoxy-2'-fluorocytidine-3'-phosphate
  modified_base 15: mod_base = OTHER; note = 2'-O-methyladenosine-3'-phosphate
  modified_base 16: mod_base = OTHER; note = 2'-deoxy-2'-fluoroadenosine-3'-phosphate
  modified_base 17: mod_base = OTHER; note = 2'-O-methyladenosine-3'-phosphate
  modified_base 18: mod_base = OTHER; note = 2'-O-methylguanosine-3'-phosphate
  modified_base 19: mod_base = OTHER; note = 2'-O-methyladenosine-3'-phosphate
  modified_base 20: mod_base = OTHER; note = 2'-O-methyluridine-3'-phosphate
  modified_base 21: mod_base = OTHER; note = 2'-O-methyladenosine-3'-phosphate
  modified_base 22: mod_base = OTHER; note = 2'-O-methyluridine-3'-phosphate
  modified_base 23: mod_base = OTHER; note = 2'-O-methyluridine
tgtttgaaggactcaaagatatt

SEQ ID NO: 4844 - RNA, 23 nt, synthetic construct
  source 1..23: mol_type = other RNA
  modified_base 1: mod_base = OTHER; note = 2'-O-methyluridine-3'-phosphate 5'-(E)-Vinylphosphonate
  modified_base 2: mod_base = OTHER; note = 2'-deoxy-2'-fluorocytidine-3'-phosphate
  modified_base 3: mod_base = OTHER; note = 2'-O-methylguanosine-3'-phosphate
  modified_base 4: mod_base = OTHER; note = 2'-O-methyluridine-3'-phosphate
  modified_base 5: mod_base = OTHER; note = 2'-O-methyluridine-3'-phosphate
  modified_base 6: mod_base = OTHER; note = 2'-deoxy-2'-fluorouridine-3'-phosphate
  modified_base 7: mod_base = OTHER; note = 2'-O-methylguanosine-3'-phosphate
  modified_base 8: mod_base = OTHER; note = 2'-O-methyladenosine-3'-phosphate
  modified_base 9: mod_base = OTHER; note = 2'-O-methyladenosine-3'-phosphate
  modified_base 10: mod_base = OTHER; note = 2'-O-methylguanosine-3'-phosphate
  modified_base 11: mod_base = OTHER; note = 2'-O-methylguanosine-3'-phosphate
  modified_base 12: mod_base = OTHER; note = 2'-O-methyladenosine-3'-phosphate
  modified_base 13: mod_base = OTHER; note = 2'-O-methylcytidine-3'-phosphate
  modified_base 14: mod_base = OTHER; note = 2'-deoxy-2'-fluorouridine-3'-phosphate
  modified_base 15: mod_base = OTHER; note = 2'-O-methylcytidine-3'-phosphate
  modified_base 16: mod_base = OTHER; note = 2'-deoxy-2'-fluoroadenosine-3'-phosphate
  modified_base 17: mod_base = OTHER; note = 2'-O-methyladenosine-3'-phosphate
  modified_base 18: mod_base = OTHER; note = 2'-O-methyladenosine-3'-phosphate
  modified_base 19: mod_base = OTHER; note = 2'-O-methylguanosine-3'-phosphate
  modified_base 20: mod_base = OTHER; note = 2'-O-methyladenosine-3'-phosphate
  modified_base 21: mod_base = OTHER; note = 2'-O-methyluridine-3'-phosphate
  modified_base 22: mod_base = OTHER; note = 2'-O-methyladenosine-3'-phosphate
  modified_base 23: mod_base = OTHER; note = 2'-O-methyluridine
tcgtttgaaggactcaaagatat

SEQ ID NO: 4845 - RNA, 23 nt, synthetic construct
  source 1..23: mol_type = other RNA
  modified_base 1: mod_base = OTHER; note = 2'-O-methyluridine-3'-phosphate 5'-(E)-Vinylphosphonate
  modified_base 2: mod_base = OTHER; note = 2'-deoxy-2'-fluorouridine-3'-phosphate
  modified_base 3: mod_base = OTHER; note = 2'-O-methylcytidine-3'-phosphate
  modified_base 4: mod_base = OTHER; note = 2'-O-methylguanosine-3'-phosphate
  modified_base 5: mod_base = OTHER; note = 2'-O-methyluridine-3'-phosphate
  modified_base 6: mod_base = OTHER; note = 2'-deoxy-2'-fluorouridine-3'-phosphate
  modified_base 7: mod_base = OTHER; note = 2'-O-methyluridine-3'-phosphate
  modified_base 8: mod_base = OTHER; note = 2'-O-methylguanosine-3'-phosphate
  modified_base 9: mod_base = OTHER; note = 2'-O-methyladenosine-3'-phosphate
  modified_base 10: mod_base = OTHER; note = 2'-O-methyladenosine-3'-phosphate
  modified_base 11: mod_base = OTHER; note = 2'-O-methylguanosine-3'-phosphate
  modified_base 12: mod_base = OTHER; note = 2'-O-methylguanosine-3'-phosphate
  modified_base 13: mod_base = OTHER; note = 2'-O-methyladenosine-3'-phosphate
  modified_base 14: mod_base = OTHER; note = 2'-deoxy-2'-fluorocytidine-3'-phosphate
  modified_base 15: mod_base = OTHER; note = 2'-O-methyluridine-3'-phosphate
  modified_base 16: mod_base = OTHER; note = 2'-deoxy-2'-fluorocytidine-3'-phosphate
  modified_base 17: mod_base = OTHER; note = 2'-O-methyladenosine-3'-phosphate
  modified_base 18: mod_base = OTHER; note = 2'-O-methyladenosine-3'-phosphate
  modified_base 19: mod_base = OTHER; note = 2'-O-methyladenosine-3'-phosphate
  modified_base 20: mod_base = OTHER; note = 2'-O-methylguanosine-3'-phosphate
  modified_base 21: mod_base = OTHER; note = 2'-O-methyladenosine-3'-phosphate
  modified_base 22: mod_base = OTHER; note = 2'-O-methyluridine-3'-phosphate
  modified_base 23: mod_base = OTHER; note = 2'-O-methyladenosine
ttcgtttgaaggactcaaagata

SEQ ID NO: 4846 - RNA, 23 nt, synthetic construct
  source 1..23: mol_type = other RNA
  modified_base 1: mod_base = OTHER; note = 2'-O-methyluridine-3'-phosphate 5'-(E)-Vinylphosphonate
  modified_base 2: mod_base = OTHER; note = 2'-deoxy-2'-fluorocytidine-3'-phosphate
  modified_base 3: mod_base = OTHER; note = 2'-O-methyluridine-3'-phosphate
  modified_base 4: mod_base = OTHER; note = 2'-O-methylcytidine-3'-phosphate
  modified_base 5: mod_base = OTHER; note = 2'-O-methylguanosine-3'-phosphate
  modified_base 6: mod_base = OTHER; note = 2'-deoxy-2'-fluorouridine-3'-phosphate
  modified_base 7: mod_base = OTHER; note = 2'-O-methyluridine-3'-phosphate
  modified_base 8: mod_base = OTHER; note = 2'-O-methyluridine-3'-phosphate
  modified_base 9: mod_base = OTHER; note = 2'-O-methylguanosine-3'-phosphate
  modified_base 10: mod_base = OTHER; note = 2'-O-methyladenosine-3'-phosphate
  modified_base 11: mod_base = OTHER; note = 2'-O-methyladenosine-3'-phosphate
  modified_base 12: mod_base = OTHER; note = 2'-O-methylguanosine-3'-phosphate
  modified_base 13: mod_base = OTHER; note = 2'-O-methylguanosine-3'-phosphate
  modified_base 14: mod_base = OTHER; note = 2'-deoxy-2'-fluoroadenosine-3'-phosphate
  modified_base 15: mod_base = OTHER; note = 2'-O-methylcytidine-3'-phosphate
  modified_base 16: mod_base = OTHER; note = 2'-deoxy-2'-fluorouridine-3'-phosphate
  modified_base 17: mod_base = OTHER; note = 2'-O-methylcytidine-3'-phosphate
  modified_base 18: mod_base = OTHER; note = 2'-O-methyladenosine-3'-phosphate
  modified_base 19: mod_base = OTHER; note = 2'-O-methyladenosine-3'-phosphate
  modified_base 20: mod_base = OTHER; note = 2'-O-methyladenosine-3'-phosphate
  modified_base 21: mod_base = OTHER; note = 2'-O-methylguanosine-3'-phosphate
  modified_base 22: mod_base = OTHER; note = 2'-O-methyladenosine-3'-phosphate
  modified_base 23: mod_base = OTHER; note = 2'-O-methyluridine
tctcgtttgaaggactcaaagat

SEQ ID NO: 4847 - RNA, 23 nt, synthetic construct
  source 1..23: mol_type = other RNA
  modified_base 1: mod_base = OTHER; note = 2'-O-methyluridine-3'-phosphate 5'-(E)-Vinylphosphonate
  modified_base 2: mod_base = OTHER; note = 2'-deoxy-2'-fluorouridine-3'-phosphate
  modified_base 3: mod_base = OTHER; note = 2'-O-methyladenosine-3'-phosphate
  modified_base 4: mod_base = OTHER; note = 2'-O-methylguanosine-3'-phosphate
  modified_base 5: mod_base = OTHER; note = 2'-O-methyladenosine-3'-phosphate
  modified_base 6: mod_base = OTHER; note = 2'-deoxy-2'-fluorouridine-3'-phosphate
  modified_base 7: mod_base = OTHER; note = 2'-O-methylguanosine-3'-phosphate
  modified_base 8: mod_base = OTHER; note = 2'-O-methyluridine-3'-phosphate
  modified_base 9: mod_base = OTHER; note = 2'-O-methylcytidine-3'-phosphate
  modified_base 10: mod_base = OTHER; note = 2'-O-methyladenosine-3'-phosphate
  modified_base 11: mod_base = OTHER; note = 2'-O-methylguanosine-3'-phosphate
  modified_base 12: mod_base = OTHER; note = 2'-O-methylcytidine-3'-phosphate
  modified_base 13: mod_base = OTHER; note = 2'-O-methyluridine-3'-phosphate
  modified_base 14: mod_base = OTHER; note = 2'-deoxy-2'-fluorocytidine-3'-phosphate
  modified_base 15: mod_base = OTHER; note = 2'-O-methylguanosine-3'-phosphate
  modified_base 16: mod_base = OTHER; note = 2'-deoxy-2'-fluorouridine-3'-phosphate
  modified_base 17: mod_base = OTHER; note = 2'-O-methyluridine-3'-phosphate
  modified_base 18: mod_base = OTHER; note = 2'-O-methyluridine-3'-phosphate
  modified_base 19: mod_base = OTHER; note = 2'-O-methylguanosine-3'-phosphate
  modified_base 20: mod_base = OTHER; note = 2'-O-methyladenosine-3'-phosphate
  modified_base 21: mod_base = OTHER; note = 2'-O-methyladenosine-3'-phosphate
  modified_base 22: mod_base = OTHER; note = 2'-O-methylguanosine-3'-phosphate
  modified_base 23: mod_base = OTHER; note = 2'-O-methylguanosine
ttagatgtcagctcgtttgaagg

SEQ ID NO: 4848 - RNA, 23 nt, synthetic construct
  source 1..23: mol_type = other RNA
  modified_base 1: mod_base = OTHER; note = 2'-O-methyluridine-3'-phosphate 5'-(E)-Vinylphosphonate
  modified_base 2: mod_base = OTHER; note = 2'-deoxy-2'-fluoroadenosine-3'-phosphate
  modified_base 3: mod_base = OTHER; note = 2'-O-methylguanosine-3'-phosphate
  modified_base 4: mod_base = OTHER; note = 2'-O-methyladenosine-3'-phosphate
  modified_base 5: mod_base = OTHER; note = 2'-O-methyladenosine-3'-phosphate
  modified_base 6: mod_base = OTHER; note = 2'-deoxy-2'-fluorouridine-3'-phosphate
  modified_base 7: mod_base = OTHER; note = 2'-O-methyladenosine-3'-phosphate
  modified_base 8: mod_base = OTHER; note = 2'-O-methylguanosine-3'-phosphate
  modified_base 9: mod_base = OTHER; note = 2'-O-methyladenosine-3'-phosphate
  modified_base 10: mod_base = OTHER; note = 2'-O-methyluridine-3'-phosphate
  modified_base 11: mod_base = OTHER; note = 2'-O-methylguanosine-3'-phosphate
  modified_base 12: mod_base = OTHER; note = 2'-O-methyluridine-3'-phosphate
  modified_base 13: mod_base = OTHER; note = 2'-O-methylcytidine-3'-phosphate
  modified_base 14: mod_base = OTHER; note = 2'-deoxy-2'-fluoroadenosine-3'-phosphate
  modified_base 15: mod_base = OTHER; note = 2'-O-methylguanosine-3'-phosphate
  modified_base 16: mod_base = OTHER; note = 2'-deoxy-2'-fluorocytidine-3'-phosphate
  modified_base 17: mod_base = OTHER; note = 2'-O-methyluridine-3'-phosphate
  modified_base 18: mod_base = OTHER; note = 2'-O-methylcytidine-3'-phosphate
  modified_base 19: mod_base = OTHER; note = 2'-O-methylguanosine-3'-phosphate
  modified_base 20: mod_base = OTHER; note = 2'-O-methyluridine-3'-phosphate
  modified_base 21: mod_base = OTHER; note = 2'-O-methyluridine-3'-phosphate
  modified_base 22: mod_base = OTHER; note = 2'-O-methyluridine-3'-phosphate
  modified_base 23: mod_base = OTHER; note = 2'-O-methylguanosine
tagaatagatgtcagctcgtttg

SEQ ID NO: 4849 - RNA, 23 nt, synthetic construct
  source 1..23: mol_type = other RNA
  modified_base 1: mod_base = OTHER; note = 2'-O-methyluridine-3'-phosphate 5'-(E)-Vinylphosphonate
  modified_base 2: mod_base = OTHER; note = 2'-deoxy-2'-fluorocytidine-3'-phosphate
  modified_base 3: mod_base = OTHER; note = 2'-O-methyladenosine-3'-phosphate
  modified_base 4: mod_base = OTHER; note = 2'-O-methylguanosine-3'-phosphate
  modified_base 5: mod_base = OTHER; note = 2'-O-methyladenosine-3'-phosphate
  modified_base 6: mod_base = OTHER; note = 2'-deoxy-2'-fluoroadenosine-3'-phosphate
  modified_base 7: mod_base = OTHER; note = 2'-O-methyluridine-3'-phosphate
  modified_base 8: mod_base = OTHER; note = 2'-O-methyladenosine-3'-phosphate
  modified_base 9: mod_base = OTHER; note = 2'-O-methylguanosine-3'-phosphate
  modified_base 10: mod_base = OTHER; note = 2'-O-methyladenosine-3'-phosphate
  modified_base 11: mod_base = OTHER; note = 2'-O-methyluridine-3'-phosphate
  modified_base 12: mod_base = OTHER; note = 2'-O-methylguanosine-3'-phosphate
  modified_base 13: mod_base = OTHER; note = 2'-O-methyluridine-3'-phosphate
  modified_base 14: mod_base = OTHER; note = 2'-deoxy-2'-fluorocytidine-3'-phosphate
  modified_base 15: mod_base = OTHER; note = 2'-O-methyladenosine-3'-phosphate
  modified_base 16: mod_base = OTHER; note = 2'-deoxy-2'-fluoroguanosine-3'-phosphate
  modified_base 17: mod_base = OTHER; note = 2'-O-methylcytidine-3'-phosphate
  modified_base 18: mod_base = OTHER; note = 2'-O-methyluridine-3'-phosphate
  modified_base 19: mod_base = OTHER; note = 2'-O-methylcytidine-3'-phosphate
  modified_base 20: mod_base = OTHER; note = 2'-O-methylguanosine-3'-phosphate
  modified_base 21: mod_base = OTHER; note = 2'-O-methyluridine-3'-phosphate
  modified_base 22: mod_base = OTHER; note = 2'-O-methyluridine-3'-phosphate
  modified_base 23: mod_base = OTHER; note = 2'-O-methyluridine
tcagaatagatgtcagctcgttt

SEQ ID NO: 4850 - RNA, 23 nt, synthetic construct
  source 1..23: mol_type = other RNA
  modified_base 1: mod_base = OTHER; note = 2'-O-methyluridine-3'-phosphate 5'-(E)-Vinylphosphonate
  modified_base 2: mod_base = OTHER; note = 2'-deoxy-2'-fluoroadenosine-3'-phosphate
  modified_base 3: mod_base = OTHER; note = 2'-O-methylcytidine-3'-phosphate
  modified_base 4: mod_base = OTHER; note = 2'-O-methyladenosine-3'-phosphate
  modified_base 5: mod_base = OTHER; note = 2'-O-methylguanosine-3'-phosphate
  modified_base 6: mod_base = OTHER; note = 2'-deoxy-2'-fluoroadenosine-3'-phosphate
  modified_base 7: mod_base = OTHER; note = 2'-O-methyladenosine-3'-phosphate
  modified_base 8: mod_base = OTHER; note = 2'-O-methyluridine-3'-phosphate
  modified_base 9: mod_base = OTHER; note = 2'-O-methyladenosine-3'-phosphate
  modified_base 10: mod_base = OTHER; note = 2'-O-methylguanosine-3'-phosphate
  modified_base 11: mod_base = OTHER; note = 2'-O-methyladenosine-3'-phosphate
  modified_base 12: mod_base = OTHER; note = 2'-O-methyluridine-3'-phosphate
  modified_base 13: mod_base = OTHER; note = 2'-O-methylguanosine-3'-phosphate
  modified_base 14: mod_base = OTHER; note = 2'-deoxy-2'-fluorouridine-3'-phosphate
  modified_base 15: mod_base = OTHER; note = 2'-O-methylcytidine-3'-phosphate
  modified_base 16: mod_base = OTHER; note = 2'-deoxy-2'-fluoroadenosine-3'-phosphate
  modified_base 17: mod_base = OTHER; note = 2'-O-methylguanosine-3'-phosphate
  modified_base 18: mod_base = OTHER; note = 2'-O-methylcytidine-3'-phosphate
  modified_base 19: mod_base = OTHER; note = 2'-O-methyluridine-3'-phosphate
  modified_base 20: mod_base = OTHER; note = 2'-O-methylcytidine-3'-phosphate
  modified_base 21: mod_base = OTHER; note = 2'-O-methylguanosine-3'-phosphate
  modified_base 22: mod_base = OTHER; note = 2'-O-methyluridine-3'-phosphate
  modified_base 23: mod_base = OTHER; note = 2'-O-methyluridine
tacagaatagatgtcagctcgtt

SEQ ID NO: 4851 - RNA, 23 nt, synthetic construct
  source 1..23: mol_type = other RNA
  modified_base 1: mod_base = OTHER; note = 2'-O-methyluridine-3'-phosphate 5'-(E)-Vinylphosphonate
  modified_base 2: mod_base = OTHER; note = 2'-deoxy-2'-fluorocytidine-3'-phosphate
  modified_base 3: mod_base = OTHER; note = 2'-O-methyladenosine-3'-phosphate
  modified_base 4: mod_base = OTHER; note = 2'-O-methyladenosine-3'-phosphate
  modified_base 5: mod_base = OTHER; note = 2'-O-methylcytidine-3'-phosphate
  modified_base 6: mod_base = OTHER; note = 2'-deoxy-2'-fluoroadenosine-3'-phosphate
  modified_base 7: mod_base = OTHER; note = 2'-O-methylguanosine-3'-phosphate
  modified_base 8: mod_base = OTHER; note = 2'-O-methyladenosine-3'-phosphate
  modified_base 9: mod_base = OTHER; note = 2'-O-methyladenosine-3'-phosphate
  modified_base 10: mod_base = OTHER; note = 2'-O-methyluridine-3'-phosphate
  modified_base 11: mod_base = OTHER; note = 2'-O-methyladenosine-3'-phosphate
  modified_base 12: mod_base = OTHER; note = 2'-O-methylguanosine-3'-phosphate
  modified_base 13: mod_base = OTHER; note = 2'-O-methyladenosine-3'-phosphate
  modified_base 14: mod_base = OTHER; note = 2'-deoxy-2'-fluorouridine-3'-phosphate
  modified_base 15: mod_base = OTHER; note = 2'-O-methylguanosine-3'-phosphate
  modified_base 16: mod_base = OTHER; note = 2'-deoxy-2'-fluorouridine-3'-phosphate
  modified_base 17: mod_base = OTHER; note = 2'-O-methylcytidine-3'-phosphate
  modified_base 18: mod_base = OTHER; note = 2'-O-methyladenosine-3'-phosphate
  modified_base 19: mod_base = OTHER; note = 2'-O-methylguanosine-3'-phosphate
  modified_base 20: mod_base = OTHER; note = 2'-O-methylcytidine-3'-phosphate
  modified_base 21: mod_base = OTHER; note = 2'-O-methyluridine-3'-phosphate
  modified_base 22: mod_base = OTHER; note = 2'-O-methylcytidine-3'-phosphate
  modified_base 23: mod_base = OTHER; note = 2'-O-methylguanosine
tcaacagaatagatgtcagctcg

SEQ ID NO: 4852 - RNA, 23 nt, synthetic construct
  source 1..23: mol_type = other RNA
  modified_base 1: mod_base = OTHER; note = 2'-O-methyluridine-3'-phosphate 5'-(E)-Vinylphosphonate
  modified_base 2: mod_base = OTHER; note = 2'-deoxy-2'-fluorocytidine-3'-phosphate
  modified_base 3: mod_base = OTHER; note = 2'-O-methylcytidine-3'-phosphate
  modified_base 4: mod_base = OTHER; note = 2'-O-methyladenosine-3'-phosphate
  modified_base 5: mod_base = OTHER; note = 2'-O-methyladenosine-3'-phosphate
  modified_base 6: mod_base = OTHER; note = 2'-deoxy-2'-fluorocytidine-3'-phosphate
  modified_base 7: mod_base = OTHER; note = 2'-O-methyladenosine-3'-phosphate
  modified_base 8: mod_base = OTHER; note = 2'-O-methylguanosine-3'-phosphate
  modified_base 9: mod_base = OTHER; note = 2'-O-methyladenosine-3'-phosphate
  modified_base 10: mod_base = OTHER; note = 2'-O-methyladenosine-3'-phosphate
  modified_base 11: mod_base = OTHER; note = 2'-O-methyluridine-3'-phosphate
  modified_base 12: mod_base = OTHER; note = 2'-O-methyladenosine-3'-phosphate
  modified_base 13: mod_base = OTHER; note = 2'-O-methylguanosine-3'-phosphate
  modified_base 14: mod_base = OTHER; note = 2'-deoxy-2'-fluoroadenosine-3'-phosphate
  modified_base 15: mod_base = OTHER; note = 2'-O-methyluridine-3'-phosphate
  modified_base 16: mod_base = OTHER; note = 2'-deoxy-2'-fluoroguanosine-3'-phosphate
  modified_base 17: mod_base = OTHER; note = 2'-O-methyluridine-3'-phosphate
  modified_base 18: mod_base = OTHER; note = 2'-O-methylcytidine-3'-phosphate
  modified_base 19: mod_base = OTHER; note = 2'-O-methyladenosine-3'-phosphate
  modified_base 20: mod_base = OTHER; note = 2'-O-methylguanosine-3'-phosphate
  modified_base 21: mod_base = OTHER; note = 2'-O-methylcytidine-3'-phosphate
  modified_base 22: mod_base = OTHER; note = 2'-O-methyluridine-3'-phosphate
  modified_base 23: mod_base = OTHER; note = 2'-O-methylcytidine
tccaacagaatagatgtcagctc

SEQ ID NO: 4853 - RNA, 23 nt, synthetic construct
  source 1..23: mol_type = other RNA
  modified_base 1: mod_base = OTHER; note = 2'-O-methyluridine-3'-phosphate 5'-(E)-Vinylphosphonate
  modified_base 2: mod_base = OTHER; note = 2'-deoxy-2'-fluoroadenosine-3'-phosphate
  modified_base 3: mod_base = OTHER; note = 2'-O-methylguanosine-3'-phosphate
  modified_base 4: mod_base = OTHER; note = 2'-O-methyladenosine-3'-phosphate
  modified_base 5: mod_base = OTHER; note = 2'-O-methylcytidine-3'-phosphate
  modified_base 6: mod_base = OTHER; note = 2'-deoxy-2'-fluorocytidine-3'-phosphate
  modified_base 7: mod_base = OTHER; note = 2'-O-methyladenosine-3'-phosphate
  modified_base 8: mod_base = OTHER; note = 2'-O-methyladenosine-3'-phosphate
  modified_base 9: mod_base = OTHER; note = 2'-O-methylcytidine-3'-phosphate
  modified_base 10: mod_base = OTHER; note = 2'-O-methyladenosine-3'-phosphate
  modified_base 11: mod_base = OTHER; note = 2'-O-methylguanosine-3'-phosphate
  modified_base 12: mod_base = OTHER; note = 2'-O-methyladenosine-3'-phosphate
  modified_base 13: mod_base = OTHER; note = 2'-O-methyladenosine-3'-phosphate
  modified_base 14: mod_base = OTHER; note = 2'-deoxy-2'-fluorouridine-3'-phosphate
  modified_base 15: mod_base = OTHER; note = 2'-O-methyladenosine-3'-phosphate
  modified_base 16: mod_base = OTHER; note = 2'-deoxy-2'-fluoroguanosine-3'-phosphate
  modified_base 17: mod_base = OTHER; note = 2'-O-methyladenosine-3'-phosphate
  modified_base 18: mod_base = OTHER; note = 2'-O-methyluridine-3'-phosphate
  modified_base 19: mod_base = OTHER; note = 2'-O-methylguanosine-3'-phosphate
  modified_base 20: mod_base = OTHER; note = 2'-O-methyluridine-3'-phosphate
  modified_base 21: mod_base = OTHER; note = 2'-O-methylcytidine-3'-phosphate
  modified_base 22: mod_base = OTHER; note = 2'-O-methyladenosine-3'-phosphate
  modified_base 23: mod_base = OTHER; note = 2'-O-methylguanosine
tagaccaacagaatagatgtcag

SEQ ID NO: 4854 - RNA, 23 nt, synthetic construct
  source 1..23: mol_type = other RNA
  modified_base 1: mod_base = OTHER; note = 2'-O-methyluridine-3'-phosphate 5'-(E)-Vinylphosphonate
  modified_base 2: mod_base = OTHER; note = 2'-deoxy-2'-fluorouridine-3'-phosphate
  modified_base 3: mod_base = OTHER; note = 2'-O-methyladenosine-3'-phosphate
  modified_base 4: mod_base = OTHER; note = 2'-O-methyladenosine-3'-phosphate
  modified_base 5: mod_base = OTHER; note = 2'-O-methyladenosine-3'-phosphate
  modified_base 6: mod_base = OTHER; note = 2'-deoxy-2'-fluorocytidine-3'-phosphate
  modified_base 7: mod_base = OTHER; note = 2'-O-methylcytidine-3'-phosphate
  modified_base 8: mod_base = OTHER; note = 2'-O-methyladenosine-3'-phosphate
  modified_base 9: mod_base = OTHER; note = 2'-O-methylguanosine-3'-phosphate
  modified_base 10: mod_base = OTHER; note = 2'-O-methyladenosine-3'-phosphate
  modified_base 11: mod_base = OTHER; note = 2'-O-methylcytidine-3'-phosphate
  modified_base 12: mod_base = OTHER; note = 2'-O-methylcytidine-3'-phosphate
  modified_base 13: mod_base = OTHER; note = 2'-O-methyladenosine-3'-phosphate
  modified_base 14: mod_base = OTHER; note = 2'-deoxy-2'-fluoroadenosine-3'-phosphate
  modified_base 15: mod_base = OTHER; note = 2'-O-methylcytidine-3'-phosphate
  modified_base 16: mod_base = OTHER; note = 2'-deoxy-2'-fluoroadenosine-3'-phosphate
  modified_base 17: mod_base = OTHER; note = 2'-O-methylguanosine-3'-phosphate
  modified_base 18: mod_base = OTHER; note = 2'-O-methyladenosine-3'-phosphate
  modified_base 19: mod_base = OTHER; note = 2'-O-methyladenosine-3'-phosphate
  modified_base 20: mod_base = OTHER; note = 2'-O-methyluridine-3'-phosphate
  modified_base 21: mod_base = OTHER; note = 2'-O-methyladenosine-3'-phosphate
  modified_base 22: mod_base = OTHER; note = 2'-O-methylguanosine-3'-phosphate
  modified_base 23: mod_base = OTHER; note = 2'-O-methyladenosine
ttaaaccagaccaacagaataga

SEQ ID NO: 4855 - RNA, 23 nt, synthetic construct
  source 1..23: mol_type = other RNA
  modified_base 1: mod_base = OTHER; note = 2'-O-methyluridine-3'-phosphate 5'-(E)-Vinylphosphonate
  modified_base 2: mod_base = OTHER; note = 2'-deoxy-2'-fluorouridine-3'-phosphate
  modified_base 3: mod_base = OTHER; note = 2'-O-methyladenosine-3'-phosphate
  modified_base 4: mod_base = OTHER; note = 2'-O-methyluridine-3'-phosphate
  modified_base 5: mod_base = OTHER; note = 2'-O-methyluridine-3'-phosphate
  modified_base 6: mod_base = OTHER; note = 2'-deoxy-2'-fluorouridine-3'-phosphate
  modified_base 7: mod_base = OTHER; note = 2'-O-methylcytidine-3'-phosphate
  modified_base 8: mod_base = OTHER; note = 2'-O-methylcytidine-3'-phosphate
  modified_base 9: mod_base = OTHER; note = 2'-O-methylcytidine-3'-phosphate
  modified_base 10: mod_base = OTHER; note = 2'-O-methyladenosine-3'-phosphate
  modified_base 11: mod_base = OTHER; note = 2'-O-methylguanosine-3'-phosphate
  modified_base 12: mod_base = OTHER; note = 2'-O-methyluridine-3'-phosphate
  modified_base 13: mod_base = OTHER; note = 2'-O-methyladenosine-3'-phosphate
  modified_base 14: mod_base = OTHER; note = 2'-deoxy-2'-fluoroadenosine-3'-phosphate
  modified_base 15: mod_base = OTHER; note = 2'-O-methyladenosine-3'-phosphate
  modified_base 16: mod_base = OTHER; note = 2'-deoxy-2'-fluorocytidine-3'-phosphate
  modified_base 17: mod_base = OTHER; note = 2'-O-methylcytidine-3'-phosphate
  modified_base 18: mod_base = OTHER; note = 2'-O-methyladenosine-3'-phosphate
  modified_base 19: mod_base = OTHER; note = 2'-O-methylguanosine-3'-phosphate
  modified_base 20: mod_base = OTHER; note = 2'-O-methyladenosine-3'-phosphate
  modified_base 21: mod_base = OTHER; note = 2'-O-methylcytidine-3'-phosphate
  modified_base 22: mod_base = OTHER; note = 2'-O-methylcytidine-3'-phosphate
  modified_base 23: mod_base = OTHER; note = 2'-O-methyladenosine
ttatttcccagtaaaccagacca

SEQ ID NO: 4856 - RNA, 23 nt, synthetic construct
  source 1..23: mol_type = other RNA
  modified_base 1: mod_base = OTHER; note = 2'-O-methyluridine-3'-phosphate 5'-(E)-Vinylphosphonate
  modified_base 2: mod_base = OTHER; note = 2'-deoxy-2'-fluoroadenosine-3'-phosphate
  modified_base 3: mod_base = OTHER; note = 2'-O-methyladenosine-3'-phosphate
  modified_base 4: mod_base = OTHER; note = 2'-O-methylguanosine-3'-phosphate
  modified_base 5: mod_base = OTHER; note = 2'-O-methylguanosine-3'-phosphate
  modified_base 6: mod_base = OTHER; note = 2'-deoxy-2'-fluorocytidine-3'-phosphate
  modified_base 7: mod_base = OTHER; note = 2'-O-methyladenosine-3'-phosphate
  modified_base 8: mod_base = OTHER; note = 2'-O-methyladenosine-3'-phosphate
  modified_base 9: mod_base = OTHER; note = 2'-O-methyluridine-3'-phosphate
  modified_base 10: mod_base = OTHER; note = 2'-O-methyluridine-3'-phosphate
  modified_base 11: mod_base = OTHER; note = 2'-O-methylguanosine-3'-phosphate
  modified_base 12: mod_base = OTHER; note = 2'-O-methylguanosine-3'-phosphate
  modified_base 13: mod_base = OTHER; note = 2'-O-methyluridine-3'-phosphate
  modified_base 14: mod_base = OTHER; note = 2'-deoxy-2'-fluoroadenosine-3'-phosphate
  modified_base 15: mod_base = OTHER; note = 2'-O-methylcytidine-3'-phosphate
  modified_base 16: mod_base = OTHER; note = 2'-deoxy-2'-fluorouridine-3'-phosphate
  modified_base 17: mod_base = OTHER; note = 2'-O-methylcytidine-3'-phosphate
  modified_base 18: mod_base = OTHER; note = 2'-O-methylcytidine-3'-phosphate
  modified_base 19: mod_base = OTHER; note = 2'-O-methyluridine-3'-phosphate
  modified_base 20: mod_base = OTHER; note = 2'-O-methylcytidine-3'-phosphate
  modified_base 21: mod_base = OTHER; note = 2'-O-methyladenosine-3'-phosphate
  modified_base 22: mod_base = OTHER; note = 2'-O-methyladenosine-3'-phosphate
  modified_base 23: mod_base = OTHER; note = 2'-O-methylcytidine
taaggcaattggtactcctcaac

SEQ ID NO: 4857 - RNA, 23 nt, synthetic construct
  source 1..23: mol_type = other RNA
  modified_base 1: mod_base = OTHER; note = 2'-O-methyluridine-3'-phosphate 5'-(E)-Vinylphosphonate
  modified_base 2: mod_base = OTHER; note = 2'-deoxy-2'-fluorouridine-3'-phosphate
  modified_base 3: mod_base = OTHER; note = 2'-O-methyladenosine-3'-phosphate
  modified_base 4: mod_base = OTHER; note = 2'-O-methyladenosine-3'-phosphate
  modified_base 5: mod_base = OTHER; note = 2'-O-methylguanosine-3'-phosphate
  modified_base 6: mod_base = OTHER; note = 2'-deoxy-2'-fluoroguanosine-3'-phosphate
  modified_base 7: mod_base = OTHER; note = 2'-O-methylcytidine-3'-phosphate
  modified_base 8: mod_base = OTHER; note = 2'-O-methyladenosine-3'-phosphate
  modified_base 9: mod_base = OTHER; note = 2'-O-methyladenosine-3'-phosphate
  modified_base 10: mod_base = OTHER; note = 2'-O-methyluridine-3'-phosphate
  modified_base 11: mod_base = OTHER; note = 2'-O-methyluridine-3'-phosphate
  modified_base 12: mod_base = OTHER; note = 2'-O-methylguanosine-3'-phosphate
  modified_base 13: mod_base = OTHER; note = 2'-O-methylguanosine-3'-phosphate
  modified_base 14: mod_base = OTHER; note = 2'-deoxy-2'-fluorouridine-3'-phosphate
  modified_base 15: mod_base = OTHER; note = 2'-O-methyladenosine-3'-phosphate
  modified_base 16: mod_base = OTHER; note = 2'-deoxy-2'-fluorocytidine-3'-phosphate
  modified_base 17: mod_base = OTHER; note = 2'-O-methyluridine-3'-phosphate
  modified_base 18: mod_base = OTHER; note = 2'-O-methylcytidine-3'-phosphate
  modified_base 19: mod_base = OTHER; note = 2'-O-methylcytidine-3'-phosphate
  modified_base 20: mod_base = OTHER; note = 2'-O-methyluridine-3'-phosphate
  modified_base 21: mod_base = OTHER; note = 2'-O-methylcytidine-3'-phosphate
  modified_base 22: mod_base = OTHER; note = 2'-O-methyladenosine-3'-phosphate
  modified_base 23: mod_base = OTHER; note = 2'-O-methyladenosine
ttaaggcaattggtactcctcaa

SEQ ID NO: 4858 - RNA, 23 nt, synthetic construct
  source 1..23: mol_type = other RNA
  modified_base 1: mod_base = OTHER; note = 2'-O-methyluridine-3'-phosphate 5'-(E)-Vinylphosphonate
  modified_base 2: mod_base = OTHER; note = 2'-deoxy-2'-fluoroadenosine-3'-phosphate
  modified_base 3: mod_base = OTHER; note = 2'-O-methyluridine-3'-phosphate
  modified_base 4: mod_base = OTHER; note = 2'-O-methyladenosine-3'-phosphate
  modified_base 5: mod_base = OTHER; note = 2'-O-methyladenosine-3'-phosphate
  modified_base 6: mod_base = OTHER; note = 2'-deoxy-2'-fluoroguanosine-3'-phosphate
  modified_base 7: mod_base = OTHER; note = 2'-O-methylguanosine-3'-phosphate
  modified_base 8: mod_base = OTHER; note = 2'-O-methylcytidine-3'-phosphate
  modified_base 9: mod_base = OTHER; note = 2'-O-methyladenosine-3'-phosphate
  modified_base 10: mod_base = OTHER; note = 2'-O-methyladenosine-3'-phosphate
  modified_base 11: mod_base = OTHER; note = 2'-O-methyluridine-3'-phosphate
  modified_base 12: mod_base = OTHER; note = 2'-O-methyluridine-3'-phosphate
  modified_base 13: mod_base = OTHER; note = 2'-O-methylguanosine-3'-phosphate
  modified_base 14: mod_base = OTHER; note = 2'-deoxy-2'-fluoroguanosine-3'-phosphate
  modified_base 15: mod_base = OTHER; note = 2'-O-methyluridine-3'-phosphate
  modified_base 16: mod_base = OTHER; note = 2'-deoxy-2'-fluoroadenosine-3'-phosphate
  modified_base 17: mod_base = OTHER; note = 2'-O-methylcytidine-3'-phosphate
  modified_base 18: mod_base = OTHER; note = 2'-O-methyluridine-3'-phosphate
  modified_base 19: mod_base = OTHER; note = 2'-O-methylcytidine-3'-phosphate
  modified_base 20: mod_base = OTHER; note = 2'-O-methylcytidine-3'-phosphate
  modified_base 21: mod_base = OTHER; note = 2'-O-methyluridine-3'-phosphate
  modified_base 22: mod_base = OTHER; note = 2'-O-methylcytidine-3'-phosphate
  modified_base 23: mod_base = OTHER; note = 2'-O-methyladenosine
tataaggcaattggtactcctca

SEQ ID NO: 4859 - RNA, 23 nt, synthetic construct
  source 1..23: mol_type = other RNA
  modified_base 1: mod_base = OTHER; note = 2'-O-methyluridine-3'-phosphate 5'-(E)-Vinylphosphonate
  modified_base 2: mod_base = OTHER; note = 2'-deoxy-2'-fluoroadenosine-3'-phosphate
  modified_base 3: mod_base = OTHER; note = 2'-O-methyladenosine-3'-phosphate
  modified_base 4: mod_base = OTHER; note = 2'-O-methyluridine-3'-phosphate
  modified_base 5: mod_base = OTHER; note = 2'-O-methyladenosine-3'-phosphate
  modified_base 6: mod_base = OTHER; note = 2'-deoxy-2'-fluoroadenosine-3'-phosphate
  modified_base 7: mod_base = OTHER; note = 2'-O-methylguanosine-3'-phosphate
  modified_base 8: mod_base = OTHER; note = 2'-O-methylguanosine-3'-phosphate
  modified_base 9: mod_base = OTHER; note = 2'-O-methylcytidine-3'-phosphate
  modified_base 10: mod_base = OTHER; note = 2'-O-methyladenosine-3'-phosphate
  modified_base 11: mod_base = OTHER; note = 2'-O-methyladenosine-3'-phosphate
  modified_base 12: mod_base = OTHER; note = 2'-O-methyluridine-3'-phosphate
  modified_base 13: mod_base = OTHER; note = 2'-O-methyluridine-3'-phosphate
  modified_base 14: mod_base = OTHER; note = 2'-deoxy-2'-fluoroguanosine-3'-phosphate
  modified_base 15: mod_base = OTHER; note = 2'-O-methylguanosine-3'-phosphate
  modified_base 16: mod_base = OTHER; note = 2'-deoxy-2'-fluorouridine-3'-phosphate
  modified_base 17: mod_base = OTHER; note = 2'-O-methyladenosine-3'-phosphate
  modified_base 18: mod_base = OTHER; note = 2'-O-methylcytidine-3'-phosphate
  modified_base 19: mod_base = OTHER; note = 2'-O-methyluridine-3'-phosphate
  modified_base 20: mod_base = OTHER; note = 2'-O-methylcytidine-3'-phosphate
  modified_base 21: mod_base = OTHER; note = 2'-O-methylcytidine-3'-phosphate
  modified_base 22: mod_base = OTHER; note = 2'-O-methyluridine-3'-phosphate
  modified_base 23: mod_base = OTHER; note = 2'-O-methylcytidine
taataaggcaattggtactcctc

SEQ ID NO: 4860 - RNA, 23 nt, synthetic construct
  source 1..23: mol_type = other RNA
  modified_base 1: mod_base = OTHER; note = 2'-O-methyluridine-3'-phosphate 5'-(E)-Vinylphosphonate
  modified_base 2: mod_base = OTHER; note = 2'-deoxy-2'-fluorouridine-3'-phosphate
  modified_base 3: mod_base = OTHER; note = 2'-O-methyladenosine-3'-phosphate
  modified_base 4: mod_base = OTHER; note = 2'-O-methyladenosine-3'-phosphate
  modified_base 5: mod_base = OTHER; note = 2'-O-methyluridine-3'-phosphate
  modified_base 6: mod_base = OTHER; note = 2'-deoxy-2'-fluoroadenosine-3'-phosphate
  modified_base 7: mod_base = OTHER; note = 2'-O-methyladenosine-3'-phosphate
  modified_base 8: mod_base = OTHER; note = 2'-O-methylguanosine-3'-phosphate
  modified_base 9: mod_base = OTHER; note = 2'-O-methylguanosine-3'-phosphate
  modified_base 10: mod_base = OTHER; note = 2'-O-methylcytidine-3'-phosphate
  modified_base 11: mod_base = OTHER; note = 2'-O-methyladenosine-3'-phosphate
  modified_base 12: mod_base = OTHER; note = 2'-O-methyladenosine-3'-phosphate
  modified_base 13: mod_base = OTHER; note = 2'-O-methyluridine-3'-phosphate
  modified_base 14: mod_base = OTHER; note = 2'-deoxy-2'-fluorouridine-3'-phosphate
  modified_base 15: mod_base = OTHER; note = 2'-O-methylguanosine-3'-phosphate
  modified_base 16: mod_base = OTHER; note = 2'-deoxy-2'-fluoroguanosine-3'-phosphate
  modified_base 17: mod_base = OTHER; note = 2'-O-methyluridine-3'-phosphate
  modified_base 18: mod_base = OTHER; note = 2'-O-methyladenosine-3'-phosphate
  modified_base 19: mod_base = OTHER; note = 2'-O-methylcytidine-3'-phosphate
  modified_base 20: mod_base = OTHER; note = 2'-O-methyluridine-3'-phosphate
  modified_base 21: mod_base = OTHER; note = 2'-O-methylcytidine-3'-phosphate
  modified_base 22: mod_base = OTHER; note = 2'-O-methylcytidine-3'-phosphate
  modified_base 23: mod_base = OTHER; note = 2'-O-methyluridine
ttaataaggcaattggtactcct

SEQ ID NO: 4861 - RNA, 23 nt, synthetic construct
  source 1..23: mol_type = other RNA
  modified_base 1: mod_base = OTHER; note = 2'-O-methyluridine-3'-phosphate 5'-(E)-Vinylphosphonate
  modified_base 2: mod_base = OTHER; note = 2'-deoxy-2'-fluoroadenosine-3'-phosphate
  modified_base 3: mod_base = OTHER; note = 2'-O-methyluridine-3'-phosphate
  modified_base 4: mod_base = OTHER; note = 2'-O-methyladenosine-3'-phosphate
  modified_base 5: mod_base = OTHER; note = 2'-O-methyladenosine-3'-phosphate
  modified_base 6: mod_base = OTHER; note = 2'-deoxy-2'-fluorouridine-3'-phosphate
  modified_base 7: mod_base = OTHER; note = 2'-O-methyladenosine-3'-phosphate
  modified_base 8: mod_base = OTHER; note = 2'-O-methyladenosine-3'-phosphate
  modified_base 9: mod_base = OTHER; note = 2'-O-methylguanosine-3'-phosphate
  modified_base 10: mod_base = OTHER; note = 2'-O-methylguanosine-3'-phosphate
  modified_base 11: mod_base = OTHER; note = 2'-O-methylcytidine-3'-phosphate
  modified_base 12: mod_base = OTHER; note = 2'-O-methyladenosine-3'-phosphate
  modified_base 13: mod_base = OTHER; note = 2'-O-methyladenosine-3'-phosphate
  modified_base 14: mod_base = OTHER; note = 2'-deoxy-2'-fluorouridine-3'-phosphate
  modified_base 15: mod_base = OTHER; note = 2'-O-methyluridine-3'-phosphate
  modified_base 16: mod_base = OTHER; note = 2'-deoxy-2'-fluoroguanosine-3'-phosphate
  modified_base 17: mod_base = OTHER; note = 2'-O-methylguanosine-3'-phosphate
  modified_base 18: mod_base = OTHER; note = 2'-O-methyluridine-3'-phosphate
  modified_base 19: mod_base = OTHER; note = 2'-O-methyladenosine-3'-phosphate
  modified_base 20: mod_base = OTHER; note = 2'-O-methylcytidine-3'-phosphate
  modified_base 21: mod_base = OTHER; note = 2'-O-methyluridine-3'-phosphate
  modified_base 22: mod_base = OTHER; note = 2'-O-methylcytidine-3'-phosphate
  modified_base 23: mod_base = OTHER; note = 2'-O-methylcytidine
tataataaggcaattggtactcc

SEQ ID NO: 4862 - RNA, 23 nt, synthetic construct
  source 1..23: mol_type = other RNA
  modified_base 1: mod_base = OTHER; note = 2'-O-methyluridine-3'-phosphate 5'-(E)-Vinylphosphonate
  modified_base 2: mod_base = OTHER; note = 2'-deoxy-2'-fluorocytidine-3'-phosphate
  modified_base 3: mod_base = OTHER; note = 2'-O-methyladenosine-3'-phosphate
  modified_base 4: mod_base = OTHER; note = 2'-O-methyluridine-3'-phosphate
  modified_base 5: mod_base = OTHER; note = 2'-O-methyladenosine-3'-phosphate
  modified_base 6: mod_base = OTHER; note = 2'-deoxy-2'-fluoroadenosine-3'-phosphate
  modified_base 7: mod_base = OTHER; note = 2'-O-methyluridine-3'-phosphate
  modified_base 8: mod_base = OTHER; note = 2'-O-methyladenosine-3'-phosphate
  modified_base 9: mod_base = OTHER; note = 2'-O-methyladenosine-3'-phosphate
  modified_base 10: mod_base = OTHER; note = 2'-O-methylguanosine-3'-phosphate
  modified_base 11: mod_base = OTHER; note = 2'-O-methylguanosine-3'-phosphate
  modified_base 12: mod_base = OTHER; note = 2'-O-methylcytidine-3'-phosphate
  modified_base 13: mod_base = OTHER; note = 2'-O-methyladenosine-3'-phosphate
  modified_base 14: mod_base = OTHER; note = 2'-deoxy-2'-fluoroadenosine-3'-phosphate
  modified_base 15: mod_base = OTHER; note = 2'-O-methyluridine-3'-phosphate
  modified_base 16: mod_base = OTHER; note = 2'-deoxy-2'-fluorouridine-3'-phosphate
  modified_base 17: mod_base = OTHER; note = 2'-O-methylguanosine-3'-phosphate
  modified_base 18: mod_base = OTHER; note = 2'-O-methylguanosine-3'-phosphate
  modified_base 19: mod_base = OTHER; note = 2'-O-methyluridine-3'-phosphate
  modified_base 20: mod_base = OTHER; note = 2'-O-methyladenosine-3'-phosphate
  modified_base 21: mod_base = OTHER; note = 2'-O-methylcytidine-3'-phosphate
  modified_base 22: mod_base = OTHER; note = 2'-O-methyluridine-3'-phosphate
  modified_base 23: mod_base = OTHER; note = 2'-O-methylcytidine
tcataataaggcaattggtactc

SEQ ID NO: 4863 - RNA, 23 nt, synthetic construct
  source 1..23: mol_type = other RNA
  modified_base 1: mod_base = OTHER; note = 2'-O-methyluridine-3'-phosphate 5'-(E)-Vinylphosphonate
  modified_base 2: mod_base = OTHER; note = 2'-deoxy-2'-fluorouridine-3'-phosphate
  modified_base 3: mod_base = OTHER; note = 2'-O-methylcytidine-3'-phosphate
  modified_base 4: mod_base = OTHER; note = 2'-O-methyladenosine-3'-phosphate
  modified_base 5: mod_base = OTHER; note = 2'-O-methyluridine-3'-phosphate
  modified_base 6: mod_base = OTHER; note = 2'-deoxy-2'-fluoroadenosine-3'-phosphate
  modified_base 7: mod_base = OTHER; note = 2'-O-methyladenosine-3'-phosphate
  modified_base 8: mod_base = OTHER; note = 2'-O-methyluridine-3'-phosphate
  modified_base 9: mod_base = OTHER; note = 2'-O-methyladenosine-3'-phosphate
  modified_base 10: mod_base = OTHER; note = 2'-O-methyladenosine-3'-phosphate
  modified_base 11: mod_base = OTHER; note = 2'-O-methylguanosine-3'-phosphate
  modified_base 12: mod_base = OTHER; note = 2'-O-methylguanosine-3'-phosphate
  modified_base 13: mod_base = OTHER; note = 2'-O-methylcytidine-3'-phosphate
  modified_base 14: mod_base = OTHER; note = 2'-deoxy-2'-fluoroadenosine-3'-phosphate
  modified_base 15: mod_base = OTHER; note = 2'-O-methyladenosine-3'-phosphate
  modified_base 16: mod_base = OTHER; note = 2'-deoxy-2'-fluorouridine-3'-phosphate
  modified_base 17: mod_base = OTHER; note = 2'-O-methyluridine-3'-phosphate
  modified_base 18: mod_base = OTHER; note = 2'-O-methylguanosine-3'-phosphate
  modified_base 19: mod_base = OTHER; note = 2'-O-methylguanosine-3'-phosphate
  modified_base 20: mod_base = OTHER; note = 2'-O-methyluridine-3'-phosphate
  modified_base 21: mod_base = OTHER; note = 2'-O-methyladenosine-3'-phosphate
  modified_base 22: mod_base = OTHER; note = 2'-O-methylcytidine-3'-phosphate
  modified_base 23: mod_base = OTHER; note = 2'-O-methyluridine
ttcataataaggcaattggtact

SEQ ID NO: 4864 - RNA, 23 nt, synthetic construct
  source 1..23: mol_type = other RNA
  modified_base 1: mod_base = OTHER; note = 2'-O-methyluridine-3'-phosphate 5'-(E)-Vinylphosphonate
  modified_base 2: mod_base = OTHER; note = 2'-deoxy-2'-fluoroguanosine-3'-phosphate
  modified_base 3: mod_base = OTHER; note = 2'-O-methyluridine-3'-phosphate
  modified_base 4: mod_base = OTHER; note = 2'-O-methylcytidine-3'-phosphate
  modified_base 5: mod_base = OTHER; note = 2'-O-methyladenosine-3'-phosphate
  modified_base 6: mod_base = OTHER; note = 2'-deoxy-2'-fluorouridine-3'-phosphate
  modified_base 7: mod_base = OTHER; note = 2'-O-methyladenosine-3'-phosphate
  modified_base 8: mod_base = OTHER; note = 2'-O-methyladenosine-3'-phosphate
  modified_base 9: mod_base = OTHER; note = 2'-O-methyluridine-3'-phosphate
  modified_base 10: mod_base = OTHER; note = 2'-O-methyladenosine-3'-phosphate
  modified_base 11: mod_base = OTHER; note = 2'-O-methyladenosine-3'-phosphate
  modified_base 12: mod_base = OTHER; note = 2'-O-methylguanosine-3'-phosphate
  modified_base 13: mod_base = OTHER; note = 2'-O-methylguanosine-3'-phosphate
  modified_base 14: mod_base = OTHER; note = 2'-deoxy-2'-fluorocytidine-3'-phosphate
  modified_base 15: mod_base = OTHER; note = 2'-O-methyladenosine-3'-phosphate
  modified_base 16: mod_base = OTHER; note = 2'-deoxy-2'-fluoroadenosine-3'-phosphate
  modified_base 17: mod_base = OTHER; note = 2'-O-methyluridine-3'-phosphate
  modified_base 18: mod_base = OTHER; note = 2'-O-methyluridine-3'-phosphate
  modified_base 19: mod_base = OTHER; note = 2'-O-methylguanosine-3'-phosphate
  modified_base 20: mod_base = OTHER; note = 2'-O-methylguanosine-3'-phosphate
  modified_base 21: mod_base = OTHER; note = 2'-O-methyluridine-3'-phosphate
  modified_base 22: mod_base = OTHER; note = 2'-O-methyladenosine-3'-phosphate
  modified_base 23: mod_base = OTHER; note = 2'-O-methylcytidine
tgtcataataaggcaattggtac

SEQ ID NO: 4865 - RNA, 23 nt, synthetic construct
  source 1..23: mol_type = other RNA
  modified_base 1: mod_base = OTHER; note = 2'-O-methyluridine-3'-phosphate 5'-(E)-Vinylphosphonate
  modified_base 2: mod_base = OTHER; note = 2'-deoxy-2'-fluorouridine-3'-phosphate
  modified_base 3: mod_base = OTHER; note = 2'-O-methylguanosine-3'-phosphate
  modified_base 4: mod_base = OTHER; note = 2'-O-methyluridine-3'-phosphate
  modified_base 5: mod_base = OTHER; note = 2'-O-methylcytidine-3'-phosphate
  modified_base 6: mod_base = OTHER; note = 2'-deoxy-2'-fluoroadenosine-3'-phosphate
  modified_base 7: mod_base = OTHER; note = 2'-O-methyluridine-3'-phosphate
  modified_base 8: mod_base = OTHER; note = 2'-O-methyladenosine-3'-phosphate
  modified_base 9: mod_base = OTHER; note = 2'-O-methyladenosine-3'-phosphate
  modified_base 10: mod_base = OTHER; note = 2'-O-methyluridine-3'-phosphate
  modified_base 11: mod_base = OTHER; note = 2'-O-methyladenosine-3'-phosphate
  modified_base 12: mod_base = OTHER; note = 2'-O-methyladenosine-3'-phosphate
  modified_base 13: mod_base = OTHER; note = 2'-O-methylguanosine-3'-phosphate
  modified_base 14: mod_base = OTHER; note = 2'-deoxy-2'-fluoroguanosine-3'-phosphate
  modified_base 15: mod_base = OTHER; note = 2'-O-methylcytidine-3'-phosphate
  modified_base 16: mod_base = OTHER; note = 2'-deoxy-2'-fluoroadenosine-3'-phosphate
  modified_base 17: mod_base = OTHER; note = 2'-O-methyladenosine-3'-phosphate
  modified_base 18: mod_base = OTHER; note = 2'-O-methyluridine-3'-phosphate
  modified_base 19: mod_base = OTHER; note = 2'-O-methyluridine-3'-phosphate
  modified_base 20: mod_base = OTHER; note = 2'-O-methylguanosine-3'-phosphate
  modified_base 21: mod_base = OTHER; note = 2'-O-methylguanosine-3'-phosphate
  modified_base 22: mod_base = OTHER; note = 2'-O-methyluridine-3'-phosphate
  modified_base 23: mod_base = OTHER; note = 2'-O-methyladenosine
ttgtcataataaggcaattggta

SEQ ID NO: 4866 - RNA, 23 nt, synthetic construct
  source 1..23: mol_type = other RNA
  modified_base 1: mod_base = OTHER; note = 2'-O-methyluridine-3'-phosphate 5'-(E)-Vinylphosphonate
  modified_base 2: mod_base = OTHER; note = 2'-deoxy-2'-fluoroadenosine-3'-phosphate
  modified_base 3: mod_base = OTHER; note = 2'-O-methyluridine-3'-phosphate
  modified_base 4: mod_base = OTHER; note = 2'-O-methylguanosine-3'-phosphate
  modified_base 5: mod_base = OTHER; note = 2'-O-methyluridine-3'-phosphate
  modified_base 6: mod_base = OTHER; note = 2'-deoxy-2'-fluorocytidine-3'-phosphate
  modified_base 7: mod_base = OTHER; note = 2'-O-methyladenosine-3'-phosphate
  modified_base 8: mod_base = OTHER; note = 2'-O-methyluridine-3'-phosphate
  modified_base 9: mod_base = OTHER; note = 2'-O-methyladenosine-3'-phosphate
  modified_base 10: mod_base = OTHER; note = 2'-O-methyladenosine-3'-phosphate
  modified_base 11: mod_base = OTHER; note = 2'-O-methyluridine-3'-phosphate
  modified_base 12: mod_base = OTHER; note = 2'-O-methyladenosine-3'-phosphate
  modified_base 13: mod_base = OTHER; note = 2'-O-methyladenosine-3'-phosphate
  modified_base 14: mod_base = OTHER; note = 2'-deoxy-2'-fluoroguanosine-3'-phosphate
  modified_base 15: mod_base = OTHER; note = 2'-O-methylguanosine-3'-phosphate
  modified_base 16: mod_base = OTHER; note = 2'-deoxy-2'-fluorocytidine-3'-phosphate
  modified_base 17: mod_base = OTHER; note = 2'-O-methyladenosine-3'-phosphate
  modified_base 18: mod_base = OTHER; note = 2'-O-methyladenosine-3'-phosphate
  modified_base 19: mod_base = OTHER; note = 2'-O-methyluridine-3'-phosphate
  modified_base 20: mod_base = OTHER; note = 2'-O-methyluridine-3'-phosphate
  modified_base 21: mod_base = OTHER; note = 2'-O-methylguanosine-3'-phosphate
  modified_base 22: mod_base = OTHER; note = 2'-O-methylguanosine-3'-phosphate
  modified_base 23: mod_base = OTHER; note = 2'-O-methyluridine
tatgtcataataaggcaattggt

SEQ ID NO: 4867 - RNA, 23 nt, synthetic construct
  source 1..23: mol_type = other RNA
  modified_base 1: mod_base = OTHER; note = 2'-O-methyluridine-3'-phosphate 5'-(E)-Vinylphosphonate
  modified_base 2: mod_base = OTHER; note = 2'-deoxy-2'-fluorocytidine-3'-phosphate
  modified_base 3: mod_base = OTHER; note = 2'-O-methyladenosine-3'-phosphate
  modified_base 4: mod_base = OTHER; note = 2'-O-methyluridine-3'-phosphate
  modified_base 5: mod_base = OTHER; note = 2'-O-methylguanosine-3'-phosphate
  modified_base 6: mod_base = OTHER; note = 2'-deoxy-2'-fluorouridine-3'-phosphate
  modified_base 7: mod_base = OTHER; note = 2'-O-methylcytidine-3'-phosphate
  modified_base 8: mod_base = OTHER; note = 2'-O-methyladenosine-3'-phosphate
  modified_base 9: mod_base = OTHER; note = 2'-O-methyluridine-3'-phosphate
  modified_base 10: mod_base = OTHER; note = 2'-O-methyladenosine-3'-phosphate
  modified_base 11: mod_base = OTHER; note = 2'-O-methyladenosine-3'-phosphate
  modified_base 12: mod_base = OTHER; note = 2'-O-methyluridine-3'-phosphate
  modified_base 13: mod_base = OTHER; note = 2'-O-methyladenosine-3'-phosphate
  modified_base 14: mod_base = OTHER; note = 2'-deoxy-2'-fluoroadenosine-3'-phosphate
  modified_base 15: mod_base = OTHER; note = 2'-O-methylguanosine-3'-phosphate
  modified_base 16: mod_base = OTHER; note = 2'-deoxy-2'-fluoroguanosine-3'-phosphate
  modified_base 17: mod_base = OTHER; note = 2'-O-methylcytidine-3'-phosphate
  modified_base 18: mod_base = OTHER; note = 2'-O-methyladenosine-3'-phosphate
  modified_base 19: mod_base = OTHER; note = 2'-O-methyladenosine-3'-phosphate
  modified_base 20: mod_base = OTHER; note = 2'-O-methyluridine-3'-phosphate
  modified_base 21: mod_base = OTHER; note = 2'-O-methyluridine-3'-phosphate
  modified_base 22: mod_base = OTHER; note = 2'-O-methylguanosine-3'-phosphate
  modified_base 23: mod_base = OTHER; note = 2'-O-methylguanosine
tcatgtcataataaggcaattgg

SEQ ID NO: 4868 - RNA, 23 nt, synthetic construct
  source 1..23: mol_type = other RNA
  modified_base 1: mod_base = OTHER; note = 2'-O-methyluridine-3'-phosphate 5'-(E)-Vinylphosphonate
  modified_base 2: mod_base = OTHER; note = 2'-deoxy-2'-fluorocytidine-3'-phosphate
  modified_base 3: mod_base = OTHER; note = 2'-O-methylcytidine-3'-phosphate
  modified_base 4: mod_base = OTHER; note = 2'-O-methyladenosine-3'-phosphate
  modified_base 5: mod_base = OTHER; note = 2'-O-methyluridine-3'-phosphate
  modified_base 6: mod_base = OTHER; note = 2'-deoxy-2'-fluoroguanosine-3'-phosphate
  modified_base 7: mod_base = OTHER; note = 2'-O-methyluridine-3'-phosphate
  modified_base 8: mod_base = OTHER; note = 2'-O-methylcytidine-3'-phosphate
  modified_base 9: mod_base = OTHER; note = 2'-O-methyladenosine-3'-phosphate
  modified_base 10: mod_base = OTHER; note = 2'-O-methyluridine-3'-phosphate
  modified_base 11: mod_base = OTHER; note = 2'-O-methyladenosine-3'-phosphate
  modified_base 12: mod_base = OTHER; note = 2'-O-methyladenosine-3'-phosphate
  modified_base 13: mod_base = OTHER; note = 2'-O-methyluridine-3'-phosphate
  modified_base 14: mod_base = OTHER; note = 2'-deoxy-2'-fluoroadenosine-3'-phosphate
  modified_base 15: mod_base = OTHER; note = 2'-O-methyladenosine-3'-phosphate
  modified_base 16: mod_base = OTHER; note = 2'-deoxy-2'-fluoroguanosine-3'-phosphate
  modified_base 17: mod_base = OTHER; note = 2'-O-methylguanosine-3'-phosphate
  modified_base 18: mod_base = OTHER; note = 2'-O-methylcytidine-3'-phosphate
  modified_base 19: mod_base = OTHER; note = 2'-O-methyladenosine-3'-phosphate
  modified_base 20: mod_base = OTHER; note = 2'-O-methyladenosine-3'-phosphate
  modified_base 21: mod_base = OTHER; note = 2'-O-methyluridine-3'-phosphate
  modified_base 22: mod_base = OTHER; note = 2'-O-methyluridine-3'-phosphate
  modified_base 23: mod_base = OTHER; note = 2'-O-methylguanosine
tccatgtcataataaggcaattg

SEQ ID NO: 4869 - RNA, 23 nt, synthetic construct
  source 1..23: mol_type = other RNA
  modified_base 1: mod_base = OTHER; note = 2'-O-methyluridine-3'-phosphate 5'-(E)-Vinylphosphonate
  modified_base 2: mod_base = OTHER; note = 2'-deoxy-2'-fluoroadenosine-3'-phosphate
  modified_base 3: mod_base = OTHER; note = 2'-O-methylcytidine-3'-phosphate
  modified_base 4: mod_base = OTHER; note = 2'-O-methylcytidine-3'-phosphate
  modified_base 5: mod_base = OTHER; note = 2'-O-methyladenosine-3'-phosphate
  modified_base 6: mod_base = OTHER; note = 2'-deoxy-2'-fluorouridine-3'-phosphate
  modified_base 7: mod_base = OTHER; note = 2'-O-methylguanosine-3'-phosphate
  modified_base 8: mod_base = OTHER; note = 2'-O-methyluridine-3'-phosphate
  modified_base 9: mod_base = OTHER; note = 2'-O-methylcytidine-3'-phosphate
  modified_base 10: mod_base = OTHER; note = 2'-O-methyladenosine-3'-phosphate
  modified_base 11: mod_base = OTHER; note = 2'-O-methyluridine-3'-phosphate
  modified_base 12: mod_base = OTHER; note = 2'-O-methyladenosine-3'-phosphate
  modified_base 13: mod_base = OTHER; note = 2'-O-methyladenosine-3'-phosphate
  modified_base 14: mod_base = OTHER; note = 2'-deoxy-2'-fluorouridine-3'-phosphate
  modified_base 15: mod_base = OTHER; note = 2'-O-methyladenosine-3'-phosphate
  modified_base 16: mod_base = OTHER; note = 2'-deoxy-2'-fluoroadenosine-3'-phosphate
  modified_base 17: mod_base = OTHER; note = 2'-O-methylguanosine-3'-phosphate
  modified_base 18: mod_base = OTHER; note = 2'-O-methylguanosine-3'-phosphate
  modified_base 19: mod_base = OTHER; note = 2'-O-methylcytidine-3'-phosphate
  modified_base 20: mod_base = OTHER; note = 2'-O-methyladenosine-3'-phosphate
  modified_base 21: mod_base = OTHER; note = 2'-O-methyladenosine-3'-phosphate
  modified_base 22: mod_base = OTHER; note = 2'-O-methyluridine-3'-phosphate
  modified_base 23: mod_base = OTHER; note = 2'-O-methyluridine
taccatgtcataataaggcaatt

SEQ ID NO: 4870 - RNA, 23 nt, synthetic construct
  source 1..23: mol_type = other RNA
  modified_base 1: mod_base = OTHER; note = 2'-O-methyluridine-3'-phosphate 5'-(E)-Vinylphosphonate
  modified_base 2: mod_base = OTHER; note = 2'-deoxy-2'-fluorocytidine-3'-phosphate
  modified_base 3: mod_base = OTHER; note = 2'-O-methyladenosine-3'-phosphate
  modified_base 4: mod_base = OTHER; note = 2'-O-methylcytidine-3'-phosphate
  modified_base 5: mod_base = OTHER; note = 2'-O-methylcytidine-3'-phosphate
  modified_base 6: mod_base = OTHER; note = 2'-deoxy-2'-fluoroadenosine-3'-phosphate
  modified_base 7: mod_base = OTHER; note = 2'-O-methyluridine-3'-phosphate
  modified_base 8: mod_base = OTHER; note = 2'-O-methylguanosine-3'-phosphate
  modified_base 9: mod_base = OTHER; note = 2'-O-methyluridine-3'-phosphate
  modified_base 10: mod_base = OTHER; note = 2'-O-methylcytidine-3'-phosphate
  modified_base 11: mod_base = OTHER; note = 2'-O-methyladenosine-3'-phosphate
  modified_base 12: mod_base = OTHER; note = 2'-O-methyluridine-3'-phosphate
  modified_base 13: mod_base = OTHER; note = 2'-O-methyladenosine-3'-phosphate
  modified_base 14: mod_base = OTHER; note = 2'-deoxy-2'-fluoroadenosine-3'-phosphate
  modified_base 15: mod_base = OTHER; note = 2'-O-methyluridine-3'-phosphate
  modified_base 16: mod_base = OTHER; note = 2'-deoxy-2'-fluoroadenosine-3'-phosphate
  modified_base 17: mod_base = OTHER; note = 2'-O-methyladenosine-3'-phosphate
  modified_base 18: mod_base = OTHER; note = 2'-O-methylguanosine-3'-phosphate
  modified_base 19: mod_base = OTHER; note = 2'-O-methylguanosine-3'-phosphate
  modified_base 20: mod_base = OTHER; note = 2'-O-methylcytidine-3'-phosphate
  modified_base 21: mod_base = OTHER; note = 2'-O-methyladenosine-3'-phosphate
  modified_base 22: mod_base = OTHER; note = 2'-O-methyladenosine-3'-phosphate
  modified_base 23: mod_base = OTHER; note = 2'-O-methyluridine
tcaccatgtcataataaggcaat

SEQ ID NO: 4871 - RNA, 23 nt, synthetic construct
  source 1..23: mol_type = other RNA
  modified_base 1: mod_base = OTHER; note = 2'-O-methyluridine-3'-phosphate 5'-(E)-Vinylphosphonate
  modified_base 2: mod_base = OTHER; note = 2'-deoxy-2'-fluoroguanosine-3'-phosphate
  modified_base 3: mod_base = OTHER; note = 2'-O-methylcytidine-3'-phosphate
  modified_base 4: mod_base = OTHER; note = 2'-O-methyladenosine-3'-phosphate
  modified_base 5: mod_base = OTHER; note = 2'-O-methylcytidine-3'-phosphate
  modified_base 6: mod_base = OTHER; note = 2'-deoxy-2'-fluorocytidine-3'-phosphate
  modified_base 7: mod_base = OTHER; note = 2'-O-methyladenosine-3'-phosphate
  modified_base 8: mod_base = OTHER; note = 2'-O-methyluridine-3'-phosphate
  modified_base 9: mod_base = OTHER; note = 2'-O-methylguanosine-3'-phosphate
  modified_base 10: mod_base = OTHER; note = 2'-O-methyluridine-3'-phosphate
  modified_base 11: mod_base = OTHER; note = 2'-O-methylcytidine-3'-phosphate
  modified_base 12: mod_base = OTHER; note = 2'-O-methyladenosine-3'-phosphate
  modified_base 13: mod_base = OTHER; note = 2'-O-methyluridine-3'-phosphate
  modified_base 14: mod_base = OTHER; note = 2'-deoxy-2'-fluoroadenosine-3'-phosphate
  modified_base 15: mod_base = OTHER; note = 2'-O-methyladenosine-3'-phosphate
  modified_base 16: mod_base = OTHER; note = 2'-deoxy-2'-fluorouridine-3'-phosphate
  modified_base 17: mod_base = OTHER; note = 2'-O-methyladenosine-3'-phosphate
  modified_base 18: mod_base = OTHER; note = 2'-O-methyladenosine-3'-phosphate
  modified_base 19: mod_base = OTHER; note = 2'-O-methylguanosine-3'-phosphate
  modified_base 20: mod_base = OTHER; note = 2'-O-methylguanosine-3'-phosphate
  modified_base 21: mod_base = OTHER; note = 2'-O-methylcytidine-3'-phosphate
  modified_base 22: mod_base = OTHER; note = 2'-O-methyladenosine-3'-phosphate
  modified_base 23: mod_base = OTHER; note = 2'-O-methyladenosine
tgcaccatgtcataataaggcaa

SEQ ID NO: 4872 - RNA, 23 nt, synthetic construct
  source 1..23: mol_type = other RNA
  modified_base 1: mod_base = OTHER; note = 2'-O-methyluridine-3'-phosphate 5'-(E)-Vinylphosphonate
  modified_base 2: mod_base = OTHER; note = 2'-deoxy-2'-fluoroguanosine-3'-phosphate
  modified_base 3: mod_base = OTHER; note = 2'-O-methylguanosine-3'-phosphate
  modified_base 4: mod_base = OTHER; note = 2'-O-methylcytidine-3'-phosphate
  modified_base 5: mod_base = OTHER; note = 2'-O-methyladenosine-3'-phosphate
  modified_base 6: mod_base = OTHER; note = 2'-deoxy-2'-fluorocytidine-3'-phosphate
  modified_base 7: mod_base = OTHER; note = 2'-O-methylcytidine-3'-phosphate
  modified_base 8: mod_base = OTHER; note = 2'-O-methyladenosine-3'-phosphate
  modified_base 9: mod_base = OTHER; note = 2'-O-methyluridine-3'-phosphate
  modified_base 10: mod_base = OTHER; note = 2'-O-methylguanosine-3'-phosphate
  modified_base 11: mod_base = OTHER; note = 2'-O-methyluridine-3'-phosphate
  modified_base 12: mod_base = OTHER; note = 2'-O-methylcytidine-3'-phosphate
  modified_base 13: mod_base = OTHER; note = 2'-O-methyladenosine-3'-phosphate
  modified_base 14: mod_base = OTHER; note = 2'-deoxy-2'-fluorouridine-3'-phosphate
  modified_base 15: mod_base = OTHER; note = 2'-O-methyladenosine-3'-phosphate
  modified_base 16: mod_base = OTHER; note = 2'-deoxy-2'-fluoroadenosine-3'-phosphate
  modified_base 17: mod_base = OTHER; note = 2'-O-methyluridine-3'-phosphate
  modified_base 18: mod_base = OTHER; note = 2'-O-methyladenosine-3'-phosphate
  modified_base 19: mod_base = OTHER; note = 2'-O-methyladenosine-3'-phosphate
  modified_base 20: mod_base = OTHER; note = 2'-O-methylguanosine-3'-phosphate
  modified_base 21: mod_base = OTHER; note = 2'-O-methylguanosine-3'-phosphate
  modified_base 22: mod_base = OTHER; note = 2'-O-methylcytidine-3'-phosphate
  modified_base 23: mod_base = OTHER; note = 2'-O-methyladenosine
tggcaccatgtcataataaggca

SEQ ID NO: 4873 - RNA, 23 nt, synthetic construct
  source 1..23: mol_type = other RNA
  modified_base 1: mod_base = OTHER; note = 2'-O-methyluridine-3'-phosphate 5'-(E)-Vinylphosphonate
  modified_base 2: mod_base = OTHER; note = 2'-deoxy-2'-fluoroadenosine-3'-phosphate
  modified_base 3: mod_base = OTHER; note = 2'-O-methylguanosine-3'-phosphate
  modified_base 4: mod_base = OTHER; note = 2'-O-methylguanosine-3'-phosphate
  modified_base 5: mod_base = OTHER; note = 2'-O-methylcytidine-3'-phosphate
  modified_base 6: mod_base = OTHER; note = 2'-deoxy-2'-fluoroadenosine-3'-phosphate
  modified_base 7: mod_base = OTHER; note = 2'-O-methylcytidine-3'-phosphate
  modified_base 8: mod_base = OTHER; note = 2'-O-methylcytidine-3'-phosphate
  modified_base 9: mod_base = OTHER; note = 2'-O-methyladenosine-3'-phosphate
  modified_base 10: mod_base = OTHER; note = 2'-O-methyluridine-3'-phosphate
  modified_base 11: mod_base = OTHER; note = 2'-O-methylguanosine-3'-phosphate
  modified_base 12: mod_base = OTHER; note = 2'-O-methyluridine-3'-phosphate
  modified_base 13: mod_base = OTHER; note = 2'-O-methylcytidine-3'-phosphate
  modified_base 14: mod_base = OTHER; note = 2'-deoxy-2'-fluoroadenosine-3'-phosphate
  modified_base 15: mod_base = OTHER; note = 2'-O-methyluridine-3'-phosphate
  modified_base 16: mod_base = OTHER; note = 2'-deoxy-2'-fluoroadenosine-3'-phosphate
  modified_base 17: mod_base = OTHER; note = 2'-O-methyladenosine-3'-phosphate
  modified_base 18: mod_base = OTHER; note = 2'-O-methyluridine-3'-phosphate
  modified_base 19: mod_base = OTHER; note = 2'-O-methyladenosine-3'-phosphate
  modified_base 20: mod_base = OTHER; note = 2'-O-methyladenosine-3'-phosphate
  modified_base 21: mod_base = OTHER; note = 2'-O-methylguanosine-3'-phosphate
  modified_base 22: mod_base = OTHER; note = 2'-O-methylguanosine-3'-phosphate
  modified_base 23: mod_base = OTHER; note = 2'-O-methylcytidine
taggcaccatgtcataataaggc

SEQ ID NO: 4874 - RNA, 23 nt, synthetic construct
  source 1..23: mol_type = other RNA
  modified_base 1: mod_base = OTHER; note = 2'-O-methyluridine-3'-phosphate 5'-(E)-Vinylphosphonate
  modified_base 2: mod_base = OTHER; note = 2'-deoxy-2'-fluoroadenosine-3'-phosphate
  modified_base 3: mod_base = OTHER; note = 2'-O-methyladenosine-3'-phosphate
  modified_base 4: mod_base = OTHER; note = 2'-O-methylguanosine-3'-phosphate
  modified_base 5: mod_base = OTHER; note = 2'-O-methylguanosine-3'-phosphate
  modified_base 6: mod_base = OTHER; note = 2'-deoxy-2'-fluorocytidine-3'-phosphate
  modified_base 7: mod_base = OTHER; note = 2'-O-methyladenosine-3'-phosphate
  modified_base 8: mod_base = OTHER; note = 2'-O-methylcytidine-3'-phosphate
  modified_base 9: mod_base = OTHER; note = 2'-O-methylcytidine-3'-phosphate
  modified_base 10: mod_base = OTHER; note = 2'-O-methyladenosine-3'-phosphate
  modified_base 11: mod_base = OTHER; note = 2'-O-methyluridine-3'-phosphate
  modified_base 12: mod_base = OTHER; note = 2'-O-methylguanosine-3'-phosphate
  modified_base 13: mod_base = OTHER; note = 2'-O-methyluridine-3'-phosphate
  modified_base 14: mod_base = OTHER; note = 2'-deoxy-2'-fluorocytidine-3'-phosphate
  modified_base 15: mod_base = OTHER; note = 2'-O-methyladenosine-3'-phosphate
  modified_base 16: mod_base = OTHER; note = 2'-deoxy-2'-fluorouridine-3'-phosphate
  modified_base 17: mod_base = OTHER; note = 2'-O-methyladenosine-3'-phosphate
  modified_base 18: mod_base = OTHER; note = 2'-O-methyladenosine-3'-phosphate
  modified_base 19: mod_base = OTHER; note = 2'-O-methyluridine-3'-phosphate
  modified_base 20: mod_base = OTHER; note = 2'-O-methyladenosine-3'-phosphate
  modified_base 21: mod_base = OTHER; note = 2'-O-methyladenosine-3'-phosphate
  modified_base 22: mod_base = OTHER; note = 2'-O-methylguanosine-3'-phosphate
  modified_base 23: mod_base = OTHER; note = 2'-O-methylguanosine
taaggcaccatgtcataataagg

SEQ ID NO: 4875 - RNA, 23 nt, synthetic construct
  source 1..23: mol_type = other RNA
  modified_base 1: mod_base = OTHER; note = 2'-O-methyluridine-3'-phosphate 5'-(E)-Vinylphosphonate
  modified_base 2: mod_base = OTHER; note = 2'-deoxy-2'-fluoroguanosine-3'-phosphate
  modified_base 3: mod_base = OTHER; note = 2'-O-methyladenosine-3'-phosphate
  modified_base 4: mod_base = OTHER; note = 2'-O-methyladenosine-3'-phosphate
  modified_base 5: mod_base = OTHER; note = 2'-O-methylguanosine-3'-phosphate
  modified_base 6: mod_base = OTHER; note = 2'-deoxy-2'-fluoroguanosine-3'-phosphate
  modified_base 7: mod_base = OTHER; note = 2'-O-methylcytidine-3'-phosphate
  modified_base 8: mod_base = OTHER; note = 2'-O-methyladenosine-3'-phosphate
  modified_base 9: mod_base = OTHER; note = 2'-O-methylcytidine-3'-phosphate
  modified_base 10: mod_base = OTHER; note = 2'-O-methylcytidine-3'-phosphate
  modified_base 11: mod_base = OTHER; note = 2'-O-methyladenosine-3'-phosphate
  modified_base 12: mod_base = OTHER; note = 2'-O-methyluridine-3'-phosphate
  modified_base 13: mod_base = OTHER; note = 2'-O-methylguanosine-3'-phosphate
  modified_base 14: mod_base = OTHER; note = 2'-deoxy-2'-fluorouridine-3'-phosphate
  modified_base 15: mod_base = OTHER; note = 2'-O-methylcytidine-3'-phosphate
  modified_base 16: mod_base = OTHER; note = 2'-deoxy-2'-fluoroadenosine-3'-phosphate
  modified_base 17: mod_base = OTHER; note = 2'-O-methyluridine-3'-phosphate
  modified_base 18: mod_base = OTHER; note = 2'-O-methyladenosine-3'-phosphate
  modified_base 19: mod_base = OTHER; note = 2'-O-methyladenosine-3'-phosphate
  modified_base 20: mod_base = OTHER; note = 2'-O-methyluridine-3'-phosphate
  modified_base 21: mod_base = OTHER; note = 2'-O-methyladenosine-3'-phosphate
  modified_base 22: mod_base = OTHER; note = 2'-O-methyladenosine-3'-phosphate
  modified_base 23: mod_base = OTHER; note = 2'-O-methylguanosine
tgaaggcaccatgtcataataag

SEQ ID NO: 4876 - RNA, 23 nt, synthetic construct
  source 1..23: mol_type = other RNA
  modified_base 1: mod_base = OTHER; note = 2'-O-methyluridine-3'-phosphate 5'-(E)-Vinylphosphonate
  modified_base 2: mod_base = OTHER; note = 2'-deoxy-2'-fluorouridine-3'-phosphate
  modified_base 3: mod_base = OTHER; note = 2'-O-methylguanosine-3'-phosphate
  modified_base 4: mod_base = OTHER; note = 2'-O-methyladenosine-3'-phosphate
  modified_base 5: mod_base = OTHER; note = 2'-O-methyladenosine-3'-phosphate
  modified_base 6: mod_base = OTHER; note = 2'-deoxy-2'-fluoroguanosine-3'-phosphate
  modified_base 7: mod_base = OTHER; note = 2'-O-methylguanosine-3'-phosphate
  modified_base 8: mod_base = OTHER; note = 2'-O-methylcytidine-3'-phosphate
  modified_base 9: mod_base = OTHER; note = 2'-O-methyladenosine-3'-phosphate
  modified_base 10: mod_base = OTHER; note = 2'-O-methylcytidine-3'-phosphate
  modified_base 11: mod_base = OTHER; note = 2'-O-methylcytidine-3'-phosphate
  modified_base 12: mod_base = OTHER; note = 2'-O-methyladenosine-3'-phosphate
  modified_base 13: mod_base = OTHER; note = 2'-O-methyluridine-3'-phosphate
  modified_base 14: mod_base = OTHER; note = 2'-deoxy-2'-fluoroguanosine-3'-phosphate
  modified_base 15: mod_base = OTHER; note = 2'-O-methyluridine-3'-phosphate
  modified_base 16: mod_base = OTHER; note = 2'-deoxy-2'-fluorocytidine-3'-phosphate
  modified_base 17: mod_base = OTHER; note = 2'-O-methyladenosine-3'-phosphate
  modified_base 18: mod_base = OTHER; note = 2'-O-methyluridine-3'-phosphate
  modified_base 19: mod_base = OTHER; note = 2'-O-methyladenosine-3'-phosphate
  modified_base 20: mod_base = OTHER; note = 2'-O-methyladenosine-3'-phosphate
  modified_base 21: mod_base = OTHER; note = 2'-O-methyluridine-3'-phosphate
  modified_base 22: mod_base = OTHER; note = 2'-O-methyladenosine-3'-phosphate
  modified_base 23: mod_base = OTHER; note = 2'-O-methyladenosine
ttgaaggcaccatgtcataataa

SEQ ID NO: 4877 - RNA, 23 nt, synthetic construct
  source 1..23: mol_type = other RNA
  modified_base 1: mod_base = OTHER; note = 2'-O-methyluridine-3'-phosphate 5'-(E)-Vinylphosphonate
  modified_base 2: mod_base = OTHER; note = 2'-deoxy-2'-fluoroadenosine-3'-phosphate
  modified_base 3: mod_base = OTHER; note = 2'-O-methylcytidine-3'-phosphate
  modified_base 4: mod_base = OTHER; note = 2'-O-methylcytidine-3'-phosphate
  modified_base 5: mod_base = OTHER; note = 2'-O-methyluridine-3'-phosphate
  modified_base 6: mod_base = OTHER; note = 2'-deoxy-2'-fluorouridine-3'-phosphate
  modified_base 7: mod_base = OTHER; note = 2'-O-methyluridine-3'-phosphate
  modified_base 8: mod_base = OTHER; note = 2'-O-methylcytidine-3'-phosphate
  modified_base 9: mod_base = OTHER; note = 2'-O-methyluridine-3'-phosphate
  modified_base 10: mod_base = OTHER; note = 2'-O-methylcytidine-3'-phosphate
  modified_base 11: mod_base = OTHER; note = 2'-O-methyladenosine-3'-phosphate
  modified_base 12: mod_base = OTHER; note = 2'-O-methyluridine-3'-phosphate
  modified_base 13: mod_base = OTHER; note = 2'-O-methyluridine-3'-phosphate
  modified_base 14: mod_base = OTHER; note = 2'-deoxy-2'-fluorouridine-3'-phosphate
  modified_base 15: mod_base = OTHER; note = 2'-O-methylcytidine-3'-phosphate
  modified_base 16: mod_base = OTHER; note = 2'-deoxy-2'-fluorocytidine-3'-phosphate
  modified_base 17: mod_base = OTHER; note = 2'-O-methyluridine-3'-phosphate
  modified_base 18: mod_base = OTHER; note = 2'-O-methylcytidine-3'-phosphate
  modified_base 19: mod_base = OTHER; note = 2'-O-methyluridine-3'-phosphate
  modified_base 20: mod_base = OTHER; note = 2'-O-methyladenosine-3'-phosphate
  modified_base 21: mod_base = OTHER; note = 2'-O-methyluridine-3'-phosphate
  modified_base 22: mod_base = OTHER; note = 2'-O-methylcytidine-3'-phosphate
  modified_base 23: mod_base = OTHER; note = 2'-O-methylguanosine
tacctttctcatttcctctatcg

SEQ ID NO: 4878 - RNA, 23 nt, synthetic construct
  source 1..23: mol_type = other RNA
  modified_base 1: mod_base = OTHER; note = 2'-O-methyluridine-3'-phosphate 5'-(E)-Vinylphosphonate
  modified_base 2: mod_base = OTHER; note = 2'-deoxy-2'-fluoroadenosine-3'-phosphate
  modified_base 3: mod_base = OTHER; note = 2'-O-methylcytidine-3'-phosphate
  modified_base 4: mod_base = OTHER; note = 2'-O-methyladenosine-3'-phosphate
  modified_base 5: mod_base = OTHER; note = 2'-O-methyladenosine-3'-phosphate
  modified_base 6: mod_base = OTHER; note = 2'-deoxy-2'-fluorocytidine-3'-phosphate
  modified_base 7: mod_base = OTHER; note = 2'-O-methylcytidine-3'-phosphate
  modified_base 8: mod_base = OTHER; note = 2'-O-methyluridine-3'-phosphate
  modified_base 9: mod_base = OTHER; note = 2'-O-methyluridine-3'-phosphate
  modified_base 10: mod_base = OTHER; note = 2'-O-methyluridine-3'-phosphate
  modified_base 11: mod_base = OTHER; note = 2'-O-methylcytidine-3'-phosphate
  modified_base 12: mod_base = OTHER; note = 2'-O-methyluridine-3'-phosphate
  modified_base 13: mod_base = OTHER; note = 2'-O-methylcytidine-3'-phosphate
  modified_base 14: mod_base = OTHER; note = 2'-deoxy-2'-fluoroadenosine-3'-phosphate
  modified_base 15: mod_base = OTHER; note = 2'-O-methyluridine-3'-phosphate
  modified_base 16: mod_base = OTHER; note = 2'-deoxy-2'-fluorouridine-3'-phosphate
  modified_base 17: mod_base = OTHER; note = 2'-O-methyluridine-3'-phosphate
  modified_base 18: mod_base = OTHER; note = 2'-O-methylcytidine-3'-phosphate
  modified_base 19: mod_base = OTHER; note = 2'-O-methylcytidine-3'-phosphate
  modified_base 20: mod_base = OTHER; note = 2'-O-methyluridine-3'-phosphate
  modified_base 21: mod_base = OTHER; note = 2'-O-methylcytidine-3'-phosphate
  modified_base 22: mod_base = OTHER; note = 2'-O-methyluridine-3'-phosphate
  modified_base 23: mod_base = OTHER; note = 2'-O-methyladenosine
tacaacctttctcatttcctcta

SEQ ID NO: 4879 - RNA, 23 nt, synthetic construct
  source 1..23: mol_type = other RNA
  modified_base 1: mod_base = OTHER; note = 2'-O-methyluridine-3'-phosphate 5'-(E)-Vinylphosphonate
  modified_base 2: mod_base = OTHER; note = 2'-deoxy-2'-fluoroadenosine-3'-phosphate
  modified_base 3: mod_base = OTHER; note = 2'-O-methyladenosine-3'-phosphate
  modified_base 4: mod_base = OTHER; note = 2'-O-methylcytidine-3'-phosphate
  modified_base 5: mod_base = OTHER; note = 2'-O-methyladenosine-3'-phosphate
  modified_base 6: mod_base = OTHER; note = 2'-deoxy-2'-fluoroadenosine-3'-phosphate
  modified_base 7: mod_base = OTHER; note = 2'-O-methylcytidine-3'-phosphate
  modified_base 8: mod_base = OTHER; note = 2'-O-methylcytidine-3'-phosphate
  modified_base 9: mod_base = OTHER; note = 2'-O-methyluridine-3'-phosphate
  modified_base 10: mod_base = OTHER; note = 2'-O-methyluridine-3'-phosphate
  modified_base 11: mod_base = OTHER; note = 2'-O-methyluridine-3'-phosphate
  modified_base 12: mod_base = OTHER; note = 2'-O-methylcytidine-3'-phosphate
  modified_base 13: mod_base = OTHER; note = 2'-O-methyluridine-3'-phosphate
  modified_base 14: mod_base = OTHER; note = 2'-deoxy-2'-fluorocytidine-3'-phosphate
  modified_base 15: mod_base = OTHER; note = 2'-O-methyladenosine-3'-phosphate
  modified_base 16: mod_base = OTHER; note = 2'-deoxy-2'-fluorouridine-3'-phosphate
  modified_base 17: mod_base = OTHER; note = 2'-O-methyluridine-3'-phosphate
  modified_base 18: mod_base = OTHER; note = 2'-O-methyluridine-3'-phosphate
  modified_base 19: mod_base = OTHER; note = 2'-O-methylcytidine-3'-phosphate
  modified_base 20: mod_base = OTHER; note = 2'-O-methylcytidine-3'-phosphate
  modified_base 21: mod_base = OTHER; note = 2'-O-methyluridine-3'-phosphate
  modified_base 22: mod_base = OTHER; note = 2'-O-methylcytidine-3'-phosphate
  modified_base 23: mod_base = OTHER; note = 2'-O-methyluridine
taacaacctttctcatttcctct

SEQ ID NO: 4880 - RNA, 23 nt, synthetic construct
  source 1..23: mol_type = other RNA
  modified_base 1: mod_base = OTHER; note = 2'-O-methyluridine-3'-phosphate 5'-(E)-Vinylphosphonate
  modified_base 2: mod_base = OTHER; note = 2'-deoxy-2'-fluoroadenosine-3'-phosphate
  modified_base 3: mod_base = OTHER; note = 2'-O-methyladenosine-3'-phosphate
  modified_base 4: mod_base = OTHER; note = 2'-O-methyladenosine-3'-phosphate
  modified_base 5: mod_base = OTHER; note = 2'-O-methylcytidine-3'-phosphate
  modified_base 6: mod_base = OTHER; note = 2'-deoxy-2'-fluoroadenosine-3'-phosphate
  modified_base 7: mod_base = OTHER; note = 2'-O-methyladenosine-3'-phosphate
  modified_base 8: mod_base = OTHER; note = 2'-O-methylcytidine-3'-phosphate
  modified_base 9: mod_base = OTHER; note = 2'-O-methylcytidine-3'-phosphate
  modified_base 10: mod_base = OTHER; note = 2'-O-methyluridine-3'-phosphate
  modified_base 11: mod_base = OTHER; note = 2'-O-methyluridine-3'-phosphate
  modified_base 12: mod_base = OTHER; note = 2'-O-methyluridine-3'-phosphate
  modified_base 13: mod_base = OTHER; note = 2'-O-methylcytidine-3'-phosphate
  modified_base 14: mod_base = OTHER; note = 2'-deoxy-2'-fluorouridine-3'-phosphate
  modified_base 15: mod_base = OTHER; note = 2'-O-methylcytidine-3'-phosphate
  modified_base 16: mod_base = OTHER; note = 2'-deoxy-2'-fluoroadenosine-3'-phosphate
  modified_base 17: mod_base = OTHER; note = 2'-O-methyluridine-3'-phosphate
  modified_base 18: mod_base = OTHER; note = 2'-O-methyluridine-3'-phosphate
  modified_base 19: mod_base = OTHER; note = 2'-O-methyluridine-3'-phosphate
  modified_base 20: mod_base = OTHER; note = 2'-O-methylcytidine-3'-phosphate
  modified_base 21: mod_base = OTHER; note = 2'-O-methylcytidine-3'-phosphate
  modified_base 22: mod_base = OTHER; note = 2'-O-methyluridine-3'-phosphate
  modified_base 23: mod_base = OTHER; note = 2'-O-methylcytidine
taaacaacctttctcatttcctc

SEQ ID NO: 4881 - RNA, 23 nt, synthetic construct
  source 1..23: mol_type = other RNA
  modified_base 1: mod_base = OTHER; note = 2'-O-methyluridine-3'-phosphate 5'-(E)-Vinylphosphonate
  modified_base 2: mod_base = OTHER; note = 2'-deoxy-2'-fluorocytidine-3'-phosphate
  modified_base 3: mod_base = OTHER; note = 2'-O-methyladenosine-3'-phosphate
  modified_base 4: mod_base = OTHER; note = 2'-O-methyladenosine-3'-phosphate
  modified_base 5: mod_base = OTHER; note = 2'-O-methyladenosine-3'-phosphate
  modified_base 6: mod_base = OTHER; note = 2'-deoxy-2'-fluorocytidine-3'-phosphate
  modified_base 7: mod_base = OTHER; note = 2'-O-methyladenosine-3'-phosphate
  modified_base 8: mod_base = OTHER; note = 2'-O-methyladenosine-3'-phosphate
  modified_base 9: mod_base = OTHER; note = 2'-O-methylcytidine-3'-phosphate
  modified_base 10: mod_base = OTHER; note = 2'-O-methylcytidine-3'-phosphate
  modified_base 11: mod_base = OTHER; note = 2'-O-methyluridine-3'-phosphate
  modified_base 12: mod_base = OTHER; note = 2'-O-methyluridine-3'-phosphate
  modified_base 13: mod_base = OTHER; note = 2'-O-methyluridine-3'-phosphate
  modified_base 14: mod_base = OTHER; note = 2'-deoxy-2'-fluorocytidine-3'-phosphate
  modified_base 15: mod_base = OTHER; note = 2'-O-methyluridine-3'-phosphate
  modified_base 16: mod_base = OTHER; note = 2'-deoxy-2'-fluorocytidine-3'-phosphate
  modified_base 17: mod_base = OTHER; note = 2'-O-methyladenosine-3'-phosphate
  modified_base 18: mod_base = OTHER; note = 2'-O-methyluridine-3'-phosphate
  modified_base 19: mod_base = OTHER; note = 2'-O-methyluridine-3'-phosphate
  modified_base 20: mod_base = OTHER; note = 2'-O-methyluridine-3'-phosphate
  modified_base 21: mod_base = OTHER; note = 2'-O-methylcytidine-3'-phosphate
  modified_base 22: mod_base = OTHER; note = 2'-O-methylcytidine-3'-phosphate
  modified_base 23: mod_base = OTHER; note = 2'-O-methyluridine
tcaaacaacctttctcatttcct

SEQ ID NO: 4882 - RNA, 23 nt, synthetic construct
  source 1..23: mol_type = other RNA
  modified_base 1: mod_base = OTHER; note = 2'-O-methyluridine-3'-phosphate 5'-(E)-Vinylphosphonate
  modified_base 2: mod_base = OTHER; note = 2'-deoxy-2'-fluoroadenosine-3'-phosphate
  modified_base 3: mod_base = OTHER; note = 2'-O-methylcytidine-3'-phosphate
  modified_base 4: mod_base = OTHER; note = 2'-O-methyladenosine-3'-phosphate
  modified_base 5: mod_base = OTHER; note = 2'-O-methyladenosine-3'-phosphate
  modified_base 6: mod_base = OTHER; note = 2'-deoxy-2'-fluoroadenosine-3'-phosphate
  modified_base 7: mod_base = OTHER; note = 2'-O-methylcytidine-3'-phosphate
  modified_base 8: mod_base = OTHER; note = 2'-O-methyladenosine-3'-phosphate
  modified_base 9: mod_base = OTHER; note = 2'-O-methyladenosine-3'-phosphate
  modified_base 10: mod_base = OTHER; note = 2'-O-methylcytidine-3'-phosphate
  modified_base 11: mod_base = OTHER; note = 2'-O-methylcytidine-3'-phosphate
  modified_base 12: mod_base = OTHER; note = 2'-O-methyluridine-3'-phosphate
  modified_base 13: mod_base = OTHER; note = 2'-O-methyluridine-3'-phosphate
  modified_base 14: mod_base = OTHER; note = 2'-deoxy-2'-fluorouridine-3'-phosphate
  modified_base 15: mod_base = OTHER; note = 2'-O-methylcytidine-3'-phosphate
  modified_base 16: mod_base = OTHER; note = 2'-deoxy-2'-fluorouridine-3'-phosphate
  modified_base 17: mod_base = OTHER; note = 2'-O-methylcytidine-3'-phosphate
  modified_base 18: mod_base = OTHER; note = 2'-O-methyladenosine-3'-phosphate
  modified_base 19: mod_base = OTHER; note = 2'-O-methyluridine-3'-phosphate
  modified_base 20: mod_base = OTHER; note = 2'-O-methyluridine-3'-phosphate
  modified_base 21: mod_base = OTHER; note = 2'-O-methyluridine-3'-phosphate
  modified_base 22: mod_base = OTHER; note = 2'-O-methylcytidine-3'-phosphate
  modified_base 23: mod_base = OTHER; note = 2'-O-methylcytidine
tacaaacaacctttctcatttcc

SEQ ID NO: 4883 - RNA, 23 nt, synthetic construct
  source 1..23: mol_type = other RNA
  modified_base 1: mod_base = OTHER; note = 2'-O-methyluridine-3'-phosphate 5'-(E)-Vinylphosphonate
  modified_base 2: mod_base = OTHER; note = 2'-deoxy-2'-fluorocytidine-3'-phosphate
  modified_base 3: mod_base = OTHER; note = 2'-O-methyladenosine-3'-phosphate
  modified_base 4: mod_base = OTHER; note = 2'-O-methylcytidine-3'-phosphate
  modified_base 5: mod_base = OTHER; note = 2'-O-methyladenosine-3'-phosphate
  modified_base 6: mod_base = OTHER; note = 2'-deoxy-2'-fluoroadenosine-3'-phosphate
  modified_base 7: mod_base = OTHER; note = 2'-O-methyladenosine-3'-phosphate
  modified_base 8: mod_base = OTHER; note = 2'-O-methylcytidine-3'-phosphate
  modified_base 9: mod_base = OTHER; note = 2'-O-methyladenosine-3'-phosphate
  modified_base 10: mod_base = OTHER; note = 2'-O-methyladenosine-3'-phosphate
  modified_base 11: mod_base = OTHER; note = 2'-O-methylcytidine-3'-phosphate
  modified_base 12: mod_base = OTHER; note = 2'-O-methylcytidine-3'-phosphate
  modified_base 13: mod_base = OTHER; note = 2'-O-methyluridine-3'-phosphate
  modified_base 14: mod_base = OTHER; note = 2'-deoxy-2'-fluorouridine-3'-phosphate
  modified_base 15: mod_base = OTHER; note = 2'-O-methyluridine-3'-phosphate
  modified_base 16: mod_base = OTHER; note = 2'-deoxy-2'-fluorocytidine-3'-phosphate
  modified_base 17: mod_base = OTHER; note = 2'-O-methyluridine-3'-phosphate
  modified_base 18: mod_base = OTHER; note = 2'-O-methylcytidine-3'-phosphate
  modified_base 19: mod_base = OTHER; note = 2'-O-methyladenosine-3'-phosphate
  modified_base 20: mod_base = OTHER; note = 2'-O-methyluridine-3'-phosphate
  modified_base 21: mod_base = OTHER; note = 2'-O-methyluridine-3'-phosphate
  modified_base 22: mod_base = OTHER; note = 2'-O-methyluridine-3'-phosphate
  modified_base 23: mod_base = OTHER; note = 2'-O-methylcytidine
tcacaaacaacctttctcatttc

SEQ ID NO: 4884 - RNA, 23 nt, synthetic construct
  source 1..23: mol_type = other RNA
  modified_base 1: mod_base = OTHER; note = 2'-O-methyluridine-3'-phosphate 5'-(E)-Vinylphosphonate
  modified_base 2: mod_base = OTHER; note = 2'-deoxy-2'-fluorouridine-3'-phosphate
  modified_base 3: mod_base = OTHER; note = 2'-O-methylcytidine-3'-phosphate
  modified_base 4: mod_base = OTHER; note = 2'-O-methyladenosine-3'-phosphate
  modified_base 5: mod_base = OTHER; note = 2'-O-methylcytidine-3'-phosphate
  modified_base 6: mod_base = OTHER; note = 2'-deoxy-2'-fluoroadenosine-3'-phosphate
  modified_base 7: mod_base = OTHER; note = 2'-O-methyladenosine-3'-phosphate
  modified_base 8: mod_base = OTHER; note = 2'-O-methyladenosine-3'-phosphate
  modified_base 9: mod_base = OTHER; note = 2'-O-methylcytidine-3'-phosphate
  modified_base 10: mod_base = OTHER; note = 2'-O-methyladenosine-3'-phosphate
  modified_base 11: mod_base = OTHER; note = 2'-O-methyladenosine-3'-phosphate
  modified_base 12: mod_base = OTHER; note = 2'-O-methylcytidine-3'-phosphate
  modified_base 13: mod_base = OTHER; note = 2'-O-methylcytidine-3'-phosphate
  modified_base 14: mod_base = OTHER; note = 2'-deoxy-2'-fluorouridine-3'-phosphate
  modified_base 15: mod_base = OTHER; note = 2'-O-methyluridine-3'-phosphate
  modified_base 16: mod_base = OTHER; note = 2'-deoxy-2'-fluorouridine-3'-phosphate
  modified_base 17: mod_base = OTHER; note = 2'-O-methylcytidine-3'-phosphate
  modified_base 18: mod_base = OTHER; note = 2'-O-methyluridine-3'-phosphate
  modified_base 19: mod_base = OTHER; note = 2'-O-methylcytidine-3'-phosphate
  modified_base 20: mod_base = OTHER; note = 2'-O-methyladenosine-3'-phosphate
  modified_base 21: mod_base = OTHER; note = 2'-O-methyluridine-3'-phosphate
  modified_base 22: mod_base = OTHER; note = 2'-O-methyluridine-3'-phosphate
  modified_base 23: mod_base = OTHER; note = 2'-O-methyluridine
ttcacaaacaacctttctcattt

SEQ ID NO: 4885 - RNA, 23 nt, synthetic construct
  source 1..23: mol_type = other RNA
  modified_base 1: mod_base = OTHER; note = 2'-O-methyluridine-3'-phosphate 5'-(E)-Vinylphosphonate
  modified_base 2: mod_base = OTHER; note = 2'-deoxy-2'-fluoroguanosine-3'-phosphate
  modified_base 3: mod_base = OTHER; note = 2'-O-methyluridine-3'-phosphate
  modified_base 4: mod_base = OTHER; note = 2'-O-methylcytidine-3'-phosphate
  modified_base 5: mod_base = OTHER; note = 2'-O-methyladenosine-3'-phosphate
  modified_base 6: mod_base = OTHER; note = 2'-deoxy-2'-fluorocytidine-3'-phosphate
  modified_base 7: mod_base = OTHER; note = 2'-O-methyladenosine-3'-phosphate
  modified_base 8: mod_base = OTHER; note = 2'-O-methyladenosine-3'-phosphate
  modified_base 9: mod_base = OTHER; note = 2'-O-methyladenosine-3'-phosphate
  modified_base 10: mod_base = OTHER; note = 2'-O-methylcytidine-3'-phosphate
  modified_base 11: mod_base = OTHER; note = 2'-O-methyladenosine-3'-phosphate
  modified_base 12: mod_base = OTHER; note = 2'-O-methyladenosine-3'-phosphate
  modified_base 13: mod_base = OTHER; note = 2'-O-methylcytidine-3'-phosphate
  modified_base 14: mod_base = OTHER; note = 2'-deoxy-2'-fluorocytidine-3'-phosphate
  modified_base 15: mod_base = OTHER; note = 2'-O-methyluridine-3'-phosphate
  modified_base 16: mod_base = OTHER; note = 2'-deoxy-2'-fluorouridine-3'-phosphate
  modified_base 17: mod_base = OTHER; note = 2'-O-methyluridine-3'-phosphate
  modified_base 18: mod_base = OTHER; note = 2'-O-methylcytidine-3'-phosphate
  modified_base 19: mod_base = OTHER; note = 2'-O-methyluridine-3'-phosphate
  modified_base 20: mod_base = OTHER; note = 2'-O-methylcytidine-3'-phosphate
  modified_base 21: mod_base = OTHER; note = 2'-O-methyladenosine-3'-phosphate
  modified_base 22: mod_base = OTHER; note = 2'-O-methyluridine-3'-phosphate
  modified_base 23: mod_base = OTHER; note = 2'-O-methyluridine
tgtcacaaacaacctttctcatt

SEQ ID NO: 4886 - RNA, 23 nt, synthetic construct
  source 1..23: mol_type = other RNA
  modified_base 1: mod_base = OTHER; note = 2'-O-methyluridine-3'-phosphate 5'-(E)-Vinylphosphonate
  modified_base 2: mod_base = OTHER; note = 2'-deoxy-2'-fluoroguanosine-3'-phosphate
  modified_base 3: mod_base = OTHER; note = 2'-O-methylguanosine-3'-phosphate
  modified_base 4: mod_base = OTHER; note = 2'-O-methyluridine-3'-phosphate
  modified_base 5: mod_base = OTHER; note = 2'-O-methylcytidine-3'-phosphate
  modified_base 6: mod_base = OTHER; note = 2'-deoxy-2'-fluoroadenosine-3'-phosphate
  modified_base 7: mod_base = OTHER; note = 2'-O-methylcytidine-3'-phosphate
  modified_base 8: mod_base = OTHER; note = 2'-O-methyladenosine-3'-phosphate
  modified_base 9: mod_base = OTHER; note = 2'-O-methyladenosine-3'-phosphate
  modified_base 10: mod_base = OTHER; note = 2'-O-methyladenosine-3'-phosphate
  modified_base 11: mod_base = OTHER; note = 2'-O-methylcytidine-3'-phosphate
  modified_base 12: mod_base = OTHER; note = 2'-O-methyladenosine-3'-phosphate
  modified_base 13: mod_base = OTHER; note = 2'-O-methyladenosine-3'-phosphate
  modified_base 14: mod_base = OTHER; note = 2'-deoxy-2'-fluorocytidine-3'-phosphate
  modified_base 15: mod_base = OTHER; note = 2'-O-methylcytidine-3'-phosphate
  modified_base 16: mod_base = OTHER; note = 2'-deoxy-2'-fluorouridine-3'-phosphate
  modified_base 17: mod_base = OTHER; note = 2'-O-methyluridine-3'-phosphate
  modified_base 18: mod_base = OTHER; note = 2'-O-methyluridine-3'-phosphate
  modified_base 19: mod_base = OTHER; note = 2'-O-methylcytidine-3'-phosphate
  modified_base 20: mod_base = OTHER; note = 2'-O-methyluridine-3'-phosphate
  modified_base 21: mod_base = OTHER; note = 2'-O-methylcytidine-3'-phosphate
  modified_base 22: mod_base = OTHER; note = 2'-O-methyladenosine-3'-phosphate
  modified_base 23: mod_base = OTHER; note = 2'-O-methyluridine
tggtcacaaacaacctttctcat

SEQ ID NO: 4887 - RNA, 23 nt, synthetic construct
  source 1..23: mol_type = other RNA
  modified_base 1: mod_base = OTHER; note = 2'-O-methyluridine-3'-phosphate 5'-(E)-Vinylphosphonate
  modified_base 2: mod_base = OTHER; note = 2'-deoxy-2'-fluorouridine-3'-phosphate
  modified_base 3: mod_base = OTHER; note = 2'-O-methylguanosine-3'-phosphate
  modified_base 4: mod_base = OTHER; note = 2'-O-methylguanosine-3'-phosphate
  modified_base 5: mod_base = OTHER; note = 2'-O-methyluridine-3'-phosphate
  modified_base 6: mod_base = OTHER; note = 2'-deoxy-2'-fluorocytidine-3'-phosphate
  modified_base 7: mod_base = OTHER; note = 2'-O-methyladenosine-3'-phosphate
  modified_base 8: mod_base = OTHER; note = 2'-O-methylcytidine-3'-phosphate
  modified_base 9: mod_base = OTHER; note = 2'-O-methyladenosine-3'-phosphate
  modified_base 10: mod_base = OTHER; note = 2'-O-methyladenosine-3'-phosphate
  modified_base 11: mod_base = OTHER; note = 2'-O-methyladenosine-3'-phosphate
  modified_base 12: mod_base = OTHER; note = 2'-O-methylcytidine-3'-phosphate
  modified_base 13: mod_base = OTHER; note = 2'-O-methyladenosine-3'-phosphate
  modified_base 14: mod_base = OTHER; note = 2'-deoxy-2'-fluoroadenosine-3'-phosphate
  modified_base 15: mod_base = OTHER; note = 2'-O-methylcytidine-3'-phosphate
  modified_base 16: mod_base = OTHER; note = 2'-deoxy-2'-fluorocytidine-3'-phosphate
  modified_base 17: mod_base = OTHER; note = 2'-O-methyluridine-3'-phosphate
  modified_base 18: mod_base = OTHER; note = 2'-O-methyluridine-3'-phosphate
  modified_base 19: mod_base = OTHER; note = 2'-O-methyluridine-3'-phosphate
  modified_base 20: mod_base = OTHER; note = 2'-O-methylcytidine-3'-phosphate
  modified_base 21: mod_base = OTHER; note = 2'-O-methyluridine-3'-phosphate
  modified_base 22: mod_base = OTHER; note = 2'-O-methylcytidine-3'-phosphate
  modified_base 23: mod_base = OTHER; note = 2'-O-methyladenosine
ttggtcacaaacaacctttctca

SEQ ID NO: 4888 - RNA, 23 nt, synthetic construct
  source 1..23: mol_type = other RNA
  modified_base 1: mod_base = OTHER; note = 2'-O-methyluridine-3'-phosphate 5'-(E)-Vinylphosphonate
  modified_base 2: mod_base = OTHER; note = 2'-deoxy-2'-fluorocytidine-3'-phosphate
  modified_base 3: mod_base = OTHER; note = 2'-O-methyluridine-3'-phosphate
  modified_base 4: mod_base = OTHER; note = 2'-O-methylguanosine-3'-phosphate
  modified_base 5: mod_base = OTHER; note = 2'-O-methylguanosine-3'-phosphate
  modified_base 6: mod_base = OTHER; note = 2'-deoxy-2'-fluorouridine-3'-phosphate
  modified_base 7: mod_base = OTHER; note = 2'-O-methylcytidine-3'-phosphate
  modified_base 8: mod_base = OTHER; note = 2'-O-methyladenosine-3'-phosphate
  modified_base 9: mod_base = OTHER; note = 2'-O-methylcytidine-3'-phosphate
  modified_base 10: mod_base = OTHER; note = 2'-O-methyladenosine-3'-phosphate
  modified_base 11: mod_base = OTHER; note = 2'-O-methyladenosine-3'-phosphate
  modified_base 12: mod_base = OTHER; note = 2'-O-methyladenosine-3'-phosphate
  modified_base 13: mod_base = OTHER; note = 2'-O-methylcytidine-3'-phosphate
  modified_base 14: mod_base = OTHER; note = 2'-deoxy-2'-fluoroadenosine-3'-phosphate
  modified_base 15: mod_base = OTHER; note = 2'-O-methyladenosine-3'-phosphate
  modified_base 16: mod_base = OTHER; note = 2'-deoxy-2'-fluorocytidine-3'-phosphate
  modified_base 17: mod_base = OTHER; note = 2'-O-methylcytidine-3'-phosphate
  modified_base 18: mod_base = OTHER; note = 2'-O-methyluridine-3'-phosphate
  modified_base 19: mod_base = OTHER; note = 2'-O-methyluridine-3'-phosphate
  modified_base 20: mod_base = OTHER; note = 2'-O-methyluridine-3'-phosphate
  modified_base 21: mod_base = OTHER; note = 2'-O-methylcytidine-3'-phosphate
  modified_base 22: mod_base = OTHER; note = 2'-O-methyluridine-3'-phosphate
  modified_base 23: mod_base = OTHER; note = 2'-O-methylcytidine
tctggtcacaaacaacctttctc

SEQ ID NO: 4889 - RNA, 23 nt, synthetic construct
  source 1..23: mol_type = other RNA
  modified_base 1: mod_base = OTHER; note = 2'-O-methyluridine-3'-phosphate 5'-(E)-Vinylphosphonate
  modified_base 2: mod_base = OTHER; note = 2'-deoxy-2'-fluorouridine-3'-phosphate
  modified_base 3: mod_base = OTHER; note = 2'-O-methylcytidine-3'-phosphate
  modified_base 4: mod_base = OTHER; note = 2'-O-methyluridine-3'-phosphate
  modified_base 5: mod_base = OTHER; note = 2'-O-methylguanosine-3'-phosphate
  modified_base 6: mod_base = OTHER; note = 2'-deoxy-2'-fluoroguanosine-3'-phosphate
  modified_base 7: mod_base = OTHER; note = 2'-O-methyluridine-3'-phosphate
  modified_base 8: mod_base = OTHER; note = 2'-O-methylcytidine-3'-phosphate
  modified_base 9: mod_base = OTHER; note = 2'-O-methyladenosine-3'-phosphate
  modified_base 10: mod_base = OTHER; note = 2'-O-methylcytidine-3'-phosphate
  modified_base 11: mod_base = OTHER; note = 2'-O-methyladenosine-3'-phosphate
  modified_base 12: mod_base = OTHER; note = 2'-O-methyladenosine-3'-phosphate
  modified_base 13: mod_base = OTHER; note = 2'-O-methyladenosine-3'-phosphate
  modified_base 14: mod_base = OTHER; note = 2'-deoxy-2'-fluorocytidine-3'-phosphate
  modified_base 15: mod_base = OTHER; note = 2'-O-methyladenosine-3'-phosphate
  modified_base 16: mod_base = OTHER; note = 2'-deoxy-2'-fluoroadenosine-3'-phosphate
  modified_base 17: mod_base = OTHER; note = 2'-O-methylcytidine-3'-phosphate
  modified_base 18: mod_base = OTHER; note = 2'-O-methylcytidine-3'-phosphate
  modified_base 19: mod_base = OTHER; note = 2'-O-methyluridine-3'-phosphate
  modified_base 20: mod_base = OTHER; note = 2'-O-methyluridine-3'-phosphate
  modified_base 21: mod_base = OTHER; note = 2'-O-methyluridine-3'-phosphate
  modified_base 22: mod_base = OTHER; note = 2'-O-methylcytidine-3'-phosphate
  modified_base 23: mod_base = OTHER; note = 2'-O-methyluridine
ttctggtcacaaacaacctttct

SEQ ID NO: 4890 - RNA, 23 nt, synthetic construct
  source 1..23: mol_type = other RNA
  modified_base 1: mod_base = OTHER; note = 2'-O-methyluridine-3'-phosphate 5'-(E)-Vinylphosphonate
  modified_base 2: mod_base = OTHER; note = 2'-deoxy-2'-fluorouridine-3'-phosphate
  modified_base 3: mod_base = OTHER; note = 2'-O-methyluridine-3'-phosphate
  modified_base 4: mod_base = OTHER; note = 2'-O-methylcytidine-3'-phosphate
  modified_base 5: mod_base = OTHER; note = 2'-O-methyluridine-3'-phosphate
  modified_base 6: mod_base = OTHER; note = 2'-deoxy-2'-fluoroguanosine-3'-phosphate
  modified_base 7: mod_base = OTHER; note = 2'-O-methylguanosine-3'-phosphate
  modified_base 8: mod_base = OTHER; note = 2'-O-methyluridine-3'-phosphate
  modified_base 9: mod_base = OTHER; note = 2'-O-methylcytidine-3'-phosphate
  modified_base 10: mod_base = OTHER; note = 2'-O-methyladenosine-3'-phosphate
  modified_base 11: mod_base = OTHER; note = 2'-O-methylcytidine-3'-phosphate
  modified_base 12: mod_base = OTHER; note = 2'-O-methyladenosine-3'-phosphate
  modified_base 13: mod_base = OTHER; note = 2'-O-methyladenosine-3'-phosphate
  modified_base 14: mod_base = OTHER; note = 2'-deoxy-2'-fluoroadenosine-3'-phosphate
  modified_base 15: mod_base = OTHER; note = 2'-O-methylcytidine-3'-phosphate
  modified_base 16: mod_base = OTHER; note = 2'-deoxy-2'-fluoroadenosine-3'-phosphate
  modified_base 17: mod_base = OTHER; note = 2'-O-methyladenosine-3'-phosphate
  modified_base 18: mod_base = OTHER; note = 2'-O-methylcytidine-3'-phosphate
  modified_base 19: mod_base = OTHER; note = 2'-O-methylcytidine-3'-phosphate
  modified_base 20: mod_base = OTHER; note = 2'-O-methyluridine-3'-phosphate
  modified_base 21: mod_base = OTHER; note = 2'-O-methyluridine-3'-phosphate
  modified_base 22: mod_base = OTHER; note = 2'-O-methyluridine-3'-phosphate
  modified_base 23: mod_base = OTHER; note = 2'-O-methylcytidine
tttctggtcacaaacaacctttc

SEQ ID NO: 4891 - RNA, 23 nt, synthetic construct
  source 1..23: mol_type = other RNA
  modified_base 1: mod_base = OTHER; note = 2'-O-methyluridine-3'-phosphate 5'-(E)-Vinylphosphonate
  modified_base 2: mod_base = OTHER; note = 2'-deoxy-2'-fluorocytidine-3'-phosphate
  modified_base 3: mod_base = OTHER; note = 2'-O-methyluridine-3'-phosphate
  modified_base 4: mod_base = OTHER; note = 2'-O-methyluridine-3'-phosphate
  modified_base 5: mod_base = OTHER; note = 2'-O-methylcytidine-3'-phosphate
  modified_base 6: mod_base = OTHER; note = 2'-deoxy-2'-fluorouridine-3'-phosphate
  modified_base 7: mod_base = OTHER; note = 2'-O-methylguanosine-3'-phosphate
  modified_base 8: mod_base = OTHER; note = 2'-O-methylguanosine-3'-phosphate
  modified_base 9: mod_base = OTHER; note = 2'-O-methyluridine-3'-phosphate
  modified_base 10: mod_base = OTHER; note = 2'-O-methylcytidine-3'-phosphate
  modified_base 11: mod_base = OTHER; note = 2'-O-methyladenosine-3'-phosphate
  modified_base 12: mod_base = OTHER; note = 2'-O-methylcytidine-3'-phosphate
  modified_base 13: mod_base = OTHER; note = 2'-O-methyladenosine-3'-phosphate
  modified_base 14: mod_base = OTHER; note = 2'-deoxy-2'-fluoroadenosine-3'-phosphate
  modified_base 15: mod_base = OTHER; note = 2'-O-methyladenosine-3'-phosphate
  modified_base 16: mod_base = OTHER; note = 2'-deoxy-2'-fluorocytidine-3'-phosphate
  modified_base 17: mod_base = OTHER; note = 2'-O-methyladenosine-3'-phosphate
  modified_base 18: mod_base = OTHER; note = 2'-O-methyladenosine-3'-phosphate
  modified_base 19: mod_base = OTHER; note = 2'-O-methylcytidine-3'-phosphate
  modified_base 20: mod_base = OTHER; note = 2'-O-methylcytidine-3'-phosphate
  modified_base 21: mod_base = OTHER; note = 2'-O-methyluridine-3'-phosphate
  modified_base 22: mod_base = OTHER; note = 2'-O-methyluridine-3'-phosphate
  modified_base 23: mod_base = OTHER; note = 2'-O-methyluridine
tcttctggtcacaaacaaccttt

SEQ ID NO: 4892 - RNA, 23 nt, synthetic construct
  source 1..23: mol_type = other RNA
  modified_base 1: mod_base = OTHER; note = 2'-O-methyluridine-3'-phosphate 5'-(E)-Vinylphosphonate
  modified_base 2: mod_base = OTHER; note = 2'-deoxy-2'-fluoroadenosine-3'-phosphate
  modified_base 3: mod_base = OTHER; note = 2'-O-methylcytidine-3'-phosphate
  modified_base 4: mod_base = OTHER; note = 2'-O-methyluridine-3'-phosphate
  modified_base 5: mod_base = OTHER; note = 2'-O-methyluridine-3'-phosphate
  modified_base 6: mod_base = OTHER; note = 2'-deoxy-2'-fluorocytidine-3'-phosphate
  modified_base 7: mod_base = OTHER; note = 2'-O-methyluridine-3'-phosphate
  modified_base 8: mod_base = OTHER; note = 2'-O-methylguanosine-3'-phosphate
  modified_base 9: mod_base = OTHER; note = 2'-O-methylguanosine-3'-phosphate
  modified_base 10: mod_base = OTHER; note = 2'-O-methyluridine-3'-phosphate
  modified_base 11: mod_base = OTHER; note = 2'-O-methylcytidine-3'-phosphate
  modified_base 12: mod_base = OTHER; note = 2'-O-methyladenosine-3'-phosphate
  modified_base 13: mod_base = OTHER; note = 2'-O-methylcytidine-3'-phosphate
  modified_base 14: mod_base = OTHER; note = 2'-deoxy-2'-fluoroadenosine-3'-phosphate
  modified_base 15: mod_base = OTHER; note = 2'-O-methyladenosine-3'-phosphate
  modified_base 16: mod_base = OTHER; note = 2'-deoxy-2'-fluoroadenosine-3'-phosphate
  modified_base 17: mod_base = OTHER; note = 2'-O-methylcytidine-3'-phosphate
  modified_base 18: mod_base = OTHER; note = 2'-O-methyladenosine-3'-phosphate
  modified_base 19: mod_base = OTHER; note = 2'-O-methyladenosine-3'-phosphate
  modified_base 20: mod_base = OTHER; note = 2'-O-methylcytidine-3'-phosphate
  modified_base 21: mod_base = OTHER; note = 2'-O-methylcytidine-3'-phosphate
  modified_base 22: mod_base = OTHER; note = 2'-O-methyluridine-3'-phosphate
  modified_base 23: mod_base = OTHER; note = 2'-O-methyluridine
tacttctggtcacaaacaacctt

SEQ ID NO: 4893 - RNA, 23 nt, synthetic construct
  source 1..23: mol_type = other RNA
  modified_base 1: mod_base = OTHER; note = 2'-O-methyluridine-3'-phosphate 5'-(E)-Vinylphosphonate
  modified_base 2: mod_base = OTHER; note = 2'-deoxy-2'-fluoroadenosine-3'-phosphate
  modified_base 3: mod_base = OTHER; note = 2'-O-methyladenosine-3'-phosphate
  modified_base 4: mod_base = OTHER; note = 2'-O-methylcytidine-3'-phosphate
  modified_base 5: mod_base = OTHER; note = 2'-O-methyluridine-3'-phosphate
  modified_base 6: mod_base = OTHER; note = 2'-deoxy-2'-fluorouridine-3'-phosphate
  modified_base 7: mod_base = OTHER; note = 2'-O-methylcytidine-3'-phosphate
  modified_base 8: mod_base = OTHER; note = 2'-O-methyluridine-3'-phosphate
  modified_base 9: mod_base = OTHER; note = 2'-O-methylguanosine-3'-phosphate
  modified_base 10: mod_base = OTHER; note = 2'-O-methylguanosine-3'-phosphate
  modified_base 11: mod_base = OTHER; note = 2'-O-methyluridine-3'-phosphate
  modified_base 12: mod_base = OTHER; note = 2'-O-methylcytidine-3'-phosphate
  modified_base 13: mod_base = OTHER; note = 2'-O-methyladenosine-3'-phosphate
  modified_base 14: mod_base = OTHER; note = 2'-deoxy-2'-fluorocytidine-3'-phosphate
  modified_base 15: mod_base = OTHER; note = 2'-O-methyladenosine-3'-phosphate
  modified_base 16: mod_base = OTHER; note = 2'-deoxy-2'-fluoroadenosine-3'-phosphate
  modified_base 17: mod_base = OTHER; note = 2'-O-methyladenosine-3'-phosphate
  modified_base 18: mod_base = OTHER; note = 2'-O-methylcytidine-3'-phosphate
  modified_base 19: mod_base = OTHER; note = 2'-O-methyladenosine-3'-phosphate
  modified_base 20: mod_base = OTHER; note = 2'-O-methyladenosine-3'-phosphate
  modified_base 21: mod_base = OTHER; note = 2'-O-methylcytidine-3'-phosphate
  modified_base 22: mod_base = OTHER; note = 2'-O-methylcytidine-3'-phosphate
  modified_base 23: mod_base = OTHER; note = 2'-O-methyluridine
taacttctggtcacaaacaacct

SEQ ID NO: 4894 - RNA, 23 nt, synthetic construct
  source 1..23: mol_type = other RNA
  modified_base 1: mod_base = OTHER; note = 2'-O-methyluridine-3'-phosphate 5'-(E)-Vinylphosphonate
  modified_base 2: mod_base = OTHER; note = 2'-deoxy-2'-fluoroadenosine-3'-phosphate
  modified_base 3: mod_base = OTHER; note = 2'-O-methyladenosine-3'-phosphate
  modified_base 4: mod_base = OTHER; note = 2'-O-methyladenosine-3'-phosphate
  modified_base 5: mod_base = OTHER; note = 2'-O-methylcytidine-3'-phosphate
  modified_base 6: mod_base = OTHER; note = 2'-deoxy-2'-fluorouridine-3'-phosphate
  modified_base 7: mod_base = OTHER; note = 2'-O-methyluridine-3'-phosphate
  modified_base 8: mod_base = OTHER; note = 2'-O-methylcytidine-3'-phosphate
  modified_base 9: mod_base = OTHER; note = 2'-O-methyluridine-3'-phosphate
  modified_base 10: mod_base = OTHER; note = 2'-O-methylguanosine-3'-phosphate
  modified_base 11: mod_base = OTHER; note = 2'-O-methylguanosine-3'-phosphate
  modified_base 12: mod_base = OTHER; note = 2'-O-methyluridine-3'-phosphate
  modified_base 13: mod_base = OTHER; note = 2'-O-methylcytidine-3'-phosphate
  modified_base 14: mod_base = OTHER; note = 2'-deoxy-2'-fluoroadenosine-3'-phosphate
  modified_base 15: mod_base = OTHER; note = 2'-O-methylcytidine-3'-phosphate
  modified_base 16: mod_base = OTHER; note = 2'-deoxy-2'-fluoroadenosine-3'-phosphate
  modified_base 17: mod_base = OTHER; note = 2'-O-methyladenosine-3'-phosphate
  modified_base 18: mod_base = OTHER; note = 2'-O-methyladenosine-3'-phosphate
  modified_base 19: mod_base = OTHER; note = 2'-O-methylcytidine-3'-phosphate
  modified_base 20: mod_base = OTHER; note = 2'-O-methyladenosine-3'-phosphate
  modified_base 21: mod_base = OTHER; note = 2'-O-methyladenosine-3'-phosphate
  modified_base 22: mod_base = OTHER; note = 2'-O-methylcytidine-3'-phosphate
  modified_base 23: mod_base = OTHER; note = 2'-O-methylcytidine
taaacttctggtcacaaacaacc

SEQ ID NO: 4895 - RNA, 23 nt, synthetic construct
  source 1..23: mol_type = other RNA
  modified_base 1: mod_base = OTHER; note = 2'-O-methyluridine-3'-phosphate 5'-(E)-Vinylphosphonate
  modified_base 2: mod_base = OTHER; note = 2'-deoxy-2'-fluoroadenosine-3'-phosphate
  modified_base 3: mod_base = OTHER; note = 2'-O-methyluridine-3'-phosphate
  modified_base 4: mod_base = OTHER; note = 2'-O-methyladenosine-3'-phosphate
  modified_base 5: mod_base = OTHER; note = 2'-O-methylcytidine-3'-phosphate
  modified_base 6: mod_base = OTHER; note = 2'-deoxy-2'-fluorouridine-3'-phosphate
  modified_base 7: mod_base = OTHER; note = 2'-O-methyluridine-3'-phosphate
  modified_base 8: mod_base = OTHER; note = 2'-O-methylguanosine-3'-phosphate
  modified_base 9: mod_base = OTHER; note = 2'-O-methylguanosine-3'-phosphate
  modified_base 10: mod_base = OTHER; note = 2'-O-methyluridine-3'-phosphate
  modified_base 11: mod_base = OTHER; note = 2'-O-methylcytidine-3'-phosphate
  modified_base 12: mod_base = OTHER; note = 2'-O-methylguanosine-3'-phosphate
  modified_base 13: mod_base = OTHER; note = 2'-O-methyladenosine-3'-phosphate
  modified_base 14: mod_base = OTHER; note = 2'-deoxy-2'-fluoroadenosine-3'-phosphate
  modified_base 15: mod_base = OTHER; note = 2'-O-methyladenosine-3'-phosphate
  modified_base 16: mod_base = OTHER; note = 2'-deoxy-2'-fluorocytidine-3'-phosphate
  modified_base 17: mod_base = OTHER; note = 2'-O-methyluridine-3'-phosphate
  modified_base 18: mod_base = OTHER; note = 2'-O-methyluridine-3'-phosphate
  modified_base 19: mod_base = OTHER; note = 2'-O-methylcytidine-3'-phosphate
  modified_base 20: mod_base = OTHER; note = 2'-O-methyluridine-3'-phosphate
  modified_base 21: mod_base = OTHER; note = 2'-O-methylguanosine-3'-phosphate
  modified_base 22: mod_base = OTHER; note = 2'-O-methylguanosine-3'-phosphate
  modified_base 23: mod_base = OTHER; note = 2'-O-methyluridine
tatacttggtcgaaacttctggt

SEQ ID NO: 4896 - RNA, 23 nt, synthetic construct
  source 1..23: mol_type = other RNA
  modified_base 1: mod_base = OTHER; note = 2'-O-methyluridine-3'-phosphate 5'-(E)-Vinylphosphonate
  modified_base 2: mod_base = OTHER; note = 2'-deoxy-2'-fluorouridine-3'-phosphate
  modified_base 3: mod_base = OTHER; note = 2'-O-methylguanosine-3'-phosphate
  modified_base 4: mod_base = OTHER; note = 2'-O-methylcytidine-3'-phosphate
  modified_base 5: mod_base = OTHER; note = 2'-O-methyluridine-3'-phosphate
  modified_base 6: mod_base = OTHER; note = 2'-deoxy-2'-fluorouridine-3'-phosphate
  modified_base 7: mod_base = OTHER; note = 2'-O-methylcytidine-3'-phosphate
  modified_base 8: mod_base = OTHER; note = 2'-O-methyladenosine-3'-phosphate
  modified_base 9: mod_base = OTHER; note = 2'-O-methylcytidine-3'-phosphate
  modified_base 10: mod_base = OTHER; note = 2'-O-methyladenosine-3'-phosphate
  modified_base 11: mod_base = OTHER; note = 2'-O-methyladenosine-3'-phosphate
  modified_base 12: mod_base = OTHER; note = 2'-O-methylcytidine-3'-phosphate
  modified_base 13: mod_base = OTHER; note = 2'-O-methyluridine-3'-phosphate
  modified_base 14: mod_base = OTHER; note = 2'-deoxy-2'-fluorouridine-3'-phosphate
  modified_base 15: mod_base = OTHER; note = 2'-O-methyluridine-3'-phosphate
  modified_base 16: mod_base = OTHER; note = 2'-deoxy-2'-fluoroguanosine-3'-phosphate
  modified_base 17: mod_base = OTHER; note = 2'-O-methylcytidine-3'-phosphate
  modified_base 18: mod_base = OTHER; note = 2'-O-methylcytidine-3'-phosphate
  modified_base 19: mod_base = OTHER; note = 2'-O-methyladenosine-3'-phosphate
  modified_base 20: mod_base = OTHER; note = 2'-O-methylcytidine-3'-phosphate
  modified_base 21: mod_base = OTHER; note = 2'-O-methyluridine-3'-phosphate
  modified_base 22: mod_base = OTHER; note = 2'-O-methylguanosine-3'-phosphate
  modified_base 23: mod_base = OTHER; note = 2'-O-methylguanosine
ttgcttcacaactttgccactgg

SEQ ID NO: 4897 - RNA, 23 nt, synthetic construct
  source 1..23: mol_type = other RNA
  modified_base 1: mod_base = OTHER; note = 2'-O-methyluridine-3'-phosphate 5'-(E)-Vinylphosphonate
  modified_base 2: mod_base = OTHER; note = 2'-deoxy-2'-fluoroadenosine-3'-phosphate
  modified_base 3: mod_base = OTHER; note = 2'-O-methylguanosine-3'-phosphate
  modified_base 4: mod_base = OTHER; note = 2'-O-methyluridine-3'-phosphate
  modified_base 5: mod_base = OTHER; note = 2'-O-methylguanosine-3'-phosphate
  modified_base 6: mod_base = OTHER; note = 2'-deoxy-2'-fluorocytidine-3'-phosphate
  modified_base 7: mod_base = OTHER; note = 2'-O-methyluridine-3'-phosphate
  modified_base 8: mod_base = OTHER; note = 2'-O-methyluridine-3'-phosphate
  modified_base 9: mod_base = OTHER; note = 2'-O-methylcytidine-3'-phosphate
  modified_base 10: mod_base = OTHER; note = 2'-O-methyladenosine-3'-phosphate
  modified_base 11: mod_base = OTHER; note = 2'-O-methylcytidine-3'-phosphate
  modified_base 12: mod_base = OTHER; note = 2'-O-methyladenosine-3'-phosphate
  modified_base 13: mod_base = OTHER; note = 2'-O-methyladenosine-3'-phosphate
  modified_base 14: mod_base = OTHER; note = 2'-deoxy-2'-fluorocytidine-3'-phosphate
  modified_base 15: mod_base = OTHER; note = 2'-O-methyluridine-3'-phosphate
  modified_base 16: mod_base = OTHER; note = 2'-deoxy-2'-fluorouridine-3'-phosphate
  modified_base 17: mod_base = OTHER; note = 2'-O-methyluridine-3'-phosphate
  modified_base 18: mod_base = OTHER; note = 2'-O-methylguanosine-3'-phosphate
  modified_base 19: mod_base = OTHER; note = 2'-O-methylcytidine-3'-phosphate
  modified_base 20: mod_base = OTHER; note = 2'-O-methylcytidine-3'-phosphate
  modified_base 21: mod_base = OTHER; note = 2'-O-methyladenosine-3'-phosphate
  modified_base 22: mod_base = OTHER; note = 2'-O-methylcytidine-3'-phosphate
  modified_base 23: mod_base = OTHER; note = 2'-O-methyluridine
tagtgcttcacaactttgccact

SEQ ID NO: 4898 - RNA, 23 nt, synthetic construct
  source 1..23: mol_type = other RNA
  modified_base 1: mod_base = OTHER; note = 2'-O-methyluridine-3'-phosphate 5'-(E)-Vinylphosphonate
  modified_base 2: mod_base = OTHER; note = 2'-deoxy-2'-fluoroadenosine-3'-phosphate
  modified_base 3: mod_base = OTHER; note = 2'-O-methyluridine-3'-phosphate
  modified_base 4: mod_base = OTHER; note = 2'-O-methyladenosine-3'-phosphate
  modified_base 5: mod_base = OTHER; note = 2'-O-methylcytidine-3'-phosphate
  modified_base 6: mod_base = OTHER; note = 2'-deoxy-2'-fluorocytidine-3'-phosphate
  modified_base 7: mod_base = OTHER; note = 2'-O-methyladenosine-3'-phosphate
  modified_base 8: mod_base = OTHER; note = 2'-O-methyladenosine-3'-phosphate
  modified_base 9: mod_base = OTHER; note = 2'-O-methylcytidine-3'-phosphate
  modified_base 10: mod_base = OTHER; note = 2'-O-methyladenosine-3'-phosphate
  modified_base 11: mod_base = OTHER; note = 2'-O-methylcytidine-3'-phosphate
  modified_base 12: mod_base = OTHER; note = 2'-O-methyluridine-3'-phosphate
  modified_base 13: mod_base = OTHER; note = 2'-O-methylcytidine-3'-phosphate
  modified_base 14: mod_base = OTHER; note = 2'-deoxy-2'-fluoroadenosine-3'-phosphate
  modified_base 15: mod_base = OTHER; note = 2'-O-methylcytidine-3'-phosphate
  modified_base 16: mod_base = OTHER; note = 2'-deoxy-2'-fluoroguanosine-3'-phosphate
  modified_base 17: mod_base = OTHER; note = 2'-O-methylcytidine-3'-phosphate
  modified_base 18: mod_base = OTHER; note = 2'-O-methyladenosine-3'-phosphate
  modified_base 19: mod_base = OTHER; note = 2'-O-methyluridine-3'-phosphate
  modified_base 20: mod_base = OTHER; note = 2'-O-methyluridine-3'-phosphate
  modified_base 21: mod_base = OTHER; note = 2'-O-methyladenosine-3'-phosphate
  modified_base 22: mod_base = OTHER; note = 2'-O-methyluridine-3'-phosphate
  modified_base 23: mod_base = OTHER; note = 2'-O-methyluridine
tataccaacactcacgcattatt

SEQ ID NO: 4899 - RNA, 23 nt, synthetic construct
  source 1..23: mol_type = other RNA
  modified_base 1: mod_base = OTHER; note = 2'-O-methyluridine-3'-phosphate 5'-(E)-Vinylphosphonate
  modified_base 2: mod_base = OTHER; note = 2'-deoxy-2'-fluoroadenosine-3'-phosphate
  modified_base 3: mod_base = OTHER; note = 2'-O-methyladenosine-3'-phosphate
  modified_base 4: mod_base = OTHER; note = 2'-O-methyluridine-3'-phosphate
  modified_base 5: mod_base = OTHER; note = 2'-O-methyladenosine-3'-phosphate
  modified_base 6: mod_base = OTHER; note = 2'-deoxy-2'-fluorocytidine-3'-phosphate
  modified_base 7: mod_base = OTHER; note = 2'-O-methylguanosine-3'-phosphate
  modified_base 8: mod_base = OTHER; note = 2'-O-methyladenosine-3'-phosphate
  modified_base 9: mod_base = OTHER; note = 2'-O-methyladenosine-3'-phosphate
  modified_base 10: mod_base = OTHER; note = 2'-O-methylguanosine-3'-phosphate
  modified_base 11: mod_base = OTHER; note = 2'-O-methyladenosine-3'-phosphate
  modified_base 12: mod_base = OTHER; note = 2'-O-methylguanosine-3'-phosphate
  modified_base 13: mod_base = OTHER; note = 2'-O-methylcytidine-3'-phosphate
  modified_base 14: mod_base = OTHER; note = 2'-deoxy-2'-fluoroadenosine-3'-phosphate
  modified_base 15: mod_base = OTHER; note = 2'-O-methylguanosine-3'-phosphate
  modified_base 16: mod_base = OTHER; note = 2'-deoxy-2'-fluorouridine-3'-phosphate
  modified_base 17: mod_base = OTHER; note = 2'-O-methyluridine-3'-phosphate
  modified_base 18: mod_base = OTHER; note = 2'-O-methyladenosine-3'-phosphate
  modified_base 19: mod_base = OTHER; note = 2'-O-methylguanosine-3'-phosphate
  modified_base 20: mod_base = OTHER; note = 2'-O-methylguanosine-3'-phosphate
  modified_base 21: mod_base = OTHER; note = 2'-O-methylcytidine-3'-phosphate
  modified_base 22: mod_base = OTHER; note = 2'-O-methylguanosine-3'-phosphate
  modified_base 23: mod_base = OTHER; note = 2'-O-methylguanosine
taatacgaagagcagttaggcgg

SEQ ID NO: 4900 - RNA, 23 nt, synthetic construct
  source 1..23: mol_type = other RNA
  modified_base 1: mod_base = OTHER; note = 2'-O-methyluridine-3'-phosphate 5'-(E)-Vinylphosphonate
  modified_base 2: mod_base = OTHER; note = 2'-deoxy-2'-fluorouridine-3'-phosphate
  modified_base 3: mod_base = OTHER; note = 2'-O-methyladenosine-3'-phosphate
  modified_base 4: mod_base = OTHER; note = 2'-O-methyladenosine-3'-phosphate
  modified_base 5: mod_base = OTHER; note = 2'-O-methyluridine-3'-phosphate
  modified_base 6: mod_base = OTHER; note = 2'-deoxy-2'-fluoroadenosine-3'-phosphate
  modified_base 7: mod_base = OTHER; note = 2'-O-methylcytidine-3'-phosphate
  modified_base 8: mod_base = OTHER; note = 2'-O-methylguanosine-3'-phosphate
  modified_base 9: mod_base = OTHER; note = 2'-O-methyladenosine-3'-phosphate
  modified_base 10: mod_base = OTHER; note = 2'-O-methyladenosine-3'-phosphate
  modified_base 11: mod_base = OTHER; note = 2'-O-methylguanosine-3'-phosphate
  modified_base 12: mod_base = OTHER; note = 2'-O-methyladenosine-3'-phosphate
  modified_base 13: mod_base = OTHER; note = 2'-O-methylguanosine-3'-phosphate
  modified_base 14: mod_base = OTHER; note = 2'-deoxy-2'-fluorocytidine-3'-phosphate
  modified_base 15: mod_base = OTHER; note = 2'-O-methyladenosine-3'-phosphate
  modified_base 16: mod_base = OTHER; note = 2'-deoxy-2'-fluoroguanosine-3'-phosphate
  modified_base 17: mod_base = OTHER; note = 2'-O-methyluridine-3'-phosphate
  modified_base 18: mod_base = OTHER; note = 2'-O-methyluridine-3'-phosphate
  modified_base 19: mod_base = OTHER; note = 2'-O-methyladenosine-3'-phosphate
  modified_base 20: mod_base = OTHER; note = 2'-O-methylguanosine-3'-phosphate
  modified_base 21: mod_base = OTHER; note = 2'-O-methylguanosine-3'-phosphate
  modified_base 22: mod_base = OTHER; note = 2'-O-methylcytidine-3'-phosphate
  modified_base 23: mod_base = OTHER; note = 2'-O-methylguanosine
ttaatacgaagagcagttaggcg

SEQ ID NO: 4901 - RNA, 23 nt, synthetic construct
  source 1..23: mol_type = other RNA
  modified_base 1: mod_base = OTHER; note = 2'-O-methyluridine-3'-phosphate 5'-(E)-Vinylphosphonate
  modified_base 2: mod_base = OTHER; note = 2'-deoxy-2'-fluorouridine-3'-phosphate
  modified_base 3: mod_base = OTHER; note = 2'-O-methyluridine-3'-phosphate
  modified_base 4: mod_base = OTHER; note = 2'-O-methyladenosine-3'-phosphate
  modified_base 5: mod_base = OTHER; note = 2'-O-methyladenosine-3'-phosphate
  modified_base 6: mod_base = OTHER; note = 2'-deoxy-2'-fluorouridine-3'-phosphate
  modified_base 7: mod_base = OTHER; note = 2'-O-methyladenosine-3'-phosphate
  modified_base 8: mod_base = OTHER; note = 2'-O-methylcytidine-3'-phosphate
  modified_base 9: mod_base = OTHER; note = 2'-O-methylguanosine-3'-phosphate
  modified_base 10: mod_base = OTHER; note = 2'-O-methyladenosine-3'-phosphate
  modified_base 11: mod_base = OTHER; note = 2'-O-methyladenosine-3'-phosphate
  modified_base 12: mod_base = OTHER; note = 2'-O-methylguanosine-3'-phosphate
  modified_base 13: mod_base = OTHER; note = 2'-O-methyladenosine-3'-phosphate
  modified_base 14: mod_base = OTHER; note = 2'-deoxy-2'-fluoroguanosine-3'-phosphate
  modified_base 15: mod_base = OTHER; note = 2'-O-methylcytidine-3'-phosphate
  modified_base 16: mod_base = OTHER; note = 2'-deoxy-2'-fluoroadenosine-3'-phosphate
  modified_base 17: mod_base = OTHER; note = 2'-O-methylguanosine-3'-phosphate
  modified_base 18: mod_base = OTHER; note = 2'-O-methyluridine-3'-phosphate
  modified_base 19: mod_base = OTHER; note = 2'-O-methyluridine-3'-phosphate
  modified_base 20: mod_base = OTHER; note = 2'-O-methyladenosine-3'-phosphate
  modified_base 21: mod_base = OTHER; note = 2'-O-methylguanosine-3'-phosphate
  modified_base 22: mod_base = OTHER; note = 2'-O-methylguanosine-3'-phosphate
  modified_base 23: mod_base = OTHER; note = 2'-O-methylcytidine
tttaatacgaagagcagttaggc

SEQ ID NO: 4902 - RNA, 23 nt, synthetic construct
  source 1..23: mol_type = other RNA
  modified_base 1: mod_base = OTHER; note = 2'-O-methyluridine-3'-phosphate 5'-(E)-Vinylphosphonate
  modified_base 2: mod_base = OTHER; note = 2'-deoxy-2'-fluorouridine-3'-phosphate
  modified_base 3: mod_base = OTHER; note = 2'-O-methyluridine-3'-phosphate
  modified_base 4: mod_base = OTHER; note = 2'-O-methylcytidine-3'-phosphate
  modified_base 5: mod_base = OTHER; note = 2'-O-methyluridine-3'-phosphate
  modified_base 6: mod_base = OTHER; note = 2'-deoxy-2'-fluorouridine-3'-phosphate
  modified_base 7: mod_base = OTHER; note = 2'-O-methyladenosine-3'-phosphate
  modified_base 8: mod_base = OTHER; note = 2'-O-methyladenosine-3'-phosphate
  modified_base 9: mod_base = OTHER; note = 2'-O-methyluridine-3'-phosphate
  modified_base 10: mod_base = OTHER; note = 2'-O-methyladenosine-3'-phosphate
  modified_base 11: mod_base = OTHER; note = 2'-O-methylcytidine-3'-phosphate
  modified_base 12: mod_base = OTHER; note = 2'-O-methylguanosine-3'-phosphate
  modified_base 13: mod_base = OTHER; note = 2'-O-methyladenosine-3'-phosphate
  modified_base 14: mod_base = OTHER; note = 2'-deoxy-2'-fluoroadenosine-3'-phosphate
  modified_base 15: mod_base = OTHER; note = 2'-O-methylguanosine-3'-phosphate
  modified_base 16: mod_base = OTHER; note = 2'-deoxy-2'-fluoroadenosine-3'-phosphate
  modified_base 17: mod_base = OTHER; note = 2'-O-methylguanosine-3'-phosphate
  modified_base 18: mod_base = OTHER; note = 2'-O-methylcytidine-3'-phosphate
  modified_base 19: mod_base = OTHER; note = 2'-O-methyladenosine-3'-phosphate
  modified_base 20: mod_base = OTHER; note = 2'-O-methylguanosine-3'-phosphate
  modified_base 21: mod_base = OTHER; note = 2'-O-methyluridine-3'-phosphate
  modified_base 22: mod_base = OTHER; note = 2'-O-methyluridine-3'-phosphate
  modified_base 23: mod_base = OTHER; note = 2'-O-methyladenosine
tttcttaatacgaagagcagtta

SEQ ID NO: 4903 - RNA, 23 nt, synthetic construct
  source 1..23: mol_type = other RNA
  modified_base 1: mod_base = OTHER; note = 2'-O-methyluridine-3'-phosphate 5'-(E)-Vinylphosphonate
  modified_base 2: mod_base = OTHER; note = 2'-deoxy-2'-fluoroguanosine-3'-phosphate
  modified_base 3: mod_base = OTHER; note = 2'-O-methyluridine-3'-phosphate
  modified_base 4: mod_base = OTHER; note = 2'-O-methylcytidine-3'-phosphate
  modified_base 5: mod_base = OTHER; note = 2'-O-methyluridine-3'-phosphate
  modified_base 6: mod_base = OTHER; note = 2'-deoxy-2'-fluorouridine-3'-phosphate
  modified_base 7: mod_base = OTHER; note = 2'-O-methylcytidine-3'-phosphate
  modified_base 8: mod_base = OTHER; note = 2'-O-methyluridine-3'-phosphate
  modified_base 9: mod_base = OTHER; note = 2'-O-methyluridine-3'-phosphate
  modified_base 10: mod_base = OTHER; note = 2'-O-methyladenosine-3'-phosphate
  modified_base 11: mod_base = OTHER; note = 2'-O-methyladenosine-3'-phosphate
  modified_base 12: mod_base = OTHER; note = 2'-O-methyluridine-3'-phosphate
  modified_base 13: mod_base = OTHER; note = 2'-O-methyladenosine-3'-phosphate
  modified_base 14: mod_base = OTHER; note = 2'-deoxy-2'-fluorocytidine-3'-phosphate
  modified_base 15: mod_base = OTHER; note = 2'-O-methylguanosine-3'-phosphate
  modified_base 16: mod_base = OTHER; note = 2'-deoxy-2'-fluoroadenosine-3'-phosphate
  modified_base 17: mod_base = OTHER; note = 2'-O-methyladenosine-3'-phosphate
  modified_base 18: mod_base = OTHER; note = 2'-O-methylguanosine-3'-phosphate
  modified_base 19: mod_base = OTHER; note = 2'-O-methyladenosine-3'-phosphate
  modified_base 20: mod_base = OTHER; note = 2'-O-methylguanosine-3'-phosphate
  modified_base 21: mod_base = OTHER; note = 2'-O-methylcytidine-3'-phosphate
  modified_base 22: mod_base = OTHER; note = 2'-O-methyladenosine-3'-phosphate
  modified_base 23: mod_base = OTHER; note = 2'-O-methylguanosine
tgtcttcttaatacgaagagcag

SEQ ID NO: 4904 - RNA, 23 nt, synthetic construct
  source 1..23: mol_type = other RNA
  modified_base 1: mod_base = OTHER; note = 2'-O-methyluridine-3'-phosphate 5'-(E)-Vinylphosphonate
  modified_base 2: mod_base = OTHER; note = 2'-deoxy-2'-fluoroadenosine-3'-phosphate
  modified_base 3: mod_base = OTHER; note = 2'-O-methylguanosine-3'-phosphate
  modified_base 4: mod_base = OTHER; note = 2'-O-methyluridine-3'-phosphate
  modified_base 5: mod_base = OTHER; note = 2'-O-methylcytidine-3'-phosphate
  modified_base 6: mod_base = OTHER; note = 2'-deoxy-2'-fluorouridine-3'-phosphate
  modified_base 7: mod_base = OTHER; note = 2'-O-methyluridine-3'-phosphate
  modified_base 8: mod_base = OTHER; note = 2'-O-methylcytidine-3'-phosphate
  modified_base 9: mod_base = OTHER; note = 2'-O-methyluridine-3'-phosphate
  modified_base 10: mod_base = OTHER; note = 2'-O-methyluridine-3'-phosphate
  modified_base 11: mod_base = OTHER; note = 2'-O-methyladenosine-3'-phosphate
  modified_base 12: mod_base = OTHER; note = 2'-O-methyladenosine-3'-phosphate
  modified_base 13: mod_base = OTHER; note = 2'-O-methyluridine-3'-phosphate
  modified_base 14: mod_base = OTHER; note = 2'-deoxy-2'-fluoroadenosine-3'-phosphate
  modified_base 15: mod_base = OTHER; note = 2'-O-methylcytidine-3'-phosphate
  modified_base 16: mod_base = OTHER; note = 2'-deoxy-2'-fluoroguanosine-3'-phosphate
  modified_base 17: mod_base = OTHER; note = 2'-O-methyladenosine-3'-phosphate
  modified_base 18: mod_base = OTHER; note = 2'-O-methyladenosine-3'-phosphate
  modified_base 19: mod_base = OTHER; note = 2'-O-methylguanosine-3'-phosphate
  modified_base 20: mod_base = OTHER; note = 2'-O-methyladenosine-3'-phosphate
  modified_base 21: mod_base = OTHER; note = 2'-O-methylguanosine-3'-phosphate
  modified_base 22: mod_base = OTHER; note = 2'-O-methylcytidine-3'-phosphate
  modified_base 23: mod_base = OTHER; note = 2'-O-methyladenosine
tagtcttcttaatacgaagagca

SEQ ID NO: 4905 - RNA, 23 nt, synthetic construct
  source 1..23: mol_type = other RNA
  modified_base 1: mod_base = OTHER; note = 2'-O-methyluridine-3'-phosphate 5'-(E)-Vinylphosphonate
  modified_base 2: mod_base = OTHER; note = 2'-deoxy-2'-fluorouridine-3'-phosphate
  modified_base 3: mod_base = OTHER; note = 2'-O-methylguanosine-3'-phosphate
  modified_base 4: mod_base = OTHER; note = 2'-O-methyladenosine-3'-phosphate
  modified_base 5: mod_base = OTHER; note = 2'-O-methylcytidine-3'-phosphate
  modified_base 6: mod_base = OTHER; note = 2'-deoxy-2'-fluoroadenosine-3'-phosphate
  modified_base 7: mod_base = OTHER; note = 2'-O-methylcytidine-3'-phosphate
  modified_base 8: mod_base = OTHER; note = 2'-O-methyladenosine-3'-phosphate
  modified_base 9: mod_base = OTHER; note = 2'-O-methyladenosine-3'-phosphate
  modified_base 10: mod_base = OTHER; note = 2'-O-methyladenosine-3'-phosphate
  modified_base 11: mod_base = OTHER; note = 2'-O-methylguanosine-3'-phosphate
  modified_base 12: mod_base = OTHER; note = 2'-O-methyluridine-3'-phosphate
  modified_base 13: mod_base = OTHER; note = 2'-O-methyluridine-3'-phosphate
  modified_base 14: mod_base = OTHER; note = 2'-deoxy-2'-fluoroguanosine-3'-phosphate
  modified_base 15: mod_base = OTHER; note = 2'-O-methyladenosine-3'-phosphate
  modified_base 16: mod_base = OTHER; note = 2'-deoxy-2'-fluoroguanosine-3'-phosphate
  modified_base 17: mod_base = OTHER; note = 2'-O-methyladenosine-3'-phosphate
  modified_base 18: mod_base = OTHER; note = 2'-O-methyluridine-3'-phosphate
  modified_base 19: mod_base = OTHER; note = 2'-O-methyladenosine-3'-phosphate
  modified_base 20: mod_base = OTHER; note = 2'-O-methyluridine-3'-phosphate
  modified_base 21: mod_base = OTHER; note = 2'-O-methyladenosine-3'-phosphate
  modified_base 22: mod_base = OTHER; note = 2'-O-methylguanosine-3'-phosphate
  modified_base 23: mod_base = OTHER; note = 2'-O-methyluridine
ttgacacaaagttgagatatagt

SEQ ID NO: 4906 - RNA, 23 nt, synthetic construct
  source 1..23: mol_type = other RNA
  modified_base 1: mod_base = OTHER; note = 2'-O-methyluridine-3'-phosphate 5'-(E)-Vinylphosphonate
  modified_base 2: mod_base = OTHER; note = 2'-deoxy-2'-fluorouridine-3'-phosphate
  modified_base 3: mod_base = OTHER; note = 2'-O-methyluridine-3'-phosphate
  modified_base 4: mod_base = OTHER; note = 2'-O-methylguanosine-3'-phosphate
  modified_base 5: mod_base = OTHER; note = 2'-O-methyladenosine-3'-phosphate
  modified_base 6: mod_base = OTHER; note = 2'-deoxy-2'-fluorocytidine-3'-phosphate
  modified_base 7: mod_base = OTHER; note = 2'-O-methyladenosine-3'-phosphate
  modified_base 8: mod_base = OTHER; note = 2'-O-methylcytidine-3'-phosphate
  modified_base 9: mod_base = OTHER; note = 2'-O-methyladenosine-3'-phosphate
  modified_base 10: mod_base = OTHER; note = 2'-O-methyladenosine-3'-phosphate
  modified_base 11: mod_base = OTHER; note = 2'-O-methyladenosine-3'-phosphate
  modified_base 12: mod_base = OTHER; note = 2'-O-methylguanosine-3'-phosphate
  modified_base 13: mod_base = OTHER; note = 2'-O-methyluridine-3'-phosphate
  modified_base 14: mod_base = OTHER; note = 2'-deoxy-2'-fluorouridine-3'-phosphate
  modified_base 15: mod_base = OTHER; note = 2'-O-methylguanosine-3'-phosphate
  modified_base 16: mod_base = OTHER; note = 2'-deoxy-2'-fluoroadenosine-3'-phosphate
  modified_base 17: mod_base = OTHER; note = 2'-O-methylguanosine-3'-phosphate
  modified_base 18: mod_base = OTHER; note = 2'-O-methyladenosine-3'-phosphate
  modified_base 19: mod_base = OTHER; note = 2'-O-methyluridine-3'-phosphate
  modified_base 20: mod_base = OTHER; note = 2'-O-methyladenosine-3'-phosphate
  modified_base 21: mod_base = OTHER; note = 2'-O-methyluridine-3'-phosphate
  modified_base 22: mod_base = OTHER; note = 2'-O-methyladenosine-3'-phosphate
  modified_base 23: mod_base = OTHER; note = 2'-O-methylguanosine
tttgacacaaagttgagatatag

SEQ ID NO: 4907 - RNA, 23 nt, synthetic construct
  source 1..23: mol_type = other RNA
  modified_base 1: mod_base = OTHER; note = 2'-O-methyluridine-3'-phosphate 5'-(E)-Vinylphosphonate
  modified_base 2: mod_base = OTHER; note = 2'-deoxy-2'-fluorouridine-3'-phosphate
  modified_base 3: mod_base = OTHER; note = 2'-O-methyluridine-3'-phosphate
  modified_base 4: mod_base = OTHER; note = 2'-O-methyluridine-3'-phosphate
  modified_base 5: mod_base = OTHER; note = 2'-O-methylguanosine-3'-phosphate
  modified_base 6: mod_base = OTHER; note = 2'-deoxy-2'-fluoroadenosine-3'-phosphate
  modified_base 7: mod_base = OTHER; note = 2'-O-methylcytidine-3'-phosphate
  modified_base 8: mod_base = OTHER; note = 2'-O-methyladenosine-3'-phosphate
  modified_base 9: mod_base = OTHER; note = 2'-O-methylcytidine-3'-phosphate
  modified_base 10: mod_base = OTHER; note = 2'-O-methyladenosine-3'-phosphate
  modified_base 11: mod_base = OTHER; note = 2'-O-methyladenosine-3'-phosphate
  modified_base 12: mod_base = OTHER; note = 2'-O-methyladenosine-3'-phosphate
  modified_base 13: mod_base = OTHER; note = 2'-O-methylguanosine-3'-phosphate
  modified_base 14: mod_base = OTHER; note = 2'-deoxy-2'-fluorouridine-3'-phosphate
  modified_base 15: mod_base = OTHER; note = 2'-O-methyluridine-3'-phosphate
  modified_base 16: mod_base = OTHER; note = 2'-deoxy-2'-fluoroguanosine-3'-phosphate
  modified_base 17: mod_base = OTHER; note = 2'-O-methyladenosine-3'-phosphate
  modified_base 18: mod_base = OTHER; note = 2'-O-methylguanosine-3'-phosphate
  modified_base 19: mod_base = OTHER; note = 2'-O-methyladenosine-3'-phosphate
  modified_base 20: mod_base = OTHER; note = 2'-O-methyluridine-3'-phosphate
  modified_base 21: mod_base = OTHER; note = 2'-O-methyladenosine-3'-phosphate
  modified_base 22: mod_base = OTHER; note = 2'-O-methyluridine-3'-phosphate
  modified_base 23: mod_base = OTHER; note = 2'-O-methyladenosine
ttttgacacaaagttgagatata

SEQ ID NO: 4908 - RNA, 23 nt, synthetic construct
  source 1..23: mol_type = other RNA
  modified_base 1: mod_base = OTHER; note = 2'-O-methyluridine-3'-phosphate 5'-(E)-Vinylphosphonate
  modified_base 2: mod_base = OTHER; note = 2'-deoxy-2'-fluorouridine-3'-phosphate
  modified_base 3: mod_base = OTHER; note = 2'-O-methyluridine-3'-phosphate
  modified_base 4: mod_base = OTHER; note = 2'-O-methylcytidine-3'-phosphate
  modified_base 5: mod_base = OTHER; note = 2'-O-methyluridine-3'-phosphate
  modified_base 6: mod_base = OTHER; note = 2'-deoxy-2'-fluorouridine-3'-phosphate
  modified_base 7: mod_base = OTHER; note = 2'-O-methyluridine-3'-phosphate
  modified_base 8: mod_base = OTHER; note = 2'-O-methylguanosine-3'-phosphate
  modified_base 9: mod_base = OTHER; note = 2'-O-methyladenosine-3'-phosphate
  modified_base 10: mod_base = OTHER; note = 2'-O-methylcytidine-3'-phosphate
  modified_base 11: mod_base = OTHER; note = 2'-O-methyladenosine-3'-phosphate
  modified_base 12: mod_base = OTHER; note = 2'-O-methylcytidine-3'-phosphate
  modified_base 13: mod_base = OTHER; note = 2'-O-methyladenosine-3'-phosphate
  modified_base 14: mod_base = OTHER; note = 2'-deoxy-2'-fluoroadenosine-3'-phosphate
  modified_base 15: mod_base = OTHER; note = 2'-O-methyladenosine-3'-phosphate
  modified_base 16: mod_base = OTHER; note = 2'-deoxy-2'-fluoroguanosine-3'-phosphate
  modified_base 17: mod_base = OTHER; note = 2'-O-methyluridine-3'-phosphate
  modified_base 18: mod_base = OTHER; note = 2'-O-methyluridine-3'-phosphate
  modified_base 19: mod_base = OTHER; note = 2'-O-methylguanosine-3'-phosphate
  modified_base 20: mod_base = OTHER; note = 2'-O-methyladenosine-3'-phosphate
  modified_base 21: mod_base = OTHER; note = 2'-O-methylguanosine-3'-phosphate
  modified_base 22: mod_base = OTHER; note = 2'-O-methyladenosine-3'-phosphate
  modified_base 23: mod_base = OTHER; note = 2'-O-methyluridine
tttctttgacacaaagttgagat

SEQ ID NO: 4909 - RNA, 23 nt, synthetic construct
  source 1..23: mol_type = other RNA
  modified_base 1: mod_base = OTHER; note = 2'-O-methyluridine-3'-phosphate 5'-(E)-Vinylphosphonate
  modified_base 2: mod_base = OTHER; note = 2'-deoxy-2'-fluorouridine-3'-phosphate
  modified_base 3: mod_base = OTHER; note = 2'-O-methylcytidine-3'-phosphate
  modified_base 4: mod_base = OTHER; note = 2'-O-methyladenosine-3'-phosphate
  modified_base 5: mod_base = OTHER; note = 2'-O-methyluridine-3'-phosphate
  modified_base 6: mod_base = OTHER; note = 2'-deoxy-2'-fluorocytidine-3'-phosphate
  modified_base 7: mod_base = OTHER; note = 2'-O-methyladenosine-3'-phosphate
  modified_base 8: mod_base = OTHER; note = 2'-O-methyluridine-3'-phosphate
  modified_base 9: mod_base = OTHER; note = 2'-O-methyluridine-3'-phosphate
  modified_base 10: mod_base = OTHER; note = 2'-O-methyladenosine-3'-phosphate
  modified_base 11: mod_base = OTHER; note = 2'-O-methylguanosine-3'-phosphate
  modified_base 12: mod_base = OTHER; note = 2'-O-methylguanosine-3'-phosphate
  modified_base 13: mod_base = OTHER; note = 2'-O-methylcytidine-3'-phosphate
  modified_base 14: mod_base = OTHER; note = 2'-deoxy-2'-fluorouridine-3'-phosphate
  modified_base 15: mod_base = OTHER; note = 2'-O-methyluridine-3'-phosphate
  modified_base 16: mod_base = OTHER; note = 2'-deoxy-2'-fluorouridine-3'-phosphate
  modified_base 17: mod_base = OTHER; note = 2'-O-methylguanosine-3'-phosphate
  modified_base 18: mod_base = OTHER; note = 2'-O-methylcytidine-3'-phosphate
  modified_base 19: mod_base = OTHER; note = 2'-O-methyladenosine-3'-phosphate
  modified_base 20: mod_base = OTHER; note = 2'-O-methylguanosine-3'-phosphate
  modified_base 21: mod_base = OTHER; note = 2'-O-methyluridine-3'-phosphate
  modified_base 22: mod_base = OTHER; note = 2'-O-methylcytidine-3'-phosphate
  modified_base 23: mod_base = OTHER; note = 2'-O-methyluridine
ttcatcattaggctttgcagtct

SEQ ID NO: 4910 - RNA, 23 nt, synthetic construct
  source 1..23: mol_type = other RNA
  modified_base 1: mod_base = OTHER; note = 2'-O-methyluridine-3'-phosphate 5'-(E)-Vinylphosphonate
  modified_base 2: mod_base = OTHER; note = 2'-deoxy-2'-fluoroadenosine-3'-phosphate
  modified_base 3: mod_base = OTHER; note = 2'-O-methyluridine-3'-phosphate
  modified_base 4: mod_base = OTHER; note = 2'-O-methylcytidine-3'-phosphate
  modified_base 5: mod_base = OTHER; note = 2'-O-methyladenosine-3'-phosphate
  modified_base 6: mod_base = OTHER; note = 2'-deoxy-2'-fluorouridine-3'-phosphate
  modified_base 7: mod_base = OTHER; note = 2'-O-methylcytidine-3'-phosphate
  modified_base 8: mod_base = OTHER; note = 2'-O-methyladenosine-3'-phosphate
  modified_base 9: mod_base = OTHER; note = 2'-O-methyluridine-3'-phosphate
  modified_base 10: mod_base = OTHER; note = 2'-O-methyluridine-3'-phosphate
  modified_base 11: mod_base = OTHER; note = 2'-O-methyladenosine-3'-phosphate
  modified_base 12: mod_base = OTHER; note = 2'-O-methylguanosine-3'-phosphate
  modified_base 13: mod_base = OTHER; note = 2'-O-methylguanosine-3'-phosphate
  modified_base 14: mod_base = OTHER; note = 2'-deoxy-2'-fluorocytidine-3'-phosphate
  modified_base 15: mod_base = OTHER; note = 2'-O-methyluridine-3'-phosphate
  modified_base 16: mod_base = OTHER; note = 2'-deoxy-2'-fluorouridine-3'-phosphate
  modified_base 17: mod_base = OTHER; note = 2'-O-methyluridine-3'-phosphate
  modified_base 18: mod_base = OTHER; note = 2'-O-methylguanosine-3'-phosphate
  modified_base 19: mod_base = OTHER; note = 2'-O-methylcytidine-3'-phosphate
  modified_base 20: mod_base = OTHER; note = 2'-O-methyladenosine-3'-phosphate
  modified_base 21: mod_base = OTHER; note = 2'-O-methylguanosine-3'-phosphate
  modified_base 22: mod_base = OTHER; note = 2'-O-methyluridine-3'-phosphate
  modified_base 23: mod_base = OTHER; note = 2'-O-methylcytidine
tatcatcattaggctttgcagtc

SEQ ID NO: 4911 - RNA, 23 nt, synthetic construct
  source 1..23: mol_type = other RNA
  modified_base 1: mod_base = OTHER; note = 2'-O-methyluridine-3'-phosphate 5'-(E)-Vinylphosphonate
  modified_base 2: mod_base = OTHER; note = 2'-deoxy-2'-fluorouridine-3'-phosphate
  modified_base 3: mod_base = OTHER; note = 2'-O-methyladenosine-3'-phosphate
  modified_base 4: mod_base = OTHER; note = 2'-O-methyluridine-3'-phosphate
  modified_base 5: mod_base = OTHER; note = 2'-O-methylcytidine-3'-phosphate
  modified_base 6: mod_base = OTHER; note = 2'-deoxy-2'-fluoroadenosine-3'-phosphate
  modified_base 7: mod_base = OTHER; note = 2'-O-methyluridine-3'-phosphate
  modified_base 8: mod_base = OTHER; note = 2'-O-methylcytidine-3'-phosphate
  modified_base 9: mod_base = OTHER; note = 2'-O-methyladenosine-3'-phosphate
  modified_base 10: mod_base = OTHER; note = 2'-O-methyluridine-3'-phosphate
  modified_base 11: mod_base = OTHER; note = 2'-O-methyluridine-3'-phosphate
  modified_base 12: mod_base = OTHER; note = 2'-O-methyladenosine-3'-phosphate
  modified_base 13: mod_base = OTHER; note = 2'-O-methylguanosine-3'-phosphate
  modified_base 14: mod_base = OTHER; note = 2'-deoxy-2'-fluoroguanosine-3'-phosphate
  modified_base 15: mod_base = OTHER; note = 2'-O-methylcytidine-3'-phosphate
  modified_base 16: mod_base = OTHER; note = 2'-deoxy-2'-fluorouridine-3'-phosphate
  modified_base 17: mod_base = OTHER; note = 2'-O-methyluridine-3'-phosphate
  modified_base 18: mod_base = OTHER; note = 2'-O-methyluridine-3'-phosphate
  modified_base 19: mod_base = OTHER; note = 2'-O-methylguanosine-3'-phosphate
  modified_base 20: mod_base = OTHER; note = 2'-O-methylcytidine-3'-phosphate
  modified_base 21: mod_base = OTHER; note = 2'-O-methyladenosine-3'-phosphate
  modified_base 22: mod_base = OTHER; note = 2'-O-methylguanosine-3'-phosphate
  modified_base 23: mod_base = OTHER; note = 2'-O-methyluridine
ttatcatcattaggctttgcagt

SEQ ID NO: 4912 - RNA, 23 nt, synthetic construct
  source 1..23: mol_type = other RNA
  modified_base 1: mod_base = OTHER; note = 2'-O-methyluridine-3'-phosphate 5'-(E)-Vinylphosphonate
  modified_base 2: mod_base = OTHER; note = 2'-deoxy-2'-fluorouridine-3'-phosphate
  modified_base 3: mod_base = OTHER; note = 2'-O-methyluridine-3'-phosphate
  modified_base 4: mod_base = OTHER; note = 2'-O-methyladenosine-3'-phosphate
  modified_base 5: mod_base = OTHER; note = 2'-O-methyluridine-3'-phosphate
  modified_base 6: mod_base = OTHER; note = 2'-deoxy-2'-fluorocytidine-3'-phosphate
  modified_base 7: mod_base = OTHER; note = 2'-O-methyladenosine-3'-phosphate
  modified_base 8: mod_base = OTHER; note = 2'-O-methyluridine-3'-phosphate
  modified_base 9: mod_base = OTHER; note = 2'-O-methylcytidine-3'-phosphate
  modified_base 10: mod_base = OTHER; note = 2'-O-methyladenosine-3'-phosphate
  modified_base 11: mod_base = OTHER; note = 2'-O-methyluridine-3'-phosphate
  modified_base 12: mod_base = OTHER; note = 2'-O-methyluridine-3'-phosphate
  modified_base 13: mod_base = OTHER; note = 2'-O-methyladenosine-3'-phosphate
  modified_base 14: mod_base = OTHER; note = 2'-deoxy-2'-fluoroguanosine-3'-phosphate
  modified_base 15: mod_base = OTHER; note = 2'-O-methylguanosine-3'-phosphate
  modified_base 16: mod_base = OTHER; note = 2'-deoxy-2'-fluorocytidine-3'-phosphate
  modified_base 17: mod_base = OTHER; note = 2'-O-methyluridine-3'-phosphate
  modified_base 18: mod_base = OTHER; note = 2'-O-methyluridine-3'-phosphate
  modified_base 19: mod_base = OTHER; note = 2'-O-methyluridine-3'-phosphate
  modified_base 20: mod_base = OTHER; note = 2'-O-methylguanosine-3'-phosphate
  modified_base 21: mod_base = OTHER; note = 2'-O-methylcytidine-3'-phosphate
  modified_base 22: mod_base = OTHER; note = 2'-O-methyladenosine-3'-phosphate
  modified_base 23: mod_base = OTHER; note = 2'-O-methylguanosine
tttatcatcattaggctttgcag

SEQ ID NO: 4913 - RNA, 23 nt, synthetic construct
  source 1..23: mol_type = other RNA
  modified_base 1: mod_base = OTHER; note = 2'-O-methyluridine-3'-phosphate 5'-(E)-Vinylphosphonate
  modified_base 2: mod_base = OTHER; note = 2'-deoxy-2'-fluoroadenosine-3'-phosphate
  modified_base 3: mod_base = OTHER; note = 2'-O-methyluridine-3'-phosphate
  modified_base 4: mod_base = OTHER; note = 2'-O-methyluridine-3'-phosphate
  modified_base 5: mod_base = OTHER; note = 2'-O-methyladenosine-3'-phosphate
  modified_base 6: mod_base = OTHER; note = 2'-deoxy-2'-fluorouridine-3'-phosphate
  modified_base 7: mod_base = OTHER; note = 2'-O-methylcytidine-3'-phosphate
  modified_base 8: mod_base = OTHER; note = 2'-O-methyladenosine-3'-phosphate
  modified_base 9: mod_base = OTHER; note = 2'-O-methyluridine-3'-phosphate
  modified_base 10: mod_base = OTHER; note = 2'-O-methylcytidine-3'-phosphate
  modified_base 11: mod_base = OTHER; note = 2'-O-methyladenosine-3'-phosphate
  modified_base 12: mod_base = OTHER; note = 2'-O-methyluridine-3'-phosphate
  modified_base 13: mod_base = OTHER; note = 2'-O-methyluridine-3'-phosphate
  modified_base 14: mod_base = OTHER; note = 2'-deoxy-2'-fluoroadenosine-3'-phosphate
  modified_base 15: mod_base = OTHER; note = 2'-O-methylguanosine-3'-phosphate
  modified_base 16: mod_base = OTHER; note = 2'-deoxy-2'-fluoroguanosine-3'-phosphate
  modified_base 17: mod_base = OTHER; note = 2'-O-methylcytidine-3'-phosphate
  modified_base 18: mod_base = OTHER; note = 2'-O-methyluridine-3'-phosphate
  modified_base 19: mod_base = OTHER; note = 2'-O-methyluridine-3'-phosphate
  modified_base 20: mod_base = OTHER; note = 2'-O-methyluridine-3'-phosphate
  modified_base 21: mod_base = OTHER; note = 2'-O-methylguanosine-3'-phosphate
  modified_base 22: mod_base = OTHER; note = 2'-O-methylcytidine-3'-phosphate
  modified_base 23: mod_base = OTHER; note = 2'-O-methyladenosine
tattatcatcattaggctttgca

SEQ ID NO: 4914 - RNA, 23 nt, synthetic construct
  source 1..23: mol_type = other RNA
  modified_base 1: mod_base = OTHER; note = 2'-O-methyluridine-3'-phosphate 5'-(E)-Vinylphosphonate
  modified_base 2: mod_base = OTHER; note = 2'-deoxy-2'-fluoroadenosine-3'-phosphate
  modified_base 3: mod_base = OTHER; note = 2'-O-methyladenosine-3'-phosphate
  modified_base 4: mod_base = OTHER; note = 2'-O-methyluridine-3'-phosphate
  modified_base 5: mod_base = OTHER; note = 2'-O-methyluridine-3'-phosphate
  modified_base 6: mod_base = OTHER; note = 2'-deoxy-2'-fluoroadenosine-3'-phosphate
  modified_base 7: mod_base = OTHER; note = 2'-O-methyluridine-3'-phosphate
  modified_base 8: mod_base = OTHER; note = 2'-O-methylcytidine-3'-phosphate
  modified_base 9: mod_base = OTHER; note = 2'-O-methyladenosine-3'-phosphate
  modified_base 10: mod_base = OTHER; note = 2'-O-methyluridine-3'-phosphate
  modified_base 11: mod_base = OTHER; note = 2'-O-methylcytidine-3'-phosphate
  modified_base 12: mod_base = OTHER; note = 2'-O-methyladenosine-3'-phosphate
  modified_base 13: mod_base = OTHER; note = 2'-O-methyluridine-3'-phosphate
  modified_base 14: mod_base = OTHER; note = 2'-deoxy-2'-fluorouridine-3'-phosphate
  modified_base 15: mod_base = OTHER; note = 2'-O-methyladenosine-3'-phosphate
  modified_base 16: mod_base = OTHER; note = 2'-deoxy-2'-fluoroguanosine-3'-phosphate
  modified_base 17: mod_base = OTHER; note = 2'-O-methylguanosine-3'-phosphate
  modified_base 18: mod_base = OTHER; note = 2'-O-methylcytidine-3'-phosphate
  modified_base 19: mod_base = OTHER; note = 2'-O-methyluridine-3'-phosphate
  modified_base 20: mod_base = OTHER; note = 2'-O-methyluridine-3'-phosphate
  modified_base 21: mod_base = OTHER; note = 2'-O-methyluridine-3'-phosphate
  modified_base 22: mod_base = OTHER; note = 2'-O-methylguanosine-3'-phosphate
  modified_base 23: mod_base = OTHER; note = 2'-O-methylcytidine
taattatcatcattaggctttgc

SEQ ID NO: 4915 - RNA, 23 nt, synthetic construct
  source 1..23: mol_type = other RNA
  modified_base 1: mod_base = OTHER; note = 2'-O-methyluridine-3'-phosphate 5'-(E)-Vinylphosphonate
  modified_base 2: mod_base = OTHER; note = 2'-deoxy-2'-fluorouridine-3'-phosphate
  modified_base 3: mod_base = OTHER; note = 2'-O-methyladenosine-3'-phosphate
  modified_base 4: mod_base = OTHER; note = 2'-O-methyladenosine-3'-phosphate
  modified_base 5: mod_base = OTHER; note = 2'-O-methyluridine-3'-phosphate
  modified_base 6: mod_base = OTHER; note = 2'-deoxy-2'-fluorouridine-3'-phosphate
  modified_base 7: mod_base = OTHER; note = 2'-O-methyladenosine-3'-phosphate
  modified_base 8: mod_base = OTHER; note = 2'-O-methyluridine-3'-phosphate
  modified_base 9: mod_base = OTHER; note = 2'-O-methylcytidine-3'-phosphate
  modified_base 10: mod_base = OTHER; note = 2'-O-methyladenosine-3'-phosphate
  modified_base 11: mod_base = OTHER; note = 2'-O-methyluridine-3'-phosphate
  modified_base 12: mod_base = OTHER; note = 2'-O-methylcytidine-3'-phosphate
  modified_base 13: mod_base = OTHER; note = 2'-O-methyladenosine-3'-phosphate
  modified_base 14: mod_base = OTHER; note = 2'-deoxy-2'-fluorouridine-3'-phosphate
  modified_base 15: mod_base = OTHER; note = 2'-O-methyluridine-3'-phosphate
  modified_base 16: mod_base = OTHER; note = 2'-deoxy-2'-fluoroadenosine-3'-phosphate
  modified_base 17: mod_base = OTHER; note = 2'-O-methylguanosine-3'-phosphate
  modified_base 18: mod_base = OTHER; note = 2'-O-methylguanosine-3'-phosphate
  modified_base 19: mod_base = OTHER; note = 2'-O-methylcytidine-3'-phosphate
  modified_base 20: mod_base = OTHER; note = 2'-O-methyluridine-3'-phosphate
  modified_base 21: mod_base = OTHER; note = 2'-O-methyluridine-3'-phosphate
  modified_base 22: mod_base = OTHER; note = 2'-O-methyluridine-3'-phosphate
  modified_base 23: mod_base = OTHER; note = 2'-O-methylguanosine
ttaattatcatcattaggctttg

SEQ ID NO: 4916 - RNA, 23 nt, synthetic construct
  source 1..23: mol_type = other RNA
  modified_base 1: mod_base = OTHER; note = 2'-O-methyluridine-3'-phosphate 5'-(E)-Vinylphosphonate
  modified_base 2: mod_base = OTHER; note = 2'-deoxy-2'-fluorocytidine-3'-phosphate
  modified_base 3: mod_base = OTHER; note = 2'-O-methyladenosine-3'-phosphate
  modified_base 4: mod_base = OTHER; note = 2'-O-methyluridine-3'-phosphate
  modified_base 5: mod_base = OTHER; note = 2'-O-methyladenosine-3'-phosphate
  modified_base 6: mod_base = OTHER; note = 2'-deoxy-2'-fluoroadenosine-3'-phosphate
  modified_base 7: mod_base = OTHER; note = 2'-O-methyluridine-3'-phosphate
  modified_base 8: mod_base = OTHER; note = 2'-O-methyluridine-3'-phosphate
  modified_base 9: mod_base = OTHER; note = 2'-O-methyladenosine-3'-phosphate
  modified_base 10: mod_base = OTHER; note = 2'-O-methyluridine-3'-phosphate
  modified_base 11: mod_base = OTHER; note = 2'-O-methylcytidine-3'-phosphate
  modified_base 12: mod_base = OTHER; note = 2'-O-methyladenosine-3'-phosphate
  modified_base 13: mod_base = OTHER; note = 2'-O-methyluridine-3'-phosphate
  modified_base 14: mod_base = OTHER; note = 2'-deoxy-2'-fluorocytidine-3'-phosphate
  modified_base 15: mod_base = OTHER; note = 2'-O-methyladenosine-3'-phosphate
  modified_base 16: mod_base = OTHER; note = 2'-deoxy-2'-fluorouridine-3'-phosphate
  modified_base 17: mod_base = OTHER; note = 2'-O-methyluridine-3'-phosphate
  modified_base 18: mod_base = OTHER; note = 2'-O-methyladenosine-3'-phosphate
  modified_base 19: mod_base = OTHER; note = 2'-O-methylguanosine-3'-phosphate
  modified_base 20: mod_base = OTHER; note = 2'-O-methylguanosine-3'-phosphate
  modified_base 21: mod_base = OTHER; note = 2'-O-methylcytidine-3'-phosphate
  modified_base 22: mod_base = OTHER; note = 2'-O-methyluridine-3'-phosphate
  modified_base 23: mod_base = OTHER; note = 2'-O-methyluridine
tcataattatcatcattaggctt

SEQ ID NO: 4917 - RNA, 23 nt, synthetic construct
  source 1..23: mol_type = other RNA
  modified_base 1: mod_base = OTHER; note = 2'-O-methyluridine-3'-phosphate 5'-(E)-Vinylphosphonate
  modified_base 2: mod_base = OTHER; note = 2'-deoxy-2'-fluoroadenosine-3'-phosphate
  modified_base 3: mod_base = OTHER; note = 2'-O-methylcytidine-3'-phosphate
  modified_base 4: mod_base = OTHER; note = 2'-O-methyladenosine-3'-phosphate
  modified_base 5: mod_base = OTHER; note = 2'-O-methyluridine-3'-phosphate
  modified_base 6: mod_base = OTHER; note = 2'-deoxy-2'-fluoroadenosine-3'-phosphate
  modified_base 7: mod_base = OTHER; note = 2'-O-methyladenosine-3'-phosphate
  modified_base 8: mod_base = OTHER; note = 2'-O-methyluridine-3'-phosphate
  modified_base 9: mod_base = OTHER; note = 2'-O-methyluridine-3'-phosphate
  modified_base 10: mod_base = OTHER; note = 2'-O-methyladenosine-3'-phosphate
  modified_base 11: mod_base = OTHER; note = 2'-O-methyluridine-3'-phosphate
  modified_base 12: mod_base = OTHER; note = 2'-O-methylcytidine-3'-phosphate
  modified_base 13: mod_base = OTHER; note = 2'-O-methyladenosine-3'-phosphate
  modified_base 14: mod_base = OTHER; note = 2'-deoxy-2'-fluorouridine-3'-phosphate
  modified_base 15: mod_base = OTHER; note = 2'-O-methylcytidine-3'-phosphate
  modified_base 16: mod_base = OTHER; note = 2'-deoxy-2'-fluoroadenosine-3'-phosphate
  modified_base 17: mod_base = OTHER; note = 2'-O-methyluridine-3'-phosphate
  modified_base 18: mod_base = OTHER; note = 2'-O-methyluridine-3'-phosphate
  modified_base 19: mod_base = OTHER; note = 2'-O-methyladenosine-3'-phosphate
  modified_base 20: mod_base = OTHER; note = 2'-O-methylguanosine-3'-phosphate
  modified_base 21: mod_base = OTHER; note = 2'-O-methylguanosine-3'-phosphate
  modified_base 22: mod_base = OTHER; note = 2'-O-methylcytidine-3'-phosphate
  modified_base 23: mod_base = OTHER; note = 2'-O-methyluridine
tacataattatcatcattaggct

SEQ ID NO: 4918 - RNA, 23 nt, synthetic construct
  source 1..23: mol_type = other RNA
  modified_base 1: mod_base = OTHER; note = 2'-O-methyluridine-3'-phosphate 5'-(E)-Vinylphosphonate
  modified_base 2: mod_base = OTHER; note = 2'-deoxy-2'-fluoroadenosine-3'-phosphate
  modified_base 3: mod_base = OTHER; note = 2'-O-methyladenosine-3'-phosphate
  modified_base 4: mod_base = OTHER; note = 2'-O-methylcytidine-3'-phosphate
  modified_base 5: mod_base = OTHER; note = 2'-O-methyladenosine-3'-phosphate
  modified_base 6: mod_base = OTHER; note = 2'-deoxy-2'-fluorouridine-3'-phosphate
  modified_base 7: mod_base = OTHER; note = 2'-O-methyladenosine-3'-phosphate
  modified_base 8: mod_base = OTHER; note = 2'-O-methyladenosine-3'-phosphate
  modified_base 9: mod_base = OTHER; note = 2'-O-methyluridine-3'-phosphate
  modified_base 10: mod_base = OTHER; note = 2'-O-methyluridine-3'-phosphate
  modified_base 11: mod_base = OTHER; note = 2'-O-methyladenosine-3'-phosphate
  modified_base 12: mod_base = OTHER; note = 2'-O-methyluridine-3'-phosphate
  modified_base 13: mod_base = OTHER; note = 2'-O-methylcytidine-3'-phosphate
  modified_base 14: mod_base = OTHER; note = 2'-deoxy-2'-fluoroadenosine-3'-phosphate
  modified_base 15: mod_base = OTHER; note = 2'-O-methyluridine-3'-phosphate
  modified_base 16: mod_base = OTHER; note = 2'-deoxy-2'-fluorocytidine-3'-phosphate
  modified_base 17: mod_base = OTHER; note = 2'-O-methyladenosine-3'-phosphate
  modified_base 18: mod_base = OTHER; note = 2'-O-methyluridine-3'-phosphate
  modified_base 19: mod_base = OTHER; note = 2'-O-methyluridine-3'-phosphate
  modified_base 20: mod_base = OTHER; note = 2'-O-methyladenosine-3'-phosphate
  modified_base 21: mod_base = OTHER; note = 2'-O-methylguanosine-3'-phosphate
  modified_base 22: mod_base = OTHER; note = 2'-O-methylguanosine-3'-phosphate
  modified_base 23: mod_base = OTHER; note = 2'-O-methylcytidine
taacataattatcatcattaggc

SEQ ID NO: 4919 - RNA, 23 nt, synthetic construct
  source 1..23: mol_type = other RNA
  modified_base 1: mod_base = OTHER; note = 2'-O-methyluridine-3'-phosphate 5'-(E)-Vinylphosphonate
  modified_base 2: mod_base = OTHER; note = 2'-deoxy-2'-fluorocytidine-3'-phosphate
  modified_base 3: mod_base = OTHER; note = 2'-O-methyluridine-3'-phosphate
  modified_base 4: mod_base = OTHER; note = 2'-O-methyladenosine-3'-phosphate
  modified_base 5: mod_base = OTHER; note = 2'-O-methyluridine-3'-phosphate
  modified_base 6: mod_base = OTHER; note = 2'-deoxy-2'-fluoroguanosine-3'-phosphate
  modified_base 7: mod_base = OTHER; note = 2'-O-methyladenosine-3'-phosphate
  modified_base 8: mod_base = OTHER; note = 2'-O-methylguanosine-3'-phosphate
  modified_base 9: mod_base = OTHER; note = 2'-O-methyladenosine-3'-phosphate
  modified_base 10: mod_base = OTHER; note = 2'-O-methylguanosine-3'-phosphate
  modified_base 11: mod_base = OTHER; note = 2'-O-methyladenosine-3'-phosphate
  modified_base 12: mod_base = OTHER; note = 2'-O-methyluridine-3'-phosphate
  modified_base 13: mod_base = OTHER; note = 2'-O-methyluridine-3'-phosphate
  modified_base 14: mod_base = OTHER; note = 2'-deoxy-2'-fluorouridine-3'-phosphate
  modified_base 15: mod_base = OTHER; note = 2'-O-methylcytidine-3'-phosphate
  modified_base 16: mod_base = OTHER; note = 2'-deoxy-2'-fluorouridine-3'-phosphate
  modified_base 17: mod_base = OTHER; note = 2'-O-methyluridine-3'-phosphate
  modified_base 18: mod_base = OTHER; note = 2'-O-methyluridine-3'-phosphate
  modified_base 19: mod_base = OTHER; note = 2'-O-methyluridine-3'-phosphate
  modified_base 20: mod_base = OTHER; note = 2'-O-methyluridine-3'-phosphate
  modified_base 21: mod_base = OTHER; note = 2'-O-methyladenosine-3'-phosphate
  modified_base 22: mod_base = OTHER; note = 2'-O-methyladenosine-3'-phosphate
  modified_base 23: mod_base = OTHER; note = 2'-O-methylcytidine
tctatgagagatttctttttaac

SEQ ID NO: 4920 - RNA, 23 nt, synthetic construct
  source 1..23: mol_type = other RNA
  modified_base 1: mod_base = OTHER; note = 2'-O-methyluridine-3'-phosphate 5'-(E)-Vinylphosphonate
  modified_base 2: mod_base = OTHER; note = 2'-deoxy-2'-fluoroguanosine-3'-phosphate
  modified_base 3: mod_base = OTHER; note = 2'-O-methylcytidine-3'-phosphate
  modified_base 4: mod_base = OTHER; note = 2'-O-methyluridine-3'-phosphate
  modified_base 5: mod_base = OTHER; note = 2'-O-methyladenosine-3'-phosphate
  modified_base 6: mod_base = OTHER; note = 2'-deoxy-2'-fluorouridine-3'-phosphate
  modified_base 7: mod_base = OTHER; note = 2'-O-methylguanosine-3'-phosphate
  modified_base 8: mod_base = OTHER; note = 2'-O-methyladenosine-3'-phosphate
  modified_base 9: mod_base = OTHER; note = 2'-O-methylguanosine-3'-phosphate
  modified_base 10: mod_base = OTHER; note = 2'-O-methyladenosine-3'-phosphate
  modified_base 11: mod_base = OTHER; note = 2'-O-methylguanosine-3'-phosphate
  modified_base 12: mod_base = OTHER; note = 2'-O-methyladenosine-3'-phosphate
  modified_base 13: mod_base = OTHER; note = 2'-O-methyluridine-3'-phosphate
  modified_base 14: mod_base = OTHER; note = 2'-deoxy-2'-fluorouridine-3'-phosphate
  modified_base 15: mod_base = OTHER; note = 2'-O-methyluridine-3'-phosphate
  modified_base 16: mod_base = OTHER; note = 2'-deoxy-2'-fluorocytidine-3'-phosphate
  modified_base 17: mod_base = OTHER; note = 2'-O-methyluridine-3'-phosphate
  modified_base 18: mod_base = OTHER; note = 2'-O-methyluridine-3'-phosphate
  modified_base 19: mod_base = OTHER; note = 2'-O-methyluridine-3'-phosphate
  modified_base 20: mod_base = OTHER; note = 2'-O-methyluridine-3'-phosphate
  modified_base 21: mod_base = OTHER; note = 2'-O-methyluridine-3'-phosphate
  modified_base 22: mod_base = OTHER; note = 2'-O-methyladenosine-3'-phosphate
  modified_base 23: mod_base = OTHER; note = 2'-O-methyladenosine
tgctatgagagatttctttttaa

SEQ ID NO: 4921 - RNA, 23 nt, synthetic construct
  source 1..23: mol_type = other RNA
  modified_base 1: mod_base = OTHER; note = 2'-O-methyluridine-3'-phosphate 5'-(E)-Vinylphosphonate
  modified_base 2: mod_base = OTHER; note = 2'-deoxy-2'-fluoroadenosine-3'-phosphate
  modified_base 3: mod_base = OTHER; note = 2'-O-methyladenosine-3'-phosphate
  modified_base 4: mod_base = OTHER; note = 2'-O-methylguanosine-3'-phosphate
  modified_base 5: mod_base = OTHER; note = 2'-O-methyladenosine-3'-phosphate
  modified_base 6: mod_base = OTHER; note = 2'-deoxy-2'-fluoroadenosine-3'-phosphate
  modified_base 7: mod_base = OTHER; note = 2'-O-methyladenosine-3'-phosphate
  modified_base 8: mod_base = OTHER; note = 2'-O-methylguanosine-3'-phosphate
  modified_base 9: mod_base = OTHER; note = 2'-O-methylcytidine-3'-phosphate
  modified_base 10: mod_base = OTHER; note = 2'-O-methyluridine-3'-phosphate
  modified_base 11: mod_base = OTHER; note = 2'-O-methyladenosine-3'-phosphate
  modified_base 12: mod_base = OTHER; note = 2'-O-methyluridine-3'-phosphate
  modified_base 13: mod_base = OTHER; note = 2'-O-methylguanosine-3'-phosphate
  modified_base 14: mod_base = OTHER; note = 2'-deoxy-2'-fluoroadenosine-3'-phosphate
  modified_base 15: mod_base = OTHER; note = 2'-O-methylguanosine-3'-phosphate
  modified_base 16: mod_base = OTHER; note = 2'-deoxy-2'-fluoroadenosine-3'-phosphate
  modified_base 17: mod_base = OTHER; note = 2'-O-methylguanosine-3'-phosphate
  modified_base 18: mod_base = OTHER; note = 2'-O-methyladenosine-3'-phosphate
  modified_base 19: mod_base = OTHER; note = 2'-O-methyluridine-3'-phosphate
  modified_base 20: mod_base = OTHER; note = 2'-O-methyluridine-3'-phosphate
  modified_base 21: mod_base = OTHER; note = 2'-O-methyluridine-3'-phosphate
  modified_base 22: mod_base = OTHER; note = 2'-O-methylcytidine-3'-phosphate
  modified_base 23: mod_base = OTHER; note = 2'-O-methyluridine
taagaaagctatgagagatttct

SEQ ID NO: 4922 - RNA, 23 nt, synthetic construct
  source 1..23: mol_type = other RNA
  modified_base 1: mod_base = OTHER; note = 2'-O-methyluridine-3'-phosphate 5'-(E)-Vinylphosphonate
  modified_base 2: mod_base = OTHER; note = 2'-deoxy-2'-fluoroadenosine-3'-phosphate
  modified_base 3: mod_base = OTHER; note = 2'-O-methyladenosine-3'-phosphate
  modified_base 4: mod_base = OTHER; note = 2'-O-methyladenosine-3'-phosphate
  modified_base 5: mod_base = OTHER; note = 2'-O-methyladenosine-3'-phosphate
  modified_base 6: mod_base = OTHER; note = 2'-deoxy-2'-fluoroguanosine-3'-phosphate
  modified_base 7: mod_base = OTHER; note = 2'-O-methyladenosine-3'-phosphate
  modified_base 8: mod_base = OTHER; note = 2'-O-methyladenosine-3'-phosphate
  modified_base 9: mod_base = OTHER; note = 2'-O-methyladenosine-3'-phosphate
  modified_base 10: mod_base = OTHER; note = 2'-O-methylguanosine-3'-phosphate
  modified_base 11: mod_base = OTHER; note = 2'-O-methylcytidine-3'-phosphate
  modified_base 12: mod_base = OTHER; note = 2'-O-methyluridine-3'-phosphate
  modified_base 13: mod_base = OTHER; note = 2'-O-methyladenosine-3'-phosphate
  modified_base 14: mod_base = OTHER; note = 2'-deoxy-2'-fluorouridine-3'-phosphate
  modified_base 15: mod_base = OTHER; note = 2'-O-methylguanosine-3'-phosphate
  modified_base 16: mod_base = OTHER; note = 2'-deoxy-2'-fluoroadenosine-3'-phosphate
  modified_base 17: mod_base = OTHER; note = 2'-O-methylguanosine-3'-phosphate
  modified_base 18: mod_base = OTHER; note = 2'-O-methyladenosine-3'-phosphate
  modified_base 19: mod_base = OTHER; note = 2'-O-methylguanosine-3'-phosphate
  modified_base 20: mod_base = OTHER; note = 2'-O-methyladenosine-3'-phosphate
  modified_base 21: mod_base = OTHER; note = 2'-O-methyluridine-3'-phosphate
  modified_base 22: mod_base = OTHER; note = 2'-O-methyluridine-3'-phosphate
  modified_base 23: mod_base = OTHER; note = 2'-O-methyluridine
taaaagaaagctatgagagattt

SEQ ID NO: 4923 - RNA, 23 nt, synthetic construct
  source 1..23: mol_type = other RNA
  modified_base 1: mod_base = OTHER; note = 2'-O-methyluridine-3'-phosphate 5'-(E)-Vinylphosphonate
  modified_base 2: mod_base = OTHER; note = 2'-deoxy-2'-fluoroadenosine-3'-phosphate
  modified_base 3: mod_base = OTHER; note = 2'-O-methyladenosine-3'-phosphate
  modified_base 4: mod_base = OTHER; note = 2'-O-methyluridine-3'-phosphate
  modified_base 5: mod_base = OTHER; note = 2'-O-methylguanosine-3'-phosphate
  modified_base 6: mod_base = OTHER; note = 2'-deoxy-2'-fluoroguanosine-3'-phosphate
  modified_base 7: mod_base = OTHER; note = 2'-O-methyladenosine-3'-phosphate
  modified_base 8: mod_base = OTHER; note = 2'-O-methyladenosine-3'-phosphate
  modified_base 9: mod_base = OTHER; note = 2'-O-methyladenosine-3'-phosphate
  modified_base 10: mod_base = OTHER; note = 2'-O-methyladenosine-3'-phosphate
  modified_base 11: mod_base = OTHER; note = 2'-O-methylguanosine-3'-phosphate
  modified_base 12: mod_base = OTHER; note = 2'-O-methyladenosine-3'-phosphate
  modified_base 13: mod_base = OTHER; note = 2'-O-methyladenosine-3'-phosphate
  modified_base 14: mod_base = OTHER; note = 2'-deoxy-2'-fluoroadenosine-3'-phosphate
  modified_base 15: mod_base = OTHER; note = 2'-O-methylguanosine-3'-phosphate
  modified_base 16: mod_base = OTHER; note = 2'-deoxy-2'-fluorocytidine-3'-phosphate
  modified_base 17: mod_base = OTHER; note = 2'-O-methyluridine-3'-phosphate
  modified_base 18: mod_base = OTHER; note = 2'-O-methyladenosine-3'-phosphate
  modified_base 19: mod_base = OTHER; note = 2'-O-methyluridine-3'-phosphate
  modified_base 20: mod_base = OTHER; note = 2'-O-methylguanosine-3'-phosphate
  modified_base 21: mod_base = OTHER; note = 2'-O-methyladenosine-3'-phosphate
  modified_base 22: mod_base = OTHER; note = 2'-O-methylguanosine-3'-phosphate
  modified_base 23: mod_base = OTHER; note = 2'-O-methyladenosine
taatggaaaagaaagctatgaga

SEQ ID NO: 4924 - RNA, 23 nt, synthetic construct
  source 1..23: mol_type = other RNA
  modified_base 1: mod_base = OTHER; note = 2'-O-methyluridine-3'-phosphate 5'-(E)-Vinylphosphonate
  modified_base 2: mod_base = OTHER; note = 2'-deoxy-2'-fluoroadenosine-3'-phosphate
  modified_base 3: mod_base = OTHER; note = 2'-O-methyladenosine-3'-phosphate
  modified_base 4: mod_base = OTHER; note = 2'-O-methyladenosine-3'-phosphate
  modified_base 5: mod_base = OTHER; note = 2'-O-methyluridine-3'-phosphate
  modified_base 6: mod_base = OTHER; note = 2'-deoxy-2'-fluoroguanosine-3'-phosphate
  modified_base 7: mod_base = OTHER; note = 2'-O-methylguanosine-3'-phosphate
  modified_base 8: mod_base = OTHER; note = 2'-O-methyladenosine-3'-phosphate
  modified_base 9: mod_base = OTHER; note = 2'-O-methyladenosine-3'-phosphate
  modified_base 10: mod_base = OTHER; note = 2'-O-methyladenosine-3'-phosphate
  modified_base 11: mod_base = OTHER; note = 2'-O-methyladenosine-3'-phosphate
  modified_base 12: mod_base = OTHER; note = 2'-O-methylguanosine-3'-phosphate
  modified_base 13: mod_base = OTHER; note = 2'-O-methyladenosine-3'-phosphate
  modified_base 14: mod_base = OTHER; note = 2'-deoxy-2'-fluoroadenosine-3'-phosphate
  modified_base 15: mod_base = OTHER; note = 2'-O-methyladenosine-3'-phosphate
  modified_base 16: mod_base = OTHER; note = 2'-deoxy-2'-fluoroguanosine-3'-phosphate
  modified_base 17: mod_base = OTHER; note = 2'-O-methylcytidine-3'-phosphate
  modified_base 18: mod_base = OTHER; note = 2'-O-methyluridine-3'-phosphate
  modified_base 19: mod_base = OTHER; note = 2'-O-methyladenosine-3'-phosphate
  modified_base 20: mod_base = OTHER; note = 2'-O-methyluridine-3'-phosphate
  modified_base 21: mod_base = OTHER; note = 2'-O-methylguanosine-3'-phosphate
  modified_base 22: mod_base = OTHER; note = 2'-O-methyladenosine-3'-phosphate
  modified_base 23: mod_base = OTHER; note = 2'-O-methylguanosine
taaatggaaaagaaagctatgag

SEQ ID NO: 4925 - RNA, 23 nt, synthetic construct
  source 1..23: mol_type = other RNA
  modified_base 1: mod_base = OTHER; note = 2'-O-methyluridine-3'-phosphate 5'-(E)-Vinylphosphonate
  modified_base 2: mod_base = OTHER; note = 2'-deoxy-2'-fluoroguanosine-3'-phosphate
  modified_base 3: mod_base = OTHER; note = 2'-O-methylcytidine-3'-phosphate
  modified_base 4: mod_base = OTHER; note = 2'-O-methyladenosine-3'-phosphate
  modified_base 5: mod_base = OTHER; note = 2'-O-methyladenosine-3'-phosphate
  modified_base 6: mod_base = OTHER; note = 2'-deoxy-2'-fluoroadenosine-3'-phosphate
  modified_base 7: mod_base = OTHER; note = 2'-O-methyladenosine-3'-phosphate
  modified_base 8: mod_base = OTHER; note = 2'-O-methyladenosine-3'-phosphate
  modified_base 9: mod_base = OTHER; note = 2'-O-methylcytidine-3'-phosphate
  modified_base 10: mod_base = OTHER; note = 2'-O-methyladenosine-3'-phosphate
  modified_base 11: mod_base = OTHER; note = 2'-O-methyluridine-3'-phosphate
  modified_base 12: mod_base = OTHER; note = 2'-O-methyluridine-3'-phosphate
  modified_base 13: mod_base = OTHER; note = 2'-O-methylcytidine-3'-phosphate
  modified_base 14: mod_base = OTHER; note = 2'-deoxy-2'-fluoroadenosine-3'-phosphate
  modified_base 15: mod_base = OTHER; note = 2'-O-methylcytidine-3'-phosphate
  modified_base 16: mod_base = OTHER; note = 2'-deoxy-2'-fluoroadenosine-3'-phosphate
  modified_base 17: mod_base = OTHER; note = 2'-O-methyluridine-3'-phosphate
  modified_base 18: mod_base = OTHER; note = 2'-O-methyladenosine-3'-phosphate
  modified_base 19: mod_base = OTHER; note = 2'-O-methyladenosine-3'-phosphate
  modified_base 20: mod_base = OTHER; note = 2'-O-methyladenosine-3'-phosphate
  modified_base 21: mod_base = OTHER; note = 2'-O-methylguanosine-3'-phosphate
  modified_base 22: mod_base = OTHER; note = 2'-O-methylguanosine-3'-phosphate
  modified_base 23: mod_base = OTHER; note = 2'-O-methylguanosine
tgcaaaaacattcacataaaggg

SEQ ID NO: 4926 - RNA, 23 nt, synthetic construct
  source 1..23: mol_type = other RNA
  modified_base 1: mod_base = OTHER; note = 2'-O-methyluridine-3'-phosphate 5'-(E)-Vinylphosphonate
  modified_base 2: mod_base = OTHER; note = 2'-deoxy-2'-fluoroadenosine-3'-phosphate
  modified_base 3: mod_base = OTHER; note = 2'-O-methyladenosine-3'-phosphate
  modified_base 4: mod_base = OTHER; note = 2'-O-methyluridine-3'-phosphate
  modified_base 5: mod_base = OTHER; note = 2'-O-methylguanosine-3'-phosphate
  modified_base 6: mod_base = OTHER; note = 2'-deoxy-2'-fluoroguanosine-3'-phosphate
  modified_base 7: mod_base = OTHER; note = 2'-O-methylcytidine-3'-phosphate
  modified_base 8: mod_base = OTHER; note = 2'-O-methyladenosine-3'-phosphate
  modified_base 9: mod_base = OTHER; note = 2'-O-methyladenosine-3'-phosphate
  modified_base 10: mod_base = OTHER; note = 2'-O-methyladenosine-3'-phosphate
  modified_base 11: mod_base = OTHER; note = 2'-O-methyladenosine-3'-phosphate
  modified_base 12: mod_base = OTHER; note = 2'-O-methyladenosine-3'-phosphate
  modified_base 13: mod_base = OTHER; note = 2'-O-methylcytidine-3'-phosphate
  modified_base 14: mod_base = OTHER; note = 2'-deoxy-2'-fluoroadenosine-3'-phosphate
  modified_base 15: mod_base = OTHER; note = 2'-O-methyluridine-3'-phosphate
  modified_base 16: mod_base = OTHER; note = 2'-deoxy-2'-fluorouridine-3'-phosphate
  modified_base 17: mod_base = OTHER; note = 2'-O-methylcytidine-3'-phosphate
  modified_base 18: mod_base = OTHER; note = 2'-O-methyladenosine-3'-phosphate
  modified_base 19: mod_base = OTHER; note = 2'-O-methylcytidine-3'-phosphate
  modified_base 20: mod_base = OTHER; note = 2'-O-methyladenosine-3'-phosphate
  modified_base 21: mod_base = OTHER; note = 2'-O-methyluridine-3'-phosphate
  modified_base 22: mod_base = OTHER; note = 2'-O-methyladenosine-3'-phosphate
  modified_base 23: mod_base = OTHER; note = 2'-O-methyladenosine
taatggcaaaaacattcacataa

SEQ ID NO: 4927 - RNA, 23 nt, synthetic construct
  source 1..23: mol_type = other RNA
  modified_base 1: mod_base = OTHER; note = 2'-O-methyluridine-3'-phosphate 5'-(E)-Vinylphosphonate
  modified_base 2: mod_base = OTHER; note = 2'-deoxy-2'-fluoroadenosine-3'-phosphate
  modified_base 3: mod_base = OTHER; note = 2'-O-methyladenosine-3'-phosphate
  modified_base 4: mod_base = OTHER; note = 2'-O-methyladenosine-3'-phosphate
  modified_base 5: mod_base = OTHER; note = 2'-O-methyladenosine-3'-phosphate
  modified_base 6: mod_base = OTHER; note = 2'-deoxy-2'-fluorouridine-3'-phosphate
  modified_base 7: mod_base = OTHER; note = 2'-O-methylguanosine-3'-phosphate
  modified_base 8: mod_base = OTHER; note = 2'-O-methylguanosine-3'-phosphate
  modified_base 9: mod_base = OTHER; note = 2'-O-methylcytidine-3'-phosphate
  modified_base 10: mod_base = OTHER; note = 2'-O-methyladenosine-3'-phosphate
  modified_base 11: mod_base = OTHER; note = 2'-O-methyladenosine-3'-phosphate
  modified_base 12: mod_base = OTHER; note = 2'-O-methyladenosine-3'-phosphate
  modified_base 13: mod_base = OTHER; note = 2'-O-methyladenosine-3'-phosphate
  modified_base 14: mod_base = OTHER; note = 2'-deoxy-2'-fluoroadenosine-3'-phosphate
  modified_base 15: mod_base = OTHER; note = 2'-O-methylcytidine-3'-phosphate
  modified_base 16: mod_base = OTHER; note = 2'-deoxy-2'-fluoroadenosine-3'-phosphate
  modified_base 17: mod_base = OTHER; note = 2'-O-methyluridine-3'-phosphate
  modified_base 18: mod_base = OTHER; note = 2'-O-methyluridine-3'-phosphate
  modified_base 19: mod_base = OTHER; note = 2'-O-methylcytidine-3'-phosphate
  modified_base 20: mod_base = OTHER; note = 2'-O-methyladenosine-3'-phosphate
  modified_base 21: mod_base = OTHER; note = 2'-O-methylcytidine-3'-phosphate
  modified_base 22: mod_base = OTHER; note = 2'-O-methyladenosine-3'-phosphate
  modified_base 23: mod_base = OTHER; note = 2'-O-methyluridine
taaaatggcaaaaacattcacat

SEQ ID NO: 4928 - RNA, 23 nt, synthetic construct
  source 1..23: mol_type = other RNA
  modified_base 1: mod_base = OTHER; note = 2'-O-methyluridine-3'-phosphate 5'-(E)-Vinylphosphonate
  modified_base 2: mod_base = OTHER; note = 2'-deoxy-2'-fluoroadenosine-3'-phosphate
  modified_base 3: mod_base = OTHER; note = 2'-O-methyladenosine-3'-phosphate
  modified_base 4: mod_base = OTHER; note = 2'-O-methyladenosine-3'-phosphate
  modified_base 5: mod_base = OTHER; note = 2'-O-methyladenosine-3'-phosphate
  modified_base 6: mod_base = OTHER; note = 2'-deoxy-2'-fluoroadenosine-3'-phosphate
  modified_base 7: mod_base = OTHER; note = 2'-O-methyladenosine-3'-phosphate
  modified_base 8: mod_base = OTHER; note = 2'-O-methyluridine-3'-phosphate
  modified_base 9: mod_base = OTHER; note = 2'-O-methylguanosine-3'-phosphate
  modified_base 10: mod_base = OTHER; note = 2'-O-methylguanosine-3'-phosphate
  modified_base 11: mod_base = OTHER; note = 2'-O-methylcytidine-3'-phosphate
  modified_base 12: mod_base = OTHER; note = 2'-O-methyladenosine-3'-phosphate
  modified_base 13: mod_base = OTHER; note = 2'-O-methyladenosine-3'-phosphate
  modified_base 14: mod_base = OTHER; note = 2'-deoxy-2'-fluoroadenosine-3'-phosphate
  modified_base 15: mod_base = OTHER; note = 2'-O-methyladenosine-3'-phosphate
  modified_base 16: mod_base = OTHER; note = 2'-deoxy-2'-fluoroadenosine-3'-phosphate
  modified_base 17: mod_base = OTHER; note = 2'-O-methylcytidine-3'-phosphate
  modified_base 18: mod_base = OTHER; note = 2'-O-methyladenosine-3'-phosphate
  modified_base 19: mod_base = OTHER; note = 2'-O-methyluridine-3'-phosphate
  modified_base 20: mod_base = OTHER; note = 2'-O-methyluridine-3'-phosphate
  modified_base 21: mod_base = OTHER; note = 2'-O-methylcytidine-3'-phosphate
  modified_base 22: mod_base = OTHER; note = 2'-O-methyladenosine-3'-phosphate
  modified_base 23: mod_base = OTHER; note = 2'-O-methylcytidine
taaaaaatggcaaaaacattcac

SEQ ID NO: 4929 - RNA, 23 nt, synthetic construct
  source 1..23: mol_type = other RNA
  modified_base 1: mod_base = OTHER; note = 2'-O-methyluridine-3'-phosphate 5'-(E)-Vinylphosphonate
  modified_base 2: mod_base = OTHER; note = 2'-deoxy-2'-fluoroadenosine-3'-phosphate
  modified_base 3: mod_base = OTHER; note = 2'-O-methyladenosine-3'-phosphate
  modified_base 4: mod_base = OTHER; note = 2'-O-methyluridine-3'-phosphate
  modified_base 5: mod_base = OTHER; note = 2'-O-methyladenosine-3'-phosphate
  modified_base 6: mod_base = OTHER; note = 2'-deoxy-2'-fluorocytidine-3'-phosphate
  modified_base 7: mod_base = OTHER; note = 2'-O-methyluridine-3'-phosphate
  modified_base 8: mod_base = OTHER; note = 2'-O-methylguanosine-3'-phosphate
  modified_base 9: mod_base = OTHER; note = 2'-O-methyluridine-3'-phosphate
  modified_base 10: mod_base = OTHER; note = 2'-O-methyladenosine-3'-phosphate
  modified_base 11: mod_base = OTHER; note = 2'-O-methylcytidine-3'-phosphate
  modified_base 12: mod_base = OTHER; note = 2'-O-methyluridine-3'-phosphate
  modified_base 13: mod_base = OTHER; note = 2'-O-methylguanosine-3'-phosphate
  modified_base 14: mod_base = OTHER; note = 2'-deoxy-2'-fluorouridine-3'-phosphate
  modified_base 15: mod_base = OTHER; note = 2'-O-methylcytidine-3'-phosphate
  modified_base 16: mod_base = OTHER; note = 2'-deoxy-2'-fluorouridine-3'-phosphate
  modified_base 17: mod_base = OTHER; note = 2'-O-methyluridine-3'-phosphate
  modified_base 18: mod_base = OTHER; note = 2'-O-methyladenosine-3'-phosphate
  modified_base 19: mod_base = OTHER; note = 2'-O-methyluridine-3'-phosphate
  modified_base 20: mod_base = OTHER; note = 2'-O-methylcytidine-3'-phosphate
  modified_base 21: mod_base = OTHER; note = 2'-O-methyluridine-3'-phosphate
  modified_base 22: mod_base = OTHER; note = 2'-O-methyluridine-3'-phosphate
  modified_base 23: mod_base = OTHER; note = 2'-O-methyluridine
taatactgtactgtcttatcttt

SEQ ID NO: 4930 - RNA, 23 nt, synthetic construct
  source 1..23: mol_type = other RNA
  modified_base 1: mod_base = OTHER; note = 2'-O-methyluridine-3'-phosphate 5'-(E)-Vinylphosphonate
  modified_base 2: mod_base = OTHER; note = 2'-deoxy-2'-fluorouridine-3'-phosphate
  modified_base 3: mod_base = OTHER; note = 2'-O-methyluridine-3'-phosphate
  modified_base 4: mod_base = OTHER; note = 2'-O-methyladenosine-3'-phosphate
  modified_base 5: mod_base = OTHER; note = 2'-O-methyladenosine-3'-phosphate
  modified_base 6: mod_base = OTHER; note = 2'-deoxy-2'-fluoroadenosine-3'-phosphate
  modified_base 7: mod_base = OTHER; note = 2'-O-methyluridine-3'-phosphate
  modified_base 8: mod_base = OTHER; note = 2'-O-methyladenosine-3'-phosphate
  modified_base 9: mod_base = OTHER; note = 2'-O-methylcytidine-3'-phosphate
  modified_base 10: mod_base = OTHER; note = 2'-O-methyluridine-3'-phosphate
  modified_base 11: mod_base = OTHER; note = 2'-O-methylguanosine-3'-phosphate
  modified_base 12: mod_base = OTHER; note = 2'-O-methyluridine-3'-phosphate
  modified_base 13: mod_base = OTHER; note = 2'-O-methyladenosine-3'-phosphate
  modified_base 14: mod_base = OTHER; note = 2'-deoxy-2'-fluorocytidine-3'-phosphate
  modified_base 15: mod_base = OTHER; note = 2'-O-methyluridine-3'-phosphate
  modified_base 16: mod_base = OTHER; note = 2'-deoxy-2'-fluoroguanosine-3'-phosphate
  modified_base 17: mod_base = OTHER; note = 2'-O-methyluridine-3'-phosphate
  modified_base 18: mod_base = OTHER; note = 2'-O-methylcytidine-3'-phosphate
  modified_base 19: mod_base = OTHER; note = 2'-O-methyluridine-3'-phosphate
  modified_base 20: mod_base = OTHER; note = 2'-O-methyluridine-3'-phosphate
  modified_base 21: mod_base = OTHER; note = 2'-O-methyladenosine-3'-phosphate
  modified_base 22: mod_base = OTHER; note = 2'-O-methyluridine-3'-phosphate
  modified_base 23: mod_base = OTHER; note = 2'-O-methylcytidine
tttaaatactgtactgtcttatc

SEQ ID NO: 4931 - RNA, 23 nt, synthetic construct
  source 1..23: mol_type = other RNA
  modified_base 1: mod_base = OTHER; note = 2'-O-methyluridine-3'-phosphate 5'-(E)-Vinylphosphonate
  modified_base 2: mod_base = OTHER; note = 2'-deoxy-2'-fluoroadenosine-3'-phosphate
  modified_base 3: mod_base = OTHER; note = 2'-O-methylcytidine-3'-phosphate
  modified_base 4: mod_base = OTHER; note = 2'-O-methyluridine-3'-phosphate
  modified_base 5: mod_base = OTHER; note = 2'-O-methyluridine-3'-phosphate
  modified_base 6: mod_base = OTHER; note = 2'-deoxy-2'-fluoroadenosine-3'-phosphate
  modified_base 7: mod_base = OTHER; note = 2'-O-methyladenosine-3'-phosphate
  modified_base 8: mod_base = OTHER; note = 2'-O-methyladenosine-3'-phosphate
  modified_base 9: mod_base = OTHER; note = 2'-O-methyluridine-3'-phosphate
  modified_base 10: mod_base = OTHER; note = 2'-O-methyladenosine-3'-phosphate
  modified_base 11: mod_base = OTHER; note = 2'-O-methylcytidine-3'-phosphate
  modified_base 12: mod_base = OTHER; note = 2'-O-methyluridine-3'-phosphate
  modified_base 13: mod_base = OTHER; note = 2'-O-methylguanosine-3'-phosphate
  modified_base 14: mod_base = OTHER; note = 2'-deoxy-2'-fluorouridine-3'-phosphate
  modified_base 15: mod_base = OTHER; note = 2'-O-methyladenosine-3'-phosphate
  modified_base 16: mod_base = OTHER; note = 2'-deoxy-2'-fluorocytidine-3'-phosphate
  modified_base 17: mod_base = OTHER; note = 2'-O-methyluridine-3'-phosphate
  modified_base 18: mod_base = OTHER; note = 2'-O-methylguanosine-3'-phosphate
  modified_base 19: mod_base = OTHER; note = 2'-O-methyluridine-3'-phosphate
  modified_base 20: mod_base = OTHER; note = 2'-O-methylcytidine-3'-phosphate
  modified_base 21: mod_base = OTHER; note = 2'-O-methyluridine-3'-phosphate
  modified_base 22: mod_base = OTHER; note = 2'-O-methyluridine-3'-phosphate
  modified_base 23: mod_base = OTHER; note = 2'-O-methyladenosine
tacttaaatactgtactgtctta

SEQ ID NO: 4932 - RNA, 23 nt, synthetic construct
  source 1..23: mol_type = other RNA
  modified_base 1: mod_base = OTHER; note = 2'-O-methyluridine-3'-phosphate 5'-(E)-Vinylphosphonate
  modified_base 2: mod_base = OTHER; note = 2'-deoxy-2'-fluoroadenosine-3'-phosphate
  modified_base 3: mod_base = OTHER; note = 2'-O-methylguanosine-3'-phosphate
  modified_base 4: mod_base = OTHER; note = 2'-O-methyladenosine-3'-phosphate
  modified_base 5: mod_base = OTHER; note = 2'-O-methylguanosine-3'-phosphate
  modified_base 6: mod_base = OTHER; note = 2'-deoxy-2'-fluorouridine-3'-phosphate
  modified_base 7: mod_base = OTHER; note = 2'-O-methyluridine-3'-phosphate
  modified_base 8: mod_base = OTHER; note = 2'-O-methyladenosine-3'-phosphate
  modified_base 9: mod_base = OTHER; note = 2'-O-methyluridine-3'-phosphate
  modified_base 10: mod_base = OTHER; note = 2'-O-methylcytidine-3'-phosphate
  modified_base 11: mod_base = OTHER; note = 2'-O-methyluridine-3'-phosphate
  modified_base 12: mod_base = OTHER; note = 2'-O-methyluridine-3'-phosphate
  modified_base 13: mod_base = OTHER; note = 2'-O-methyluridine-3'-phosphate
  modified_base 14: mod_base = OTHER; note = 2'-deoxy-2'-fluorouridine-3'-phosphate
  modified_base 15: mod_base = OTHER; note = 2'-O-methylcytidine-3'-phosphate
  modified_base 16: mod_base = OTHER; note = 2'-deoxy-2'-fluoroadenosine-3'-phosphate
  modified_base 17: mod_base = OTHER; note = 2'-O-methyluridine-3'-phosphate
  modified_base 18: mod_base = OTHER; note = 2'-O-methylguanosine-3'-phosphate
  modified_base 19: mod_base = OTHER; note = 2'-O-methylcytidine-3'-phosphate
  modified_base 20: mod_base = OTHER; note = 2'-O-methyluridine-3'-phosphate
  modified_base 21: mod_base = OTHER; note = 2'-O-methylguanosine-3'-phosphate
  modified_base 22: mod_base = OTHER; note = 2'-O-methylcytidine-3'-phosphate
  modified_base 23: mod_base = OTHER; note = 2'-O-methylcytidine
tagagttatcttttcatgctgcc

SEQ ID NO: 4933 - RNA, 23 nt, synthetic construct
  source 1..23: mol_type = other RNA
  modified_base 1: mod_base = OTHER; note = 2'-O-methyluridine-3'-phosphate 5'-(E)-Vinylphosphonate
  modified_base 2: mod_base = OTHER; note = 2'-deoxy-2'-fluorouridine-3'-phosphate
  modified_base 3: mod_base = OTHER; note = 2'-O-methyladenosine-3'-phosphate
  modified_base 4: mod_base = OTHER; note = 2'-O-methyladenosine-3'-phosphate
  modified_base 5: mod_base = OTHER; note = 2'-O-methylcytidine-3'-phosphate
  modified_base 6: mod_base = OTHER; note = 2'-deoxy-2'-fluoroadenosine-3'-phosphate
  modified_base 7: mod_base = OTHER; note = 2'-O-methyluridine-3'-phosphate
  modified_base 8: mod_base = OTHER; note = 2'-O-methyladenosine-3'-phosphate
  modified_base 9: mod_base = OTHER; note = 2'-O-methylguanosine-3'-phosphate
  modified_base 10: mod_base = OTHER; note = 2'-O-methyladenosine-3'-phosphate
  modified_base 11: mod_base = OTHER; note = 2'-O-methylguanosine-3'-phosphate
  modified_base 12: mod_base = OTHER; note = 2'-O-methyladenosine-3'-phosphate
  modified_base 13: mod_base = OTHER; note = 2'-O-methyluridine-3'-phosphate
  modified_base 14: mod_base = OTHER; note = 2'-deoxy-2'-fluorouridine-3'-phosphate
  modified_base 15: mod_base = OTHER; note = 2'-O-methylguanosine-3'-phosphate
  modified_base 16: mod_base = OTHER; note = 2'-deoxy-2'-fluoroguanosine-3'-phosphate
  modified_base 17: mod_base = OTHER; note = 2'-O-methyladenosine-3'-phosphate
  modified_base 18: mod_base = OTHER; note = 2'-O-methyluridine-3'-phosphate
  modified_base 19: mod_base = OTHER; note = 2'-O-methylguanosine-3'-phosphate
  modified_base 20: mod_base = OTHER; note = 2'-O-methyladenosine-3'-phosphate
  modified_base 21: mod_base = OTHER; note = 2'-O-methyladenosine-3'-phosphate
  modified_base 22: mod_base = OTHER; note = 2'-O-methylguanosine-3'-phosphate
  modified_base 23: mod_base = OTHER; note = 2'-O-methyluridine
ttaacatagagattggatgaagt

SEQ ID NO: 4934 - RNA, 23 nt, synthetic construct
  source 1..23: mol_type = other RNA
  modified_base 1: mod_base = OTHER; note = 2'-O-methyluridine-3'-phosphate 5'-(E)-Vinylphosphonate
  modified_base 2: mod_base = OTHER; note = 2'-deoxy-2'-fluoroguanosine-3'-phosphate
  modified_base 3: mod_base = OTHER; note = 2'-O-methyladenosine-3'-phosphate
  modified_base 4: mod_base = OTHER; note = 2'-O-methyluridine-3'-phosphate
  modified_base 5: mod_base = OTHER; note = 2'-O-methylguanosine-3'-phosphate
  modified_base 6: mod_base = OTHER; note = 2'-deoxy-2'-fluoroadenosine-3'-phosphate
  modified_base 7: mod_base = OTHER; note = 2'-O-methylguanosine-3'-phosphate
  modified_base 8: mod_base = OTHER; note = 2'-O-methyluridine-3'-phosphate
  modified_base 9: mod_base = OTHER; note = 2'-O-methyluridine-3'-phosphate
  modified_base 10: mod_base = OTHER; note = 2'-O-methylguanosine-3'-phosphate
  modified_base 11: mod_base = OTHER; note = 2'-O-methyladenosine-3'-phosphate
  modified_base 12: mod_base = OTHER; note = 2'-O-methylguanosine-3'-phosphate
  modified_base 13: mod_base = OTHER; note = 2'-O-methylguanosine-3'-phosphate
  modified_base 14: mod_base = OTHER; note = 2'-deoxy-2'-fluorouridine-3'-phosphate
  modified_base 15: mod_base = OTHER; note = 2'-O-methylguanosine-3'-phosphate
  modified_base 16: mod_base = OTHER; note = 2'-deoxy-2'-fluorouridine-3'-phosphate
  modified_base 17: mod_base = OTHER; note = 2'-O-methyluridine-3'-phosphate
  modified_base 18: mod_base = OTHER; note = 2'-O-methylguanosine-3'-phosphate
  modified_base 19: mod_base = OTHER; note = 2'-O-methylcytidine-3'-phosphate
  modified_base 20: mod_base = OTHER; note = 2'-O-methyluridine-3'-phosphate
  modified_base 21: mod_base = OTHER; note = 2'-O-methyluridine-3'-phosphate
  modified_base 22: mod_base = OTHER; note = 2'-O-methyluridine-3'-phosphate
  modified_base 23: mod_base = OTHER; note = 2'-O-methylcytidine
tgatgagttgaggtgttgctttc

SEQ ID NO: 4935 - RNA, 23 nt, synthetic construct
  source 1..23: mol_type = other RNA
  modified_base 1: mod_base = OTHER; note = 2'-O-methyluridine-3'-phosphate 5'-(E)-Vinylphosphonate
  modified_base 2: mod_base = OTHER; note = 2'-deoxy-2'-fluoroadenosine-3'-phosphate
  modified_base 3: mod_base = OTHER; note = 2'-O-methyladenosine-3'-phosphate
  modified_base 4: mod_base = OTHER; note = 2'-O-methyladenosine-3'-phosphate
  modified_base 5: mod_base = OTHER; note = 2'-O-methylguanosine-3'-phosphate
  modified_base 6: mod_base = OTHER; note = 2'-deoxy-2'-fluoroadenosine-3'-phosphate
  modified_base 7: mod_base = OTHER; note = 2'-O-methyluridine-3'-phosphate
  modified_base 8: mod_base = OTHER; note = 2'-O-methylguanosine-3'-phosphate
  modified_base 9: mod_base = OTHER; note = 2'-O-methyladenosine-3'-phosphate
  modified_base 10: mod_base = OTHER; note = 2'-O-methylguanosine-3'-phosphate
  modified_base 11: mod_base = OTHER; note = 2'-O-methyluridine-3'-phosphate
  modified_base 12: mod_base = OTHER; note = 2'-O-methyluridine-3'-phosphate
  modified_base 13: mod_base = OTHER; note = 2'-O-methylguanosine-3'-phosphate
  modified_base 14: mod_base = OTHER; note = 2'-deoxy-2'-fluoroadenosine-3'-phosphate
  modified_base 15: mod_base = OTHER; note = 2'-O-methylguanosine-3'-phosphate
  modified_base 16: mod_base = OTHER; note = 2'-deoxy-2'-fluoroguanosine-3'-phosphate
  modified_base 17: mod_base = OTHER; note = 2'-O-methyluridine-3'-phosphate
  modified_base 18: mod_base = OTHER; note = 2'-O-methylguanosine-3'-phosphate
  modified_base 19: mod_base = OTHER; note = 2'-O-methyluridine-3'-phosphate
  modified_base 20: mod_base = OTHER; note = 2'-O-methyluridine-3'-phosphate
  modified_base 21: mod_base = OTHER; note = 2'-O-methylguanosine-3'-phosphate
  modified_base 22: mod_base = OTHER; note = 2'-O-methylcytidine-3'-phosphate
  modified_base 23: mod_base = OTHER; note = 2'-O-methyluridine
taaagatgagttgaggtgttgct

SEQ ID NO: 4936 - RNA, 23 nt, synthetic construct
  source 1..23: mol_type = other RNA
  modified_base 1: mod_base = OTHER; note = 2'-O-methyluridine-3'-phosphate 5'-(E)-Vinylphosphonate
  modified_base 2: mod_base = OTHER; note = 2'-deoxy-2'-fluorouridine-3'-phosphate
  modified_base 3: mod_base = OTHER; note = 2'-O-methyladenosine-3'-phosphate
  modified_base 4: mod_base = OTHER; note = 2'-O-methyladenosine-3'-phosphate
  modified_base 5: mod_base = OTHER; note = 2'-O-methyladenosine-3'-phosphate
  modified_base 6: mod_base = OTHER; note = 2'-deoxy-2'-fluoroadenosine-3'-phosphate
  modified_base 7: mod_base = OTHER; note = 2'-O-methyladenosine-3'-phosphate
  modified_base 8: mod_base = OTHER; note = 2'-O-methylguanosine-3'-phosphate
  modified_base 9: mod_base = OTHER; note = 2'-O-methyladenosine-3'-phosphate
  modified_base 10: mod_base = OTHER; note = 2'-O-methyluridine-3'-phosphate
  modified_base 11: mod_base = OTHER; note = 2'-O-methylguanosine-3'-phosphate
  modified_base 12: mod_base = OTHER; note = 2'-O-methyladenosine-3'-phosphate
  modified_base 13: mod_base = OTHER; note = 2'-O-methylguanosine-3'-phosphate
  modified_base 14: mod_base = OTHER; note = 2'-deoxy-2'-fluorouridine-3'-phosphate
  modified_base 15: mod_base = OTHER; note = 2'-O-methyluridine-3'-phosphate
  modified_base 16: mod_base = OTHER; note = 2'-deoxy-2'-fluoroguanosine-3'-phosphate
  modified_base 17: mod_base = OTHER; note = 2'-O-methyladenosine-3'-phosphate
  modified_base 18: mod_base = OTHER; note = 2'-O-methylguanosine-3'-phosphate
  modified_base 19: mod_base = OTHER; note = 2'-O-methylguanosine-3'-phosphate
  modified_base 20: mod_base = OTHER; note = 2'-O-methyluridine-3'-phosphate
  modified_base 21: mod_base = OTHER; note = 2'-O-methylguanosine-3'-phosphate
  modified_base 22: mod_base = OTHER; note = 2'-O-methyluridine-3'-phosphate
  modified_base 23: mod_base = OTHER; note = 2'-O-methyluridine
ttaaaaagatgagttgaggtgtt

SEQ ID NO: 4937 - RNA, 23 nt, synthetic construct
  source 1..23: mol_type = other RNA
  modified_base 1: mod_base = OTHER; note = 2'-O-methyluridine-3'-phosphate 5'-(E)-Vinylphosphonate
  modified_base 2: mod_base = OTHER; note = 2'-deoxy-2'-fluoroadenosine-3'-phosphate
  modified_base 3: mod_base = OTHER; note = 2'-O-methyladenosine-3'-phosphate
  modified_base 4: mod_base = OTHER; note = 2'-O-methyluridine-3'-phosphate
  modified_base 5: mod_base = OTHER; note = 2'-O-methyladenosine-3'-phosphate
  modified_base 6: mod_base = OTHER; note = 2'-deoxy-2'-fluoroadenosine-3'-phosphate
  modified_base 7: mod_base = OTHER; note = 2'-O-methyladenosine-3'-phosphate
  modified_base 8: mod_base = OTHER; note = 2'-O-methyladenosine-3'-phosphate
  modified_base 9: mod_base = OTHER; note = 2'-O-methyladenosine-3'-phosphate
  modified_base 10: mod_base = OTHER; note = 2'-O-methylguanosine-3'-phosphate
  modified_base 11: mod_base = OTHER; note = 2'-O-methyladenosine-3'-phosphate
  modified_base 12: mod_base = OTHER; note = 2'-O-methyluridine-3'-phosphate
  modified_base 13: mod_base = OTHER; note = 2'-O-methylguanosine-3'-phosphate
  modified_base 14: mod_base = OTHER; note = 2'-deoxy-2'-fluoroadenosine-3'-phosphate
  modified_base 15: mod_base = OTHER; note = 2'-O-methylguanosine-3'-phosphate
  modified_base 16: mod_base = OTHER; note = 2'-deoxy-2'-fluorouridine-3'-phosphate
  modified_base 17: mod_base = OTHER; note = 2'-O-methyluridine-3'-phosphate
  modified_base 18: mod_base = OTHER; note = 2'-O-methylguanosine-3'-phosphate
  modified_base 19: mod_base = OTHER; note = 2'-O-methyladenosine-3'-phosphate
  modified_base 20: mod_base = OTHER; note = 2'-O-methylguanosine-3'-phosphate
  modified_base 21: mod_base = OTHER; note = 2'-O-methylguanosine-3'-phosphate
  modified_base 22: mod_base = OTHER; note = 2'-O-methyluridine-3'-phosphate
  modified_base 23: mod_base = OTHER; note = 2'-O-methylguanosine
taataaaaagatgagttgaggtg

SEQ ID NO: 4938 - RNA, 23 nt, synthetic construct
  source 1..23: mol_type = other RNA
  modified_base 1: mod_base = OTHER; note = 2'-O-methyluridine-3'-phosphate 5'-(E)-Vinylphosphonate
  modified_base 2: mod_base = OTHER; note = 2'-deoxy-2'-fluoroadenosine-3'-phosphate
  modified_base 3: mod_base = OTHER; note = 2'-O-methyladenosine-3'-phosphate
  modified_base 4: mod_base = OTHER; note = 2'-O-methyladenosine-3'-phosphate
  modified_base 5: mod_base = OTHER; note = 2'-O-methyluridine-3'-phosphate
  modified_base 6: mod_base = OTHER; note = 2'-deoxy-2'-fluoroadenosine-3'-phosphate
  modified_base 7: mod_base = OTHER; note = 2'-O-methyladenosine-3'-phosphate
  modified_base 8: mod_base = OTHER; note = 2'-O-methyladenosine-3'-phosphate
  modified_base 9: mod_base = OTHER; note = 2'-O-methyladenosine-3'-phosphate
  modified_base 10: mod_base = OTHER; note = 2'-O-methyladenosine-3'-phosphate
  modified_base 11: mod_base = OTHER; note = 2'-O-methylguanosine-3'-phosphate
  modified_base 12: mod_base = OTHER; note = 2'-O-methyladenosine-3'-phosphate
  modified_base 13: mod_base = OTHER; note = 2'-O-methyluridine-3'-phosphate
  modified_base 14: mod_base = OTHER; note = 2'-deoxy-2'-fluoroguanosine-3'-phosphate
  modified_base 15: mod_base = OTHER; note = 2'-O-methyladenosine-3'-phosphate
  modified_base 16: mod_base = OTHER; note = 2'-deoxy-2'-fluoroguanosine-3'-phosphate
  modified_base 17: mod_base = OTHER; note = 2'-O-methyluridine-3'-phosphate
  modified_base 18: mod_base = OTHER; note = 2'-O-methyluridine-3'-phosphate
  modified_base 19: mod_base = OTHER; note = 2'-O-methylguanosine-3'-phosphate
  modified_base 20: mod_base = OTHER; note = 2'-O-methyladenosine-3'-phosphate
  modified_base 21: mod_base = OTHER; note = 2'-O-methylguanosine-3'-phosphate
  modified_base 22: mod_base = OTHER; note = 2'-O-methylguanosine-3'-phosphate
  modified_base 23: mod_base = OTHER; note = 2'-O-methyluridine
taaataaaaagatgagttgaggt

SEQ ID NO: 4939 - RNA, 23 nt, synthetic construct
  source 1..23: mol_type = other RNA
  modified_base 1: mod_base = OTHER; note = 2'-O-methyluridine-3'-phosphate 5'-(E)-Vinylphosphonate
  modified_base 2: mod_base = OTHER; note = 2'-deoxy-2'-fluoroguanosine-3'-phosphate
  modified_base 3: mod_base = OTHER; note = 2'-O-methyladenosine-3'-phosphate
  modified_base 4: mod_base = OTHER; note = 2'-O-methylcytidine-3'-phosphate
  modified_base 5: mod_base = OTHER; note = 2'-O-methyluridine-3'-phosphate
  modified_base 6: mod_base = OTHER; note = 2'-deoxy-2'-fluoroadenosine-3'-phosphate
  modified_base 7: mod_base = OTHER; note = 2'-O-methyluridine-3'-phosphate
  modified_base 8: mod_base = OTHER; note = 2'-O-methyladenosine-3'-phosphate
  modified_base 9: mod_base = OTHER; note = 2'-O-methyladenosine-3'-phosphate
  modified_base 10: mod_base = OTHER; note = 2'-O-methylcytidine-3'-phosphate
  modified_base 11: mod_base = OTHER; note = 2'-O-methyladenosine-3'-phosphate
  modified_base 12: mod_base = OTHER; note = 2'-O-methyluridine-3'-phosphate
  modified_base 13: mod_base = OTHER; note = 2'-O-methyluridine-3'-phosphate
  modified_base 14: mod_base = OTHER; note = 2'-deoxy-2'-fluorouridine-3'-phosphate
  modified_base 15: mod_base = OTHER; note = 2'-O-methyluridine-3'-phosphate
  modified_base 16: mod_base = OTHER; note = 2'-deoxy-2'-fluorouridine-3'-phosphate
  modified_base 17: mod_base = OTHER; note = 2'-O-methyladenosine-3'-phosphate
  modified_base 18: mod_base = OTHER; note = 2'-O-methyluridine-3'-phosphate
  modified_base 19: mod_base = OTHER; note = 2'-O-methyladenosine-3'-phosphate
  modified_base 20: mod_base = OTHER; note = 2'-O-methylguanosine-3'-phosphate
  modified_base 21: mod_base = OTHER; note = 2'-O-methyladenosine-3'-phosphate
  modified_base 22: mod_base = OTHER; note = 2'-O-methylguanosine-3'-phosphate
  modified_base 23: mod_base = OTHER; note = 2'-O-methylcytidine
tgactataacatttttatagagc

SEQ ID NO: 4940 - RNA, 23 nt, synthetic construct
  source 1..23: mol_type = other RNA
  modified_base 1: mod_base = OTHER; note = 2'-O-methyluridine-3'-phosphate 5'-(E)-Vinylphosphonate
  modified_base 2: mod_base = OTHER; note = 2'-deoxy-2'-fluoroguanosine-3'-phosphate
  modified_base 3: mod_base = OTHER; note = 2'-O-methylcytidine-3'-phosphate
  modified_base 4: mod_base = OTHER; note = 2'-O-methyluridine-3'-phosphate
  modified_base 5: mod_base = OTHER; note = 2'-O-methylcytidine-3'-phosphate
  modified_base 6: mod_base = OTHER; note = 2'-deoxy-2'-fluorouridine-3'-phosphate
  modified_base 7: mod_base = OTHER; note = 2'-O-methyluridine-3'-phosphate
  modified_base 8: mod_base = OTHER; note = 2'-O-methylguanosine-3'-phosphate
  modified_base 9: mod_base = OTHER; note = 2'-O-methylguanosine-3'-phosphate
  modified_base 10: mod_base = OTHER; note = 2'-O-methyluridine-3'-phosphate
  modified_base 11: mod_base = OTHER; note = 2'-O-methyluridine-3'-phosphate
  modified_base 12: mod_base = OTHER; note = 2'-O-methylcytidine-3'-phosphate
  modified_base 13: mod_base = OTHER; note = 2'-O-methyladenosine-3'-phosphate
  modified_base 14: mod_base = OTHER; note = 2'-deoxy-2'-fluoroadenosine-3'-phosphate
  modified_base 15: mod_base = OTHER; note = 2'-O-methylguanosine-3'-phosphate
  modified_base 16: mod_base = OTHER; note = 2'-deoxy-2'-fluorouridine-3'-phosphate
  modified_base 17: mod_base = OTHER; note = 2'-O-methyladenosine-3'-phosphate
  modified_base 18: mod_base = OTHER; note = 2'-O-methyladenosine-3'-phosphate
  modified_base 19: mod_base = OTHER; note = 2'-O-methyladenosine-3'-phosphate
  modified_base 20: mod_base = OTHER; note = 2'-O-methyladenosine-3'-phosphate
  modified_base 21: mod_base = OTHER; note = 2'-O-methyluridine-3'-phosphate
  modified_base 22: mod_base = OTHER; note = 2'-O-methyladenosine-3'-phosphate
  modified_base 23: mod_base = OTHER; note = 2'-O-methyladenosine
tgctcttggttcaagtaaaataa

SEQ ID NO: 4941 - RNA, 23 nt, synthetic construct
  source 1..23: mol_type = other RNA
  modified_base 1: mod_base = OTHER; note = 2'-O-methyluridine-3'-phosphate 5'-(E)-Vinylphosphonate
  modified_base 2: mod_base = OTHER; note = 2'-deoxy-2'-fluorouridine-3'-phosphate
  modified_base 3: mod_base = OTHER; note = 2'-O-methylguanosine-3'-phosphate
  modified_base 4: mod_base = OTHER; note = 2'-O-methylcytidine-3'-phosphate
  modified_base 5: mod_base = OTHER; note = 2'-O-methyluridine-3'-phosphate
  modified_base 6: mod_base = OTHER; note = 2'-deoxy-2'-fluorocytidine-3'-phosphate
  modified_base 7: mod_base = OTHER; note = 2'-O-methyluridine-3'-phosphate
  modified_base 8: mod_base = OTHER; note = 2'-O-methyluridine-3'-phosphate
  modified_base 9: mod_base = OTHER; note = 2'-O-methylguanosine-3'-phosphate
  modified_base 10: mod_base = OTHER; note = 2'-O-methylguanosine-3'-phosphate
  modified_base 11: mod_base = OTHER; note = 2'-O-methyluridine-3'-phosphate
  modified_base 12: mod_base = OTHER; note = 2'-O-methyluridine-3'-phosphate
  modified_base 13: mod_base = OTHER; note = 2'-O-methylcytidine-3'-phosphate
  modified_base 14: mod_base = OTHER; note = 2'-deoxy-2'-fluoroadenosine-3'-phosphate
  modified_base 15: mod_base = OTHER; note = 2'-O-methyladenosine-3'-phosphate
  modified_base 16: mod_base = OTHER; note = 2'-deoxy-2'-fluoroguanosine-3'-phosphate
  modified_base 17: mod_base = OTHER; note = 2'-O-methyluridine-3'-phosphate
  modified_base 18: mod_base = OTHER; note = 2'-O-methyladenosine-3'-phosphate
  modified_base 19: mod_base = OTHER; note = 2'-O-methyladenosine-3'-phosphate
  modified_base 20: mod_base = OTHER; note = 2'-O-methyladenosine-3'-phosphate
  modified_base 21: mod_base = OTHER; note = 2'-O-methyladenosine-3'-phosphate
  modified_base 22: mod_base = OTHER; note = 2'-O-methyluridine-3'-phosphate
  modified_base 23: mod_base = OTHER; note = 2'-O-methyladenosine
ttgctcttggttcaagtaaaata

SEQ ID NO: 4942 - RNA, 23 nt, synthetic construct
  source 1..23: mol_type = other RNA
  modified_base 1: mod_base = OTHER; note = 2'-O-methyluridine-3'-phosphate 5'-(E)-Vinylphosphonate
  modified_base 2: mod_base = OTHER; note = 2'-deoxy-2'-fluoroguanosine-3'-phosphate
  modified_base 3: mod_base = OTHER; note = 2'-O-methyluridine-3'-phosphate
  modified_base 4: mod_base = OTHER; note = 2'-O-methylguanosine-3'-phosphate
  modified_base 5: mod_base = OTHER; note = 2'-O-methylcytidine-3'-phosphate
  modified_base 6: mod_base = OTHER; note = 2'-deoxy-2'-fluorouridine-3'-phosphate
  modified_base 7: mod_base = OTHER; note = 2'-O-methylcytidine-3'-phosphate
  modified_base 8: mod_base = OTHER; note = 2'-O-methyluridine-3'-phosphate
  modified_base 9: mod_base = OTHER; note = 2'-O-methyluridine-3'-phosphate
  modified_base 10: mod_base = OTHER; note = 2'-O-methylguanosine-3'-phosphate
  modified_base 11: mod_base = OTHER; note = 2'-O-methylguanosine-3'-phosphate
  modified_base 12: mod_base = OTHER; note = 2'-O-methyluridine-3'-phosphate
  modified_base 13: mod_base = OTHER; note = 2'-O-methyluridine-3'-phosphate
  modified_base 14: mod_base = OTHER; note = 2'-deoxy-2'-fluorocytidine-3'-phosphate
  modified_base 15: mod_base = OTHER; note = 2'-O-methyladenosine-3'-phosphate
  modified_base 16: mod_base = OTHER; note = 2'-deoxy-2'-fluoroadenosine-3'-phosphate
  modified_base 17: mod_base = OTHER; note = 2'-O-methylguanosine-3'-phosphate
  modified_base 18: mod_base = OTHER; note = 2'-O-methyluridine-3'-phosphate
  modified_base 19: mod_base = OTHER; note = 2'-O-methyladenosine-3'-phosphate
  modified_base 20: mod_base = OTHER; note = 2'-O-methyladenosine-3'-phosphate
  modified_base 21: mod_base = OTHER; note = 2'-O-methyladenosine-3'-phosphate
  modified_base 22: mod_base = OTHER; note = 2'-O-methyladenosine-3'-phosphate
  modified_base 23: mod_base = OTHER; note = 2'-O-methyluridine
tgtgctcttggttcaagtaaaat

SEQ ID NO: 4943 - RNA, 23 nt, synthetic construct
  source 1..23: mol_type = other RNA
  modified_base 1: mod_base = OTHER; note = 2'-O-methyluridine-3'-phosphate 5'-(E)-Vinylphosphonate
  modified_base 2: mod_base = OTHER; note = 2'-deoxy-2'-fluorouridine-3'-phosphate
  modified_base 3: mod_base = OTHER; note = 2'-O-methylguanosine-3'-phosphate
  modified_base 4: mod_base = OTHER; note = 2'-O-methyluridine-3'-phosphate
  modified_base 5: mod_base = OTHER; note = 2'-O-methylguanosine-3'-phosphate
  modified_base 6: mod_base = OTHER; note = 2'-deoxy-2'-fluorocytidine-3'-phosphate
  modified_base 7: mod_base = OTHER; note = 2'-O-methyluridine-3'-phosphate
  modified_base 8: mod_base = OTHER; note = 2'-O-methylcytidine-3'-phosphate
  modified_base 9: mod_base = OTHER; note = 2'-O-methyluridine-3'-phosphate
  modified_base 10: mod_base = OTHER; note = 2'-O-methyluridine-3'-phosphate
  modified_base 11: mod_base = OTHER; note = 2'-O-methylguanosine-3'-phosphate
  modified_base 12: mod_base = OTHER; note = 2'-O-methylguanosine-3'-phosphate
  modified_base 13: mod_base = OTHER; note = 2'-O-methyluridine-3'-phosphate
  modified_base 14: mod_base = OTHER; note = 2'-deoxy-2'-fluorouridine-3'-phosphate
  modified_base 15: mod_base = OTHER; note = 2'-O-methylcytidine-3'-phosphate
  modified_base 16: mod_base = OTHER; note = 2'-deoxy-2'-fluoroadenosine-3'-phosphate
  modified_base 17: mod_base = OTHER; note = 2'-O-methyladenosine-3'-phosphate
  modified_base 18: mod_base = OTHER; note = 2'-O-methylguanosine-3'-phosphate
  modified_base 19: mod_base = OTHER; note = 2'-O-methyluridine-3'-phosphate
  modified_base 20: mod_base = OTHER; note = 2'-O-methyladenosine-3'-phosphate
  modified_base 21: mod_base = OTHER; note = 2'-O-methyladenosine-3'-phosphate
  modified_base 22: mod_base = OTHER; note = 2'-O-methyladenosine-3'-phosphate
  modified_base 23: mod_base = OTHER; note = 2'-O-methyladenosine
ttgtgctcttggttcaagtaaaa

SEQ ID NO: 4944 - RNA, 23 nt, synthetic construct
  source 1..23: mol_type = other RNA
  modified_base 1: mod_base = OTHER; note = 2'-O-methyluridine-3'-phosphate 5'-(E)-Vinylphosphonate
  modified_base 2: mod_base = OTHER; note = 2'-deoxy-2'-fluoroadenosine-3'-phosphate
  modified_base 3: mod_base = OTHER; note = 2'-O-methyluridine-3'-phosphate
  modified_base 4: mod_base = OTHER; note = 2'-O-methylguanosine-3'-phosphate
  modified_base 5: mod_base = OTHER; note = 2'-O-methyluridine-3'-phosphate
  modified_base 6: mod_base = OTHER; note = 2'-deoxy-2'-fluoroguanosine-3'-phosphate
  modified_base 7: mod_base = OTHER; note = 2'-O-methylcytidine-3'-phosphate
  modified_base 8: mod_base = OTHER; note = 2'-O-methyluridine-3'-phosphate
  modified_base 9: mod_base = OTHER; note = 2'-O-methylcytidine-3'-phosphate
  modified_base 10: mod_base = OTHER; note = 2'-O-methyluridine-3'-phosphate
  modified_base 11: mod_base = OTHER; note = 2'-O-methyluridine-3'-phosphate
  modified_base 12: mod_base = OTHER; note = 2'-O-methylguanosine-3'-phosphate
  modified_base 13: mod_base = OTHER; note = 2'-O-methylguanosine-3'-phosphate
  modified_base 14: mod_base = OTHER; note = 2'-deoxy-2'-fluorouridine-3'-phosphate
  modified_base 15: mod_base = OTHER; note = 2'-O-methyluridine-3'-phosphate
  modified_base 16: mod_base = OTHER; note = 2'-deoxy-2'-fluorocytidine-3'-phosphate
  modified_base 17: mod_base = OTHER; note = 2'-O-methyladenosine-3'-phosphate
  modified_base 18: mod_base = OTHER; note = 2'-O-methyladenosine-3'-phosphate
  modified_base 19: mod_base = OTHER; note = 2'-O-methylguanosine-3'-phosphate
  modified_base 20: mod_base = OTHER; note = 2'-O-methyluridine-3'-phosphate
  modified_base 21: mod_base = OTHER; note = 2'-O-methyladenosine-3'-phosphate
  modified_base 22: mod_base = OTHER; note = 2'-O-methyladenosine-3'-phosphate
  modified_base 23: mod_base = OTHER; note = 2'-O-methyladenosine
tatgtgctcttggttcaagtaaa

SEQ ID NO: 4945 - RNA, 23 nt, synthetic construct
  source 1..23: mol_type = other RNA
  modified_base 1: mod_base = OTHER; note = 2'-O-methyluridine-3'-phosphate 5'-(E)-Vinylphosphonate
  modified_base 2: mod_base = OTHER; note = 2'-deoxy-2'-fluorocytidine-3'-phosphate
  modified_base 3: mod_base = OTHER; note = 2'-O-methyladenosine-3'-phosphate
  modified_base 4: mod_base = OTHER; note = 2'-O-methyluridine-3'-phosphate
  modified_base 5: mod_base = OTHER; note = 2'-O-methylguanosine-3'-phosphate
  modified_base 6: mod_base = OTHER; note = 2'-deoxy-2'-fluorouridine-3'-phosphate
  modified_base 7: mod_base = OTHER; note = 2'-O-methylguanosine-3'-phosphate
  modified_base 8: mod_base = OTHER; note = 2'-O-methylcytidine-3'-phosphate
  modified_base 9: mod_base = OTHER; note = 2'-O-methyluridine-3'-phosphate
  modified_base 10: mod_base = OTHER; note = 2'-O-methylcytidine-3'-phosphate
  modified_base 11: mod_base = OTHER; note = 2'-O-methyluridine-3'-phosphate
  modified_base 12: mod_base = OTHER; note = 2'-O-methyluridine-3'-phosphate
  modified_base 13: mod_base = OTHER; note = 2'-O-methylguanosine-3'-phosphate
  modified_base 14: mod_base = OTHER; note = 2'-deoxy-2'-fluoroguanosine-3'-phosphate
  modified_base 15: mod_base = OTHER; note = 2'-O-methyluridine-3'-phosphate
  modified_base 16: mod_base = OTHER; note = 2'-deoxy-2'-fluorouridine-3'-phosphate
  modified_base 17: mod_base = OTHER; note = 2'-O-methylcytidine-3'-phosphate
  modified_base 18: mod_base = OTHER; note = 2'-O-methyladenosine-3'-phosphate
  modified_base 19: mod_base = OTHER; note = 2'-O-methyladenosine-3'-phosphate
  modified_base 20: mod_base = OTHER; note = 2'-O-methylguanosine-3'-phosphate
  modified_base 21: mod_base = OTHER; note = 2'-O-methyluridine-3'-phosphate
  modified_base 22: mod_base = OTHER; note = 2'-O-methyladenosine-3'-phosphate
  modified_base 23: mod_base = OTHER; note = 2'-O-methyladenosine
tcatgtgctcttggttcaagtaa

SEQ ID NO: 4946 - RNA, 23 nt, synthetic construct
  source 1..23: mol_type = other RNA
  modified_base 1: mod_base = OTHER; note = 2'-O-methyluridine-3'-phosphate 5'-(E)-Vinylphosphonate
  modified_base 2: mod_base = OTHER; note = 2'-deoxy-2'-fluorouridine-3'-phosphate
  modified_base 3: mod_base = OTHER; note = 2'-O-methylcytidine-3'-phosphate
  modified_base 4: mod_base = OTHER; note = 2'-O-methyladenosine-3'-phosphate
  modified_base 5: mod_base = OTHER; note = 2'-O-methyluridine-3'-phosphate
  modified_base 6: mod_base = OTHER; note = 2'-deoxy-2'-fluoroguanosine-3'-phosphate
  modified_base 7: mod_base = OTHER; note = 2'-O-methyluridine-3'-phosphate
  modified_base 8: mod_base = OTHER; note = 2'-O-methylguanosine-3'-phosphate
  modified_base 9: mod_base = OTHER; note = 2'-O-methylcytidine-3'-phosphate
  modified_base 10: mod_base = OTHER; note = 2'-O-methyluridine-3'-phosphate
  modified_base 11: mod_base = OTHER; note = 2'-O-methylcytidine-3'-phosphate
  modified_base 12: mod_base = OTHER; note = 2'-O-methyluridine-3'-phosphate
  modified_base 13: mod_base = OTHER; note = 2'-O-methyluridine-3'-phosphate
  modified_base 14: mod_base = OTHER; note = 2'-deoxy-2'-fluoroguanosine-3'-phosphate
  modified_base 15: mod_base = OTHER; note = 2'-O-methylguanosine-3'-phosphate
  modified_base 16: mod_base = OTHER; note = 2'-deoxy-2'-fluorouridine-3'-phosphate
  modified_base 17: mod_base = OTHER; note = 2'-O-methyluridine-3'-phosphate
  modified_base 18: mod_base = OTHER; note = 2'-O-methylcytidine-3'-phosphate
  modified_base 19: mod_base = OTHER; note = 2'-O-methyladenosine-3'-phosphate
  modified_base 20: mod_base = OTHER; note = 2'-O-methyladenosine-3'-phosphate
  modified_base 21: mod_base = OTHER; note = 2'-O-methylguanosine-3'-phosphate
  modified_base 22: mod_base = OTHER; note = 2'-O-methyluridine-3'-phosphate
  modified_base 23: mod_base = OTHER; note = 2'-O-methyladenosine
ttcatgtgctcttggttcaagta

SEQ ID NO: 4947 - RNA, 23 nt, synthetic construct
  source 1..23: mol_type = other RNA
  modified_base 1: mod_base = OTHER; note = 2'-O-methyluridine-3'-phosphate 5'-(E)-Vinylphosphonate
  modified_base 2: mod_base = OTHER; note = 2'-deoxy-2'-fluorouridine-3'-phosphate
  modified_base 3: mod_base = OTHER; note = 2'-O-methyluridine-3'-phosphate
  modified_base 4: mod_base = OTHER; note = 2'-O-methylcytidine-3'-phosphate
  modified_base 5: mod_base = OTHER; note = 2'-O-methyladenosine-3'-phosphate
  modified_base 6: mod_base = OTHER; note = 2'-deoxy-2'-fluorouridine-3'-phosphate
  modified_base 7: mod_base = OTHER; note = 2'-O-methylguanosine-3'-phosphate
  modified_base 8: mod_base = OTHER; note = 2'-O-methyluridine-3'-phosphate
  modified_base 9: mod_base = OTHER; note = 2'-O-methylguanosine-3'-phosphate
  modified_base 10: mod_base = OTHER; note = 2'-O-methylcytidine-3'-phosphate
  modified_base 11: mod_base = OTHER; note = 2'-O-methyluridine-3'-phosphate
  modified_base 12: mod_base = OTHER; note = 2'-O-methylcytidine-3'-phosphate
  modified_base 13: mod_base = OTHER; note = 2'-O-methyluridine-3'-phosphate
  modified_base 14: mod_base = OTHER; note = 2'-deoxy-2'-fluorouridine-3'-phosphate
  modified_base 15: mod_base = OTHER; note = 2'-O-methylguanosine-3'-phosphate
  modified_base 16: mod_base = OTHER; note = 2'-deoxy-2'-fluoroguanosine-3'-phosphate
  modified_base 17: mod_base = OTHER; note = 2'-O-methyluridine-3'-phosphate
  modified_base 18: mod_base = OTHER; note = 2'-O-methyluridine-3'-phosphate
  modified_base 19: mod_base = OTHER; note = 2'-O-methylcytidine-3'-phosphate
  modified_base 20: mod_base = OTHER; note = 2'-O-methyladenosine-3'-phosphate
  modified_base 21: mod_base = OTHER; note = 2'-O-methyladenosine-3'-phosphate
  modified_base 22: mod_base = OTHER; note = 2'-O-methylguanosine-3'-phosphate
  modified_base 23: mod_base = OTHER; note = 2'-O-methyluridine
tttcatgtgctcttggttcaagt

SEQ ID NO: 4948 - RNA, 23 nt, synthetic construct
  source 1..23: mol_type = other RNA
  modified_base 1: mod_base = OTHER; note = 2'-O-methyluridine-3'-phosphate 5'-(E)-Vinylphosphonate
  modified_base 2: mod_base = OTHER; note = 2'-deoxy-2'-fluoroadenosine-3'-phosphate
  modified_base 3: mod_base = OTHER; note = 2'-O-methyluridine-3'-phosphate
  modified_base 4: mod_base = OTHER; note = 2'-O-methyluridine-3'-phosphate
  modified_base 5: mod_base = OTHER; note = 2'-O-methylcytidine-3'-phosphate
  modified_base 6: mod_base = OTHER; note = 2'-deoxy-2'-fluoroadenosine-3'-phosphate
  modified_base 7: mod_base = OTHER; note = 2'-O-methyluridine-3'-phosphate
  modified_base 8: mod_base = OTHER; note = 2'-O-methylguanosine-3'-phosphate
  modified_base 9: mod_base = OTHER; note = 2'-O-methyluridine-3'-phosphate
  modified_base 10: mod_base = OTHER; note = 2'-O-methylguanosine-3'-phosphate
  modified_base 11: mod_base = OTHER; note = 2'-O-methylcytidine-3'-phosphate
  modified_base 12: mod_base = OTHER; note = 2'-O-methyluridine-3'-phosphate
  modified_base 13: mod_base = OTHER; note = 2'-O-methylcytidine-3'-phosphate
  modified_base 14: mod_base = OTHER; note = 2'-deoxy-2'-fluorouridine-3'-phosphate
  modified_base 15: mod_base = OTHER; note = 2'-O-methyluridine-3'-phosphate
  modified_base 16: mod_base = OTHER; note = 2'-deoxy-2'-fluoroguanosine-3'-phosphate
  modified_base 17: mod_base = OTHER; note = 2'-O-methylguanosine-3'-phosphate
  modified_base 18: mod_base = OTHER; note = 2'-O-methyluridine-3'-phosphate
  modified_base 19: mod_base = OTHER; note = 2'-O-methyluridine-3'-phosphate
  modified_base 20: mod_base = OTHER; note = 2'-O-methylcytidine-3'-phosphate
  modified_base 21: mod_base = OTHER; note = 2'-O-methyladenosine-3'-phosphate
  modified_base 22: mod_base = OTHER; note = 2'-O-methyladenosine-3'-phosphate
  modified_base 23: mod_base = OTHER; note = 2'-O-methylguanosine
tattcatgtgctcttggttcaag

SEQ ID NO: 4949 - RNA, 23 nt, synthetic construct
  source 1..23: mol_type = other RNA
  modified_base 1: mod_base = OTHER; note = 2'-O-methyluridine-3'-phosphate 5'-(E)-Vinylphosphonate
  modified_base 2: mod_base = OTHER; note = 2'-deoxy-2'-fluorocytidine-3'-phosphate
  modified_base 3: mod_base = OTHER; note = 2'-O-methyladenosine-3'-phosphate
  modified_base 4: mod_base = OTHER; note = 2'-O-methyluridine-3'-phosphate
  modified_base 5: mod_base = OTHER; note = 2'-O-methyluridine-3'-phosphate
  modified_base 6: mod_base = OTHER; note = 2'-deoxy-2'-fluorocytidine-3'-phosphate
  modified_base 7: mod_base = OTHER; note = 2'-O-methyladenosine-3'-phosphate
  modified_base 8: mod_base = OTHER; note = 2'-O-methyluridine-3'-phosphate
  modified_base 9: mod_base = OTHER; note = 2'-O-methylguanosine-3'-phosphate
  modified_base 10: mod_base = OTHER; note = 2'-O-methyluridine-3'-phosphate
  modified_base 11: mod_base = OTHER; note = 2'-O-methylguanosine-3'-phosphate
  modified_base 12: mod_base = OTHER; note = 2'-O-methylcytidine-3'-phosphate
  modified_base 13: mod_base = OTHER; note = 2'-O-methyluridine-3'-phosphate
  modified_base 14: mod_base = OTHER; note = 2'-deoxy-2'-fluorocytidine-3'-phosphate
  modified_base 15: mod_base = OTHER; note = 2'-O-methyluridine-3'-phosphate
  modified_base 16: mod_base = OTHER; note = 2'-deoxy-2'-fluorouridine-3'-phosphate
  modified_base 17: mod_base = OTHER; note = 2'-O-methylguanosine-3'-phosphate
  modified_base 18: mod_base = OTHER; note = 2'-O-methylguanosine-3'-phosphate
  modified_base 19: mod_base = OTHER; note = 2'-O-methyluridine-3'-phosphate
  modified_base 20: mod_base = OTHER; note = 2'-O-methyluridine-3'-phosphate
  modified_base 21: mod_base = OTHER; note = 2'-O-methylcytidine-3'-phosphate
  modified_base 22: mod_base = OTHER; note = 2'-O-methyladenosine-3'-phosphate
  modified_base 23: mod_base = OTHER; note = 2'-O-methyladenosine
tcattcatgtgctcttggttcaa

SEQ ID NO: 4950 - RNA, 23 nt, synthetic construct
  source 1..23: mol_type = other RNA
  modified_base 1: mod_base = OTHER; note = 2'-O-methyluridine-3'-phosphate 5'-(E)-Vinylphosphonate
  modified_base 2: mod_base = OTHER; note = 2'-deoxy-2'-fluorouridine-3'-phosphate
  modified_base 3: mod_base = OTHER; note = 2'-O-methylcytidine-3'-phosphate
  modified_base 4: mod_base = OTHER; note = 2'-O-methyladenosine-3'-phosphate
  modified_base 5: mod_base = OTHER; note = 2'-O-methyluridine-3'-phosphate
  modified_base 6: mod_base = OTHER; note = 2'-deoxy-2'-fluorouridine-3'-phosphate
  modified_base 7: mod_base = OTHER; note = 2'-O-methylcytidine-3'-phosphate
  modified_base 8: mod_base = OTHER; note = 2'-O-methyladenosine-3'-phosphate
  modified_base 9: mod_base = OTHER; note = 2'-O-methyluridine-3'-phosphate
  modified_base 10: mod_base = OTHER; note = 2'-O-methylguanosine-3'-phosphate
  modified_base 11: mod_base = OTHER; note = 2'-O-methyluridine-3'-phosphate
  modified_base 12: mod_base = OTHER; note = 2'-O-methylguanosine-3'-phosphate
  modified_base 13: mod_base = OTHER; note = 2'-O-methylcytidine-3'-phosphate
  modified_base 14: mod_base = OTHER; note = 2'-deoxy-2'-fluorouridine-3'-phosphate
  modified_base 15: mod_base = OTHER; note = 2'-O-methylcytidine-3'-phosphate
  modified_base 16: mod_base = OTHER; note = 2'-deoxy-2'-fluorouridine-3'-phosphate
  modified_base 17: mod_base = OTHER; note = 2'-O-methyluridine-3'-phosphate
  modified_base 18: mod_base = OTHER; note = 2'-O-methylguanosine-3'-phosphate
  modified_base 19: mod_base = OTHER; note = 2'-O-methylguanosine-3'-phosphate
  modified_base 20: mod_base = OTHER; note = 2'-O-methyluridine-3'-phosphate
  modified_base 21: mod_base = OTHER; note = 2'-O-methyluridine-3'-phosphate
  modified_base 22: mod_base = OTHER; note = 2'-O-methylcytidine-3'-phosphate
  modified_base 23: mod_base = OTHER; note = 2'-O-methyladenosine
ttcattcatgtgctcttggttca

SEQ ID NO: 4951 - RNA, 23 nt, synthetic construct
  source 1..23: mol_type = other RNA
  modified_base 1: mod_base = OTHER; note = 2'-O-methyluridine-3'-phosphate 5'-(E)-Vinylphosphonate
  modified_base 2: mod_base = OTHER; note = 2'-deoxy-2'-fluorouridine-3'-phosphate
  modified_base 3: mod_base = OTHER; note = 2'-O-methyluridine-3'-phosphate
  modified_base 4: mod_base = OTHER; note = 2'-O-methylcytidine-3'-phosphate
  modified_base 5: mod_base = OTHER; note = 2'-O-methyladenosine-3'-phosphate
  modified_base 6: mod_base = OTHER; note = 2'-deoxy-2'-fluorouridine-3'-phosphate
  modified_base 7: mod_base = OTHER; note = 2'-O-methyluridine-3'-phosphate
  modified_base 8: mod_base = OTHER; note = 2'-O-methylcytidine-3'-phosphate
  modified_base 9: mod_base = OTHER; note = 2'-O-methyladenosine-3'-phosphate
  modified_base 10: mod_base = OTHER; note = 2'-O-methyluridine-3'-phosphate
  modified_base 11: mod_base = OTHER; note = 2'-O-methylguanosine-3'-phosphate
  modified_base 12: mod_base = OTHER; note = 2'-O-methyluridine-3'-phosphate
  modified_base 13: mod_base = OTHER; note = 2'-O-methylguanosine-3'-phosphate
  modified_base 14: mod_base = OTHER; note = 2'-deoxy-2'-fluorocytidine-3'-phosphate
  modified_base 15: mod_base = OTHER; note = 2'-O-methyluridine-3'-phosphate
  modified_base 16: mod_base = OTHER; note = 2'-deoxy-2'-fluorocytidine-3'-phosphate
  modified_base 17: mod_base = OTHER; note = 2'-O-methyluridine-3'-phosphate
  modified_base 18: mod_base = OTHER; note = 2'-O-methyluridine-3'-phosphate
  modified_base 19: mod_base = OTHER; note = 2'-O-methylguanosine-3'-phosphate
  modified_base 20: mod_base = OTHER; note = 2'-O-methylguanosine-3'-phosphate
  modified_base 21: mod_base = OTHER; note = 2'-O-methyluridine-3'-phosphate
  modified_base 22: mod_base = OTHER; note = 2'-O-methyluridine-3'-phosphate
  modified_base 23: mod_base = OTHER; note = 2'-O-methylcytidine
tttcattcatgtgctcttggttc

SEQ ID NO: 4952 - RNA, 23 nt, synthetic construct
  source 1..23: mol_type = other RNA
  modified_base 1: mod_base = OTHER; note = 2'-O-methyluridine-3'-phosphate 5'-(E)-Vinylphosphonate
  modified_base 2: mod_base = OTHER; note = 2'-deoxy-2'-fluoroguanosine-3'-phosphate
  modified_base 3: mod_base = OTHER; note = 2'-O-methyluridine-3'-phosphate
  modified_base 4: mod_base = OTHER; note = 2'-O-methyluridine-3'-phosphate
  modified_base 5: mod_base = OTHER; note = 2'-O-methylcytidine-3'-phosphate
  modified_base 6: mod_base = OTHER; note = 2'-deoxy-2'-fluoroadenosine-3'-phosphate
  modified_base 7: mod_base = OTHER; note = 2'-O-methyluridine-3'-phosphate
  modified_base 8: mod_base = OTHER; note = 2'-O-methyluridine-3'-phosphate
  modified_base 9: mod_base = OTHER; note = 2'-O-methylcytidine-3'-phosphate
  modified_base 10: mod_base = OTHER; note = 2'-O-methyladenosine-3'-phosphate
  modified_base 11: mod_base = OTHER; note = 2'-O-methyluridine-3'-phosphate
  modified_base 12: mod_base = OTHER; note = 2'-O-methylguanosine-3'-phosphate
  modified_base 13: mod_base = OTHER; note = 2'-O-methyluridine-3'-phosphate
  modified_base 14: mod_base = OTHER; note = 2'-deoxy-2'-fluoroguanosine-3'-phosphate
  modified_base 15: mod_base = OTHER; note = 2'-O-methylcytidine-3'-phosphate
  modified_base 16: mod_base = OTHER; note = 2'-deoxy-2'-fluorouridine-3'-phosphate
  modified_base 17: mod_base = OTHER; note = 2'-O-methylcytidine-3'-phosphate
  modified_base 18: mod_base = OTHER; note = 2'-O-methyluridine-3'-phosphate
  modified_base 19: mod_base = OTHER; note = 2'-O-methyluridine-3'-phosphate
  modified_base 20: mod_base = OTHER; note = 2'-O-methylguanosine-3'-phosphate
  modified_base 21: mod_base = OTHER; note = 2'-O-methylguanosine-3'-phosphate
  modified_base 22: mod_base = OTHER; note = 2'-O-methyluridine-3'-phosphate
  modified_base 23: mod_base = OTHER; note = 2'-O-methyluridine
tgttcattcatgtgctcttggtt

SEQ ID NO: 4953 - RNA, 23 nt, synthetic construct
  source 1..23: mol_type = other RNA
  modified_base 1: mod_base = OTHER; note = 2'-O-methyluridine-3'-phosphate 5'-(E)-Vinylphosphonate
  modified_base 2: mod_base = OTHER; note = 2'-deoxy-2'-fluorouridine-3'-phosphate
  modified_base 3: mod_base = OTHER; note = 2'-O-methylguanosine-3'-phosphate
  modified_base 4: mod_base = OTHER; note = 2'-O-methyluridine-3'-phosphate
  modified_base 5: mod_base = OTHER; note = 2'-O-methyluridine-3'-phosphate
  modified_base 6: mod_base = OTHER; note = 2'-deoxy-2'-fluorocytidine-3'-phosphate
  modified_base 7: mod_base = OTHER; note = 2'-O-methyladenosine-3'-phosphate
  modified_base 8: mod_base = OTHER; note = 2'-O-methyluridine-3'-phosphate
  modified_base 9: mod_base = OTHER; note = 2'-O-methyluridine-3'-phosphate
  modified_base 10: mod_base = OTHER; note = 2'-O-methylcytidine-3'-phosphate
  modified_base 11: mod_base = OTHER; note = 2'-O-methyladenosine-3'-phosphate
  modified_base 12: mod_base = OTHER; note = 2'-O-methyluridine-3'-phosphate
  modified_base 13: mod_base = OTHER; note = 2'-O-methylguanosine-3'-phosphate
  modified_base 14: mod_base = OTHER; note = 2'-deoxy-2'-fluorouridine-3'-phosphate
  modified_base 15: mod_base = OTHER; note = 2'-O-methylguanosine-3'-phosphate
  modified_base 16: mod_base = OTHER; note = 2'-deoxy-2'-fluorocytidine-3'-phosphate
  modified_base 17: mod_base = OTHER; note = 2'-O-methyluridine-3'-phosphate
  modified_base 18: mod_base = OTHER; note = 2'-O-methylcytidine-3'-phosphate
  modified_base 19: mod_base = OTHER; note = 2'-O-methyluridine-3'-phosphate
  modified_base 20: mod_base = OTHER; note = 2'-O-methyluridine-3'-phosphate
  modified_base 21: mod_base = OTHER; note = 2'-O-methylguanosine-3'-phosphate
  modified_base 22: mod_base = OTHER; note = 2'-O-methylguanosine-3'-phosphate
  modified_base 23: mod_base = OTHER; note = 2'-O-methyluridine
ttgttcattcatgtgctcttggt

SEQ ID NO: 4954 - RNA, 23 nt, synthetic construct
  source 1..23: mol_type = other RNA
  modified_base 1: mod_base = OTHER; note = 2'-O-methyluridine-3'-phosphate 5'-(E)-Vinylphosphonate
  modified_base 2: mod_base = OTHER; note = 2'-deoxy-2'-fluorocytidine-3'-phosphate
  modified_base 3: mod_base = OTHER; note = 2'-O-methyluridine-3'-phosphate
  modified_base 4: mod_base = OTHER; note = 2'-O-methylguanosine-3'-phosphate
  modified_base 5: mod_base = OTHER; note = 2'-O-methyluridine-3'-phosphate
  modified_base 6: mod_base = OTHER; note = 2'-deoxy-2'-fluorouridine-3'-phosphate
  modified_base 7: mod_base = OTHER; note = 2'-O-methylcytidine-3'-phosphate
  modified_base 8: mod_base = OTHER; note = 2'-O-methyladenosine-3'-phosphate
  modified_base 9: mod_base = OTHER; note = 2'-O-methyluridine-3'-phosphate
  modified_base 10: mod_base = OTHER; note = 2'-O-methyluridine-3'-phosphate
  modified_base 11: mod_base = OTHER; note = 2'-O-methylcytidine-3'-phosphate
  modified_base 12: mod_base = OTHER; note = 2'-O-methyladenosine-3'-phosphate
  modified_base 13: mod_base = OTHER; note = 2'-O-methyluridine-3'-phosphate
  modified_base 14: mod_base = OTHER; note = 2'-deoxy-2'-fluoroguanosine-3'-phosphate
  modified_base 15: mod_base = OTHER; note = 2'-O-methyluridine-3'-phosphate
  modified_base 16: mod_base = OTHER; note = 2'-deoxy-2'-fluoroguanosine-3'-phosphate
  modified_base 17: mod_base = OTHER; note = 2'-O-methylcytidine-3'-phosphate
  modified_base 18: mod_base = OTHER; note = 2'-O-methyluridine-3'-phosphate
  modified_base 19: mod_base = OTHER; note = 2'-O-methylcytidine-3'-phosphate
  modified_base 20: mod_base = OTHER; note = 2'-O-methyluridine-3'-phosphate
  modified_base 21: mod_base = OTHER; note = 2'-O-methyluridine-3'-phosphate
  modified_base 22: mod_base = OTHER; note = 2'-O-methylguanosine-3'-phosphate
  modified_base 23: mod_base = OTHER; note = 2'-O-methylguanosine
tctgttcattcatgtgctcttgg

SEQ ID NO: 4955 - RNA, 23 nt, synthetic construct
  source 1..23: mol_type = other RNA
  modified_base 1: mod_base = OTHER; note = 2'-O-methyluridine-3'-phosphate 5'-(E)-Vinylphosphonate
  modified_base 2: mod_base = OTHER; note = 2'-deoxy-2'-fluoroadenosine-3'-phosphate
  modified_base 3: mod_base = OTHER; note = 2'-O-methyladenosine-3'-phosphate
  modified_base 4: mod_base = OTHER; note = 2'-O-methyluridine-3'-phosphate
  modified_base 5: mod_base = OTHER; note = 2'-O-methylguanosine-3'-phosphate
  modified_base 6: mod_base = OTHER; note = 2'-deoxy-2'-fluorouridine-3'-phosphate
  modified_base 7: mod_base = OTHER; note = 2'-O-methyluridine-3'-phosphate
  modified_base 8: mod_base = OTHER; note = 2'-O-methyluridine-3'-phosphate
  modified_base 9: mod_base = OTHER; note = 2'-O-methyluridine-3'-phosphate
  modified_base 10: mod_base = OTHER; note = 2'-O-methyluridine-3'-phosphate
  modified_base 11: mod_base = OTHER; note = 2'-O-methyladenosine-3'-phosphate
  modified_base 12: mod_base = OTHER; note = 2'-O-methylcytidine-3'-phosphate
  modified_base 13: mod_base = OTHER; note = 2'-O-methyladenosine-3'-phosphate
  modified_base 14: mod_base = OTHER; note = 2'-deoxy-2'-fluorouridine-3'-phosphate
  modified_base 15: mod_base = OTHER; note = 2'-O-methylcytidine-3'-phosphate
  modified_base 16: mod_base = OTHER; note = 2'-deoxy-2'-fluorouridine-3'-phosphate
  modified_base 17: mod_base = OTHER; note = 2'-O-methyluridine-3'-phosphate
  modified_base 18: mod_base = OTHER; note = 2'-O-methyluridine-3'-phosphate
  modified_base 19: mod_base = OTHER; note = 2'-O-methyluridine-3'-phosphate
  modified_base 20: mod_base = OTHER; note = 2'-O-methylcytidine-3'-phosphate
  modified_base 21: mod_base = OTHER; note = 2'-O-methylcytidine-3'-phosphate
  modified_base 22: mod_base = OTHER; note = 2'-O-methyluridine-3'-phosphate
  modified_base 23: mod_base = OTHER; note = 2'-O-methylguanosine
taatgtttttacatcttttcctg

SEQ ID NO: 4956 - RNA, 23 nt, synthetic construct
  source 1..23: mol_type = other RNA
  modified_base 1: mod_base = OTHER; note = 2'-O-methyluridine-3'-phosphate 5'-(E)-Vinylphosphonate
  modified_base 2: mod_base = OTHER; note = 2'-deoxy-2'-fluoroguanosine-3'-phosphate
  modified_base 3: mod_base = OTHER; note = 2'-O-methyluridine-3'-phosphate
  modified_base 4: mod_base = OTHER; note = 2'-O-methyluridine-3'-phosphate
  modified_base 5: mod_base = OTHER; note = 2'-O-methyluridine-3'-phosphate
  modified_base 6: mod_base = OTHER; note = 2'-deoxy-2'-fluorouridine-3'-phosphate
  modified_base 7: mod_base = OTHER; note = 2'-O-methylcytidine-3'-phosphate
  modified_base 8: mod_base = OTHER; note = 2'-O-methyladenosine-3'-phosphate
  modified_base 9: mod_base = OTHER; note = 2'-O-methyluridine-3'-phosphate
  modified_base 10: mod_base = OTHER; note = 2'-O-methylcytidine-3'-phosphate
  modified_base 11: mod_base = OTHER; note = 2'-O-methyluridine-3'-phosphate
  modified_base 12: mod_base = OTHER; note = 2'-O-methylcytidine-3'-phosphate
  modified_base 13: mod_base = OTHER; note = 2'-O-methyladenosine-3'-phosphate
  modified_base 14: mod_base = OTHER; note = 2'-deoxy-2'-fluoroguanosine-3'-phosphate
  modified_base 15: mod_base = OTHER; note = 2'-O-methyladenosine-3'-phosphate
  modified_base 16: mod_base = OTHER; note = 2'-deoxy-2'-fluoroadenosine-3'-phosphate
  modified_base 17: mod_base = OTHER; note = 2'-O-methyladenosine-3'-phosphate
  modified_base 18: mod_base = OTHER; note = 2'-O-methyladenosine-3'-phosphate
  modified_base 19: mod_base = OTHER; note = 2'-O-methyladenosine-3'-phosphate
  modified_base 20: mod_base = OTHER; note = 2'-O-methyladenosine-3'-phosphate
  modified_base 21: mod_base = OTHER; note = 2'-O-methyladenosine-3'-phosphate
  modified_base 22: mod_base = OTHER; note = 2'-O-methyluridine-3'-phosphate
  modified_base 23: mod_base = OTHER; note = 2'-O-methylguanosine
tgttttcatctcagaaaaaaatg

SEQ ID NO: 4957 - RNA, 23 nt, synthetic construct
  source 1..23: mol_type = other RNA
  modified_base 1: mod_base = OTHER; note = 2'-O-methyluridine-3'-phosphate 5'-(E)-Vinylphosphonate
  modified_base 2: mod_base = OTHER; note = 2'-deoxy-2'-fluorouridine-3'-phosphate
  modified_base 3: mod_base = OTHER; note = 2'-O-methyladenosine-3'-phosphate
  modified_base 4: mod_base = OTHER; note = 2'-O-methylguanosine-3'-phosphate
  modified_base 5: mod_base = OTHER; note = 2'-O-methylcytidine-3'-phosphate
  modified_base 6: mod_base = OTHER; note = 2'-deoxy-2'-fluoroadenosine-3'-phosphate
  modified_base 7: mod_base = OTHER; note = 2'-O-methyluridine-3'-phosphate
  modified_base 8: mod_base = OTHER; note = 2'-O-methylguanosine-3'-phosphate
  modified_base 9: mod_base = OTHER; note = 2'-O-methylcytidine-3'-phosphate
  modified_base 10: mod_base = OTHER; note = 2'-O-methyluridine-3'-phosphate
  modified_base 11: mod_base = OTHER; note = 2'-O-methylcytidine-3'-phosphate
  modified_base 12: mod_base = OTHER; note = 2'-O-methyluridine-3'-phosphate
  modified_base 13: mod_base = OTHER; note = 2'-O-methyladenosine-3'-phosphate
  modified_base 14: mod_base = OTHER; note = 2'-deoxy-2'-fluoroadenosine-3'-phosphate
  modified_base 15: mod_base = OTHER; note = 2'-O-methyluridine-3'-phosphate
  modified_base 16: mod_base = OTHER; note = 2'-deoxy-2'-fluorouridine-3'-phosphate
  modified_base 17: mod_base = OTHER; note = 2'-O-methyluridine-3'-phosphate
  modified_base 18: mod_base = OTHER; note = 2'-O-methylguanosine-3'-phosphate
  modified_base 19: mod_base = OTHER; note = 2'-O-methylcytidine-3'-phosphate
  modified_base 20: mod_base = OTHER; note = 2'-O-methyladenosine-3'-phosphate
  modified_base 21: mod_base = OTHER; note = 2'-O-methyluridine-3'-phosphate
  modified_base 22: mod_base = OTHER; note = 2'-O-methylguanosine-3'-phosphate
  modified_base 23: mod_base = OTHER; note = 2'-O-methyluridine
ttagcatgctctaatttgcatgt

SEQ ID NO: 4958 - RNA, 23 nt, synthetic construct
  source 1..23: mol_type = other RNA
  modified_base 1: mod_base = OTHER; note = 2'-O-methyluridine-3'-phosphate 5'-(E)-Vinylphosphonate
  modified_base 2: mod_base = OTHER; note = 2'-deoxy-2'-fluoroadenosine-3'-phosphate
  modified_base 3: mod_base = OTHER; note = 2'-O-methyluridine-3'-phosphate
  modified_base 4: mod_base = OTHER; note = 2'-O-methyladenosine-3'-phosphate
  modified_base 5: mod_base = OTHER; note = 2'-O-methylguanosine-3'-phosphate
  modified_base 6: mod_base = OTHER; note = 2'-deoxy-2'-fluorocytidine-3'-phosphate
  modified_base 7: mod_base = OTHER; note = 2'-O-methyladenosine-3'-phosphate
  modified_base 8: mod_base = OTHER; note = 2'-O-methyluridine-3'-phosphate
  modified_base 9: mod_base = OTHER; note = 2'-O-methylguanosine-3'-phosphate
  modified_base 10: mod_base = OTHER; note = 2'-O-methylcytidine-3'-phosphate
  modified_base 11: mod_base = OTHER; note = 2'-O-methyluridine-3'-phosphate
  modified_base 12: mod_base = OTHER; note = 2'-O-methylcytidine-3'-phosphate
  modified_base 13: mod_base = OTHER; note = 2'-O-methyluridine-3'-phosphate
  modified_base 14: mod_base = OTHER; note = 2'-deoxy-2'-fluoroadenosine-3'-phosphate
  modified_base 15: mod_base = OTHER; note = 2'-O-methyladenosine-3'-phosphate
  modified_base 16: mod_base = OTHER; note = 2'-deoxy-2'-fluorouridine-3'-phosphate
  modified_base 17: mod_base = OTHER; note = 2'-O-methyluridine-3'-phosphate
  modified_base 18: mod_base = OTHER; note = 2'-O-methyluridine-3'-phosphate
  modified_base 19: mod_base = OTHER; note = 2'-O-methylguanosine-3'-phosphate
  modified_base 20: mod_base = OTHER; note = 2'-O-methylcytidine-3'-phosphate
  modified_base 21: mod_base = OTHER; note = 2'-O-methyladenosine-3'-phosphate
  modified_base 22: mod_base = OTHER; note = 2'-O-methyluridine-3'-phosphate
  modified_base 23: mod_base = OTHER; note = 2'-O-methylguanosine
tatagcatgctctaatttgcatg

SEQ ID NO: 4959 - RNA, 23 nt, synthetic construct
  source 1..23: mol_type = other RNA
  modified_base 1: mod_base = OTHER; note = 2'-O-methyluridine-3'-phosphate 5'-(E)-Vinylphosphonate
  modified_base 2: mod_base = OTHER; note = 2'-deoxy-2'-fluoroadenosine-3'-phosphate
  modified_base 3: mod_base = OTHER; note = 2'-O-methyladenosine-3'-phosphate
  modified_base 4: mod_base = OTHER; note = 2'-O-methylguanosine-3'-phosphate
  modified_base 5: mod_base = OTHER; note = 2'-O-methyladenosine-3'-phosphate
  modified_base 6: mod_base = OTHER; note = 2'-deoxy-2'-fluorouridine-3'-phosphate
  modified_base 7: mod_base = OTHER; note = 2'-O-methyladenosine-3'-phosphate
  modified_base 8: mod_base = OTHER; note = 2'-O-methylguanosine-3'-phosphate
  modified_base 9: mod_base = OTHER; note = 2'-O-methylcytidine-3'-phosphate
  modified_base 10: mod_base = OTHER; note = 2'-O-methyladenosine-3'-phosphate
  modified_base 11: mod_base = OTHER; note = 2'-O-methyluridine-3'-phosphate
  modified_base 12: mod_base = OTHER; note = 2'-O-methylguanosine-3'-phosphate
  modified_base 13: mod_base = OTHER; note = 2'-O-methylcytidine-3'-phosphate
  modified_base 14: mod_base = OTHER; note = 2'-deoxy-2'-fluorouridine-3'-phosphate
  modified_base 15: mod_base = OTHER; note = 2'-O-methylcytidine-3'-phosphate
  modified_base 16: mod_base = OTHER; note = 2'-deoxy-2'-fluorouridine-3'-phosphate
  modified_base 17: mod_base = OTHER; note = 2'-O-methyladenosine-3'-phosphate
  modified_base 18: mod_base = OTHER; note = 2'-O-methyladenosine-3'-phosphate
  modified_base 19: mod_base = OTHER; note = 2'-O-methyluridine-3'-phosphate
  modified_base 20: mod_base = OTHER; note = 2'-O-methyluridine-3'-phosphate
  modified_base 21: mod_base = OTHER; note = 2'-O-methyluridine-3'-phosphate
  modified_base 22: mod_base = OTHER; note = 2'-O-methylguanosine-3'-phosphate
  modified_base 23: mod_base = OTHER; note = 2'-O-methylcytidine
taagatagcatgctctaatttgc

SEQ ID NO: 4960 - RNA, 23 nt, synthetic construct
  source 1..23: mol_type = other RNA
  modified_base 1: mod_base = OTHER; note = 2'-O-methyluridine-3'-phosphate 5'-(E)-Vinylphosphonate
  modified_base 2: mod_base = OTHER; note = 2'-deoxy-2'-fluoroadenosine-3'-phosphate
  modified_base 3: mod_base = OTHER; note = 2'-O-methylcytidine-3'-phosphate
  modified_base 4: mod_base = OTHER; note = 2'-O-methylcytidine-3'-phosphate
  modified_base 5: mod_base = OTHER; note = 2'-O-methyluridine-3'-phosphate
  modified_base 6: mod_base = OTHER; note = 2'-deoxy-2'-fluoroadenosine-3'-phosphate
  modified_base 7: mod_base = OTHER; note = 2'-O-methyladenosine-3'-phosphate
  modified_base 8: mod_base = OTHER; note = 2'-O-methyladenosine-3'-phosphate
  modified_base 9: mod_base = OTHER; note = 2'-O-methylguanosine-3'-phosphate
  modified_base 10: mod_base = OTHER; note = 2'-O-methyladenosine-3'-phosphate
  modified_base 11: mod_base = OTHER; note = 2'-O-methyluridine-3'-phosphate
  modified_base 12: mod_base = OTHER; note = 2'-O-methyladenosine-3'-phosphate
  modified_base 13: mod_base = OTHER; note = 2'-O-methylguanosine-3'-phosphate
  modified_base 14: mod_base = OTHER; note = 2'-deoxy-2'-fluorocytidine-3'-phosphate
  modified_base 15: mod_base = OTHER; note = 2'-O-methyladenosine-3'-phosphate
  modified_base 16: mod_base = OTHER; note = 2'-deoxy-2'-fluorouridine-3'-phosphate
  modified_base 17: mod_base = OTHER; note = 2'-O-methylguanosine-3'-phosphate
  modified_base 18: mod_base = OTHER; note = 2'-O-methylcytidine-3'-phosphate
  modified_base 19: mod_base = OTHER; note = 2'-O-methyluridine-3'-phosphate
  modified_base 20: mod_base = OTHER; note = 2'-O-methylcytidine-3'-phosphate
  modified_base 21: mod_base = OTHER; note = 2'-O-methyluridine-3'-phosphate
  modified_base 22: mod_base = OTHER; note = 2'-O-methyladenosine-3'-phosphate
  modified_base 23: mod_base = OTHER; note = 2'-O-methyladenosine
tacctaaagatagcatgctctaa

SEQ ID NO: 4961 - RNA, 23 nt, synthetic construct
  source 1..23: mol_type = other RNA
  modified_base 1: mod_base = OTHER; note = 2'-O-methyluridine-3'-phosphate 5'-(E)-Vinylphosphonate
  modified_base 2: mod_base = OTHER; note = 2'-deoxy-2'-fluoroadenosine-3'-phosphate
  modified_base 3: mod_base = OTHER; note = 2'-O-methyluridine-3'-phosphate
  modified_base 4: mod_base = OTHER; note = 2'-O-methylcytidine-3'-phosphate
  modified_base 5: mod_base = OTHER; note = 2'-O-methyladenosine-3'-phosphate
  modified_base 6: mod_base = OTHER; note = 2'-deoxy-2'-fluorocytidine-3'-phosphate
  modified_base 7: mod_base = OTHER; note = 2'-O-methylcytidine-3'-phosphate
  modified_base 8: mod_base = OTHER; note = 2'-O-methyluridine-3'-phosphate
  modified_base 9: mod_base = OTHER; note = 2'-O-methyladenosine-3'-phosphate
  modified_base 10: mod_base = OTHER; note = 2'-O-methyladenosine-3'-phosphate
  modified_base 11: mod_base = OTHER; note = 2'-O-methyladenosine-3'-phosphate
  modified_base 12: mod_base = OTHER; note = 2'-O-methylguanosine-3'-phosphate
  modified_base 13: mod_base = OTHER; note = 2'-O-methyladenosine-3'-phosphate
  modified_base 14: mod_base = OTHER; note = 2'-deoxy-2'-fluorouridine-3'-phosphate
  modified_base 15: mod_base = OTHER; note = 2'-O-methyladenosine-3'-phosphate
  modified_base 16: mod_base = OTHER; note = 2'-deoxy-2'-fluoroguanosine-3'-phosphate
  modified_base 17: mod_base = OTHER; note = 2'-O-methylcytidine-3'-phosphate
  modified_base 18: mod_base = OTHER; note = 2'-O-methyladenosine-3'-phosphate
  modified_base 19: mod_base = OTHER; note = 2'-O-methyluridine-3'-phosphate
  modified_base 20: mod_base = OTHER; note = 2'-O-methylguanosine-3'-phosphate
  modified_base 21: mod_base = OTHER; note = 2'-O-methylcytidine-3'-phosphate
  modified_base 22: mod_base = OTHER; note = 2'-O-methyluridine-3'-phosphate
  modified_base 23: mod_base = OTHER; note = 2'-O-methylcytidine
tatcacctaaagatagcatgctc

SEQ ID NO: 4962 - RNA, 23 nt, synthetic construct
  source 1..23: mol_type = other RNA
  modified_base 1: mod_base = OTHER; note = 2'-O-methyluridine-3'-phosphate 5'-(E)-Vinylphosphonate
  modified_base 2: mod_base = OTHER; note = 2'-deoxy-2'-fluorouridine-3'-phosphate
  modified_base 3: mod_base = OTHER; note = 2'-O-methyladenosine-3'-phosphate
  modified_base 4: mod_base = OTHER; note = 2'-O-methylguanosine-3'-phosphate
  modified_base 5: mod_base = OTHER; note = 2'-O-methyladenosine-3'-phosphate
  modified_base 6: mod_base = OTHER; note = 2'-deoxy-2'-fluorouridine-3'-phosphate
  modified_base 7: mod_base = OTHER; note = 2'-O-methyluridine-3'-phosphate
  modified_base 8: mod_base = OTHER; note = 2'-O-methylguanosine-3'-phosphate
  modified_base 9: mod_base = OTHER; note = 2'-O-methylcytidine-3'-phosphate
  modified_base 10: mod_base = OTHER; note = 2'-O-methyladenosine-3'-phosphate
  modified_base 11: mod_base = OTHER; note = 2'-O-methyluridine-3'-phosphate
  modified_base 12: mod_base = OTHER; note = 2'-O-methylcytidine-3'-phosphate
  modified_base 13: mod_base = OTHER; note = 2'-O-methyladenosine-3'-phosphate
  modified_base 14: mod_base = OTHER; note = 2'-deoxy-2'-fluorocytidine-3'-phosphate
  modified_base 15: mod_base = OTHER; note = 2'-O-methylcytidine-3'-phosphate
  modified_base 16: mod_base = OTHER; note = 2'-deoxy-2'-fluorouridine-3'-phosphate
  modified_base 17: mod_base = OTHER; note = 2'-O-methyladenosine-3'-phosphate
  modified_base 18: mod_base = OTHER; note = 2'-O-methyladenosine-3'-phosphate
  modified_base 19: mod_base = OTHER; note = 2'-O-methyladenosine-3'-phosphate
  modified_base 20: mod_base = OTHER; note = 2'-O-methylguanosine-3'-phosphate
  modified_base 21: mod_base = OTHER; note = 2'-O-methyladenosine-3'-phosphate
  modified_base 22: mod_base = OTHER; note = 2'-O-methyluridine-3'-phosphate
  modified_base 23: mod_base = OTHER; note = 2'-O-methyladenosine
ttagattgcatcacctaaagata

SEQ ID NO: 4963 - RNA, 23 nt, synthetic construct
  source 1..23: mol_type = other RNA
  modified_base 1: mod_base = OTHER; note = 2'-O-methyluridine-3'-phosphate 5'-(E)-Vinylphosphonate
  modified_base 2: mod_base = OTHER; note = 2'-deoxy-2'-fluorouridine-3'-phosphate
  modified_base 3: mod_base = OTHER; note = 2'-O-methyluridine-3'-phosphate
  modified_base 4: mod_base = OTHER; note = 2'-O-methyluridine-3'-phosphate
  modified_base 5: mod_base = OTHER; note = 2'-O-methyladenosine-3'-phosphate
  modified_base 6: mod_base = OTHER; note = 2'-deoxy-2'-fluoroadenosine-3'-phosphate
  modified_base 7: mod_base = OTHER; note = 2'-O-methyladenosine-3'-phosphate
  modified_base 8: mod_base = OTHER; note = 2'-O-methyladenosine-3'-phosphate
  modified_base 9: mod_base = OTHER; note = 2'-O-methyladenosine-3'-phosphate
  modified_base 10: mod_base = OTHER; note = 2'-O-methylguanosine-3'-phosphate
  modified_base 11: mod_base = OTHER; note = 2'-O-methyluridine-3'-phosphate
  modified_base 12: mod_base = OTHER; note = 2'-O-methylcytidine-3'-phosphate
  modified_base 13: mod_base = OTHER; note = 2'-O-methylcytidine-3'-phosphate
  modified_base 14: mod_base = OTHER; note = 2'-deoxy-2'-fluorouridine-3'-phosphate
  modified_base 15: mod_base = OTHER; note = 2'-O-methylguanosine-3'-phosphate
  modified_base 16: mod_base = OTHER; note = 2'-deoxy-2'-fluorocytidine-3'-phosphate
  modified_base 17: mod_base = OTHER; note = 2'-O-methyluridine-3'-phosphate
  modified_base 18: mod_base = OTHER; note = 2'-O-methyladenosine-3'-phosphate
  modified_base 19: mod_base = OTHER; note = 2'-O-methyladenosine-3'-phosphate
  modified_base 20: mod_base = OTHER; note = 2'-O-methylcytidine-3'-phosphate
  modified_base 21: mod_base = OTHER; note = 2'-O-methyluridine-3'-phosphate
  modified_base 22: mod_base = OTHER; note = 2'-O-methyluridine-3'-phosphate
  modified_base 23: mod_base = OTHER; note = 2'-O-methyladenosine
ttttaaaaagtcctgctaactta

SEQ ID NO: 4964 - RNA, 23 nt, synthetic construct
  source 1..23: mol_type = other RNA
  modified_base 1: mod_base = OTHER; note = 2'-O-methyluridine-3'-phosphate 5'-(E)-Vinylphosphonate
  modified_base 2: mod_base = OTHER; note = 2'-deoxy-2'-fluorouridine-3'-phosphate
  modified_base 3: mod_base = OTHER; note = 2'-O-methyluridine-3'-phosphate
  modified_base 4: mod_base = OTHER; note = 2'-O-methyluridine-3'-phosphate
  modified_base 5: mod_base = OTHER; note = 2'-O-methyluridine-3'-phosphate
  modified_base 6: mod_base = OTHER; note = 2'-deoxy-2'-fluoroadenosine-3'-phosphate
  modified_base 7: mod_base = OTHER; note = 2'-O-methyladenosine-3'-phosphate
  modified_base 8: mod_base = OTHER; note = 2'-O-methyladenosine-3'-phosphate
  modified_base 9: mod_base = OTHER; note = 2'-O-methyladenosine-3'-phosphate
  modified_base 10: mod_base = OTHER; note = 2'-O-methyladenosine-3'-phosphate
  modified_base 11: mod_base = OTHER; note = 2'-O-methylguanosine-3'-phosphate
  modified_base 12: mod_base = OTHER; note = 2'-O-methyluridine-3'-phosphate
  modified_base 13: mod_base = OTHER; note = 2'-O-methylcytidine-3'-phosphate
  modified_base 14: mod_base = OTHER; note = 2'-deoxy-2'-fluorocytidine-3'-phosphate
  modified_base 15: mod_base = OTHER; note = 2'-O-methyluridine-3'-phosphate
  modified_base 16: mod_base = OTHER; note = 2'-deoxy-2'-fluoroguanosine-3'-phosphate
  modified_base 17: mod_base = OTHER; note = 2'-O-methylcytidine-3'-phosphate
  modified_base 18: mod_base = OTHER; note = 2'-O-methyluridine-3'-phosphate
  modified_base 19: mod_base = OTHER; note = 2'-O-methyladenosine-3'-phosphate
  modified_base 20: mod_base = OTHER; note = 2'-O-methyladenosine-3'-phosphate
  modified_base 21: mod_base = OTHER; note = 2'-O-methylcytidine-3'-phosphate
  modified_base 22: mod_base = OTHER; note = 2'-O-methyluridine-3'-phosphate
  modified_base 23: mod_base = OTHER; note = 2'-O-methyluridine
tttttaaaaagtcctgctaactt

SEQ ID NO: 4965 - RNA, 23 nt, synthetic construct
  source 1..23: mol_type = other RNA
  modified_base 1: mod_base = OTHER; note = 2'-O-methyluridine-3'-phosphate 5'-(E)-Vinylphosphonate
  modified_base 2: mod_base = OTHER; note = 2'-deoxy-2'-fluorouridine-3'-phosphate
  modified_base 3: mod_base = OTHER; note = 2'-O-methyluridine-3'-phosphate
  modified_base 4: mod_base = OTHER; note = 2'-O-methyluridine-3'-phosphate
  modified_base 5: mod_base = OTHER; note = 2'-O-methyluridine-3'-phosphate
  modified_base 6: mod_base = OTHER; note = 2'-deoxy-2'-fluorouridine-3'-phosphate
  modified_base 7: mod_base = OTHER; note = 2'-O-methyladenosine-3'-phosphate
  modified_base 8: mod_base = OTHER; note = 2'-O-methyladenosine-3'-phosphate
  modified_base 9: mod_base = OTHER; note = 2'-O-methyladenosine-3'-phosphate
  modified_base 10: mod_base = OTHER; note = 2'-O-methyladenosine-3'-phosphate
  modified_base 11: mod_base = OTHER; note = 2'-O-methyladenosine-3'-phosphate
  modified_base 12: mod_base = OTHER; note = 2'-O-methylguanosine-3'-phosphate
  modified_base 13: mod_base = OTHER; note = 2'-O-methyluridine-3'-phosphate
  modified_base 14: mod_base = OTHER; note = 2'-deoxy-2'-fluorocytidine-3'-phosphate
  modified_base 15: mod_base = OTHER; note = 2'-O-methylcytidine-3'-phosphate
  modified_base 16: mod_base = OTHER; note = 2'-deoxy-2'-fluorouridine-3'-phosphate
  modified_base 17: mod_base = OTHER; note = 2'-O-methylguanosine-3'-phosphate
  modified_base 18: mod_base = OTHER; note = 2'-O-methylcytidine-3'-phosphate
  modified_base 19: mod_base = OTHER; note = 2'-O-methyluridine-3'-phosphate
  modified_base 20: mod_base = OTHER; note = 2'-O-methyladenosine-3'-phosphate
  modified_base 21: mod_base = OTHER; note = 2'-O-methyladenosine-3'-phosphate
  modified_base 22: mod_base = OTHER; note = 2'-O-methylcytidine-3'-phosphate
  modified_base 23: mod_base = OTHER; note = 2'-O-methyluridine
ttttttaaaaagtcctgctaact

SEQ ID NO: 4966 - RNA, 23 nt, synthetic construct
  source 1..23: mol_type = other RNA
  modified_base 1: mod_base = OTHER; note = 2'-O-methyluridine-3'-phosphate 5'-(E)-Vinylphosphonate
  modified_base 2: mod_base = OTHER; note = 2'-deoxy-2'-fluoroadenosine-3'-phosphate
  modified_base 3: mod_base = OTHER; note = 2'-O-methyluridine-3'-phosphate
  modified_base 4: mod_base = OTHER; note = 2'-O-methyluridine-3'-phosphate
  modified_base 5: mod_base = OTHER; note = 2'-O-methyluridine-3'-phosphate
  modified_base 6: mod_base = OTHER; note = 2'-deoxy-2'-fluorouridine-3'-phosphate
  modified_base 7: mod_base = OTHER; note = 2'-O-methyluridine-3'-phosphate
  modified_base 8: mod_base = OTHER; note = 2'-O-methyladenosine-3'-phosphate
  modified_base 9: mod_base = OTHER; note = 2'-O-methyladenosine-3'-phosphate
  modified_base 10: mod_base = OTHER; note = 2'-O-methyladenosine-3'-phosphate
  modified_base 11: mod_base = OTHER; note = 2'-O-methyladenosine-3'-phosphate
  modified_base 12: mod_base = OTHER; note = 2'-O-methyladenosine-3'-phosphate
  modified_base 13: mod_base = OTHER; note = 2'-O-methylguanosine-3'-phosphate
  modified_base 14: mod_base = OTHER; note = 2'-deoxy-2'-fluorouridine-3'-phosphate
  modified_base 15: mod_base = OTHER; note = 2'-O-methylcytidine-3'-phosphate
  modified_base 16: mod_base = OTHER; note = 2'-deoxy-2'-fluorocytidine-3'-phosphate
  modified_base 17: mod_base = OTHER; note = 2'-O-methyluridine-3'-phosphate
  modified_base 18: mod_base = OTHER; note = 2'-O-methylguanosine-3'-phosphate
  modified_base 19: mod_base = OTHER; note = 2'-O-methylcytidine-3'-phosphate
  modified_base 20: mod_base = OTHER; note = 2'-O-methyluridine-3'-phosphate
  modified_base 21: mod_base = OTHER; note = 2'-O-methyladenosine-3'-phosphate
  modified_base 22: mod_base = OTHER; note = 2'-O-methyladenosine-3'-phosphate
  modified_base 23: mod_base = OTHER; note = 2'-O-methylcytidine
tatttttaaaaagtcctgctaac

SEQ ID NO: 4967 - RNA, 23 nt, synthetic construct
  source 1..23: mol_type = other RNA
  modified_base 1: mod_base = OTHER; note = 2'-O-methyluridine-3'-phosphate 5'-(E)-Vinylphosphonate
  modified_base 2: mod_base = OTHER; note = 2'-deoxy-2'-fluorocytidine-3'-phosphate
  modified_base 3: mod_base = OTHER; note = 2'-O-methylguanosine-3'-phosphate
  modified_base 4: mod_base = OTHER; note = 2'-O-methyladenosine-3'-phosphate
  modified_base 5: mod_base = OTHER; note = 2'-O-methyluridine-3'-phosphate
  modified_base 6: mod_base = OTHER; note = 2'-deoxy-2'-fluoroadenosine-3'-phosphate
  modified_base 7: mod_base = OTHER; note = 2'-O-methyluridine-3'-phosphate
  modified_base 8: mod_base = OTHER; note = 2'-O-methyladenosine-3'-phosphate
  modified_base 9: mod_base = OTHER; note = 2'-O-methyluridine-3'-phosphate
  modified_base 10: mod_base = OTHER; note = 2'-O-methyluridine-3'-phosphate
  modified_base 11: mod_base = OTHER; note = 2'-O-methyladenosine-3'-phosphate
  modified_base 12: mod_base = OTHER; note = 2'-O-methyladenosine-3'-phosphate
  modified_base 13: mod_base = OTHER; note = 2'-O-methyladenosine-3'-phosphate
  modified_base 14: mod_base = OTHER; note = 2'-deoxy-2'-fluoroguanosine-3'-phosphate
  modified_base 15: mod_base = OTHER; note = 2'-O-methyluridine-3'-phosphate
  modified_base 16: mod_base = OTHER; note = 2'-deoxy-2'-fluorouridine-3'-phosphate
  modified_base 17: mod_base = OTHER; note = 2'-O-methyluridine-3'-phosphate
  modified_base 18: mod_base = OTHER; note = 2'-O-methyladenosine-3'-phosphate
  modified_base 19: mod_base = OTHER; note = 2'-O-methylguanosine-3'-phosphate
  modified_base 20: mod_base = OTHER; note = 2'-O-methyladenosine-3'-phosphate
  modified_base 21: mod_base = OTHER; note = 2'-O-methylguanosine-3'-phosphate
  modified_base 22: mod_base = OTHER; note = 2'-O-methylcytidine-3'-phosphate
  modified_base 23: mod_base = OTHER; note = 2'-O-methyladenosine
tcgatatattaaagtttagagca

SEQ ID NO: 4968 - RNA, 23 nt, synthetic construct
  source 1..23: mol_type = other RNA
  modified_base 1: mod_base = OTHER; note = 2'-O-methyluridine-3'-phosphate 5'-(E)-Vinylphosphonate
  modified_base 2: mod_base = OTHER; note = 2'-deoxy-2'-fluorouridine-3'-phosphate
  modified_base 3: mod_base = OTHER; note = 2'-O-methylcytidine-3'-phosphate
  modified_base 4: mod_base = OTHER; note = 2'-O-methylguanosine-3'-phosphate
  modified_base 5: mod_base = OTHER; note = 2'-O-methyladenosine-3'-phosphate
  modified_base 6: mod_base = OTHER; note = 2'-deoxy-2'-fluorouridine-3'-phosphate
  modified_base 7: mod_base = OTHER; note = 2'-O-methyladenosine-3'-phosphate
  modified_base 8: mod_base = OTHER; note = 2'-O-methyluridine-3'-phosphate
  modified_base 9: mod_base = OTHER; note = 2'-O-methyladenosine-3'-phosphate
  modified_base 10: mod_base = OTHER; note = 2'-O-methyluridine-3'-phosphate
  modified_base 11: mod_base = OTHER; note = 2'-O-methyluridine-3'-phosphate
  modified_base 12: mod_base = OTHER; note = 2'-O-methyladenosine-3'-phosphate
  modified_base 13: mod_base = OTHER; note = 2'-O-methyladenosine-3'-phosphate
  modified_base 14: mod_base = OTHER; note = 2'-deoxy-2'-fluoroadenosine-3'-phosphate
  modified_base 15: mod_base = OTHER; note = 2'-O-methylguanosine-3'-phosphate
  modified_base 16: mod_base = OTHER; note = 2'-deoxy-2'-fluorouridine-3'-phosphate
  modified_base 17: mod_base = OTHER; note = 2'-O-methyluridine-3'-phosphate
  modified_base 18: mod_base = OTHER; note = 2'-O-methyluridine-3'-phosphate
  modified_base 19: mod_base = OTHER; note = 2'-O-methyladenosine-3'-phosphate
  modified_base 20: mod_base = OTHER; note = 2'-O-methylguanosine-3'-phosphate
  modified_base 21: mod_base = OTHER; note = 2'-O-methyladenosine-3'-phosphate
  modified_base 22: mod_base = OTHER; note = 2'-O-methylguanosine-3'-phosphate
  modified_base 23: mod_base = OTHER; note = 2'-O-methylcytidine
ttcgatatattaaagtttagagc

SEQ ID NO: 4969 - RNA, 23 nt, synthetic construct
  source 1..23: mol_type = other RNA
  modified_base 1: mod_base = OTHER; note = 2'-O-methyluridine-3'-phosphate 5'-(E)-Vinylphosphonate
  modified_base 2: mod_base = OTHER; note = 2'-deoxy-2'-fluorocytidine-3'-phosphate
  modified_base 3: mod_base = OTHER; note = 2'-O-methylguanosine-3'-phosphate
  modified_base 4: mod_base = OTHER; note = 2'-O-methyluridine-3'-phosphate
  modified_base 5: mod_base = OTHER; note = 2'-O-methyluridine-3'-phosphate
  modified_base 6: mod_base = OTHER; note = 2'-deoxy-2'-fluorocytidine-3'-phosphate
  modified_base 7: mod_base = OTHER; note = 2'-O-methylguanosine-3'-phosphate
  modified_base 8: mod_base = OTHER; note = 2'-O-methyladenosine-3'-phosphate
  modified_base 9: mod_base = OTHER; note = 2'-O-methyluridine-3'-phosphate
  modified_base 10: mod_base = OTHER; note = 2'-O-methyladenosine-3'-phosphate
  modified_base 11: mod_base = OTHER; note = 2'-O-methyluridine-3'-phosphate
  modified_base 12: mod_base = OTHER; note = 2'-O-methyladenosine-3'-phosphate
  modified_base 13: mod_base = OTHER; note = 2'-O-methyluridine-3'-phosphate
  modified_base 14: mod_base = OTHER; note = 2'-deoxy-2'-fluorouridine-3'-phosphate
  modified_base 15: mod_base = OTHER; note = 2'-O-methyladenosine-3'-phosphate
  modified_base 16: mod_base = OTHER; note = 2'-deoxy-2'-fluoroadenosine-3'-phosphate
  modified_base 17: mod_base = OTHER; note = 2'-O-methyladenosine-3'-phosphate
  modified_base 18: mod_base = OTHER; note = 2'-O-methylguanosine-3'-phosphate
  modified_base 19: mod_base = OTHER; note = 2'-O-methyluridine-3'-phosphate
  modified_base 20: mod_base = OTHER; note = 2'-O-methyluridine-3'-phosphate
  modified_base 21: mod_base = OTHER; note = 2'-O-methyluridine-3'-phosphate
  modified_base 22: mod_base = OTHER; note = 2'-O-methyladenosine-3'-phosphate
  modified_base 23: mod_base = OTHER; note = 2'-O-methylguanosine
tcgttcgatatattaaagtttag

SEQ ID NO: 4970 - RNA, 23 nt, synthetic construct
  source 1..23: mol_type = other RNA
  modified_base 1: mod_base = OTHER; note = 2'-O-methyluridine-3'-phosphate 5'-(E)-Vinylphosphonate
  modified_base 2: mod_base = OTHER; note = 2'-deoxy-2'-fluorocytidine-3'-phosphate
  modified_base 3: mod_base = OTHER; note = 2'-O-methyladenosine-3'-phosphate
  modified_base 4: mod_base = OTHER; note = 2'-O-methylcytidine-3'-phosphate
  modified_base 5: mod_base = OTHER; note = 2'-O-methylguanosine-3'-phosphate
  modified_base 6: mod_base = OTHER; note = 2'-deoxy-2'-fluorouridine-3'-phosphate
  modified_base 7: mod_base = OTHER; note = 2'-O-methyluridine-3'-phosphate
  modified_base 8: mod_base = OTHER; note = 2'-O-methylcytidine-3'-phosphate
  modified_base 9: mod_base = OTHER; note = 2'-O-methylguanosine-3'-phosphate
  modified_base 10: mod_base = OTHER; note = 2'-O-methyladenosine-3'-phosphate
  modified_base 11: mod_base = OTHER; note = 2'-O-methyluridine-3'-phosphate
  modified_base 12: mod_base = OTHER; note = 2'-O-methyladenosine-3'-phosphate
  modified_base 13: mod_base = OTHER; note = 2'-O-methyluridine-3'-phosphate
  modified_base 14: mod_base = OTHER; note = 2'-deoxy-2'-fluoroadenosine-3'-phosphate
  modified_base 15: mod_base = OTHER; note = 2'-O-methyluridine-3'-phosphate
  modified_base 16: mod_base = OTHER; note = 2'-deoxy-2'-fluorouridine-3'-phosphate
  modified_base 17: mod_base = OTHER; note = 2'-O-methyladenosine-3'-phosphate
  modified_base 18: mod_base = OTHER; note = 2'-O-methyladenosine-3'-phosphate
  modified_base 19: mod_base = OTHER; note = 2'-O-methyladenosine-3'-phosphate
  modified_base 20: mod_base = OTHER; note = 2'-O-methylguanosine-3'-phosphate
  modified_base 21: mod_base = OTHER; note = 2'-O-methyluridine-3'-phosphate
  modified_base 22: mod_base = OTHER; note = 2'-O-methyluridine-3'-phosphate
  modified_base 23: mod_base = OTHER; note = 2'-O-methyluridine
tcacgttcgatatattaaagttt

SEQ ID NO: 4971 - RNA, 23 nt, synthetic construct
  source 1..23: mol_type = other RNA
  modified_base 1: mod_base = OTHER; note = 2'-O-methyluridine-3'-phosphate 5'-(E)-Vinylphosphonate
  modified_base 2: mod_base = OTHER; note = 2'-deoxy-2'-fluorouridine-3'-phosphate
  modified_base 3: mod_base = OTHER; note = 2'-O-methylcytidine-3'-phosphate
  modified_base 4: mod_base = OTHER; note = 2'-O-methyladenosine-3'-phosphate
  modified_base 5: mod_base = OTHER; note = 2'-O-methylcytidine-3'-phosphate
  modified_base 6: mod_base = OTHER; note = 2'-deoxy-2'-fluoroguanosine-3'-phosphate
  modified_base 7: mod_base = OTHER; note = 2'-O-methyluridine-3'-phosphate
  modified_base 8: mod_base = OTHER; note = 2'-O-methyluridine-3'-phosphate
  modified_base 9: mod_base = OTHER; note = 2'-O-methylcytidine-3'-phosphate
  modified_base 10: mod_base = OTHER; note = 2'-O-methylguanosine-3'-phosphate
  modified_base 11: mod_base = OTHER; note = 2'-O-methyladenosine-3'-phosphate
  modified_base 12: mod_base = OTHER; note = 2'-O-methyluridine-3'-phosphate
  modified_base 13: mod_base = OTHER; note = 2'-O-methyladenosine-3'-phosphate
  modified_base 14: mod_base = OTHER; note = 2'-deoxy-2'-fluorouridine-3'-phosphate
  modified_base 15: mod_base = OTHER; note = 2'-O-methyladenosine-3'-phosphate
  modified_base 16: mod_base = OTHER; note = 2'-deoxy-2'-fluorouridine-3'-phosphate
  modified_base 17: mod_base = OTHER; note = 2'-O-methyluridine-3'-phosphate
  modified_base 18: mod_base = OTHER; note = 2'-O-methyladenosine-3'-phosphate
  modified_base 19: mod_base = OTHER; note = 2'-O-methyladenosine-3'-phosphate
  modified_base 20: mod_base = OTHER; note = 2'-O-methyladenosine-3'-phosphate
  modified_base 21: mod_base = OTHER; note = 2'-O-methylguanosine-3'-phosphate
  modified_base 22: mod_base = OTHER; note = 2'-O-methyluridine-3'-phosphate
  modified_base 23: mod_base = OTHER; note = 2'-O-methyluridine
ttcacgttcgatatattaaagtt

SEQ ID NO: 4972 - RNA, 23 nt, synthetic construct
  source 1..23: mol_type = other RNA
  modified_base 1: mod_base = OTHER; note = 2'-O-methyluridine-3'-phosphate 5'-(E)-Vinylphosphonate
  modified_base 2: mod_base = OTHER; note = 2'-deoxy-2'-fluorocytidine-3'-phosphate
  modified_base 3: mod_base = OTHER; note = 2'-O-methyluridine-3'-phosphate
  modified_base 4: mod_base = OTHER; note = 2'-O-methylcytidine-3'-phosphate
  modified_base 5: mod_base = OTHER; note = 2'-O-methyladenosine-3'-phosphate
  modified_base 6: mod_base = OTHER; note = 2'-deoxy-2'-fluorocytidine-3'-phosphate
  modified_base 7: mod_base = OTHER; note = 2'-O-methylguanosine-3'-phosphate
  modified_base 8: mod_base = OTHER; note = 2'-O-methyluridine-3'-phosphate
  modified_base 9: mod_base = OTHER; note = 2'-O-methyluridine-3'-phosphate
  modified_base 10: mod_base = OTHER; note = 2'-O-methylcytidine-3'-phosphate
  modified_base 11: mod_base = OTHER; note = 2'-O-methylguanosine-3'-phosphate
  modified_base 12: mod_base = OTHER; note = 2'-O-methyladenosine-3'-phosphate
  modified_base 13: mod_base = OTHER; note = 2'-O-methyluridine-3'-phosphate
  modified_base 14: mod_base = OTHER; note = 2'-deoxy-2'-fluoroadenosine-3'-phosphate
  modified_base 15: mod_base = OTHER; note = 2'-O-methyluridine-3'-phosphate
  modified_base 16: mod_base = OTHER; note = 2'-deoxy-2'-fluoroadenosine-3'-phosphate
  modified_base 17: mod_base = OTHER; note = 2'-O-methyluridine-3'-phosphate
  modified_base 18: mod_base = OTHER; note = 2'-O-methyluridine-3'-phosphate
  modified_base 19: mod_base = OTHER; note = 2'-O-methyladenosine-3'-phosphate
  modified_base 20: mod_base = OTHER; note = 2'-O-methyladenosine-3'-phosphate
  modified_base 21: mod_base = OTHER; note = 2'-O-methyladenosine-3'-phosphate
  modified_base 22: mod_base = OTHER; note = 2'-O-methylguanosine-3'-phosphate
  modified_base 23: mod_base = OTHER; note = 2'-O-methyluridine
tctcacgttcgatatattaaagt

SEQ ID NO: 4973 - RNA, 23 nt, synthetic construct
  source 1..23: mol_type = other RNA
  modified_base 1: mod_base = OTHER; note = 2'-O-methyluridine-3'-phosphate 5'-(E)-Vinylphosphonate
  modified_base 2: mod_base = OTHER; note = 2'-deoxy-2'-fluorouridine-3'-phosphate
  modified_base 3: mod_base = OTHER; note = 2'-O-methylcytidine-3'-phosphate
  modified_base 4: mod_base = OTHER; note = 2'-O-methyluridine-3'-phosphate
  modified_base 5: mod_base = OTHER; note = 2'-O-methylcytidine-3'-phosphate
  modified_base 6: mod_base = OTHER; note = 2'-deoxy-2'-fluoroadenosine-3'-phosphate
  modified_base 7: mod_base = OTHER; note = 2'-O-methylcytidine-3'-phosphate
  modified_base 8: mod_base = OTHER; note = 2'-O-methylguanosine-3'-phosphate
  modified_base 9: mod_base = OTHER; note = 2'-O-methyluridine-3'-phosphate
  modified_base 10: mod_base = OTHER; note = 2'-O-methyluridine-3'-phosphate
  modified_base 11: mod_base = OTHER; note = 2'-O-methylcytidine-3'-phosphate
  modified_base 12: mod_base = OTHER; note = 2'-O-methylguanosine-3'-phosphate
  modified_base 13: mod_base = OTHER; note = 2'-O-methyladenosine-3'-phosphate
  modified_base 14: mod_base = OTHER; note = 2'-deoxy-2'-fluorouridine-3'-phosphate
  modified_base 15: mod_base = OTHER; note = 2'-O-methyladenosine-3'-phosphate
  modified_base 16: mod_base = OTHER; note = 2'-deoxy-2'-fluorouridine-3'-phosphate
  modified_base 17: mod_base = OTHER; note = 2'-O-methyladenosine-3'-phosphate
  modified_base 18: mod_base = OTHER; note = 2'-O-methyluridine-3'-phosphate
  modified_base 19: mod_base = OTHER; note = 2'-O-methyluridine-3'-phosphate
  modified_base 20: mod_base = OTHER; note = 2'-O-methyladenosine-3'-phosphate
  modified_base 21: mod_base = OTHER; note = 2'-O-methyladenosine-3'-phosphate
  modified_base 22: mod_base = OTHER; note = 2'-O-methyladenosine-3'-phosphate
  modified_base 23: mod_base = OTHER; note = 2'-O-methylguanosine
ttctcacgttcgatatattaaag

SEQ ID NO: 4974 - RNA, 23 nt, synthetic construct
  source 1..23: mol_type = other RNA
  modified_base 1: mod_base = OTHER; note = 2'-O-methyluridine-3'-phosphate 5'-(E)-Vinylphosphonate
  modified_base 2: mod_base = OTHER; note = 2'-deoxy-2'-fluorocytidine-3'-phosphate
  modified_base 3: mod_base = OTHER; note = 2'-O-methyluridine-3'-phosphate
  modified_base 4: mod_base = OTHER; note = 2'-O-methylcytidine-3'-phosphate
  modified_base 5: mod_base = OTHER; note = 2'-O-methyluridine-3'-phosphate
  modified_base 6: mod_base = OTHER; note = 2'-deoxy-2'-fluorocytidine-3'-phosphate
  modified_base 7: mod_base = OTHER; note = 2'-O-methyladenosine-3'-phosphate
  modified_base 8: mod_base = OTHER; note = 2'-O-methylcytidine-3'-phosphate
  modified_base 9: mod_base = OTHER; note = 2'-O-methylguanosine-3'-phosphate
  modified_base 10: mod_base = OTHER; note = 2'-O-methyluridine-3'-phosphate
  modified_base 11: mod_base = OTHER; note = 2'-O-methyluridine-3'-phosphate
  modified_base 12: mod_base = OTHER; note = 2'-O-methylcytidine-3'-phosphate
  modified_base 13: mod_base = OTHER; note = 2'-O-methylguanosine-3'-phosphate
  modified_base 14: mod_base = OTHER; note = 2'-deoxy-2'-fluoroadenosine-3'-phosphate
  modified_base 15: mod_base = OTHER; note = 2'-O-methyluridine-3'-phosphate
  modified_base 16: mod_base = OTHER; note = 2'-deoxy-2'-fluoroadenosine-3'-phosphate
  modified_base 17: mod_base = OTHER; note = 2'-O-methyluridine-3'-phosphate
  modified_base 18: mod_base = OTHER; note = 2'-O-methyladenosine-3'-phosphate
  modified_base 19: mod_base = OTHER; note = 2'-O-methyluridine-3'-phosphate
  modified_base 20: mod_base = OTHER; note = 2'-O-methyluridine-3'-phosphate
  modified_base 21: mod_base = OTHER; note = 2'-O-methyladenosine-3'-phosphate
  modified_base 22: mod_base = OTHER; note = 2'-O-methyladenosine-3'-phosphate
  modified_base 23: mod_base = OTHER; note = 2'-O-methyladenosine
tctctcacgttcgatatattaaa

SEQ ID NO: 4975 - RNA, 23 nt, synthetic construct
  source 1..23: mol_type = other RNA
  modified_base 1: mod_base = OTHER; note = 2'-O-methyluridine-3'-phosphate 5'-(E)-Vinylphosphonate
  modified_base 2: mod_base = OTHER; note = 2'-deoxy-2'-fluoroadenosine-3'-phosphate
  modified_base 3: mod_base = OTHER; note = 2'-O-methylcytidine-3'-phosphate
  modified_base 4: mod_base = OTHER; note = 2'-O-methyluridine-3'-phosphate
  modified_base 5: mod_base = OTHER; note = 2'-O-methylcytidine-3'-phosphate
  modified_base 6: mod_base = OTHER; note = 2'-deoxy-2'-fluorouridine-3'-phosphate
  modified_base 7: mod_base = OTHER; note = 2'-O-methylcytidine-3'-phosphate
  modified_base 8: mod_base = OTHER; note = 2'-O-methyladenosine-3'-phosphate
  modified_base 9: mod_base = OTHER; note = 2'-O-methylcytidine-3'-phosphate
  modified_base 10: mod_base = OTHER; note = 2'-O-methylguanosine-3'-phosphate
  modified_base 11: mod_base = OTHER; note = 2'-O-methyluridine-3'-phosphate
  modified_base 12: mod_base = OTHER; note = 2'-O-methyluridine-3'-phosphate
  modified_base 13: mod_base = OTHER; note = 2'-O-methylcytidine-3'-phosphate
  modified_base 14: mod_base = OTHER; note = 2'-deoxy-2'-fluoroguanosine-3'-phosphate
  modified_base 15: mod_base = OTHER; note = 2'-O-methyladenosine-3'-phosphate
  modified_base 16: mod_base = OTHER; note = 2'-deoxy-2'-fluorouridine-3'-phosphate
  modified_base 17: mod_base = OTHER; note = 2'-O-methyladenosine-3'-phosphate
  modified_base 18: mod_base = OTHER; note = 2'-O-methyluridine-3'-phosphate
  modified_base 19: mod_base = OTHER; note = 2'-O-methyladenosine-3'-phosphate
  modified_base 20: mod_base = OTHER; note = 2'-O-methyluridine-3'-phosphate
  modified_base 21: mod_base = OTHER; note = 2'-O-methyluridine-3'-phosphate
  modified_base 22: mod_base = OTHER; note = 2'-O-methyladenosine-3'-phosphate
  modified_base 23: mod_base = OTHER; note = 2'-O-methyladenosine
tactctcacgttcgatatattaa

SEQ ID NO: 4976 - RNA, 23 nt, synthetic construct
  source 1..23: mol_type = other RNA
  modified_base 1: mod_base = OTHER; note = 2'-O-methyluridine-3'-phosphate 5'-(E)-Vinylphosphonate
  modified_base 2: mod_base = OTHER; note = 2'-deoxy-2'-fluorocytidine-3'-phosphate
  modified_base 3: mod_base = OTHER; note = 2'-O-methyladenosine-3'-phosphate
  modified_base 4: mod_base = OTHER; note = 2'-O-methylcytidine-3'-phosphate
  modified_base 5: mod_base = OTHER; note = 2'-O-methyluridine-3'-phosphate
  modified_base 6: mod_base = OTHER; note = 2'-deoxy-2'-fluorocytidine-3'-phosphate
  modified_base 7: mod_base = OTHER; note = 2'-O-methyluridine-3'-phosphate
  modified_base 8: mod_base = OTHER; note = 2'-O-methylcytidine-3'-phosphate
  modified_base 9: mod_base = OTHER; note = 2'-O-methyladenosine-3'-phosphate
  modified_base 10: mod_base = OTHER; note = 2'-O-methylcytidine-3'-phosphate
  modified_base 11: mod_base = OTHER; note = 2'-O-methylguanosine-3'-phosphate
  modified_base 12: mod_base = OTHER; note = 2'-O-methyluridine-3'-phosphate
  modified_base 13: mod_base = OTHER; note = 2'-O-methyluridine-3'-phosphate
  modified_base 14: mod_base = OTHER; note = 2'-deoxy-2'-fluorocytidine-3'-phosphate
  modified_base 15: mod_base = OTHER; note = 2'-O-methylguanosine-3'-phosphate
  modified_base 16: mod_base = OTHER; note = 2'-deoxy-2'-fluoroadenosine-3'-phosphate
  modified_base 17: mod_base = OTHER; note = 2'-O-methyluridine-3'-phosphate
  modified_base 18: mod_base = OTHER; note = 2'-O-methyladenosine-3'-phosphate
  modified_base 19: mod_base = OTHER; note = 2'-O-methyluridine-3'-phosphate
  modified_base 20: mod_base = OTHER; note = 2'-O-methyladenosine-3'-phosphate
  modified_base 21: mod_base = OTHER; note = 2'-O-methyluridine-3'-phosphate
  modified_base 22: mod_base = OTHER; note = 2'-O-methyluridine-3'-phosphate
  modified_base 23: mod_base = OTHER; note = 2'-O-methyladenosine
tcactctcacgttcgatatatta

SEQ ID NO: 4977 - RNA, 23 nt, synthetic construct
  source 1..23: mol_type = other RNA
  modified_base 1: mod_base = OTHER; note = 2'-O-methyluridine-3'-phosphate 5'-(E)-Vinylphosphonate
  modified_base 2: mod_base = OTHER; note = 2'-deoxy-2'-fluorocytidine-3'-phosphate
  modified_base 3: mod_base = OTHER; note = 2'-O-methylcytidine-3'-phosphate
  modified_base 4: mod_base = OTHER; note = 2'-O-methyladenosine-3'-phosphate
  modified_base 5: mod_base = OTHER; note = 2'-O-methylcytidine-3'-phosphate
  modified_base 6: mod_base = OTHER; note = 2'-deoxy-2'-fluorouridine-3'-phosphate
  modified_base 7: mod_base = OTHER; note = 2'-O-methylcytidine-3'-phosphate
  modified_base 8: mod_base = OTHER; note = 2'-O-methyluridine-3'-phosphate
  modified_base 9: mod_base = OTHER; note = 2'-O-methylcytidine-3'-phosphate
  modified_base 10: mod_base = OTHER; note = 2'-O-methyladenosine-3'-phosphate
  modified_base 11: mod_base = OTHER; note = 2'-O-methylcytidine-3'-phosphate
  modified_base 12: mod_base = OTHER; note = 2'-O-methylguanosine-3'-phosphate
  modified_base 13: mod_base = OTHER; note = 2'-O-methyluridine-3'-phosphate
  modified_base 14: mod_base = OTHER; note = 2'-deoxy-2'-fluorouridine-3'-phosphate
  modified_base 15: mod_base = OTHER; note = 2'-O-methylcytidine-3'-phosphate
  modified_base 16: mod_base = OTHER; note = 2'-deoxy-2'-fluoroguanosine-3'-phosphate
  modified_base 17: mod_base = OTHER; note = 2'-O-methyladenosine-3'-phosphate
  modified_base 18: mod_base = OTHER; note = 2'-O-methyluridine-3'-phosphate
  modified_base 19: mod_base = OTHER; note = 2'-O-methyladenosine-3'-phosphate
  modified_base 20: mod_base = OTHER; note = 2'-O-methyluridine-3'-phosphate
  modified_base 21: mod_base = OTHER; note = 2'-O-methyladenosine-3'-phosphate
  modified_base 22: mod_base = OTHER; note = 2'-O-methyluridine-3'-phosphate
  modified_base 23: mod_base = OTHER; note = 2'-O-methyluridine
tccactctcacgttcgatatatt

SEQ ID NO: 4978 - RNA, 23 nt, synthetic construct
  source 1..23: mol_type = other RNA
  modified_base 1: mod_base = OTHER; note = 2'-O-methyluridine-3'-phosphate 5'-(E)-Vinylphosphonate
  modified_base 2: mod_base = OTHER; note = 2'-deoxy-2'-fluoroadenosine-3'-phosphate
  modified_base 3: mod_base = OTHER; note = 2'-O-methylguanosine-3'-phosphate
  modified_base 4: mod_base = OTHER; note = 2'-O-methyluridine-3'-phosphate
  modified_base 5: mod_base = OTHER; note = 2'-O-methyladenosine-3'-phosphate
  modified_base 6: mod_base = OTHER; note = 2'-deoxy-2'-fluoroguanosine-3'-phosphate
  modified_base 7: mod_base = OTHER; note = 2'-O-methyluridine-3'-phosphate
  modified_base 8: mod_base = OTHER; note = 2'-O-methylguanosine-3'-phosphate
  modified_base 9: mod_base = OTHER; note = 2'-O-methylguanosine-3'-phosphate
  modified_base 10: mod_base = OTHER; note = 2'-O-methyladenosine-3'-phosphate
  modified_base 11: mod_base = OTHER; note = 2'-O-methyluridine-3'-phosphate
  modified_base 12: mod_base = OTHER; note = 2'-O-methyluridine-3'-phosphate
  modified_base 13: mod_base = OTHER; note = 2'-O-methyladenosine-3'-phosphate
  modified_base 14: mod_base = OTHER; note = 2'-deoxy-2'-fluorouridine-3'-phosphate
  modified_base 15: mod_base = OTHER; note = 2'-O-methylguanosine-3'-phosphate
  modified_base 16: mod_base = OTHER; note = 2'-deoxy-2'-fluoroadenosine-3'-phosphate
  modified_base 17: mod_base = OTHER; note = 2'-O-methyladenosine-3'-phosphate
  modified_base 18: mod_base = OTHER; note = 2'-O-methylguanosine-3'-phosphate
  modified_base 19: mod_base = OTHER; note = 2'-O-methyladenosine-3'-phosphate
  modified_base 20: mod_base = OTHER; note = 2'-O-methyladenosine-3'-phosphate
  modified_base 21: mod_base = OTHER; note = 2'-O-methylcytidine-3'-phosphate
  modified_base 22: mod_base = OTHER; note = 2'-O-methyladenosine-3'-phosphate
  modified_base 23: mod_base = OTHER; note = 2'-O-methylguanosine
tagtagtggattatgaagaacag

SEQ ID NO: 4979 - RNA, 23 nt, synthetic construct
  source 1..23: mol_type = other RNA
  modified_base 1: mod_base = OTHER; note = 2'-O-methyluridine-3'-phosphate 5'-(E)-Vinylphosphonate
  modified_base 2: mod_base = OTHER; note = 2'-deoxy-2'-fluoroguanosine-3'-phosphate
  modified_base 3: mod_base = OTHER; note = 2'-O-methylguanosine-3'-phosphate
  modified_base 4: mod_base = OTHER; note = 2'-O-methyladenosine-3'-phosphate
  modified_base 5: mod_base = OTHER; note = 2'-O-methyladenosine-3'-phosphate
  modified_base 6: mod_base = OTHER; note = 2'-deoxy-2'-fluorocytidine-3'-phosphate
  modified_base 7: mod_base = OTHER; note = 2'-O-methyladenosine-3'-phosphate
  modified_base 8: mod_base = OTHER; note = 2'-O-methyladenosine-3'-phosphate
  modified_base 9: mod_base = OTHER; note = 2'-O-methylguanosine-3'-phosphate
  modified_base 10: mod_base = OTHER; note = 2'-O-methyluridine-3'-phosphate
  modified_base 11: mod_base = OTHER; note = 2'-O-methyluridine-3'-phosphate
  modified_base 12: mod_base = OTHER; note = 2'-O-methyluridine-3'-phosphate
  modified_base 13: mod_base = OTHER; note = 2'-O-methyladenosine-3'-phosphate
  modified_base 14: mod_base = OTHER; note = 2'-deoxy-2'-fluoroguanosine-3'-phosphate
  modified_base 15: mod_base = OTHER; note = 2'-O-methyluridine-3'-phosphate
  modified_base 16: mod_base = OTHER; note = 2'-deoxy-2'-fluoroguanosine-3'-phosphate
  modified_base 17: mod_base = OTHER; note = 2'-O-methylguanosine-3'-phosphate
  modified_base 18: mod_base = OTHER; note = 2'-O-methyluridine-3'-phosphate
  modified_base 19: mod_base = OTHER; note = 2'-O-methyluridine-3'-phosphate
  modified_base 20: mod_base = OTHER; note = 2'-O-methylcytidine-3'-phosphate
  modified_base 21: mod_base = OTHER; note = 2'-O-methyladenosine-3'-phosphate
  modified_base 22: mod_base = OTHER; note = 2'-O-methylguanosine-3'-phosphate
  modified_base 23: mod_base = OTHER; note = 2'-O-methylguanosine
tggaacaagtttagtggttcagg

SEQ ID NO: 4980 - RNA, 23 nt, synthetic construct
  source 1..23: mol_type = other RNA
  modified_base 1: mod_base = OTHER; note = 2'-O-methyluridine-3'-phosphate 5'-(E)-Vinylphosphonate
  modified_base 2: mod_base = OTHER; note = 2'-deoxy-2'-fluoroadenosine-3'-phosphate
  modified_base 3: mod_base = OTHER; note = 2'-O-methylguanosine-3'-phosphate
  modified_base 4: mod_base = OTHER; note = 2'-O-methylguanosine-3'-phosphate
  modified_base 5: mod_base = OTHER; note = 2'-O-methyladenosine-3'-phosphate
  modified_base 6: mod_base = OTHER; note = 2'-deoxy-2'-fluoroadenosine-3'-phosphate
  modified_base 7: mod_base = OTHER; note = 2'-O-methylcytidine-3'-phosphate
  modified_base 8: mod_base = OTHER; note = 2'-O-methyladenosine-3'-phosphate
  modified_base 9: mod_base = OTHER; note = 2'-O-methyladenosine-3'-phosphate
  modified_base 10: mod_base = OTHER; note = 2'-O-methylguanosine-3'-phosphate
  modified_base 11: mod_base = OTHER; note = 2'-O-methyluridine-3'-phosphate
  modified_base 12: mod_base = OTHER; note = 2'-O-methyluridine-3'-phosphate
  modified_base 13: mod_base = OTHER; note = 2'-O-methyluridine-3'-phosphate
  modified_base 14: mod_base = OTHER; note = 2'-deoxy-2'-fluoroadenosine-3'-phosphate
  modified_base 15: mod_base = OTHER; note = 2'-O-methylguanosine-3'-phosphate
  modified_base 16: mod_base = OTHER; note = 2'-deoxy-2'-fluorouridine-3'-phosphate
  modified_base 17: mod_base = OTHER; note = 2'-O-methylguanosine-3'-phosphate
  modified_base 18: mod_base = OTHER; note = 2'-O-methylguanosine-3'-phosphate
  modified_base 19: mod_base = OTHER; note = 2'-O-methyluridine-3'-phosphate
  modified_base 20: mod_base = OTHER; note = 2'-O-methyluridine-3'-phosphate
  modified_base 21: mod_base = OTHER; note = 2'-O-methylcytidine-3'-phosphate
  modified_base 22: mod_base = OTHER; note = 2'-O-methyladenosine-3'-phosphate
  modified_base 23: mod_base = OTHER; note = 2'-O-methylguanosine
taggaacaagtttagtggttcag

SEQ ID NO: 4981 - RNA, 23 nt, synthetic construct
  source 1..23: mol_type = other RNA
  modified_base 1: mod_base = OTHER; note = 2'-O-methyluridine-3'-phosphate 5'-(E)-Vinylphosphonate
  modified_base 2: mod_base = OTHER; note = 2'-deoxy-2'-fluoroadenosine-3'-phosphate
  modified_base 3: mod_base = OTHER; note = 2'-O-methyladenosine-3'-phosphate
  modified_base 4: mod_base = OTHER; note = 2'-O-methylguanosine-3'-phosphate
  modified_base 5: mod_base = OTHER; note = 2'-O-methylguanosine-3'-phosphate
  modified_base 6: mod_base = OTHER; note = 2'-deoxy-2'-fluoroadenosine-3'-phosphate
  modified_base 7: mod_base = OTHER; note = 2'-O-methyladenosine-3'-phosphate
  modified_base 8: mod_base = OTHER; note = 2'-O-methylcytidine-3'-phosphate
  modified_base 9: mod_base = OTHER; note = 2'-O-methyladenosine-3'-phosphate
  modified_base 10: mod_base = OTHER; note = 2'-O-methyladenosine-3'-phosphate
  modified_base 11: mod_base = OTHER; note = 2'-O-methylguanosine-3'-phosphate
  modified_base 12: mod_base = OTHER; note = 2'-O-methyluridine-3'-phosphate
  modified_base 13: mod_base = OTHER; note = 2'-O-methyluridine-3'-phosphate
  modified_base 14: mod_base = OTHER; note = 2'-deoxy-2'-fluorouridine-3'-phosphate
  modified_base 15: mod_base = OTHER; note = 2'-O-methyladenosine-3'-phosphate
  modified_base 16: mod_base = OTHER; note = 2'-deoxy-2'-fluoroguanosine-3'-phosphate
  modified_base 17: mod_base = OTHER; note = 2'-O-methyluridine-3'-phosphate
  modified_base 18: mod_base = OTHER; note = 2'-O-methylguanosine-3'-phosphate
  modified_base 19: mod_base = OTHER; note = 2'-O-methylguanosine-3'-phosphate
  modified_base 20: mod_base = OTHER; note = 2'-O-methyluridine-3'-phosphate
  modified_base 21: mod_base = OTHER; note = 2'-O-methyluridine-3'-phosphate
  modified_base 22: mod_base = OTHER; note = 2'-O-methylcytidine-3'-phosphate
  modified_base 23: mod_base = OTHER; note = 2'-O-methyladenosine
taaggaacaagtttagtggttca

SEQ ID NO: 4982 - RNA, 23 nt, synthetic construct
  source 1..23: mol_type = other RNA
  modified_base 1: mod_base = OTHER; note = 2'-O-methyluridine-3'-phosphate 5'-(E)-Vinylphosphonate
  modified_base 2: mod_base = OTHER; note = 2'-deoxy-2'-fluoroadenosine-3'-phosphate
  modified_base 3: mod_base = OTHER; note = 2'-O-methyladenosine-3'-phosphate
  modified_base 4: mod_base = OTHER; note = 2'-O-methyladenosine-3'-phosphate
  modified_base 5: mod_base = OTHER; note = 2'-O-methylguanosine-3'-phosphate
  modified_base 6: mod_base = OTHER; note = 2'-deoxy-2'-fluoroguanosine-3'-phosphate
  modified_base 7: mod_base = OTHER; note = 2'-O-methyladenosine-3'-phosphate
  modified_base 8: mod_base = OTHER; note = 2'-O-methyladenosine-3'-phosphate
  modified_base 9: mod_base = OTHER; note = 2'-O-methylcytidine-3'-phosphate
  modified_base 10: mod_base = OTHER; note = 2'-O-methyladenosine-3'-phosphate
  modified_base 11: mod_base = OTHER; note = 2'-O-methyladenosine-3'-phosphate
  modified_base 12: mod_base = OTHER; note = 2'-O-methylguanosine-3'-phosphate
  modified_base 13: mod_base = OTHER; note = 2'-O-methyluridine-3'-phosphate
  modified_base 14: mod_base = OTHER; note = 2'-deoxy-2'-fluorouridine-3'-phosphate
  modified_base 15: mod_base = OTHER; note = 2'-O-methyluridine-3'-phosphate
  modified_base 16: mod_base = OTHER; note = 2'-deoxy-2'-fluoroadenosine-3'-phosphate
  modified_base 17: mod_base = OTHER; note = 2'-O-methylguanosine-3'-phosphate
  modified_base 18: mod_base = OTHER; note = 2'-O-methyluridine-3'-phosphate
  modified_base 19: mod_base = OTHER; note = 2'-O-methylguanosine-3'-phosphate
  modified_base 20: mod_base = OTHER; note = 2'-O-methylguanosine-3'-phosphate
  modified_base 21: mod_base = OTHER; note = 2'-O-methyluridine-3'-phosphate
  modified_base 22: mod_base = OTHER; note = 2'-O-methyluridine-3'-phosphate
  modified_base 23: mod_base = OTHER; note = 2'-O-methylcytidine
taaaggaacaagtttagtggttc

SEQ ID NO: 4983 - RNA, 23 nt, synthetic construct
  source 1..23: mol_type = other RNA
  modified_base 1: mod_base = OTHER; note = 2'-O-methyluridine-3'-phosphate 5'-(E)-Vinylphosphonate
  modified_base 2: mod_base = OTHER; note = 2'-deoxy-2'-fluoroguanosine-3'-phosphate
  modified_base 3: mod_base = OTHER; note = 2'-O-methyladenosine-3'-phosphate
  modified_base 4: mod_base = OTHER; note = 2'-O-methyladenosine-3'-phosphate
  modified_base 5: mod_base = OTHER; note = 2'-O-methyladenosine-3'-phosphate
  modified_base 6: mod_base = OTHER; note = 2'-deoxy-2'-fluoroguanosine-3'-phosphate
  modified_base 7: mod_base = OTHER; note = 2'-O-methylguanosine-3'-phosphate
  modified_base 8: mod_base = OTHER; note = 2'-O-methyladenosine-3'-phosphate
  modified_base 9: mod_base = OTHER; note = 2'-O-methyladenosine-3'-phosphate
  modified_base 10: mod_base = OTHER; note = 2'-O-methylcytidine-3'-phosphate
  modified_base 11: mod_base = OTHER; note = 2'-O-methyladenosine-3'-phosphate
  modified_base 12: mod_base = OTHER; note = 2'-O-methyladenosine-3'-phosphate
  modified_base 13: mod_base = OTHER; note = 2'-O-methylguanosine-3'-phosphate
  modified_base 14: mod_base = OTHER; note = 2'-deoxy-2'-fluorouridine-3'-phosphate
  modified_base 15: mod_base = OTHER; note = 2'-O-methyluridine-3'-phosphate
  modified_base 16: mod_base = OTHER; note = 2'-deoxy-2'-fluorouridine-3'-phosphate
  modified_base 17: mod_base = OTHER; note = 2'-O-methyladenosine-3'-phosphate
  modified_base 18: mod_base = OTHER; note = 2'-O-methylguanosine-3'-phosphate
  modified_base 19: mod_base = OTHER; note = 2'-O-methyluridine-3'-phosphate
  modified_base 20: mod_base = OTHER; note = 2'-O-methylguanosine-3'-phosphate
  modified_base 21: mod_base = OTHER; note = 2'-O-methylguanosine-3'-phosphate
  modified_base 22: mod_base = OTHER; note = 2'-O-methyluridine-3'-phosphate
  modified_base 23: mod_base = OTHER; note = 2'-O-methyluridine
tgaaaggaacaagtttagtggtt

SEQ ID NO: 4984 - RNA, 23 nt, synthetic construct
  source 1..23: mol_type = other RNA
  modified_base 1: mod_base = OTHER; note = 2'-O-methyluridine-3'-phosphate 5'-(E)-Vinylphosphonate
  modified_base 2: mod_base = OTHER; note = 2'-deoxy-2'-fluorouridine-3'-phosphate
  modified_base 3: mod_base = OTHER; note = 2'-O-methylguanosine-3'-phosphate
  modified_base 4: mod_base = OTHER; note = 2'-O-methyladenosine-3'-phosphate
  modified_base 5: mod_base = OTHER; note = 2'-O-methyladenosine-3'-phosphate
  modified_base 6: mod_base = OTHER; note = 2'-deoxy-2'-fluoroadenosine-3'-phosphate
  modified_base 7: mod_base = OTHER; note = 2'-O-methylguanosine-3'-phosphate
  modified_base 8: mod_base = OTHER; note = 2'-O-methylguanosine-3'-phosphate
  modified_base 9: mod_base = OTHER; note = 2'-O-methyladenosine-3'-phosphate
  modified_base 10: mod_base = OTHER; note = 2'-O-methyladenosine-3'-phosphate
  modified_base 11: mod_base = OTHER; note = 2'-O-methylcytidine-3'-phosphate
  modified_base 12: mod_base = OTHER; note = 2'-O-methyladenosine-3'-phosphate
  modified_base 13: mod_base = OTHER; note = 2'-O-methyladenosine-3'-phosphate
  modified_base 14: mod_base = OTHER; note = 2'-deoxy-2'-fluoroguanosine-3'-phosphate
  modified_base 15: mod_base = OTHER; note = 2'-O-methyluridine-3'-phosphate
  modified_base 16: mod_base = OTHER; note = 2'-deoxy-2'-fluorouridine-3'-phosphate
  modified_base 17: mod_base = OTHER; note = 2'-O-methyluridine-3'-phosphate
  modified_base 18: mod_base = OTHER; note = 2'-O-methyladenosine-3'-phosphate
  modified_base 19: mod_base = OTHER; note = 2'-O-methylguanosine-3'-phosphate
  modified_base 20: mod_base = OTHER; note = 2'-O-methyluridine-3'-phosphate
  modified_base 21: mod_base = OTHER; note = 2'-O-methylguanosine-3'-phosphate
  modified_base 22: mod_base = OTHER; note = 2'-O-methylguanosine-3'-phosphate
  modified_base 23: mod_base = OTHER; note = 2'-O-methyluridine
ttgaaaggaacaagtttagtggt

SEQ ID NO: 4985 - RNA, 23 nt, synthetic construct
  source 1..23: mol_type = other RNA
  modified_base 1: mod_base = OTHER; note = 2'-O-methyluridine-3'-phosphate 5'-(E)-Vinylphosphonate
  modified_base 2: mod_base = OTHER; note = 2'-deoxy-2'-fluoroadenosine-3'-phosphate
  modified_base 3: mod_base = OTHER; note = 2'-O-methyluridine-3'-phosphate
  modified_base 4: mod_base = OTHER; note = 2'-O-methylguanosine-3'-phosphate
  modified_base 5: mod_base = OTHER; note = 2'-O-methyladenosine-3'-phosphate
  modified_base 6: mod_base = OTHER; note = 2'-deoxy-2'-fluoroadenosine-3'-phosphate
  modified_base 7: mod_base = OTHER; note = 2'-O-methyladenosine-3'-phosphate
  modified_base 8: mod_base = OTHER; note = 2'-O-methylguanosine-3'-phosphate
  modified_base 9: mod_base = OTHER; note = 2'-O-methylguanosine-3'-phosphate
  modified_base 10: mod_base = OTHER; note = 2'-O-methyladenosine-3'-phosphate
  modified_base 11: mod_base = OTHER; note = 2'-O-methyladenosine-3'-phosphate
  modified_base 12: mod_base = OTHER; note = 2'-O-methylcytidine-3'-phosphate
  modified_base 13: mod_base = OTHER; note = 2'-O-methyladenosine-3'-phosphate
  modified_base 14: mod_base = OTHER; note = 2'-deoxy-2'-fluoroadenosine-3'-phosphate
  modified_base 15: mod_base = OTHER; note = 2'-O-methylguanosine-3'-phosphate
  modified_base 16: mod_base = OTHER; note = 2'-deoxy-2'-fluorouridine-3'-phosphate
  modified_base 17: mod_base = OTHER; note = 2'-O-methyluridine-3'-phosphate
  modified_base 18: mod_base = OTHER; note = 2'-O-methyluridine-3'-phosphate
  modified_base 19: mod_base = OTHER; note = 2'-O-methyladenosine-3'-phosphate
  modified_base 20: mod_base = OTHER; note = 2'-O-methylguanosine-3'-phosphate
  modified_base 21: mod_base = OTHER; note = 2'-O-methyluridine-3'-phosphate
  modified_base 22: mod_base = OTHER; note = 2'-O-methylguanosine-3'-phosphate
  modified_base 23: mod_base = OTHER; note = 2'-O-methylguanosine
tatgaaaggaacaagtttagtgg

SEQ ID NO: 4986 - RNA, 23 nt, synthetic construct
  source 1..23: mol_type = other RNA
  modified_base 1: mod_base = OTHER; note = 2'-O-methyluridine-3'-phosphate 5'-(E)-Vinylphosphonate
  modified_base 2: mod_base = OTHER; note = 2'-deoxy-2'-fluoroadenosine-3'-phosphate
  modified_base 3: mod_base = OTHER; note = 2'-O-methyladenosine-3'-phosphate
  modified_base 4: mod_base = OTHER; note = 2'-O-methyluridine-3'-phosphate
  modified_base 5: mod_base = OTHER; note = 2'-O-methylguanosine-3'-phosphate
  modified_base 6: mod_base = OTHER; note = 2'-deoxy-2'-fluoroadenosine-3'-phosphate
  modified_base 7: mod_base = OTHER; note = 2'-O-methyladenosine-3'-phosphate
  modified_base 8: mod_base = OTHER; note = 2'-O-methyladenosine-3'-phosphate
  modified_base 9: mod_base = OTHER; note = 2'-O-methylguanosine-3'-phosphate
  modified_base 10: mod_base = OTHER; note = 2'-O-methylguanosine-3'-phosphate
  modified_base 11: mod_base = OTHER; note = 2'-O-methyladenosine-3'-phosphate
  modified_base 12: mod_base = OTHER; note = 2'-O-methyladenosine-3'-phosphate
  modified_base 13: mod_base = OTHER; note = 2'-O-methylcytidine-3'-phosphate
  modified_base 14: mod_base = OTHER; note = 2'-deoxy-2'-fluoroadenosine-3'-phosphate
  modified_base 15: mod_base = OTHER; note = 2'-O-methyladenosine-3'-phosphate
  modified_base 16: mod_base = OTHER; note = 2'-deoxy-2'-fluoroguanosine-3'-phosphate
  modified_base 17: mod_base = OTHER; note = 2'-O-methyluridine-3'-phosphate
  modified_base 18: mod_base = OTHER; note = 2'-O-methyluridine-3'-phosphate
  modified_base 19: mod_base = OTHER; note = 2'-O-methyluridine-3'-phosphate
  modified_base 20: mod_base = OTHER; note = 2'-O-methyladenosine-3'-phosphate
  modified_base 21: mod_base = OTHER; note = 2'-O-methylguanosine-3'-phosphate
  modified_base 22: mod_base = OTHER; note = 2'-O-methyluridine-3'-phosphate
  modified_base 23: mod_base = OTHER; note = 2'-O-methylguanosine
taatgaaaggaacaagtttagtg

SEQ ID NO: 4987 - RNA, 23 nt, synthetic construct
  source 1..23: mol_type = other RNA
  modified_base 1: mod_base = OTHER; note = 2'-O-methyluridine-3'-phosphate 5'-(E)-Vinylphosphonate
  modified_base 2: mod_base = OTHER; note = 2'-deoxy-2'-fluoroadenosine-3'-phosphate
  modified_base 3: mod_base = OTHER; note = 2'-O-methyladenosine-3'-phosphate
  modified_base 4: mod_base = OTHER; note = 2'-O-methyladenosine-3'-phosphate
  modified_base 5: mod_base = OTHER; note = 2'-O-methyluridine-3'-phosphate
  modified_base 6: mod_base = OTHER; note = 2'-deoxy-2'-fluoroguanosine-3'-phosphate
  modified_base 7: mod_base = OTHER; note = 2'-O-methyladenosine-3'-phosphate
  modified_base 8: mod_base = OTHER; note = 2'-O-methyladenosine-3'-phosphate
  modified_base 9: mod_base = OTHER; note = 2'-O-methyladenosine-3'-phosphate
  modified_base 10: mod_base = OTHER; note = 2'-O-methylguanosine-3'-phosphate
  modified_base 11: mod_base = OTHER; note = 2'-O-methylguanosine-3'-phosphate
  modified_base 12: mod_base = OTHER; note = 2'-O-methyladenosine-3'-phosphate
  modified_base 13: mod_base = OTHER; note = 2'-O-methyladenosine-3'-phosphate
  modified_base 14: mod_base = OTHER; note = 2'-deoxy-2'-fluorocytidine-3'-phosphate
  modified_base 15: mod_base = OTHER; note = 2'-O-methyladenosine-3'-phosphate
  modified_base 16: mod_base = OTHER; note = 2'-deoxy-2'-fluoroadenosine-3'-phosphate
  modified_base 17: mod_base = OTHER; note = 2'-O-methylguanosine-3'-phosphate
  modified_base 18: mod_base = OTHER; note = 2'-O-methyluridine-3'-phosphate
  modified_base 19: mod_base = OTHER; note = 2'-O-methyluridine-3'-phosphate
  modified_base 20: mod_base = OTHER; note = 2'-O-methyluridine-3'-phosphate
  modified_base 21: mod_base = OTHER; note = 2'-O-methyladenosine-3'-phosphate
  modified_base 22: mod_base = OTHER; note = 2'-O-methylguanosine-3'-phosphate
  modified_base 23: mod_base = OTHER; note = 2'-O-methyluridine
taaatgaaaggaacaagtttagt

SEQ ID NO: 4988 - RNA, 23 nt, synthetic construct
  source 1..23: mol_type = other RNA
  modified_base 1: mod_base = OTHER; note = 2'-O-methyluridine-3'-phosphate 5'-(E)-Vinylphosphonate
  modified_base 2: mod_base = OTHER; note = 2'-deoxy-2'-fluorouridine-3'-phosphate
  modified_base 3: mod_base = OTHER; note = 2'-O-methyladenosine-3'-phosphate
  modified_base 4: mod_base = OTHER; note = 2'-O-methyladenosine-3'-phosphate
  modified_base 5: mod_base = OTHER; note = 2'-O-methyladenosine-3'-phosphate
  modified_base 6: mod_base = OTHER; note = 2'-deoxy-2'-fluorouridine-3'-phosphate
  modified_base 7: mod_base = OTHER; note = 2'-O-methylguanosine-3'-phosphate
  modified_base 8: mod_base = OTHER; note = 2'-O-methyladenosine-3'-phosphate
  modified_base 9: mod_base = OTHER; note = 2'-O-methyladenosine-3'-phosphate
  modified_base 10: mod_base = OTHER; note = 2'-O-methyladenosine-3'-phosphate
  modified_base 11: mod_base = OTHER; note = 2'-O-methylguanosine-3'-phosphate
  modified_base 12: mod_base = OTHER; note = 2'-O-methylguanosine-3'-phosphate
  modified_base 13: mod_base = OTHER; note = 2'-O-methyladenosine-3'-phosphate
  modified_base 14: mod_base = OTHER; note = 2'-deoxy-2'-fluoroadenosine-3'-phosphate
  modified_base 15: mod_base = OTHER; note = 2'-O-methylcytidine-3'-phosphate
  modified_base 16: mod_base = OTHER; note = 2'-deoxy-2'-fluoroadenosine-3'-phosphate
  modified_base 17: mod_base = OTHER; note = 2'-O-methyladenosine-3'-phosphate
  modified_base 18: mod_base = OTHER; note = 2'-O-methylguanosine-3'-phosphate
  modified_base 19: mod_base = OTHER; note = 2'-O-methyluridine-3'-phosphate
  modified_base 20: mod_base = OTHER; note = 2'-O-methyluridine-3'-phosphate
  modified_base 21: mod_base = OTHER; note = 2'-O-methyluridine-3'-phosphate
  modified_base 22: mod_base = OTHER; note = 2'-O-methyladenosine-3'-phosphate
  modified_base 23: mod_base = OTHER; note = 2'-O-methylguanosine
ttaaatgaaaggaacaagtttag

SEQ ID NO: 4989 - RNA, 23 nt, synthetic construct
  source 1..23: mol_type = other RNA
  modified_base 1: mod_base = OTHER; note = 2'-O-methyluridine-3'-phosphate 5'-(E)-Vinylphosphonate
  modified_base 2: mod_base = OTHER; note = 2'-deoxy-2'-fluoroguanosine-3'-phosphate
  modified_base 3: mod_base = OTHER; note = 2'-O-methyluridine-3'-phosphate
  modified_base 4: mod_base = OTHER; note = 2'-O-methyladenosine-3'-phosphate
  modified_base 5: mod_base = OTHER; note = 2'-O-methyladenosine-3'-phosphate
  modified_base 6: mod_base = OTHER; note = 2'-deoxy-2'-fluoroadenosine-3'-phosphate
  modified_base 7: mod_base = OTHER; note = 2'-O-methyluridine-3'-phosphate
  modified_base 8: mod_base = OTHER; note = 2'-O-methylguanosine-3'-phosphate
  modified_base 9: mod_base = OTHER; note = 2'-O-methyladenosine-3'-phosphate
  modified_base 10: mod_base = OTHER; note = 2'-O-methyladenosine-3'-phosphate
  modified_base 11: mod_base = OTHER; note = 2'-O-methyladenosine-3'-phosphate
  modified_base 12: mod_base = OTHER; note = 2'-O-methylguanosine-3'-phosphate
  modified_base 13: mod_base = OTHER; note = 2'-O-methylguanosine-3'-phosphate
  modified_base 14: mod_base = OTHER; note = 2'-deoxy-2'-fluoroadenosine-3'-phosphate
  modified_base 15: mod_base = OTHER; note = 2'-O-methyladenosine-3'-phosphate
  modified_base 16: mod_base = OTHER; note = 2'-deoxy-2'-fluorocytidine-3'-phosphate
  modified_base 17: mod_base = OTHER; note = 2'-O-methyladenosine-3'-phosphate
  modified_base 18: mod_base = OTHER; note = 2'-O-methyladenosine-3'-phosphate
  modified_base 19: mod_base = OTHER; note = 2'-O-methylguanosine-3'-phosphate
  modified_base 20: mod_base = OTHER; note = 2'-O-methyluridine-3'-phosphate
  modified_base 21: mod_base = OTHER; note = 2'-O-methyluridine-3'-phosphate
  modified_base 22: mod_base = OTHER; note = 2'-O-methyluridine-3'-phosphate
  modified_base 23: mod_base = OTHER; note = 2'-O-methyladenosine
tgtaaatgaaaggaacaagttta

SEQ ID NO: 4990 - RNA, 23 nt, synthetic construct
  source 1..23: mol_type = other RNA
  modified_base 1: mod_base = OTHER; note = 2'-O-methyluridine-3'-phosphate 5'-(E)-Vinylphosphonate
  modified_base 2: mod_base = OTHER; note = 2'-deoxy-2'-fluorouridine-3'-phosphate
  modified_base 3: mod_base = OTHER; note = 2'-O-methylguanosine-3'-phosphate
  modified_base 4: mod_base = OTHER; note = 2'-O-methyluridine-3'-phosphate
  modified_base 5: mod_base = OTHER; note = 2'-O-methyladenosine-3'-phosphate
  modified_base 6: mod_base = OTHER; note = 2'-deoxy-2'-fluoroadenosine-3'-phosphate
  modified_base 7: mod_base = OTHER; note = 2'-O-methyladenosine-3'-phosphate
  modified_base 8: mod_base = OTHER; note = 2'-O-methyluridine-3'-phosphate
  modified_base 9: mod_base = OTHER; note = 2'-O-methylguanosine-3'-phosphate
  modified_base 10: mod_base = OTHER; note = 2'-O-methyladenosine-3'-phosphate
  modified_base 11: mod_base = OTHER; note = 2'-O-methyladenosine-3'-phosphate
  modified_base 12: mod_base = OTHER; note = 2'-O-methyladenosine-3'-phosphate
  modified_base 13: mod_base = OTHER; note = 2'-O-methylguanosine-3'-phosphate
  modified_base 14: mod_base = OTHER; note = 2'-deoxy-2'-fluoroguanosine-3'-phosphate
  modified_base 15: mod_base = OTHER; note = 2'-O-methyladenosine-3'-phosphate
  modified_base 16: mod_base = OTHER; note = 2'-deoxy-2'-fluoroadenosine-3'-phosphate
  modified_base 17: mod_base = OTHER; note = 2'-O-methylcytidine-3'-phosphate
  modified_base 18: mod_base = OTHER; note = 2'-O-methyladenosine-3'-phosphate
  modified_base 19: mod_base = OTHER; note = 2'-O-methyladenosine-3'-phosphate
  modified_base 20: mod_base = OTHER; note = 2'-O-methylguanosine-3'-phosphate
  modified_base 21: mod_base = OTHER; note = 2'-O-methyluridine-3'-phosphate
  modified_base 22: mod_base = OTHER; note = 2'-O-methyluridine-3'-phosphate
  modified_base 23: mod_base = OTHER; note = 2'-O-methyluridine
ttgtaaatgaaaggaacaagttt

SEQ ID NO: 4991 - RNA, 23 nt, synthetic construct
  source 1..23: mol_type = other RNA
  modified_base 1: mod_base = OTHER; note = 2'-O-methyluridine-3'-phosphate 5'-(E)-Vinylphosphonate
  modified_base 2: mod_base = OTHER; note = 2'-deoxy-2'-fluorouridine-3'-phosphate
  modified_base 3: mod_base = OTHER; note = 2'-O-methyluridine-3'-phosphate
  modified_base 4: mod_base = OTHER; note = 2'-O-methylguanosine-3'-phosphate
  modified_base 5: mod_base = OTHER; note = 2'-O-methyluridine-3'-phosphate
  modified_base 6: mod_base = OTHER; note = 2'-deoxy-2'-fluoroadenosine-3'-phosphate
  modified_base 7: mod_base = OTHER; note = 2'-O-methyladenosine-3'-phosphate
  modified_base 8: mod_base = OTHER; note = 2'-O-methyladenosine-3'-phosphate
  modified_base 9: mod_base = OTHER; note = 2'-O-methyluridine-3'-phosphate
  modified_base 10: mod_base = OTHER; note = 2'-O-methylguanosine-3'-phosphate
  modified_base 11: mod_base = OTHER; note = 2'-O-methyladenosine-3'-phosphate
  modified_base 12: mod_base = OTHER; note = 2'-O-methyladenosine-3'-phosphate
  modified_base 13: mod_base = OTHER; note = 2'-O-methyladenosine-3'-phosphate
  modified_base 14: mod_base = OTHER; note = 2'-deoxy-2'-fluoroguanosine-3'-phosphate
  modified_base 15: mod_base = OTHER; note = 2'-O-methylguanosine-3'-phosphate
  modified_base 16: mod_base = OTHER; note = 2'-deoxy-2'-fluoroadenosine-3'-phosphate
  modified_base 17: mod_base = OTHER; note = 2'-O-methyladenosine-3'-phosphate
  modified_base 18: mod_base = OTHER; note = 2'-O-methylcytidine-3'-phosphate
  modified_base 19: mod_base = OTHER; note = 2'-O-methyladenosine-3'-phosphate
  modified_base 20: mod_base = OTHER; note = 2'-O-methyladenosine-3'-phosphate
  modified_base 21: mod_base = OTHER; note = 2'-O-methylguanosine-3'-phosphate
  modified_base 22: mod_base = OTHER; note = 2'-O-methyluridine-3'-phosphate
  modified_base 23: mod_base = OTHER; note = 2'-O-methyluridine
tttgtaaatgaaaggaacaagtt

SEQ ID NO: 4992 - RNA, 23 nt, synthetic construct
  source 1..23: mol_type = other RNA
  modified_base 1: mod_base = OTHER; note = 2'-O-methyluridine-3'-phosphate 5'-(E)-Vinylphosphonate
  modified_base 2: mod_base = OTHER; note = 2'-deoxy-2'-fluorouridine-3'-phosphate
  modified_base 3: mod_base = OTHER; note = 2'-O-methyluridine-3'-phosphate
  modified_base 4: mod_base = OTHER; note = 2'-O-methyluridine-3'-phosphate
  modified_base 5: mod_base = OTHER; note = 2'-O-methylguanosine-3'-phosphate
  modified_base 6: mod_base = OTHER; note = 2'-deoxy-2'-fluorouridine-3'-phosphate
  modified_base 7: mod_base = OTHER; note = 2'-O-methyladenosine-3'-phosphate
  modified_base 8: mod_base = OTHER; note = 2'-O-methyladenosine-3'-phosphate
  modified_base 9: mod_base = OTHER; note = 2'-O-methyladenosine-3'-phosphate
  modified_base 10: mod_base = OTHER; note = 2'-O-methyluridine-3'-phosphate
  modified_base 11: mod_base = OTHER; note = 2'-O-methylguanosine-3'-phosphate
  modified_base 12: mod_base = OTHER; note = 2'-O-methyladenosine-3'-phosphate
  modified_base 13: mod_base = OTHER; note = 2'-O-methyladenosine-3'-phosphate
  modified_base 14: mod_base = OTHER; note = 2'-deoxy-2'-fluoroadenosine-3'-phosphate
  modified_base 15: mod_base = OTHER; note = 2'-O-methylguanosine-3'-phosphate
  modified_base 16: mod_base = OTHER; note = 2'-deoxy-2'-fluoroguanosine-3'-phosphate
  modified_base 17: mod_base = OTHER; note = 2'-O-methyladenosine-3'-phosphate
  modified_base 18: mod_base = OTHER; note = 2'-O-methyladenosine-3'-phosphate
  modified_base 19: mod_base = OTHER; note = 2'-O-methylcytidine-3'-phosphate
  modified_base 20: mod_base = OTHER; note = 2'-O-methyladenosine-3'-phosphate
  modified_base 21: mod_base = OTHER; note = 2'-O-methyladenosine-3'-phosphate
  modified_base 22: mod_base = OTHER; note = 2'-O-methylguanosine-3'-phosphate
  modified_base 23: mod_base = OTHER; note = 2'-O-methyluridine
ttttgtaaatgaaaggaacaagt

SEQ ID NO: 4993 - RNA, 23 nt, synthetic construct
  source 1..23: mol_type = other RNA
  modified_base 1: mod_base = OTHER; note = 2'-O-methyluridine-3'-phosphate 5'-(E)-Vinylphosphonate
  modified_base 2: mod_base = OTHER; note = 2'-deoxy-2'-fluorouridine-3'-phosphate
  modified_base 3: mod_base = OTHER; note = 2'-O-methyluridine-3'-phosphate
  modified_base 4: mod_base = OTHER; note = 2'-O-methyluridine-3'-phosphate
  modified_base 5: mod_base = OTHER; note = 2'-O-methyluridine-3'-phosphate
  modified_base 6: mod_base = OTHER; note = 2'-deoxy-2'-fluoroguanosine-3'-phosphate
  modified_base 7: mod_base = OTHER; note = 2'-O-methyluridine-3'-phosphate
  modified_base 8: mod_base = OTHER; note = 2'-O-methyladenosine-3'-phosphate
  modified_base 9: mod_base = OTHER; note = 2'-O-methyladenosine-3'-phosphate
  modified_base 10: mod_base = OTHER; note = 2'-O-methyladenosine-3'-phosphate
  modified_base 11: mod_base = OTHER; note = 2'-O-methyluridine-3'-phosphate
  modified_base 12: mod_base = OTHER; note = 2'-O-methylguanosine-3'-phosphate
  modified_base 13: mod_base = OTHER; note = 2'-O-methyladenosine-3'-phosphate
  modified_base 14: mod_base = OTHER; note = 2'-deoxy-2'-fluoroadenosine-3'-phosphate
  modified_base 15: mod_base = OTHER; note = 2'-O-methyladenosine-3'-phosphate
  modified_base 16: mod_base = OTHER; note = 2'-deoxy-2'-fluoroguanosine-3'-phosphate
  modified_base 17: mod_base = OTHER; note = 2'-O-methylguanosine-3'-phosphate
  modified_base 18: mod_base = OTHER; note = 2'-O-methyladenosine-3'-phosphate
  modified_base 19: mod_base = OTHER; note = 2'-O-methyladenosine-3'-phosphate
  modified_base 20: mod_base = OTHER; note = 2'-O-methylcytidine-3'-phosphate
  modified_base 21: mod_base = OTHER; note = 2'-O-methyladenosine-3'-phosphate
  modified_base 22: mod_base = OTHER; note = 2'-O-methyladenosine-3'-phosphate
  modified_base 23: mod_base = OTHER; note = 2'-O-methylguanosine
tttttgtaaatgaaaggaacaag

SEQ ID NO: 4994 - RNA, 23 nt, synthetic construct
  source 1..23: mol_type = other RNA
  modified_base 1: mod_base = OTHER; note = 2'-O-methyluridine-3'-phosphate 5'-(E)-Vinylphosphonate
  modified_base 2: mod_base = OTHER; note = 2'-deoxy-2'-fluorocytidine-3'-phosphate
  modified_base 3: mod_base = OTHER; note = 2'-O-methyluridine-3'-phosphate
  modified_base 4: mod_base = OTHER; note = 2'-O-methyluridine-3'-phosphate
  modified_base 5: mod_base = OTHER; note = 2'-O-methyluridine-3'-phosphate
  modified_base 6: mod_base = OTHER; note = 2'-deoxy-2'-fluorouridine-3'-phosphate
  modified_base 7: mod_base = OTHER; note = 2'-O-methylguanosine-3'-phosphate
  modified_base 8: mod_base = OTHER; note = 2'-O-methyluridine-3'-phosphate
  modified_base 9: mod_base = OTHER; note = 2'-O-methyladenosine-3'-phosphate
  modified_base 10: mod_base = OTHER; note = 2'-O-methyladenosine-3'-phosphate
  modified_base 11: mod_base = OTHER; note = 2'-O-methyladenosine-3'-phosphate
  modified_base 12: mod_base = OTHER; note = 2'-O-methyluridine-3'-phosphate
  modified_base 13: mod_base = OTHER; note = 2'-O-methylguanosine-3'-phosphate
  modified_base 14: mod_base = OTHER; note = 2'-deoxy-2'-fluoroadenosine-3'-phosphate
  modified_base 15: mod_base = OTHER; note = 2'-O-methyladenosine-3'-phosphate
  modified_base 16: mod_base = OTHER; note = 2'-deoxy-2'-fluoroadenosine-3'-phosphate
  modified_base 17: mod_base = OTHER; note = 2'-O-methylguanosine-3'-phosphate
  modified_base 18: mod_base = OTHER; note = 2'-O-methylguanosine-3'-phosphate
  modified_base 19: mod_base = OTHER; note = 2'-O-methyladenosine-3'-phosphate
  modified_base 20: mod_base = OTHER; note = 2'-O-methyladenosine-3'-phosphate
  modified_base 21: mod_base = OTHER; note = 2'-O-methylcytidine-3'-phosphate
  modified_base 22: mod_base = OTHER; note = 2'-O-methyladenosine-3'-phosphate
  modified_base 23: mod_base = OTHER; note = 2'-O-methyladenosine
tcttttgtaaatgaaaggaacaa

SEQ ID NO: 4995 - RNA, 23 nt, synthetic construct
  source 1..23: mol_type = other RNA
  modified_base 1: mod_base = OTHER; note = 2'-O-methyluridine-3'-phosphate 5'-(E)-Vinylphosphonate
  modified_base 2: mod_base = OTHER; note = 2'-deoxy-2'-fluorouridine-3'-phosphate
  modified_base 3: mod_base = OTHER; note = 2'-O-methylcytidine-3'-phosphate
  modified_base 4: mod_base = OTHER; note = 2'-O-methyluridine-3'-phosphate
  modified_base 5: mod_base = OTHER; note = 2'-O-methyluridine-3'-phosphate
  modified_base 6: mod_base = OTHER; note = 2'-deoxy-2'-fluorouridine-3'-phosphate
  modified_base 7: mod_base = OTHER; note = 2'-O-methyluridine-3'-phosphate
  modified_base 8: mod_base = OTHER; note = 2'-O-methylguanosine-3'-phosphate
  modified_base 9: mod_base = OTHER; note = 2'-O-methyluridine-3'-phosphate
  modified_base 10: mod_base = OTHER; note = 2'-O-methyladenosine-3'-phosphate
  modified_base 11: mod_base = OTHER; note = 2'-O-methyladenosine-3'-phosphate
  modified_base 12: mod_base = OTHER; note = 2'-O-methyladenosine-3'-phosphate
  modified_base 13: mod_base = OTHER; note = 2'-O-methyluridine-3'-phosphate
  modified_base 14: mod_base = OTHER; note = 2'-deoxy-2'-fluoroguanosine-3'-phosphate
  modified_base 15: mod_base = OTHER; note = 2'-O-methyladenosine-3'-phosphate
  modified_base 16: mod_base = OTHER; note = 2'-deoxy-2'-fluoroadenosine-3'-phosphate
  modified_base 17: mod_base = OTHER; note = 2'-O-methyladenosine-3'-phosphate
  modified_base 18: mod_base = OTHER; note = 2'-O-methylguanosine-3'-phosphate
  modified_base 19: mod_base = OTHER; note = 2'-O-methylguanosine-3'-phosphate
  modified_base 20: mod_base = OTHER; note = 2'-O-methyladenosine-3'-phosphate
  modified_base 21: mod_base = OTHER; note = 2'-O-methyladenosine-3'-phosphate
  modified_base 22: mod_base = OTHER; note = 2'-O-methylcytidine-3'-phosphate
  modified_base 23: mod_base = OTHER; note = 2'-O-methyladenosine
ttcttttgtaaatgaaaggaaca

SEQ ID NO: 4996 - RNA, 23 nt, synthetic construct
  source 1..23: mol_type = other RNA
  modified_base 1: mod_base = OTHER; note = 2'-O-methyluridine-3'-phosphate 5'-(E)-Vinylphosphonate
  modified_base 2: mod_base = OTHER; note = 2'-deoxy-2'-fluorocytidine-3'-phosphate
  modified_base 3: mod_base = OTHER; note = 2'-O-methyluridine-3'-phosphate
  modified_base 4: mod_base = OTHER; note = 2'-O-methylcytidine-3'-phosphate
  modified_base 5: mod_base = OTHER; note = 2'-O-methyluridine-3'-phosphate
  modified_base 6: mod_base = OTHER; note = 2'-deoxy-2'-fluorouridine-3'-phosphate
  modified_base 7: mod_base = OTHER; note = 2'-O-methyluridine-3'-phosphate
  modified_base 8: mod_base = OTHER; note = 2'-O-methyluridine-3'-phosphate
  modified_base 9: mod_base = OTHER; note = 2'-O-methylguanosine-3'-phosphate
  modified_base 10: mod_base = OTHER; note = 2'-O-methyluridine-3'-phosphate
  modified_base 11: mod_base = OTHER; note = 2'-O-methyladenosine-3'-phosphate
  modified_base 12: mod_base = OTHER; note = 2'-O-methyladenosine-3'-phosphate
  modified_base 13: mod_base = OTHER; note = 2'-O-methyladenosine-3'-phosphate
  modified_base 14: mod_base = OTHER; note = 2'-deoxy-2'-fluorouridine-3'-phosphate
  modified_base 15: mod_base = OTHER; note = 2'-O-methylguanosine-3'-phosphate
  modified_base 16: mod_base = OTHER; note = 2'-deoxy-2'-fluoroadenosine-3'-phosphate
  modified_base 17: mod_base = OTHER; note = 2'-O-methyladenosine-3'-phosphate
  modified_base 18: mod_base = OTHER; note = 2'-O-methyladenosine-3'-phosphate
  modified_base 19: mod_base = OTHER; note = 2'-O-methylguanosine-3'-phosphate
  modified_base 20: mod_base = OTHER; note = 2'-O-methylguanosine-3'-phosphate
  modified_base 21: mod_base = OTHER; note = 2'-O-methyladenosine-3'-phosphate
  modified_base 22: mod_base = OTHER; note = 2'-O-methyladenosine-3'-phosphate
  modified_base 23: mod_base = OTHER; note = 2'-O-methylcytidine
tctcttttgtaaatgaaaggaac

SEQ ID NO: 4997 - RNA, 23 nt, synthetic construct
  source 1..23: mol_type = other RNA
  modified_base 1: mod_base = OTHER; note = 2'-O-methyluridine-3'-phosphate 5'-(E)-Vinylphosphonate
  modified_base 2: mod_base = OTHER; note = 2'-deoxy-2'-fluorouridine-3'-phosphate
  modified_base 3: mod_base = OTHER; note = 2'-O-methylcytidine-3'-phosphate
  modified_base 4: mod_base = OTHER; note = 2'-O-methyluridine-3'-phosphate
  modified_base 5: mod_base = OTHER; note = 2'-O-methylcytidine-3'-phosphate
  modified_base 6: mod_base = OTHER; note = 2'-deoxy-2'-fluorouridine-3'-phosphate
  modified_base 7: mod_base = OTHER; note = 2'-O-methyluridine-3'-phosphate
  modified_base 8: mod_base = OTHER; note = 2'-O-methyluridine-3'-phosphate
  modified_base 9: mod_base = OTHER; note = 2'-O-methyluridine-3'-phosphate
  modified_base 10: mod_base = OTHER; note = 2'-O-methylguanosine-3'-phosphate
  modified_base 11: mod_base = OTHER; note = 2'-O-methyluridine-3'-phosphate
  modified_base 12: mod_base = OTHER; note = 2'-O-methyladenosine-3'-phosphate
  modified_base 13: mod_base = OTHER; note = 2'-O-methyladenosine-3'-phosphate
  modified_base 14: mod_base = OTHER; note = 2'-deoxy-2'-fluoroadenosine-3'-phosphate
  modified_base 15: mod_base = OTHER; note = 2'-O-methyluridine-3'-phosphate
  modified_base 16: mod_base = OTHER; note = 2'-deoxy-2'-fluoroguanosine-3'-phosphate
  modified_base 17: mod_base = OTHER; note = 2'-O-methyladenosine-3'-phosphate
  modified_base 18: mod_base = OTHER; note = 2'-O-methyladenosine-3'-phosphate
  modified_base 19: mod_base = OTHER; note = 2'-O-methyladenosine-3'-phosphate
  modified_base 20: mod_base = OTHER; note = 2'-O-methylguanosine-3'-phosphate
  modified_base 21: mod_base = OTHER; note = 2'-O-methylguanosine-3'-phosphate
  modified_base 22: mod_base = OTHER; note = 2'-O-methyladenosine-3'-phosphate
  modified_base 23: mod_base = OTHER; note = 2'-O-methyladenosine
ttctcttttgtaaatgaaaggaa

SEQ ID NO: 4998 - RNA, 23 nt, synthetic construct
  source 1..23: mol_type = other RNA
  modified_base 1: mod_base = OTHER; note = 2'-O-methyluridine-3'-phosphate 5'-(E)-Vinylphosphonate
  modified_base 2: mod_base = OTHER; note = 2'-deoxy-2'-fluoroadenosine-3'-phosphate
  modified_base 3: mod_base = OTHER; note = 2'-O-methyluridine-3'-phosphate
  modified_base 4: mod_base = OTHER; note = 2'-O-methylcytidine-3'-phosphate
  modified_base 5: mod_base = OTHER; note = 2'-O-methyluridine-3'-phosphate
  modified_base 6: mod_base = OTHER; note = 2'-deoxy-2'-fluorocytidine-3'-phosphate
  modified_base 7: mod_base = OTHER; note = 2'-O-methyluridine-3'-phosphate
  modified_base 8: mod_base = OTHER; note = 2'-O-methyluridine-3'-phosphate
  modified_base 9: mod_base = OTHER; note = 2'-O-methyluridine-3'-phosphate
  modified_base 10: mod_base = OTHER; note = 2'-O-methyluridine-3'-phosphate
  modified_base 11: mod_base = OTHER; note = 2'-O-methylguanosine-3'-phosphate
  modified_base 12: mod_base = OTHER; note = 2'-O-methyluridine-3'-phosphate
  modified_base 13: mod_base = OTHER; note = 2'-O-methyladenosine-3'-phosphate
  modified_base 14: mod_base = OTHER; note = 2'-deoxy-2'-fluoroadenosine-3'-phosphate
  modified_base 15: mod_base = OTHER; note = 2'-O-methyladenosine-3'-phosphate
  modified_base 16: mod_base = OTHER; note = 2'-deoxy-2'-fluorouridine-3'-phosphate
  modified_base 17: mod_base = OTHER; note = 2'-O-methylguanosine-3'-phosphate
  modified_base 18: mod_base = OTHER; note = 2'-O-methyladenosine-3'-phosphate
  modified_base 19: mod_base = OTHER; note = 2'-O-methyladenosine-3'-phosphate
  modified_base 20: mod_base = OTHER; note = 2'-O-methyladenosine-3'-phosphate
  modified_base 21: mod_base = OTHER; note = 2'-O-methylguanosine-3'-phosphate
  modified_base 22: mod_base = OTHER; note = 2'-O-methylguanosine-3'-phosphate
  modified_base 23: mod_base = OTHER; note = 2'-O-methyladenosine
tatctcttttgtaaatgaaagga

SEQ ID NO: 4999 - RNA, 23 nt, synthetic construct
  source 1..23: mol_type = other RNA
  modified_base 1: mod_base = OTHER; note = 2'-O-methyluridine-3'-phosphate 5'-(E)-Vinylphosphonate
  modified_base 2: mod_base = OTHER; note = 2'-deoxy-2'-fluorouridine-3'-phosphate
  modified_base 3: mod_base = OTHER; note = 2'-O-methyladenosine-3'-phosphate
  modified_base 4: mod_base = OTHER; note = 2'-O-methyluridine-3'-phosphate
  modified_base 5: mod_base = OTHER; note = 2'-O-methylcytidine-3'-phosphate
  modified_base 6: mod_base = OTHER; note = 2'-deoxy-2'-fluorouridine-3'-phosphate
  modified_base 7: mod_base = OTHER; note = 2'-O-methylcytidine-3'-phosphate
  modified_base 8: mod_base = OTHER; note = 2'-O-methyluridine-3'-phosphate
  modified_base 9: mod_base = OTHER; note = 2'-O-methyluridine-3'-phosphate
  modified_base 10: mod_base = OTHER; note = 2'-O-methyluridine-3'-phosphate
  modified_base 11: mod_base = OTHER; note = 2'-O-methyluridine-3'-phosphate
  modified_base 12: mod_base = OTHER; note = 2'-O-methylguanosine-3'-phosphate
  modified_base 13: mod_base = OTHER; note = 2'-O-methyluridine-3'-phosphate
  modified_base 14: mod_base = OTHER; note = 2'-deoxy-2'-fluoroadenosine-3'-phosphate
  modified_base 15: mod_base = OTHER; note = 2'-O-methyladenosine-3'-phosphate
  modified_base 16: mod_base = OTHER; note = 2'-deoxy-2'-fluoroadenosine-3'-phosphate
  modified_base 17: mod_base = OTHER; note = 2'-O-methyluridine-3'-phosphate
  modified_base 18: mod_base = OTHER; note = 2'-O-methylguanosine-3'-phosphate
  modified_base 19: mod_base = OTHER; note = 2'-O-methyladenosine-3'-phosphate
  modified_base 20: mod_base = OTHER; note = 2'-O-methyladenosine-3'-phosphate
  modified_base 21: mod_base = OTHER; note = 2'-O-methyladenosine-3'-phosphate
  modified_base 22: mod_base = OTHER; note = 2'-O-methylguanosine-3'-phosphate
  modified_base 23: mod_base = OTHER; note = 2'-O-methylguanosine
ttatctcttttgtaaatgaaagg

SEQ ID NO: 5000 - RNA, 23 nt, synthetic construct
  source 1..23: mol_type = other RNA
  modified_base 1: mod_base = OTHER; note = 2'-O-methyluridine-3'-phosphate 5'-(E)-Vinylphosphonate
  modified_base 2: mod_base = OTHER; note = 2'-deoxy-2'-fluoroguanosine-3'-phosphate
  modified_base 3: mod_base = OTHER; note = 2'-O-methyluridine-3'-phosphate
  modified_base 4: mod_base = OTHER; note = 2'-O-methyladenosine-3'-phosphate
  modified_base 5: mod_base = OTHER; note = 2'-O-methyluridine-3'-phosphate
  modified_base 6: mod_base = OTHER; note = 2'-deoxy-2'-fluorocytidine-3'-phosphate
  modified_base 7: mod_base = OTHER; note = 2'-O-methyluridine-3'-phosphate
  modified_base 8: mod_base = OTHER; note = 2'-O-methylcytidine-3'-phosphate
  modified_base 9: mod_base = OTHER; note = 2'-O-methyluridine-3'-phosphate
  modified_base 10: mod_base = OTHER; note = 2'-O-methyluridine-3'-phosphate
  modified_base 11: mod_base = OTHER; note = 2'-O-methyluridine-3'-phosphate
  modified_base 12: mod_base = OTHER; note = 2'-O-methyluridine-3'-phosphate
  modified_base 13: mod_base = OTHER; note = 2'-O-methylguanosine-3'-phosphate
  modified_base 14: mod_base = OTHER; note = 2'-deoxy-2'-fluorouridine-3'-phosphate
  modified_base 15: mod_base = OTHER; note = 2'-O-methyladenosine-3'-phosphate
  modified_base 16: mod_base = OTHER; note = 2'-deoxy-2'-fluoroadenosine-3'-phosphate
  modified_base 17: mod_base = OTHER; note = 2'-O-methyladenosine-3'-phosphate
  modified_base 18: mod_base = OTHER; note = 2'-O-methyluridine-3'-phosphate
  modified_base 19: mod_base = OTHER; note = 2'-O-methylguanosine-3'-phosphate
  modified_base 20: mod_base = OTHER; note = 2'-O-methyladenosine-3'-phosphate
  modified_base 21: mod_base = OTHER; note = 2'-O-methyladenosine-3'-phosphate
  modified_base 22: mod_base = OTHER; note = 2'-O-methyladenosine-3'-phosphate
  modified_base 23: mod_base = OTHER; note = 2'-O-methylguanosine
tgtatctcttttgtaaatgaaag

SEQ ID NO: 5001 - RNA, 23 nt, synthetic construct
  source 1..23: mol_type = other RNA
  modified_base 1: mod_base = OTHER; note = 2'-O-methyluridine-3'-phosphate 5'-(E)-Vinylphosphonate
  modified_base 2: mod_base = OTHER; note = 2'-deoxy-2'-fluoroguanosine-3'-phosphate
  modified_base 3: mod_base = OTHER; note = 2'-O-methylguanosine-3'-phosphate
  modified_base 4: mod_base = OTHER; note = 2'-O-methyluridine-3'-phosphate
  modified_base 5: mod_base = OTHER; note = 2'-O-methyladenosine-3'-phosphate
  modified_base 6: mod_base = OTHER; note = 2'-deoxy-2'-fluorouridine-3'-phosphate
  modified_base 7: mod_base = OTHER; note = 2'-O-methylcytidine-3'-phosphate
  modified_base 8: mod_base = OTHER; note = 2'-O-methyluridine-3'-phosphate
  modified_base 9: mod_base = OTHER; note = 2'-O-methylcytidine-3'-phosphate
  modified_base 10: mod_base = OTHER; note = 2'-O-methyluridine-3'-phosphate
  modified_base 11: mod_base = OTHER; note = 2'-O-methyluridine-3'-phosphate
  modified_base 12: mod_base = OTHER; note = 2'-O-methyluridine-3'-phosphate
  modified_base 13: mod_base = OTHER; note = 2'-O-methyluridine-3'-phosphate
  modified_base 14: mod_base = OTHER; note = 2'-deoxy-2'-fluoroguanosine-3'-phosphate
  modified_base 15: mod_base = OTHER; note = 2'-O-methyluridine-3'-phosphate
  modified_base 16: mod_base = OTHER; note = 2'-deoxy-2'-fluoroadenosine-3'-phosphate
  modified_base 17: mod_base = OTHER; note = 2'-O-methyladenosine-3'-phosphate
  modified_base 18: mod_base = OTHER; note = 2'-O-methyladenosine-3'-phosphate
  modified_base 19: mod_base = OTHER; note = 2'-O-methyluridine-3'-phosphate
  modified_base 20: mod_base = OTHER; note = 2'-O-methylguanosine-3'-phosphate
  modified_base 21: mod_base = OTHER; note = 2'-O-methyladenosine-3'-phosphate
  modified_base 22: mod_base = OTHER; note = 2'-O-methyladenosine-3'-phosphate
  modified_base 23: mod_base = OTHER; note = 2'-O-methyladenosine
tggtatctcttttgtaaatgaaa

SEQ ID NO: 5002 - RNA, 23 nt, synthetic construct
  source 1..23: mol_type = other RNA
  modified_base 1: mod_base = OTHER; note = 2'-O-methyluridine-3'-phosphate 5'-(E)-Vinylphosphonate
  modified_base 2: mod_base = OTHER; note = 2'-deoxy-2'-fluoroadenosine-3'-phosphate
  modified_base 3: mod_base = OTHER; note = 2'-O-methylguanosine-3'-phosphate
  modified_base 4: mod_base = OTHER; note = 2'-O-methylguanosine-3'-phosphate
  modified_base 5: mod_base = OTHER; note = 2'-O-methyluridine-3'-phosphate
  modified_base 6: mod_base = OTHER; note = 2'-deoxy-2'-fluoroadenosine-3'-phosphate
  modified_base 7: mod_base = OTHER; note = 2'-O-methyluridine-3'-phosphate
  modified_base 8: mod_base = OTHER; note = 2'-O-methylcytidine-3'-phosphate
  modified_base 9: mod_base = OTHER; note = 2'-O-methyluridine-3'-phosphate
  modified_base 10: mod_base = OTHER; note = 2'-O-methylcytidine-3'-phosphate
  modified_base 11: mod_base = OTHER; note = 2'-O-methyluridine-3'-phosphate
  modified_base 12: mod_base = OTHER; note = 2'-O-methyluridine-3'-phosphate
  modified_base 13: mod_base = OTHER; note = 2'-O-methyluridine-3'-phosphate
  modified_base 14: mod_base = OTHER; note = 2'-deoxy-2'-fluorouridine-3'-phosphate
  modified_base 15: mod_base = OTHER; note = 2'-O-methylguanosine-3'-phosphate
  modified_base 16: mod_base = OTHER; note = 2'-deoxy-2'-fluorouridine-3'-phosphate
  modified_base 17: mod_base = OTHER; note = 2'-O-methyladenosine-3'-phosphate
  modified_base 18: mod_base = OTHER; note = 2'-O-methyladenosine-3'-phosphate
  modified_base 19: mod_base = OTHER; note = 2'-O-methyladenosine-3'-phosphate
  modified_base 20: mod_base = OTHER; note = 2'-O-methyluridine-3'-phosphate
  modified_base 21: mod_base = OTHER; note = 2'-O-methylguanosine-3'-phosphate
  modified_base 22: mod_base = OTHER; note = 2'-O-methyladenosine-3'-phosphate
  modified_base 23: mod_base = OTHER; note = 2'-O-methyladenosine
taggtatctcttttgtaaatgaa

SEQ ID NO: 5003 - RNA, 23 nt, synthetic construct
  source 1..23: mol_type = other RNA
  modified_base 1: mod_base = OTHER; note = 2'-O-methyluridine-3'-phosphate 5'-(E)-Vinylphosphonate
  modified_base 2: mod_base = OTHER; note = 2'-deoxy-2'-fluorocytidine-3'-phosphate
  modified_base 3: mod_base = OTHER; note = 2'-O-methyladenosine-3'-phosphate
  modified_base 4: mod_base = OTHER; note = 2'-O-methylguanosine-3'-phosphate
  modified_base 5: mod_base = OTHER; note = 2'-O-methylguanosine-3'-phosphate
  modified_base 6: mod_base = OTHER; note = 2'-deoxy-2'-fluorouridine-3'-phosphate
  modified_base 7: mod_base = OTHER; note = 2'-O-methyladenosine-3'-phosphate
  modified_base 8: mod_base = OTHER; note = 2'-O-methyluridine-3'-phosphate
  modified_base 9: mod_base = OTHER; note = 2'-O-methylcytidine-3'-phosphate
  modified_base 10: mod_base = OTHER; note = 2'-O-methyluridine-3'-phosphate
  modified_base 11: mod_base = OTHER; note = 2'-O-methylcytidine-3'-phosphate
  modified_base 12: mod_base = OTHER; note = 2'-O-methyluridine-3'-phosphate
  modified_base 13: mod_base = OTHER; note = 2'-O-methyluridine-3'-phosphate
  modified_base 14: mod_base = OTHER; note = 2'-deoxy-2'-fluorouridine-3'-phosphate
  modified_base 15: mod_base = OTHER; note = 2'-O-methyluridine-3'-phosphate
  modified_base 16: mod_base = OTHER; note = 2'-deoxy-2'-fluoroguanosine-3'-phosphate
  modified_base 17: mod_base = OTHER; note = 2'-O-methyluridine-3'-phosphate
  modified_base 18: mod_base = OTHER; note = 2'-O-methyladenosine-3'-phosphate
  modified_base 19: mod_base = OTHER; note = 2'-O-methyladenosine-3'-phosphate
  modified_base 20: mod_base = OTHER; note = 2'-O-methyladenosine-3'-phosphate
  modified_base 21: mod_base = OTHER; note = 2'-O-methyluridine-3'-phosphate
  modified_base 22: mod_base = OTHER; note = 2'-O-methylguanosine-3'-phosphate
  modified_base 23: mod_base = OTHER; note = 2'-O-methyladenosine
tcaggtatctcttttgtaaatga

SEQ ID NO: 5004 - RNA, 23 nt, synthetic construct
  source 1..23: mol_type = other RNA
  modified_base 1: mod_base = OTHER; note = 2'-O-methyluridine-3'-phosphate 5'-(E)-Vinylphosphonate
  modified_base 2: mod_base = OTHER; note = 2'-deoxy-2'-fluorouridine-3'-phosphate
  modified_base 3: mod_base = OTHER; note = 2'-O-methylcytidine-3'-phosphate
  modified_base 4: mod_base = OTHER; note = 2'-O-methyladenosine-3'-phosphate
  modified_base 5: mod_base = OTHER; note = 2'-O-methylguanosine-3'-phosphate
  modified_base 6: mod_base = OTHER; note = 2'-deoxy-2'-fluoroguanosine-3'-phosphate
  modified_base 7: mod_base = OTHER; note = 2'-O-methyluridine-3'-phosphate
  modified_base 8: mod_base = OTHER; note = 2'-O-methyladenosine-3'-phosphate
  modified_base 9: mod_base = OTHER; note = 2'-O-methyluridine-3'-phosphate
  modified_base 10: mod_base = OTHER; note = 2'-O-methylcytidine-3'-phosphate
  modified_base 11: mod_base = OTHER; note = 2'-O-methyluridine-3'-phosphate
  modified_base 12: mod_base = OTHER; note = 2'-O-methylcytidine-3'-phosphate
  modified_base 13: mod_base = OTHER; note = 2'-O-methyluridine-3'-phosphate
  modified_base 14: mod_base = OTHER; note = 2'-deoxy-2'-fluorouridine-3'-phosphate
  modified_base 15: mod_base = OTHER; note = 2'-O-methyluridine-3'-phosphate
  modified_base 16: mod_base = OTHER; note = 2'-deoxy-2'-fluorouridine-3'-phosphate
  modified_base 17: mod_base = OTHER; note = 2'-O-methylguanosine-3'-phosphate
  modified_base 18: mod_base = OTHER; note = 2'-O-methyluridine-3'-phosphate
  modified_base 19: mod_base = OTHER; note = 2'-O-methyladenosine-3'-phosphate
  modified_base 20: mod_base = OTHER; note = 2'-O-methyladenosine-3'-phosphate
  modified_base 21: mod_base = OTHER; note = 2'-O-methyladenosine-3'-phosphate
  modified_base 22: mod_base = OTHER; note = 2'-O-methyluridine-3'-phosphate
  modified_base 23: mod_base = OTHER; note = 2'-O-methylguanosine
ttcaggtatctcttttgtaaatg

SEQ ID NO: 5005 - RNA, 23 nt, synthetic construct
  source 1..23: mol_type = other RNA
  modified_base 1: mod_base = OTHER; note = 2'-O-methyluridine-3'-phosphate 5'-(E)-Vinylphosphonate
  modified_base 2: mod_base = OTHER; note = 2'-deoxy-2'-fluoroguanosine-3'-phosphate
  modified_base 3: mod_base = OTHER; note = 2'-O-methyluridine-3'-phosphate
  modified_base 4: mod_base = OTHER; note = 2'-O-methylcytidine-3'-phosphate
  modified_base 5: mod_base = OTHER; note = 2'-O-methyladenosine-3'-phosphate
  modified_base 6: mod_base = OTHER; note = 2'-deoxy-2'-fluoroguanosine-3'-phosphate
  modified_base 7: mod_base = OTHER; note = 2'-O-methylguanosine-3'-phosphate
  modified_base 8: mod_base = OTHER; note = 2'-O-methyluridine-3'-phosphate
  modified_base 9: mod_base = OTHER; note = 2'-O-methyladenosine-3'-phosphate
  modified_base 10: mod_base = OTHER; note = 2'-O-methyluridine-3'-phosphate
  modified_base 11: mod_base = OTHER; note = 2'-O-methylcytidine-3'-phosphate
  modified_base 12: mod_base = OTHER; note = 2'-O-methyluridine-3'-phosphate
  modified_base 13: mod_base = OTHER; note = 2'-O-methylcytidine-3'-phosphate
  modified_base 14: mod_base = OTHER; note = 2'-deoxy-2'-fluorouridine-3'-phosphate
  modified_base 15: mod_base = OTHER; note = 2'-O-methyluridine-3'-phosphate
  modified_base 16: mod_base = OTHER; note = 2'-deoxy-2'-fluorouridine-3'-phosphate
  modified_base 17: mod_base = OTHER; note = 2'-O-methyluridine-3'-phosphate
  modified_base 18: mod_base = OTHER; note = 2'-O-methylguanosine-3'-phosphate
  modified_base 19: mod_base = OTHER; note = 2'-O-methyluridine-3'-phosphate
  modified_base 20: mod_base = OTHER; note = 2'-O-methyladenosine-3'-phosphate
  modified_base 21: mod_base = OTHER; note = 2'-O-methyladenosine-3'-phosphate
  modified_base 22: mod_base = OTHER; note = 2'-O-methyladenosine-3'-phosphate
  modified_base 23: mod_base = OTHER; note = 2'-O-methyluridine
tgtcaggtatctcttttgtaaat

SEQ ID NO: 5006 - RNA, 23 nt, synthetic construct
  source 1..23: mol_type = other RNA
  modified_base 1: mod_base = OTHER; note = 2'-O-methyluridine-3'-phosphate 5'-(E)-Vinylphosphonate
  modified_base 2: mod_base = OTHER; note = 2'-deoxy-2'-fluorouridine-3'-phosphate
  modified_base 3: mod_base = OTHER; note = 2'-O-methylguanosine-3'-phosphate
  modified_base 4: mod_base = OTHER; note = 2'-O-methyluridine-3'-phosphate
  modified_base 5: mod_base = OTHER; note = 2'-O-methylcytidine-3'-phosphate
  modified_base 6: mod_base = OTHER; note = 2'-deoxy-2'-fluoroadenosine-3'-phosphate
  modified_base 7: mod_base = OTHER; note = 2'-O-methylguanosine-3'-phosphate
  modified_base 8: mod_base = OTHER; note = 2'-O-methylguanosine-3'-phosphate
  modified_base 9: mod_base = OTHER; note = 2'-O-methyluridine-3'-phosphate
  modified_base 10: mod_base = OTHER; note = 2'-O-methyladenosine-3'-phosphate
  modified_base 11: mod_base = OTHER; note = 2'-O-methyluridine-3'-phosphate
  modified_base 12: mod_base = OTHER; note = 2'-O-methylcytidine-3'-phosphate
  modified_base 13: mod_base = OTHER; note = 2'-O-methyluridine-3'-phosphate
  modified_base 14: mod_base = OTHER; note = 2'-deoxy-2'-fluorocytidine-3'-phosphate
  modified_base 15: mod_base = OTHER; note = 2'-O-methyluridine-3'-phosphate
  modified_base 16: mod_base = OTHER; note = 2'-deoxy-2'-fluorouridine-3'-phosphate
  modified_base 17: mod_base = OTHER; note = 2'-O-methyluridine-3'-phosphate
  modified_base 18: mod_base = OTHER; note = 2'-O-methyluridine-3'-phosphate
  modified_base 19: mod_base = OTHER; note = 2'-O-methylguanosine-3'-phosphate
  modified_base 20: mod_base = OTHER; note = 2'-O-methyluridine-3'-phosphate
  modified_base 21: mod_base = OTHER; note = 2'-O-methyladenosine-3'-phosphate
  modified_base 22: mod_base = OTHER; note = 2'-O-methyladenosine-3'-phosphate
  modified_base 23: mod_base = OTHER; note = 2'-O-methyladenosine
ttgtcaggtatctcttttgtaaa

SEQ ID NO: 5007 - RNA, 23 nt, synthetic construct
  source 1..23: mol_type = other RNA
  modified_base 1: mod_base = OTHER; note = 2'-O-methyluridine-3'-phosphate 5'-(E)-Vinylphosphonate
  modified_base 2: mod_base = OTHER; note = 2'-deoxy-2'-fluoroadenosine-3'-phosphate
  modified_base 3: mod_base = OTHER; note = 2'-O-methyluridine-3'-phosphate
  modified_base 4: mod_base = OTHER; note = 2'-O-methylguanosine-3'-phosphate
  modified_base 5: mod_base = OTHER; note = 2'-O-methyluridine-3'-phosphate
  modified_base 6: mod_base = OTHER; note = 2'-deoxy-2'-fluorocytidine-3'-phosphate
  modified_base 7: mod_base = OTHER; note = 2'-O-methyladenosine-3'-phosphate
  modified_base 8: mod_base = OTHER; note = 2'-O-methylguanosine-3'-phosphate
  modified_base 9: mod_base = OTHER; note = 2'-O-methylguanosine-3'-phosphate
  modified_base 10: mod_base = OTHER; note = 2'-O-methyluridine-3'-phosphate
  modified_base 11: mod_base = OTHER; note = 2'-O-methyladenosine-3'-phosphate
  modified_base 12: mod_base = OTHER; note = 2'-O-methyluridine-3'-phosphate
  modified_base 13: mod_base = OTHER; note = 2'-O-methylcytidine-3'-phosphate
  modified_base 14: mod_base = OTHER; note = 2'-deoxy-2'-fluorouridine-3'-phosphate
  modified_base 15: mod_base = OTHER; note = 2'-O-methylcytidine-3'-phosphate
  modified_base 16: mod_base = OTHER; note = 2'-deoxy-2'-fluorouridine-3'-phosphate
  modified_base 17: mod_base = OTHER; note = 2'-O-methyluridine-3'-phosphate
  modified_base 18: mod_base = OTHER; note = 2'-O-methyluridine-3'-phosphate
  modified_base 19: mod_base = OTHER; note = 2'-O-methyluridine-3'-phosphate
  modified_base 20: mod_base = OTHER; note = 2'-O-methylguanosine-3'-phosphate
  modified_base 21: mod_base = OTHER; note = 2'-O-methyluridine-3'-phosphate
  modified_base 22: mod_base = OTHER; note = 2'-O-methyladenosine-3'-phosphate
  modified_base 23: mod_base = OTHER; note = 2'-O-methyladenosine
tatgtcaggtatctcttttgtaa

SEQ ID NO: 5008 - RNA, 23 nt, synthetic construct
  source 1..23: mol_type = other RNA
  modified_base 1: mod_base = OTHER; note = 2'-O-methyluridine-3'-phosphate 5'-(E)-Vinylphosphonate
  modified_base 2: mod_base = OTHER; note = 2'-deoxy-2'-fluoroguanosine-3'-phosphate
  modified_base 3: mod_base = OTHER; note = 2'-O-methyladenosine-3'-phosphate
  modified_base 4: mod_base = OTHER; note = 2'-O-methyluridine-3'-phosphate
  modified_base 5: mod_base = OTHER; note = 2'-O-methylguanosine-3'-phosphate
  modified_base 6: mod_base = OTHER; note = 2'-deoxy-2'-fluorouridine-3'-phosphate
  modified_base 7: mod_base = OTHER; note = 2'-O-methylcytidine-3'-phosphate
  modified_base 8: mod_base = OTHER; note = 2'-O-methyladenosine-3'-phosphate
  modified_base 9: mod_base = OTHER; note = 2'-O-methylguanosine-3'-phosphate
  modified_base 10: mod_base = OTHER; note = 2'-O-methylguanosine-3'-phosphate
  modified_base 11: mod_base = OTHER; note = 2'-O-methyluridine-3'-phosphate
  modified_base 12: mod_base = OTHER; note = 2'-O-methyladenosine-3'-phosphate
  modified_base 13: mod_base = OTHER; note = 2'-O-methyluridine-3'-phosphate
  modified_base 14: mod_base = OTHER; note = 2'-deoxy-2'-fluorocytidine-3'-phosphate
  modified_base 15: mod_base = OTHER; note = 2'-O-methyluridine-3'-phosphate
  modified_base 16: mod_base = OTHER; note = 2'-deoxy-2'-fluorocytidine-3'-phosphate
  modified_base 17: mod_base = OTHER; note = 2'-O-methyluridine-3'-phosphate
  modified_base 18: mod_base = OTHER; note = 2'-O-methyluridine-3'-phosphate
  modified_base 19: mod_base = OTHER; note = 2'-O-methyluridine-3'-phosphate
  modified_base 20: mod_base = OTHER; note = 2'-O-methyluridine-3'-phosphate
  modified_base 21: mod_base = OTHER; note = 2'-O-methylguanosine-3'-phosphate
  modified_base 22: mod_base = OTHER; note = 2'-O-methyluridine-3'-phosphate
  modified_base 23: mod_base = OTHER; note = 2'-O-methyladenosine
tgatgtcaggtatctcttttgta

SEQ ID NO: 5009 - RNA, 23 nt, synthetic construct
  source 1..23: mol_type = other RNA
  modified_base 1: mod_base = OTHER; note = 2'-O-methyluridine-3'-phosphate 5'-(E)-Vinylphosphonate
  modified_base 2: mod_base = OTHER; note = 2'-deoxy-2'-fluoroguanosine-3'-phosphate
  modified_base 3: mod_base = OTHER; note = 2'-O-methylguanosine-3'-phosphate
  modified_base 4: mod_base = OTHER; note = 2'-O-methyladenosine-3'-phosphate
  modified_base 5: mod_base = OTHER; note = 2'-O-methyluridine-3'-phosphate
  modified_base 6: mod_base = OTHER; note = 2'-deoxy-2'-fluoroguanosine-3'-phosphate
  modified_base 7: mod_base = OTHER; note = 2'-O-methyluridine-3'-phosphate
  modified_base 8: mod_base = OTHER; note = 2'-O-methylcytidine-3'-phosphate
  modified_base 9: mod_base = OTHER; note = 2'-O-methyladenosine-3'-phosphate
  modified_base 10: mod_base = OTHER; note = 2'-O-methylguanosine-3'-phosphate
  modified_base 11: mod_base = OTHER; note = 2'-O-methylguanosine-3'-phosphate
  modified_base 12: mod_base = OTHER; note = 2'-O-methyluridine-3'-phosphate
  modified_base 13: mod_base = OTHER; note = 2'-O-methyladenosine-3'-phosphate
  modified_base 14: mod_base = OTHER; note = 2'-deoxy-2'-fluorouridine-3'-phosphate
  modified_base 15: mod_base = OTHER; note = 2'-O-methylcytidine-3'-phosphate
  modified_base 16: mod_base = OTHER; note = 2'-deoxy-2'-fluorouridine-3'-phosphate
  modified_base 17: mod_base = OTHER; note = 2'-O-methylcytidine-3'-phosphate
  modified_base 18: mod_base = OTHER; note = 2'-O-methyluridine-3'-phosphate
  modified_base 19: mod_base = OTHER; note = 2'-O-methyluridine-3'-phosphate
  modified_base 20: mod_base = OTHER; note = 2'-O-methyluridine-3'-phosphate
  modified_base 21: mod_base = OTHER; note = 2'-O-methyluridine-3'-phosphate
  modified_base 22: mod_base = OTHER; note = 2'-O-methylguanosine-3'-phosphate
  modified_base 23: mod_base = OTHER; note = 2'-O-methyluridine
tggatgtcaggtatctcttttgt

SEQ ID NO: 5010 - RNA, 23 nt, synthetic construct
  source 1..23: mol_type = other RNA
  modified_base 1: mod_base = OTHER; note = 2'-O-methyluridine-3'-phosphate 5'-(E)-Vinylphosphonate
  modified_base 2: mod_base = OTHER; note = 2'-deoxy-2'-fluorocytidine-3'-phosphate
  modified_base 3: mod_base = OTHER; note = 2'-O-methyladenosine-3'-phosphate
  modified_base 4: mod_base = OTHER; note = 2'-O-methyluridine-3'-phosphate
  modified_base 5: mod_base = OTHER; note = 2'-O-methyluridine-3'-phosphate
  modified_base 6: mod_base = OTHER; note = 2'-deoxy-2'-fluorouridine-3'-phosphate
  modified_base 7: mod_base = OTHER; note = 2'-O-methylcytidine-3'-phosphate
  modified_base 8: mod_base = OTHER; note = 2'-O-methyluridine-3'-phosphate
  modified_base 9: mod_base = OTHER; note = 2'-O-methylcytidine-3'-phosphate
  modified_base 10: mod_base = OTHER; note = 2'-O-methyladenosine-3'-phosphate
  modified_base 11: mod_base = OTHER; note = 2'-O-methylguanosine-3'-phosphate
  modified_base 12: mod_base = OTHER; note = 2'-O-methyluridine-3'-phosphate
  modified_base 13: mod_base = OTHER; note = 2'-O-methylguanosine-3'-phosphate
  modified_base 14: mod_base = OTHER; note = 2'-deoxy-2'-fluorouridine-3'-phosphate
  modified_base 15: mod_base = OTHER; note = 2'-O-methylcytidine-3'-phosphate
  modified_base 16: mod_base = OTHER; note = 2'-deoxy-2'-fluorouridine-3'-phosphate
  modified_base 17: mod_base = OTHER; note = 2'-O-methylcytidine-3'-phosphate
  modified_base 18: mod_base = OTHER; note = 2'-O-methyladenosine-3'-phosphate
  modified_base 19: mod_base = OTHER; note = 2'-O-methylguanosine-3'-phosphate
  modified_base 20: mod_base = OTHER; note = 2'-O-methylguanosine-3'-phosphate
  modified_base 21: mod_base = OTHER; note = 2'-O-methyladenosine-3'-phosphate
  modified_base 22: mod_base = OTHER; note = 2'-O-methyluridine-3'-phosphate
  modified_base 23: mod_base = OTHER; note = 2'-O-methylguanosine
tcatttctcagtgtctcaggatg

SEQ ID NO: 5011 - RNA, 23 nt, synthetic construct
  source 1..23: mol_type = other RNA
  modified_base 1: mod_base = OTHER; note = 2'-O-methyluridine-3'-phosphate 5'-(E)-Vinylphosphonate
  modified_base 2: mod_base = OTHER; note = 2'-deoxy-2'-fluoroguanosine-3'-phosphate
  modified_base 3: mod_base = OTHER; note = 2'-O-methyladenosine-3'-phosphate
  modified_base 4: mod_base = OTHER; note = 2'-O-methylcytidine-3'-phosphate
  modified_base 5: mod_base = OTHER; note = 2'-O-methyladenosine-3'-phosphate
  modified_base 6: mod_base = OTHER; note = 2'-deoxy-2'-fluorouridine-3'-phosphate
  modified_base 7: mod_base = OTHER; note = 2'-O-methyluridine-3'-phosphate
  modified_base 8: mod_base = OTHER; note = 2'-O-methyluridine-3'-phosphate
  modified_base 9: mod_base = OTHER; note = 2'-O-methylcytidine-3'-phosphate
  modified_base 10: mod_base = OTHER; note = 2'-O-methyluridine-3'-phosphate
  modified_base 11: mod_base = OTHER; note = 2'-O-methylcytidine-3'-phosphate
  modified_base 12: mod_base = OTHER; note = 2'-O-methyladenosine-3'-phosphate
  modified_base 13: mod_base = OTHER; note = 2'-O-methylguanosine-3'-phosphate
  modified_base 14: mod_base = OTHER; note = 2'-deoxy-2'-fluorouridine-3'-phosphate
  modified_base 15: mod_base = OTHER; note = 2'-O-methylguanosine-3'-phosphate
  modified_base 16: mod_base = OTHER; note = 2'-deoxy-2'-fluorouridine-3'-phosphate
  modified_base 17: mod_base = OTHER; note = 2'-O-methylcytidine-3'-phosphate
  modified_base 18: mod_base = OTHER; note = 2'-O-methyluridine-3'-phosphate
  modified_base 19: mod_base = OTHER; note = 2'-O-methylcytidine-3'-phosphate
  modified_base 20: mod_base = OTHER; note = 2'-O-methyladenosine-3'-phosphate
  modified_base 21: mod_base = OTHER; note = 2'-O-methylguanosine-3'-phosphate
  modified_base 22: mod_base = OTHER; note = 2'-O-methylguanosine-3'-phosphate
  modified_base 23: mod_base = OTHER; note = 2'-O-methyladenosine
tgacatttctcagtgtctcagga

SEQ ID NO: 5012 - RNA, 23 nt, synthetic construct
  source 1..23: mol_type = other RNA
  modified_base 1: mod_base = OTHER; note = 2'-O-methyluridine-3'-phosphate 5'-(E)-Vinylphosphonate
  modified_base 2: mod_base = OTHER; note = 2'-deoxy-2'-fluoroadenosine-3'-phosphate
  modified_base 3: mod_base = OTHER; note = 2'-O-methylguanosine-3'-phosphate
  modified_base 4: mod_base = OTHER; note = 2'-O-methylguanosine-3'-phosphate
  modified_base 5: mod_base = OTHER; note = 2'-O-methyladenosine-3'-phosphate
  modified_base 6: mod_base = OTHER; note = 2'-deoxy-2'-fluorocytidine-3'-phosphate
  modified_base 7: mod_base = OTHER; note = 2'-O-methyladenosine-3'-phosphate
  modified_base 8: mod_base = OTHER; note = 2'-O-methyluridine-3'-phosphate
  modified_base 9: mod_base = OTHER; note = 2'-O-methyluridine-3'-phosphate
  modified_base 10: mod_base = OTHER; note = 2'-O-methyluridine-3'-phosphate
  modified_base 11: mod_base = OTHER; note = 2'-O-methylcytidine-3'-phosphate
  modified_base 12: mod_base = OTHER; note = 2'-O-methyluridine-3'-phosphate
  modified_base 13: mod_base = OTHER; note = 2'-O-methylcytidine-3'-phosphate
  modified_base 14: mod_base = OTHER; note = 2'-deoxy-2'-fluoroadenosine-3'-phosphate
  modified_base 15: mod_base = OTHER; note = 2'-O-methylguanosine-3'-phosphate
  modified_base 16: mod_base = OTHER; note = 2'-deoxy-2'-fluorouridine-3'-phosphate
  modified_base 17: mod_base = OTHER; note = 2'-O-methylguanosine-3'-phosphate
  modified_base 18: mod_base = OTHER; note = 2'-O-methyluridine-3'-phosphate
  modified_base 19: mod_base = OTHER; note = 2'-O-methylcytidine-3'-phosphate
  modified_base 20: mod_base = OTHER; note = 2'-O-methyluridine-3'-phosphate
  modified_base 21: mod_base = OTHER; note = 2'-O-methylcytidine-3'-phosphate
  modified_base 22: mod_base = OTHER; note = 2'-O-methyladenosine-3'-phosphate
  modified_base 23: mod_base = OTHER; note = 2'-O-methylguanosine
taggacatttctcagtgtctcag

SEQ ID NO: 5013 - RNA, 23 nt, synthetic construct
  source 1..23: mol_type = other RNA
  modified_base 1: mod_base = OTHER; note = 2'-O-methyluridine-3'-phosphate 5'-(E)-Vinylphosphonate
  modified_base 2: mod_base = OTHER; note = 2'-deoxy-2'-fluorouridine-3'-phosphate
  modified_base 3: mod_base = OTHER; note = 2'-O-methylguanosine-3'-phosphate
  modified_base 4: mod_base = OTHER; note = 2'-O-methyluridine-3'-phosphate
  modified_base 5: mod_base = OTHER; note = 2'-O-methylguanosine-3'-phosphate
  modified_base 6: mod_base = OTHER; note = 2'-deoxy-2'-fluoroadenosine-3'-phosphate
  modified_base 7: mod_base = OTHER; note = 2'-O-methylcytidine-3'-phosphate
  modified_base 8: mod_base = OTHER; note = 2'-O-methyluridine-3'-phosphate
  modified_base 9: mod_base = OTHER; note = 2'-O-methyluridine-3'-phosphate
  modified_base 10: mod_base = OTHER; note = 2'-O-methylcytidine-3'-phosphate
  modified_base 11: mod_base = OTHER; note = 2'-O-methyladenosine-3'-phosphate
  modified_base 12: mod_base = OTHER; note = 2'-O-methylguanosine-3'-phosphate
  modified_base 13: mod_base = OTHER; note = 2'-O-methylguanosine-3'-phosphate
  modified_base 14: mod_base = OTHER; note = 2'-deoxy-2'-fluoroadenosine-3'-phosphate
  modified_base 15: mod_base = OTHER; note = 2'-O-methylcytidine-3'-phosphate
  modified_base 16: mod_base = OTHER; note = 2'-deoxy-2'-fluoroadenosine-3'-phosphate
  modified_base 17: mod_base = OTHER; note = 2'-O-methyluridine-3'-phosphate
  modified_base 18: mod_base = OTHER; note = 2'-O-methyluridine-3'-phosphate
  modified_base 19: mod_base = OTHER; note = 2'-O-methyluridine-3'-phosphate
  modified_base 20: mod_base = OTHER; note = 2'-O-methylcytidine-3'-phosphate
  modified_base 21: mod_base = OTHER; note = 2'-O-methyluridine-3'-phosphate
  modified_base 22: mod_base = OTHER; note = 2'-O-methylcytidine-3'-phosphate
  modified_base 23: mod_base = OTHER; note = 2'-O-methyladenosine
ttgtgacttcaggacatttctca

SEQ ID NO: 5014 - RNA, 23 nt, synthetic construct
  source 1..23: mol_type = other RNA
  modified_base 1: mod_base = OTHER; note = 2'-O-methyluridine-3'-phosphate 5'-(E)-Vinylphosphonate
  modified_base 2: mod_base = OTHER; note = 2'-deoxy-2'-fluoroadenosine-3'-phosphate
  modified_base 3: mod_base = OTHER; note = 2'-O-methyluridine-3'-phosphate
  modified_base 4: mod_base = OTHER; note = 2'-O-methyluridine-3'-phosphate
  modified_base 5: mod_base = OTHER; note = 2'-O-methyladenosine-3'-phosphate
  modified_base 6: mod_base = OTHER; note = 2'-deoxy-2'-fluoroguanosine-3'-phosphate
  modified_base 7: mod_base = OTHER; note = 2'-O-methylcytidine-3'-phosphate
  modified_base 8: mod_base = OTHER; note = 2'-O-methyluridine-3'-phosphate
  modified_base 9: mod_base = OTHER; note = 2'-O-methylguanosine-3'-phosphate
  modified_base 10: mod_base = OTHER; note = 2'-O-methyluridine-3'-phosphate
  modified_base 11: mod_base = OTHER; note = 2'-O-methylguanosine-3'-phosphate
  modified_base 12: mod_base = OTHER; note = 2'-O-methyluridine-3'-phosphate
  modified_base 13: mod_base = OTHER; note = 2'-O-methylguanosine-3'-phosphate
  modified_base 14: mod_base = OTHER; note = 2'-deoxy-2'-fluoroadenosine-3'-phosphate
  modified_base 15: mod_base = OTHER; note = 2'-O-methylcytidine-3'-phosphate
  modified_base 16: mod_base = OTHER; note = 2'-deoxy-2'-fluorouridine-3'-phosphate
  modified_base 17: mod_base = OTHER; note = 2'-O-methyluridine-3'-phosphate
  modified_base 18: mod_base = OTHER; note = 2'-O-methylcytidine-3'-phosphate
  modified_base 19: mod_base = OTHER; note = 2'-O-methyladenosine-3'-phosphate
  modified_base 20: mod_base = OTHER; note = 2'-O-methylguanosine-3'-phosphate
  modified_base 21: mod_base = OTHER; note = 2'-O-methylguanosine-3'-phosphate
  modified_base 22: mod_base = OTHER; note = 2'-O-methyladenosine-3'-phosphate
  modified_base 23: mod_base = OTHER; note = 2'-O-methylcytidine
tattagctgtgtgacttcaggac

SEQ ID NO: 5015 - RNA, 23 nt, synthetic construct
  source 1..23: mol_type = other RNA
  modified_base 1: mod_base = OTHER; note = 2'-O-methyluridine-3'-phosphate 5'-(E)-Vinylphosphonate
  modified_base 2: mod_base = OTHER; note = 2'-deoxy-2'-fluorouridine-3'-phosphate
  modified_base 3: mod_base = OTHER; note = 2'-O-methyladenosine-3'-phosphate
  modified_base 4: mod_base = OTHER; note = 2'-O-methyluridine-3'-phosphate
  modified_base 5: mod_base = OTHER; note = 2'-O-methylcytidine-3'-phosphate
  modified_base 6: mod_base = OTHER; note = 2'-deoxy-2'-fluoroadenosine-3'-phosphate
  modified_base 7: mod_base = OTHER; note = 2'-O-methylcytidine-3'-phosphate
  modified_base 8: mod_base = OTHER; note = 2'-O-methyladenosine-3'-phosphate
  modified_base 9: mod_base = OTHER; note = 2'-O-methyladenosine-3'-phosphate
  modified_base 10: mod_base = OTHER; note = 2'-O-methylguanosine-3'-phosphate
  modified_base 11: mod_base = OTHER; note = 2'-O-methyladenosine-3'-phosphate
  modified_base 12: mod_base = OTHER; note = 2'-O-methyluridine-3'-phosphate
  modified_base 13: mod_base = OTHER; note = 2'-O-methyluridine-3'-phosphate
  modified_base 14: mod_base = OTHER; note = 2'-deoxy-2'-fluorouridine-3'-phosphate
  modified_base 15: mod_base = OTHER; note = 2'-O-methylguanosine-3'-phosphate
  modified_base 16: mod_base = OTHER; note = 2'-deoxy-2'-fluoroguanosine-3'-phosphate
  modified_base 17: mod_base = OTHER; note = 2'-O-methyladenosine-3'-phosphate
  modified_base 18: mod_base = OTHER; note = 2'-O-methylcytidine-3'-phosphate
  modified_base 19: mod_base = OTHER; note = 2'-O-methylcytidine-3'-phosphate
  modified_base 20: mod_base = OTHER; note = 2'-O-methyluridine-3'-phosphate
  modified_base 21: mod_base = OTHER; note = 2'-O-methyladenosine-3'-phosphate
  modified_base 22: mod_base = OTHER; note = 2'-O-methylguanosine-3'-phosphate
  modified_base 23: mod_base = OTHER; note = 2'-O-methyluridine
ttatcacaagatttggacctagt

SEQ ID NO: 5016 - RNA, 23 nt, synthetic construct
  source 1..23: mol_type = other RNA
  modified_base 1: mod_base = OTHER; note = 2'-O-methyluridine-3'-phosphate 5'-(E)-Vinylphosphonate
  modified_base 2: mod_base = OTHER; note = 2'-deoxy-2'-fluorouridine-3'-phosphate
  modified_base 3: mod_base = OTHER; note = 2'-O-methyluridine-3'-phosphate
  modified_base 4: mod_base = OTHER; note = 2'-O-methyladenosine-3'-phosphate
  modified_base 5: mod_base = OTHER; note = 2'-O-methyluridine-3'-phosphate
  modified_base 6: mod_base = OTHER; note = 2'-deoxy-2'-fluorocytidine-3'-phosphate
  modified_base 7: mod_base = OTHER; note = 2'-O-methyladenosine-3'-phosphate
  modified_base 8: mod_base = OTHER; note = 2'-O-methylcytidine-3'-phosphate
  modified_base 9: mod_base = OTHER; note = 2'-O-methyladenosine-3'-phosphate
  modified_base 10: mod_base = OTHER; note = 2'-O-methyladenosine-3'-phosphate
  modified_base 11: mod_base = OTHER; note = 2'-O-methylguanosine-3'-phosphate
  modified_base 12: mod_base = OTHER; note = 2'-O-methyladenosine-3'-phosphate
  modified_base 13: mod_base = OTHER; note = 2'-O-methyluridine-3'-phosphate
  modified_base 14: mod_base = OTHER; note = 2'-deoxy-2'-fluorouridine-3'-phosphate
  modified_base 15: mod_base = OTHER; note = 2'-O-methyluridine-3'-phosphate
  modified_base 16: mod_base = OTHER; note = 2'-deoxy-2'-fluoroguanosine-3'-phosphate
  modified_base 17: mod_base = OTHER; note = 2'-O-methylguanosine-3'-phosphate
  modified_base 18: mod_base = OTHER; note = 2'-O-methyladenosine-3'-phosphate
  modified_base 19: mod_base = OTHER; note = 2'-O-methylcytidine-3'-phosphate
  modified_base 20: mod_base = OTHER; note = 2'-O-methylcytidine-3'-phosphate
  modified_base 21: mod_base = OTHER; note = 2'-O-methyluridine-3'-phosphate
  modified_base 22: mod_base = OTHER; note = 2'-O-methyladenosine-3'-phosphate
  modified_base 23: mod_base = OTHER; note = 2'-O-methylguanosine
tttatcacaagatttggacctag

SEQ ID NO: 5017 - RNA, 23 nt, synthetic construct
  source 1..23: mol_type = other RNA
  modified_base 1: mod_base = OTHER; note = 2'-O-methyluridine-3'-phosphate 5'-(E)-Vinylphosphonate
  modified_base 2: mod_base = OTHER; note = 2'-deoxy-2'-fluorocytidine-3'-phosphate
  modified_base 3: mod_base = OTHER; note = 2'-O-methyladenosine-3'-phosphate
  modified_base 4: mod_base = OTHER; note = 2'-O-methyluridine-3'-phosphate
  modified_base 5: mod_base = OTHER; note = 2'-O-methyluridine-3'-phosphate
  modified_base 6: mod_base = OTHER; note = 2'-deoxy-2'-fluoroadenosine-3'-phosphate
  modified_base 7: mod_base = OTHER; note = 2'-O-methyluridine-3'-phosphate
  modified_base 8: mod_base = OTHER; note = 2'-O-methylcytidine-3'-phosphate
  modified_base 9: mod_base = OTHER; note = 2'-O-methyladenosine-3'-phosphate
  modified_base 10: mod_base = OTHER; note = 2'-O-methylcytidine-3'-phosphate
  modified_base 11: mod_base = OTHER; note = 2'-O-methyladenosine-3'-phosphate
  modified_base 12: mod_base = OTHER; note = 2'-O-methyladenosine-3'-phosphate
  modified_base 13: mod_base = OTHER; note = 2'-O-methylguanosine-3'-phosphate
  modified_base 14: mod_base = OTHER; note = 2'-deoxy-2'-fluoroadenosine-3'-phosphate
  modified_base 15: mod_base = OTHER; note = 2'-O-methyluridine-3'-phosphate
  modified_base 16: mod_base = OTHER; note = 2'-deoxy-2'-fluorouridine-3'-phosphate
  modified_base 17: mod_base = OTHER; note = 2'-O-methyluridine-3'-phosphate
  modified_base 18: mod_base = OTHER; note = 2'-O-methylguanosine-3'-phosphate
  modified_base 19: mod_base = OTHER; note = 2'-O-methylguanosine-3'-phosphate
  modified_base 20: mod_base = OTHER; note = 2'-O-methyladenosine-3'-phosphate
  modified_base 21: mod_base = OTHER; note = 2'-O-methylcytidine-3'-phosphate
  modified_base 22: mod_base = OTHER; note = 2'-O-methylcytidine-3'-phosphate
  modified_base 23: mod_base = OTHER; note = 2'-O-methyluridine
tcattatcacaagatttggacct

SEQ ID NO: 5018 - RNA, 23 nt, synthetic construct
  source 1..23: mol_type = other RNA
  modified_base 1: mod_base = OTHER; note = 2'-O-methyluridine-3'-phosphate 5'-(E)-Vinylphosphonate
  modified_base 2: mod_base = OTHER; note = 2'-deoxy-2'-fluorouridine-3'-phosphate
  modified_base 3: mod_base = OTHER; note = 2'-O-methyluridine-3'-phosphate
  modified_base 4: mod_base = OTHER; note = 2'-O-methylcytidine-3'-phosphate
  modified_base 5: mod_base = OTHER; note = 2'-O-methyladenosine-3'-phosphate
  modified_base 6: mod_base = OTHER; note = 2'-deoxy-2'-fluorouridine-3'-phosphate
  modified_base 7: mod_base = OTHER; note = 2'-O-methyluridine-3'-phosphate
  modified_base 8: mod_base = OTHER; note = 2'-O-methyladenosine-3'-phosphate
  modified_base 9: mod_base = OTHER; note = 2'-O-methyluridine-3'-phosphate
  modified_base 10: mod_base = OTHER; note = 2'-O-methylcytidine-3'-phosphate
  modified_base 11: mod_base = OTHER; note = 2'-O-methyladenosine-3'-phosphate
  modified_base 12: mod_base = OTHER; note = 2'-O-methylcytidine-3'-phosphate
  modified_base 13: mod_base = OTHER; note = 2'-O-methyladenosine-3'-phosphate
  modified_base 14: mod_base = OTHER; note = 2'-deoxy-2'-fluoroadenosine-3'-phosphate
  modified_base 15: mod_base = OTHER; note = 2'-O-methylguanosine-3'-phosphate
  modified_base 16: mod_base = OTHER; note = 2'-deoxy-2'-fluoroadenosine-3'-phosphate
  modified_base 17: mod_base = OTHER; note = 2'-O-methyluridine-3'-phosphate
  modified_base 18: mod_base = OTHER; note = 2'-O-methyluridine-3'-phosphate
  modified_base 19: mod_base = OTHER; note = 2'-O-methyluridine-3'-phosphate
  modified_base 20: mod_base = OTHER; note = 2'-O-methylguanosine-3'-phosphate
  modified_base 21: mod_base = OTHER; note = 2'-O-methylguanosine-3'-phosphate
  modified_base 22: mod_base = OTHER; note = 2'-O-methyladenosine-3'-phosphate
  modified_base 23: mod_base = OTHER; note = 2'-O-methylcytidine
tttcattatcacaagatttggac

SEQ ID NO: 5019 - RNA, 23 nt, synthetic construct
  source 1..23: mol_type = other RNA
  modified_base 1: mod_base = OTHER; note = 2'-O-methyluridine-3'-phosphate 5'-(E)-Vinylphosphonate
  modified_base 2: mod_base = OTHER; note = 2'-deoxy-2'-fluorouridine-3'-phosphate
  modified_base 3: mod_base = OTHER; note = 2'-O-methylguanosine-3'-phosphate
  modified_base 4: mod_base = OTHER; note = 2'-O-methyluridine-3'-phosphate
  modified_base 5: mod_base = OTHER; note = 2'-O-methyluridine-3'-phosphate
  modified_base 6: mod_base = OTHER; note = 2'-deoxy-2'-fluorocytidine-3'-phosphate
  modified_base 7: mod_base = OTHER; note = 2'-O-methyladenosine-3'-phosphate
  modified_base 8: mod_base = OTHER; note = 2'-O-methyluridine-3'-phosphate
  modified_base 9: mod_base = OTHER; note = 2'-O-methyluridine-3'-phosphate
  modified_base 10: mod_base = OTHER; note = 2'-O-methyladenosine-3'-phosphate
  modified_base 11: mod_base = OTHER; note = 2'-O-methyluridine-3'-phosphate
  modified_base 12: mod_base = OTHER; note = 2'-O-methylcytidine-3'-phosphate
  modified_base 13: mod_base = OTHER; note = 2'-O-methyladenosine-3'-phosphate
  modified_base 14: mod_base = OTHER; note = 2'-deoxy-2'-fluorocytidine-3'-phosphate
  modified_base 15: mod_base = OTHER; note = 2'-O-methyladenosine-3'-phosphate
  modified_base 16: mod_base = OTHER; note = 2'-deoxy-2'-fluoroadenosine-3'-phosphate
  modified_base 17: mod_base = OTHER; note = 2'-O-methylguanosine-3'-phosphate
  modified_base 18: mod_base = OTHER; note = 2'-O-methyladenosine-3'-phosphate
  modified_base 19: mod_base = OTHER; note = 2'-O-methyluridine-3'-phosphate
  modified_base 20: mod_base = OTHER; note = 2'-O-methyluridine-3'-phosphate
  modified_base 21: mod_base = OTHER; note = 2'-O-methyluridine-3'-phosphate
  modified_base 22: mod_base = OTHER; note = 2'-O-methylguanosine-3'-phosphate
  modified_base 23: mod_base = OTHER; note = 2'-O-methylguanosine
ttgttcattatcacaagatttgg

SEQ ID NO: 5020 - RNA, 23 nt, synthetic construct
  source 1..23: mol_type = other RNA
  modified_base 1: mod_base = OTHER; note = 2'-O-methyluridine-3'-phosphate 5'-(E)-Vinylphosphonate
  modified_base 2: mod_base = OTHER; note = 2'-deoxy-2'-fluorouridine-3'-phosphate
  modified_base 3: mod_base = OTHER; note = 2'-O-methyluridine-3'-phosphate
  modified_base 4: mod_base = OTHER; note = 2'-O-methyladenosine-3'-phosphate
  modified_base 5: mod_base = OTHER; note = 2'-O-methylcytidine-3'-phosphate
  modified_base 6: mod_base = OTHER; note = 2'-deoxy-2'-fluoroguanosine-3'-phosphate
  modified_base 7: mod_base = OTHER; note = 2'-O-methylguanosine-3'-phosphate
  modified_base 8: mod_base = OTHER; note = 2'-O-methyluridine-3'-phosphate
  modified_base 9: mod_base = OTHER; note = 2'-O-methylguanosine-3'-phosphate
  modified_base 10: mod_base = OTHER; note = 2'-O-methyluridine-3'-phosphate
  modified_base 11: mod_base = OTHER; note = 2'-O-methyluridine-3'-phosphate
  modified_base 12: mod_base = OTHER; note = 2'-O-methylcytidine-3'-phosphate
  modified_base 13: mod_base = OTHER; note = 2'-O-methyladenosine-3'-phosphate
  modified_base 14: mod_base = OTHER; note = 2'-deoxy-2'-fluorouridine-3'-phosphate
  modified_base 15: mod_base = OTHER; note = 2'-O-methyluridine-3'-phosphate
  modified_base 16: mod_base = OTHER; note = 2'-deoxy-2'-fluoroadenosine-3'-phosphate
  modified_base 17: mod_base = OTHER; note = 2'-O-methyluridine-3'-phosphate
  modified_base 18: mod_base = OTHER; note = 2'-O-methylcytidine-3'-phosphate
  modified_base 19: mod_base = OTHER; note = 2'-O-methyladenosine-3'-phosphate
  modified_base 20: mod_base = OTHER; note = 2'-O-methylcytidine-3'-phosphate
  modified_base 21: mod_base = OTHER; note = 2'-O-methyladenosine-3'-phosphate
  modified_base 22: mod_base = OTHER; note = 2'-O-methyladenosine-3'-phosphate
  modified_base 23: mod_base = OTHER; note = 2'-O-methylguanosine
tttacggtgttcattatcacaag

SEQ ID NO: 5021 - RNA, 23 nt, synthetic construct
  source 1..23: mol_type = other RNA
  modified_base 1: mod_base = OTHER; note = 2'-O-methyluridine-3'-phosphate 5'-(E)-Vinylphosphonate
  modified_base 2: mod_base = OTHER; note = 2'-deoxy-2'-fluoroadenosine-3'-phosphate
  modified_base 3: mod_base = OTHER; note = 2'-O-methyladenosine-3'-phosphate
  modified_base 4: mod_base = OTHER; note = 2'-O-methylguanosine-3'-phosphate
  modified_base 5: mod_base = OTHER; note = 2'-O-methyluridine-3'-phosphate
  modified_base 6: mod_base = OTHER; note = 2'-deoxy-2'-fluoroadenosine-3'-phosphate
  modified_base 7: mod_base = OTHER; note = 2'-O-methylguanosine-3'-phosphate
  modified_base 8: mod_base = OTHER; note = 2'-O-methylguanosine-3'-phosphate
  modified_base 9: mod_base = OTHER; note = 2'-O-methyladenosine-3'-phosphate
  modified_base 10: mod_base = OTHER; note = 2'-O-methyladenosine-3'-phosphate
  modified_base 11: mod_base = OTHER; note = 2'-O-methylguanosine-3'-phosphate
  modified_base 12: mod_base = OTHER; note = 2'-O-methylcytidine-3'-phosphate
  modified_base 13: mod_base = OTHER; note = 2'-O-methyluridine-3'-phosphate
  modified_base 14: mod_base = OTHER; note = 2'-deoxy-2'-fluoroadenosine-3'-phosphate
  modified_base 15: mod_base = OTHER; note = 2'-O-methylguanosine-3'-phosphate
  modified_base 16: mod_base = OTHER; note = 2'-deoxy-2'-fluorocytidine-3'-phosphate
  modified_base 17: mod_base = OTHER; note = 2'-O-methyluridine-3'-phosphate
  modified_base 18: mod_base = OTHER; note = 2'-O-methyladenosine-3'-phosphate
  modified_base 19: mod_base = OTHER; note = 2'-O-methyladenosine-3'-phosphate
  modified_base 20: mod_base = OTHER; note = 2'-O-methylcytidine-3'-phosphate
  modified_base 21: mod_base = OTHER; note = 2'-O-methylcytidine-3'-phosphate
  modified_base 22: mod_base = OTHER; note = 2'-O-methyluridine-3'-phosphate
  modified_base 23: mod_base = OTHER; note = 2'-O-methyluridine
taagtaggaagctagctaacctt

SEQ ID NO: 5022 - RNA, 23 nt, synthetic construct
  source 1..23: mol_type = other RNA
  modified_base 1: mod_base = OTHER; note = 2'-O-methyluridine-3'-phosphate 5'-(E)-Vinylphosphonate
  modified_base 2: mod_base = OTHER; note = 2'-deoxy-2'-fluoroadenosine-3'-phosphate
  modified_base 3: mod_base = OTHER; note = 2'-O-methyladenosine-3'-phosphate
  modified_base 4: mod_base = OTHER; note = 2'-O-methyladenosine-3'-phosphate
  modified_base 5: mod_base = OTHER; note = 2'-O-methylguanosine-3'-phosphate
  modified_base 6: mod_base = OTHER; note = 2'-deoxy-2'-fluorouridine-3'-phosphate
  modified_base 7: mod_base = OTHER; note = 2'-O-methyladenosine-3'-phosphate
  modified_base 8: mod_base = OTHER; note = 2'-O-methylguanosine-3'-phosphate
  modified_base 9: mod_base = OTHER; note = 2'-O-methylguanosine-3'-phosphate
  modified_base 10: mod_base = OTHER; note = 2'-O-methyladenosine-3'-phosphate
  modified_base 11: mod_base = OTHER; note = 2'-O-methyladenosine-3'-phosphate
  modified_base 12: mod_base = OTHER; note = 2'-O-methylguanosine-3'-phosphate
  modified_base 13: mod_base = OTHER; note = 2'-O-methylcytidine-3'-phosphate
  modified_base 14: mod_base = OTHER; note = 2'-deoxy-2'-fluorouridine-3'-phosphate
  modified_base 15: mod_base = OTHER; note = 2'-O-methyladenosine-3'-phosphate
  modified_base 16: mod_base = OTHER; note = 2'-deoxy-2'-fluoroguanosine-3'-phosphate
  modified_base 17: mod_base = OTHER; note = 2'-O-methylcytidine-3'-phosphate
  modified_base 18: mod_base = OTHER; note = 2'-O-methyluridine-3'-phosphate
  modified_base 19: mod_base = OTHER; note = 2'-O-methyladenosine-3'-phosphate
  modified_base 20: mod_base = OTHER; note = 2'-O-methyladenosine-3'-phosphate
  modified_base 21: mod_base = OTHER; note = 2'-O-methylcytidine-3'-phosphate
  modified_base 22: mod_base = OTHER; note = 2'-O-methylcytidine-3'-phosphate
  modified_base 23: mod_base = OTHER; note = 2'-O-methyluridine
taaagtaggaagctagctaacct

SEQ ID NO: 5023 - RNA, 23 nt, synthetic construct
  source 1..23: mol_type = other RNA
  modified_base 1: mod_base = OTHER; note = 2'-O-methyluridine-3'-phosphate 5'-(E)-Vinylphosphonate
  modified_base 2: mod_base = OTHER; note = 2'-deoxy-2'-fluorouridine-3'-phosphate
  modified_base 3: mod_base = OTHER; note = 2'-O-methylcytidine-3'-phosphate
  modified_base 4: mod_base = OTHER; note = 2'-O-methyladenosine-3'-phosphate
  modified_base 5: mod_base = OTHER; note = 2'-O-methyladenosine-3'-phosphate
  modified_base 6: mod_base = OTHER; note = 2'-deoxy-2'-fluoroguanosine-3'-phosphate
  modified_base 7: mod_base = OTHER; note = 2'-O-methylguanosine-3'-phosphate
  modified_base 8: mod_base = OTHER; note = 2'-O-methylguanosine-3'-phosphate
  modified_base 9: mod_base = OTHER; note = 2'-O-methyladenosine-3'-phosphate
  modified_base 10: mod_base = OTHER; note = 2'-O-methyladenosine-3'-phosphate
  modified_base 11: mod_base = OTHER; note = 2'-O-methyladenosine-3'-phosphate
  modified_base 12: mod_base = OTHER; note = 2'-O-methylguanosine-3'-phosphate
  modified_base 13: mod_base = OTHER; note = 2'-O-methyluridine-3'-phosphate
  modified_base 14: mod_base = OTHER; note = 2'-deoxy-2'-fluoroadenosine-3'-phosphate
  modified_base 15: mod_base = OTHER; note = 2'-O-methylguanosine-3'-phosphate
  modified_base 16: mod_base = OTHER; note = 2'-deoxy-2'-fluoroguanosine-3'-phosphate
  modified_base 17: mod_base = OTHER; note = 2'-O-methyladenosine-3'-phosphate
  modified_base 18: mod_base = OTHER; note = 2'-O-methyladenosine-3'-phosphate
  modified_base 19: mod_base = OTHER; note = 2'-O-methylguanosine-3'-phosphate
  modified_base 20: mod_base = OTHER; note = 2'-O-methylcytidine-3'-phosphate
  modified_base 21: mod_base = OTHER; note = 2'-O-methyluridine-3'-phosphate
  modified_base 22: mod_base = OTHER; note = 2'-O-methyladenosine-3'-phosphate
  modified_base 23: mod_base = OTHER; note = 2'-O-methylguanosine
ttcaagggaaagtaggaagctag

SEQ ID NO: 5024 - RNA, 23 nt, synthetic construct
  source 1..23: mol_type = other RNA
  modified_base 1: mod_base = OTHER; note = 2'-O-methyluridine-3'-phosphate 5'-(E)-Vinylphosphonate
  modified_base 2: mod_base = OTHER; note = 2'-deoxy-2'-fluoroadenosine-3'-phosphate
  modified_base 3: mod_base = OTHER; note = 2'-O-methylcytidine-3'-phosphate
  modified_base 4: mod_base = OTHER; note = 2'-O-methyluridine-3'-phosphate
  modified_base 5: mod_base = OTHER; note = 2'-O-methyladenosine-3'-phosphate
  modified_base 6: mod_base = OTHER; note = 2'-deoxy-2'-fluorouridine-3'-phosphate
  modified_base 7: mod_base = OTHER; note = 2'-O-methyluridine-3'-phosphate
  modified_base 8: mod_base = OTHER; note = 2'-O-methylcytidine-3'-phosphate
  modified_base 9: mod_base = OTHER; note = 2'-O-methyladenosine-3'-phosphate
  modified_base 10: mod_base = OTHER; note = 2'-O-methyladenosine-3'-phosphate
  modified_base 11: mod_base = OTHER; note = 2'-O-methylguanosine-3'-phosphate
  modified_base 12: mod_base = OTHER; note = 2'-O-methylguanosine-3'-phosphate
  modified_base 13: mod_base = OTHER; note = 2'-O-methylguanosine-3'-phosphate
  modified_base 14: mod_base = OTHER; note = 2'-deoxy-2'-fluoroadenosine-3'-phosphate
  modified_base 15: mod_base = OTHER; note = 2'-O-methyladenosine-3'-phosphate
  modified_base 16: mod_base = OTHER; note = 2'-deoxy-2'-fluoroadenosine-3'-phosphate
  modified_base 17: mod_base = OTHER; note = 2'-O-methylguanosine-3'-phosphate
  modified_base 18: mod_base = OTHER; note = 2'-O-methyluridine-3'-phosphate
  modified_base 19: mod_base = OTHER; note = 2'-O-methyladenosine-3'-phosphate
  modified_base 20: mod_base = OTHER; note = 2'-O-methylguanosine-3'-phosphate
  modified_base 21: mod_base = OTHER; note = 2'-O-methylguanosine-3'-phosphate
  modified_base 22: mod_base = OTHER; note = 2'-O-methyladenosine-3'-phosphate
  modified_base 23: mod_base = OTHER; note = 2'-O-methyladenosine
tactattcaagggaaagtaggaa

SEQ ID NO: 5025 - RNA, 23 nt, synthetic construct
  source 1..23: mol_type = other RNA
  modified_base 1: mod_base = OTHER; note = 2'-O-methyluridine-3'-phosphate 5'-(E)-Vinylphosphonate
  modified_base 2: mod_base = OTHER; note = 2'-deoxy-2'-fluorocytidine-3'-phosphate
  modified_base 3: mod_base = OTHER; note = 2'-O-methyladenosine-3'-phosphate
  modified_base 4: mod_base = OTHER; note = 2'-O-methylcytidine-3'-phosphate
  modified_base 5: mod_base = OTHER; note = 2'-O-methyluridine-3'-phosphate
  modified_base 6: mod_base = OTHER; note = 2'-deoxy-2'-fluoroadenosine-3'-phosphate
  modified_base 7: mod_base = OTHER; note = 2'-O-methyluridine-3'-phosphate
  modified_base 8: mod_base = OTHER; note = 2'-O-methyluridine-3'-phosphate
  modified_base 9: mod_base = OTHER; note = 2'-O-methylcytidine-3'-phosphate
  modified_base 10: mod_base = OTHER; note = 2'-O-methyladenosine-3'-phosphate
  modified_base 11: mod_base = OTHER; note = 2'-O-methyladenosine-3'-phosphate
  modified_base 12: mod_base = OTHER; note = 2'-O-methylguanosine-3'-phosphate
  modified_base 13: mod_base = OTHER; note = 2'-O-methylguanosine-3'-phosphate
  modified_base 14: mod_base = OTHER; note = 2'-deoxy-2'-fluoroguanosine-3'-phosphate
  modified_base 15: mod_base = OTHER; note = 2'-O-methyladenosine-3'-phosphate
  modified_base 16: mod_base = OTHER; note = 2'-deoxy-2'-fluoroadenosine-3'-phosphate
  modified_base 17: mod_base = OTHER; note = 2'-O-methyladenosine-3'-phosphate
  modified_base 18: mod_base = OTHER; note = 2'-O-methylguanosine-3'-phosphate
  modified_base 19: mod_base = OTHER; note = 2'-O-methyluridine-3'-phosphate
  modified_base 20: mod_base = OTHER; note = 2'-O-methyladenosine-3'-phosphate
  modified_base 21: mod_base = OTHER; note = 2'-O-methylguanosine-3'-phosphate
  modified_base 22: mod_base = OTHER; note = 2'-O-methylguanosine-3'-phosphate
  modified_base 23: mod_base = OTHER; note = 2'-O-methyladenosine
tcactattcaagggaaagtagga

SEQ ID NO: 5026 - RNA, 23 nt, synthetic construct
  source 1..23: mol_type = other RNA
  modified_base 1: mod_base = OTHER; note = 2'-O-methyluridine-3'-phosphate 5'-(E)-Vinylphosphonate
  modified_base 2: mod_base = OTHER; note = 2'-deoxy-2'-fluoroguanosine-3'-phosphate
  modified_base 3: mod_base = OTHER; note = 2'-O-methyladenosine-3'-phosphate
  modified_base 4: mod_base = OTHER; note = 2'-O-methyladenosine-3'-phosphate
  modified_base 5: mod_base = OTHER; note = 2'-O-methyladenosine-3'-phosphate
  modified_base 6: mod_base = OTHER; note = 2'-deoxy-2'-fluoroadenosine-3'-phosphate
  modified_base 7: mod_base = OTHER; note = 2'-O-methylguanosine-3'-phosphate
  modified_base 8: mod_base = OTHER; note = 2'-O-methylcytidine-3'-phosphate
  modified_base 9: mod_base = OTHER; note = 2'-O-methyladenosine-3'-phosphate
  modified_base 10: mod_base = OTHER; note = 2'-O-methylcytidine-3'-phosphate
  modified_base 11: mod_base = OTHER; note = 2'-O-methyluridine-3'-phosphate
  modified_base 12: mod_base = OTHER; note = 2'-O-methyladenosine-3'-phosphate
  modified_base 13: mod_base = OTHER; note = 2'-O-methyluridine-3'-phosphate
  modified_base 14: mod_base = OTHER; note = 2'-deoxy-2'-fluorouridine-3'-phosphate
  modified_base 15: mod_base = OTHER; note = 2'-O-methylcytidine-3'-phosphate
  modified_base 16: mod_base = OTHER; note = 2'-deoxy-2'-fluoroadenosine-3'-phosphate
  modified_base 17: mod_base = OTHER; note = 2'-O-methyladenosine-3'-phosphate
  modified_base 18: mod_base = OTHER; note = 2'-O-methylguanosine-3'-phosphate
  modified_base 19: mod_base = OTHER; note = 2'-O-methylguanosine-3'-phosphate
  modified_base 20: mod_base = OTHER; note = 2'-O-methylguanosine-3'-phosphate
  modified_base 21: mod_base = OTHER; note = 2'-O-methyladenosine-3'-phosphate
  modified_base 22: mod_base = OTHER; note = 2'-O-methyladenosine-3'-phosphate
  modified_base 23: mod_base = OTHER; note = 2'-O-methyladenosine
tgaaaagcactattcaagggaaa

SEQ ID NO: 5027 - RNA, 23 nt, synthetic construct
  source 1..23: mol_type = other RNA
  modified_base 1: mod_base = OTHER; note = 2'-O-methyluridine-3'-phosphate 5'-(E)-Vinylphosphonate
  modified_base 2: mod_base = OTHER; note = 2'-deoxy-2'-fluoroadenosine-3'-phosphate
  modified_base 3: mod_base = OTHER; note = 2'-O-methylguanosine-3'-phosphate
  modified_base 4: mod_base = OTHER; note = 2'-O-methyladenosine-3'-phosphate
  modified_base 5: mod_base = OTHER; note = 2'-O-methyladenosine-3'-phosphate
  modified_base 6: mod_base = OTHER; note = 2'-deoxy-2'-fluoroadenosine-3'-phosphate
  modified_base 7: mod_base = OTHER; note = 2'-O-methyladenosine-3'-phosphate
  modified_base 8: mod_base = OTHER; note = 2'-O-methylguanosine-3'-phosphate
  modified_base 9: mod_base = OTHER; note = 2'-O-methylcytidine-3'-phosphate
  modified_base 10: mod_base = OTHER; note = 2'-O-methyladenosine-3'-phosphate
  modified_base 11: mod_base = OTHER; note = 2'-O-methylcytidine-3'-phosphate
  modified_base 12: mod_base = OTHER; note = 2'-O-methyluridine-3'-phosphate
  modified_base 13: mod_base = OTHER; note = 2'-O-methyladenosine-3'-phosphate
  modified_base 14: mod_base = OTHER; note = 2'-deoxy-2'-fluorouridine-3'-phosphate
  modified_base 15: mod_base = OTHER; note = 2'-O-methyluridine-3'-phosphate
  modified_base 16: mod_base = OTHER; note = 2'-deoxy-2'-fluorocytidine-3'-phosphate
  modified_base 17: mod_base = OTHER; note = 2'-O-methyladenosine-3'-phosphate
  modified_base 18: mod_base = OTHER; note = 2'-O-methyladenosine-3'-phosphate
  modified_base 19: mod_base = OTHER; note = 2'-O-methylguanosine-3'-phosphate
  modified_base 20: mod_base = OTHER; note = 2'-O-methylguanosine-3'-phosphate
  modified_base 21: mod_base = OTHER; note = 2'-O-methylguanosine-3'-phosphate
  modified_base 22: mod_base = OTHER; note = 2'-O-methyladenosine-3'-phosphate
  modified_base 23: mod_base = OTHER; note = 2'-O-methyladenosine
tagaaaagcactattcaagggaa

SEQ ID NO: 5028 - RNA, 23 nt, synthetic construct
  source 1..23: mol_type = other RNA
  modified_base 1: mod_base = OTHER; note = 2'-O-methyluridine-3'-phosphate 5'-(E)-Vinylphosphonate
  modified_base 2: mod_base = OTHER; note = 2'-deoxy-2'-fluoroguanosine-3'-phosphate
  modified_base 3: mod_base = OTHER; note = 2'-O-methyladenosine-3'-phosphate
  modified_base 4: mod_base = OTHER; note = 2'-O-methylguanosine-3'-phosphate
  modified_base 5: mod_base = OTHER; note = 2'-O-methyladenosine-3'-phosphate
  modified_base 6: mod_base = OTHER; note = 2'-deoxy-2'-fluoroadenosine-3'-phosphate
  modified_base 7: mod_base = OTHER; note = 2'-O-methyladenosine-3'-phosphate
  modified_base 8: mod_base = OTHER; note = 2'-O-methyladenosine-3'-phosphate
  modified_base 9: mod_base = OTHER; note = 2'-O-methylguanosine-3'-phosphate
  modified_base 10: mod_base = OTHER; note = 2'-O-methylcytidine-3'-phosphate
  modified_base 11: mod_base = OTHER; note = 2'-O-methyladenosine-3'-phosphate
  modified_base 12: mod_base = OTHER; note = 2'-O-methylcytidine-3'-phosphate
  modified_base 13: mod_base = OTHER; note = 2'-O-methyluridine-3'-phosphate
  modified_base 14: mod_base = OTHER; note = 2'-deoxy-2'-fluoroadenosine-3'-phosphate
  modified_base 15: mod_base = OTHER; note = 2'-O-methyluridine-3'-phosphate
  modified_base 16: mod_base = OTHER; note = 2'-deoxy-2'-fluorouridine-3'-phosphate
  modified_base 17: mod_base = OTHER; note = 2'-O-methylcytidine-3'-phosphate
  modified_base 18: mod_base = OTHER; note = 2'-O-methyladenosine-3'-phosphate
  modified_base 19: mod_base = OTHER; note = 2'-O-methyladenosine-3'-phosphate
  modified_base 20: mod_base = OTHER; note = 2'-O-methylguanosine-3'-phosphate
  modified_base 21: mod_base = OTHER; note = 2'-O-methylguanosine-3'-phosphate
  modified_base 22: mod_base = OTHER; note = 2'-O-methylguanosine-3'-phosphate
  modified_base 23: mod_base = OTHER; note = 2'-O-methyladenosine
tgagaaaagcactattcaaggga

SEQ ID NO: 5029 - RNA, 23 nt, synthetic construct
  source 1..23: mol_type = other RNA
  modified_base 1: mod_base = OTHER; note = 2'-O-methyluridine-3'-phosphate 5'-(E)-Vinylphosphonate
  modified_base 2: mod_base = OTHER; note = 2'-deoxy-2'-fluoroguanosine-3'-phosphate
  modified_base 3: mod_base = OTHER; note = 2'-O-methylguanosine-3'-phosphate
  modified_base 4: mod_base = OTHER; note = 2'-O-methyladenosine-3'-phosphate
  modified_base 5: mod_base = OTHER; note = 2'-O-methylguanosine-3'-phosphate
  modified_base 6: mod_base = OTHER; note = 2'-deoxy-2'-fluoroadenosine-3'-phosphate
  modified_base 7: mod_base = OTHER; note = 2'-O-methyladenosine-3'-phosphate
  modified_base 8: mod_base = OTHER; note = 2'-O-methyladenosine-3'-phosphate
  modified_base 9: mod_base = OTHER; note = 2'-O-methyladenosine-3'-phosphate
  modified_base 10: mod_base = OTHER; note = 2'-O-methylguanosine-3'-phosphate
  modified_base 11: mod_base = OTHER; note = 2'-O-methylcytidine-3'-phosphate
  modified_base 12: mod_base = OTHER; note = 2'-O-methyladenosine-3'-phosphate
  modified_base 13: mod_base = OTHER; note = 2'-O-methylcytidine-3'-phosphate
  modified_base 14: mod_base = OTHER; note = 2'-deoxy-2'-fluorouridine-3'-phosphate
  modified_base 15: mod_base = OTHER; note = 2'-O-methyladenosine-3'-phosphate
  modified_base 16: mod_base = OTHER; note = 2'-deoxy-2'-fluorouridine-3'-phosphate
  modified_base 17: mod_base = OTHER; note = 2'-O-methyluridine-3'-phosphate
  modified_base 18: mod_base = OTHER; note = 2'-O-methylcytidine-3'-phosphate
  modified_base 19: mod_base = OTHER; note = 2'-O-methyladenosine-3'-phosphate
  modified_base 20: mod_base = OTHER; note = 2'-O-methyladenosine-3'-phosphate
  modified_base 21: mod_base = OTHER; note = 2'-O-methylguanosine-3'-phosphate
  modified_base 22: mod_base = OTHER; note = 2'-O-methylguanosine-3'-phosphate
  modified_base 23: mod_base = OTHER; note = 2'-O-methylguanosine
tggagaaaagcactattcaaggg

SEQ ID NO: 5030 - RNA, 23 nt, synthetic construct
  source 1..23: mol_type = other RNA
  modified_base 1: mod_base = OTHER; note = 2'-O-methyluridine-3'-phosphate 5'-(E)-Vinylphosphonate
  modified_base 2: mod_base = OTHER; note = 2'-deoxy-2'-fluoroadenosine-3'-phosphate
  modified_base 3: mod_base = OTHER; note = 2'-O-methylguanosine-3'-phosphate
  modified_base 4: mod_base = OTHER; note = 2'-O-methylguanosine-3'-phosphate
  modified_base 5: mod_base = OTHER; note = 2'-O-methylguanosine-3'-phosphate
  modified_base 6: mod_base = OTHER; note = 2'-deoxy-2'-fluoroadenosine-3'-phosphate
  modified_base 7: mod_base = OTHER; note = 2'-O-methylguanosine-3'-phosphate
  modified_base 8: mod_base = OTHER; note = 2'-O-methyladenosine-3'-phosphate
  modified_base 9: mod_base = OTHER; note = 2'-O-methyladenosine-3'-phosphate
  modified_base 10: mod_base = OTHER; note = 2'-O-methyladenosine-3'-phosphate
  modified_base 11: mod_base = OTHER; note = 2'-O-methyladenosine-3'-phosphate
  modified_base 12: mod_base = OTHER; note = 2'-O-methylguanosine-3'-phosphate
  modified_base 13: mod_base = OTHER; note = 2'-O-methylcytidine-3'-phosphate
  modified_base 14: mod_base = OTHER; note = 2'-deoxy-2'-fluoroadenosine-3'-phosphate
  modified_base 15: mod_base = OTHER; note = 2'-O-methylcytidine-3'-phosphate
  modified_base 16: mod_base = OTHER; note = 2'-deoxy-2'-fluorouridine-3'-phosphate
  modified_base 17: mod_base = OTHER; note = 2'-O-methyladenosine-3'-phosphate
  modified_base 18: mod_base = OTHER; note = 2'-O-methyluridine-3'-phosphate
  modified_base 19: mod_base = OTHER; note = 2'-O-methyluridine-3'-phosphate
  modified_base 20: mod_base = OTHER; note = 2'-O-methylcytidine-3'-phosphate
  modified_base 21: mod_base = OTHER; note = 2'-O-methyladenosine-3'-phosphate
  modified_base 22: mod_base = OTHER; note = 2'-O-methyladenosine-3'-phosphate
  modified_base 23: mod_base = OTHER; note = 2'-O-methylguanosine
tagggagaaaagcactattcaag

SEQ ID NO: 5031 - RNA, 23 nt, synthetic construct
  source 1..23: mol_type = other RNA
  modified_base 1: mod_base = OTHER; note = 2'-O-methyluridine-3'-phosphate 5'-(E)-Vinylphosphonate
  modified_base 2: mod_base = OTHER; note = 2'-deoxy-2'-fluorouridine-3'-phosphate
  modified_base 3: mod_base = OTHER; note = 2'-O-methyladenosine-3'-phosphate
  modified_base 4: mod_base = OTHER; note = 2'-O-methyluridine-3'-phosphate
  modified_base 5: mod_base = OTHER; note = 2'-O-methyluridine-3'-phosphate
  modified_base 6: mod_base = OTHER; note = 2'-deoxy-2'-fluoroadenosine-3'-phosphate
  modified_base 7: mod_base = OTHER; note = 2'-O-methylcytidine-3'-phosphate
  modified_base 8: mod_base = OTHER; note = 2'-O-methyladenosine-3'-phosphate
  modified_base 9: mod_base = OTHER; note = 2'-O-methyluridine-3'-phosphate
  modified_base 10: mod_base = OTHER; note = 2'-O-methyladenosine-3'-phosphate
  modified_base 11: mod_base = OTHER; note = 2'-O-methylguanosine-3'-phosphate
  modified_base 12: mod_base = OTHER; note = 2'-O-methylguanosine-3'-phosphate
  modified_base 13: mod_base = OTHER; note = 2'-O-methylguanosine-3'-phosphate
  modified_base 14: mod_base = OTHER; note = 2'-deoxy-2'-fluoroadenosine-3'-phosphate
  modified_base 15: mod_base = OTHER; note = 2'-O-methylguanosine-3'-phosphate
  modified_base 16: mod_base = OTHER; note = 2'-deoxy-2'-fluoroadenosine-3'-phosphate
  modified_base 17: mod_base = OTHER; note = 2'-O-methyladenosine-3'-phosphate
  modified_base 18: mod_base = OTHER; note = 2'-O-methyladenosine-3'-phosphate
  modified_base 19: mod_base = OTHER; note = 2'-O-methyladenosine-3'-phosphate
  modified_base 20: mod_base = OTHER; note = 2'-O-methylguanosine-3'-phosphate
  modified_base 21: mod_base = OTHER; note = 2'-O-methylcytidine-3'-phosphate
  modified_base 22: mod_base = OTHER; note = 2'-O-methyladenosine-3'-phosphate
  modified_base 23: mod_base = OTHER; note = 2'-O-methylcytidine
ttattacatagggagaaaagcac

SEQ ID NO: 5032 - RNA, 23 nt, synthetic construct
  source 1..23: mol_type = other RNA
  modified_base 1: mod_base = OTHER; note = 2'-O-methyluridine-3'-phosphate 5'-(E)-Vinylphosphonate
  modified_base 2: mod_base = OTHER; note = 2'-deoxy-2'-fluoroadenosine-3'-phosphate
  modified_base 3: mod_base = OTHER; note = 2'-O-methyladenosine-3'-phosphate
  modified_base 4: mod_base = OTHER; note = 2'-O-methyluridine-3'-phosphate
  modified_base 5: mod_base = OTHER; note = 2'-O-methyladenosine-3'-phosphate
  modified_base 6: mod_base = OTHER; note = 2'-deoxy-2'-fluorouridine-3'-phosphate
  modified_base 7: mod_base = OTHER; note = 2'-O-methylguanosine-3'-phosphate
  modified_base 8: mod_base = OTHER; note = 2'-O-methylcytidine-3'-phosphate
  modified_base 9: mod_base = OTHER; note = 2'-O-methylcytidine-3'-phosphate
  modified_base 10: mod_base = OTHER; note = 2'-O-methyluridine-3'-phosphate
  modified_base 11: mod_base = OTHER; note = 2'-O-methyluridine-3'-phosphate
  modified_base 12: mod_base = OTHER; note = 2'-O-methylcytidine-3'-phosphate
  modified_base 13: mod_base = OTHER; note = 2'-O-methyluridine-3'-phosphate
  modified_base 14: mod_base = OTHER; note = 2'-deoxy-2'-fluoroadenosine-3'-phosphate
  modified_base 15: mod_base = OTHER; note = 2'-O-methyladenosine-3'-phosphate
  modified_base 16: mod_base = OTHER; note = 2'-deoxy-2'-fluoroadenosine-3'-phosphate
  modified_base 17: mod_base = OTHER; note = 2'-O-methylcytidine-3'-phosphate
  modified_base 18: mod_base = OTHER; note = 2'-O-methylcytidine-3'-phosphate
  modified_base 19: mod_base = OTHER; note = 2'-O-methyladenosine-3'-phosphate
  modified_base 20: mod_base = OTHER; note = 2'-O-methylcytidine-3'-phosphate
  modified_base 21: mod_base = OTHER; note = 2'-O-methyladenosine-3'-phosphate
  modified_base 22: mod_base = OTHER; note = 2'-O-methyladenosine-3'-phosphate
  modified_base 23: mod_base = OTHER; note = 2'-O-methyladenosine
taatatgccttctaaaccacaaa

SEQ ID NO: 5033 - RNA, 23 nt, synthetic construct
  source 1..23: mol_type = other RNA
  modified_base 1: mod_base = OTHER; note = 2'-O-methyluridine-3'-phosphate 5'-(E)-Vinylphosphonate
  modified_base 2: mod_base = OTHER; note = 2'-deoxy-2'-fluoroadenosine-3'-phosphate
  modified_base 3: mod_base = OTHER; note = 2'-O-methyladenosine-3'-phosphate
  modified_base 4: mod_base = OTHER; note = 2'-O-methylcytidine-3'-phosphate
  modified_base 5: mod_base = OTHER; note = 2'-O-methyluridine-3'-phosphate
  modified_base 6: mod_base = OTHER; note = 2'-deoxy-2'-fluorocytidine-3'-phosphate
  modified_base 7: mod_base = OTHER; note = 2'-O-methyladenosine-3'-phosphate
  modified_base 8: mod_base = OTHER; note = 2'-O-methyladenosine-3'-phosphate
  modified_base 9: mod_base = OTHER; note = 2'-O-methyluridine-3'-phosphate
  modified_base 10: mod_base = OTHER; note = 2'-O-methyladenosine-3'-phosphate
  modified_base 11: mod_base = OTHER; note = 2'-O-methyluridine-3'-phosphate
  modified_base 12: mod_base = OTHER; note = 2'-O-methylguanosine-3'-phosphate
  modified_base 13: mod_base = OTHER; note = 2'-O-methylcytidine-3'-phosphate
  modified_base 14: mod_base = OTHER; note = 2'-deoxy-2'-fluorocytidine-3'-phosphate
  modified_base 15: mod_base = OTHER; note = 2'-O-methyluridine-3'-phosphate
  modified_base 16: mod_base = OTHER; note = 2'-deoxy-2'-fluorouridine-3'-phosphate
  modified_base 17: mod_base = OTHER; note = 2'-O-methylcytidine-3'-phosphate
  modified_base 18: mod_base = OTHER; note = 2'-O-methyluridine-3'-phosphate
  modified_base 19: mod_base = OTHER; note = 2'-O-methyladenosine-3'-phosphate
  modified_base 20: mod_base = OTHER; note = 2'-O-methyladenosine-3'-phosphate
  modified_base 21: mod_base = OTHER; note = 2'-O-methyladenosine-3'-phosphate
  modified_base 22: mod_base = OTHER; note = 2'-O-methylcytidine-3'-phosphate
  modified_base 23: mod_base = OTHER; note = 2'-O-methylcytidine
taactcaatatgccttctaaacc

SEQ ID NO: 5034 - RNA, 23 nt, synthetic construct
  source 1..23: mol_type = other RNA
  modified_base 1: mod_base = OTHER; note = 2'-O-methyluridine-3'-phosphate 5'-(E)-Vinylphosphonate
  modified_base 2: mod_base = OTHER; note = 2'-deoxy-2'-fluoroadenosine-3'-phosphate
  modified_base 3: mod_base = OTHER; note = 2'-O-methyluridine-3'-phosphate
  modified_base 4: mod_base = OTHER; note = 2'-O-methyladenosine-3'-phosphate
  modified_base 5: mod_base = OTHER; note = 2'-O-methyladenosine-3'-phosphate
  modified_base 6: mod_base = OTHER; note = 2'-deoxy-2'-fluorocytidine-3'-phosphate
  modified_base 7: mod_base = OTHER; note = 2'-O-methyluridine-3'-phosphate
  modified_base 8: mod_base = OTHER; note = 2'-O-methylcytidine-3'-phosphate
  modified_base 9: mod_base = OTHER; note = 2'-O-methyladenosine-3'-phosphate
  modified_base 10: mod_base = OTHER; note = 2'-O-methyladenosine-3'-phosphate
  modified_base 11: mod_base = OTHER; note = 2'-O-methyluridine-3'-phosphate
  modified_base 12: mod_base = OTHER; note = 2'-O-methyladenosine-3'-phosphate
  modified_base 13: mod_base = OTHER; note = 2'-O-methyluridine-3'-phosphate
  modified_base 14: mod_base = OTHER; note = 2'-deoxy-2'-fluoroguanosine-3'-phosphate
  modified_base 15: mod_base = OTHER; note = 2'-O-methylcytidine-3'-phosphate
  modified_base 16: mod_base = OTHER; note = 2'-deoxy-2'-fluorocytidine-3'-phosphate
  modified_base 17: mod_base = OTHER; note = 2'-O-methyluridine-3'-phosphate
  modified_base 18: mod_base = OTHER; note = 2'-O-methyluridine-3'-phosphate
  modified_base 19: mod_base = OTHER; note = 2'-O-methylcytidine-3'-phosphate
  modified_base 20: mod_base = OTHER; note = 2'-O-methyluridine-3'-phosphate
  modified_base 21: mod_base = OTHER; note = 2'-O-methyladenosine-3'-phosphate
  modified_base 22: mod_base = OTHER; note = 2'-O-methyladenosine-3'-phosphate
  modified_base 23: mod_base = OTHER; note = 2'-O-methyladenosine
tataactcaatatgccttctaaa

SEQ ID NO: 5035 - RNA, 23 nt, synthetic construct
  source 1..23: mol_type = other RNA
  modified_base 1: mod_base = OTHER; note = 2'-O-methyluridine-3'-phosphate 5'-(E)-Vinylphosphonate
  modified_base 2: mod_base = OTHER; note = 2'-deoxy-2'-fluoroadenosine-3'-phosphate
  modified_base 3: mod_base = OTHER; note = 2'-O-methyladenosine-3'-phosphate
  modified_base 4: mod_base = OTHER; note = 2'-O-methyluridine-3'-phosphate
  modified_base 5: mod_base = OTHER; note = 2'-O-methyladenosine-3'-phosphate
  modified_base 6: mod_base = OTHER; note = 2'-deoxy-2'-fluoroadenosine-3'-phosphate
  modified_base 7: mod_base = OTHER; note = 2'-O-methylcytidine-3'-phosphate
  modified_base 8: mod_base = OTHER; note = 2'-O-methyluridine-3'-phosphate
  modified_base 9: mod_base = OTHER; note = 2'-O-methylcytidine-3'-phosphate
  modified_base 10: mod_base = OTHER; note = 2'-O-methyladenosine-3'-phosphate
  modified_base 11: mod_base = OTHER; note = 2'-O-methyladenosine-3'-phosphate
  modified_base 12: mod_base = OTHER; note = 2'-O-methyluridine-3'-phosphate
  modified_base 13: mod_base = OTHER; note = 2'-O-methyladenosine-3'-phosphate
  modified_base 14: mod_base = OTHER; note = 2'-deoxy-2'-fluorouridine-3'-phosphate
  modified_base 15: mod_base = OTHER; note = 2'-O-methylguanosine-3'-phosphate
  modified_base 16: mod_base = OTHER; note = 2'-deoxy-2'-fluorocytidine-3'-phosphate
  modified_base 17: mod_base = OTHER; note = 2'-O-methylcytidine-3'-phosphate
  modified_base 18: mod_base = OTHER; note = 2'-O-methyluridine-3'-phosphate
  modified_base 19: mod_base = OTHER; note = 2'-O-methyluridine-3'-phosphate
  modified_base 20: mod_base = OTHER; note = 2'-O-methylcytidine-3'-phosphate
  modified_base 21: mod_base = OTHER; note = 2'-O-methyluridine-3'-phosphate
  modified_base 22: mod_base = OTHER; note = 2'-O-methyladenosine-3'-phosphate
  modified_base 23: mod_base = OTHER; note = 2'-O-methyladenosine
taataactcaatatgccttctaa

SEQ ID NO: 5036 - RNA, 23 nt, synthetic construct
  source 1..23: mol_type = other RNA
  modified_base 1: mod_base = OTHER; note = 2'-O-methyluridine-3'-phosphate 5'-(E)-Vinylphosphonate
  modified_base 2: mod_base = OTHER; note = 2'-deoxy-2'-fluorocytidine-3'-phosphate
  modified_base 3: mod_base = OTHER; note = 2'-O-methyluridine-3'-phosphate
  modified_base 4: mod_base = OTHER; note = 2'-O-methylguanosine-3'-phosphate
  modified_base 5: mod_base = OTHER; note = 2'-O-methylcytidine-3'-phosphate
  modified_base 6: mod_base = OTHER; note = 2'-deoxy-2'-fluoroadenosine-3'-phosphate
  modified_base 7: mod_base = OTHER; note = 2'-O-methyladenosine-3'-phosphate
  modified_base 8: mod_base = OTHER; note = 2'-O-methyladenosine-3'-phosphate
  modified_base 9: mod_base = OTHER; note = 2'-O-methyladenosine-3'-phosphate
  modified_base 10: mod_base = OTHER; note = 2'-O-methyluridine-3'-phosphate
  modified_base 11: mod_base = OTHER; note = 2'-O-methyladenosine-3'-phosphate
  modified_base 12: mod_base = OTHER; note = 2'-O-methyladenosine-3'-phosphate
  modified_base 13: mod_base = OTHER; note = 2'-O-methylcytidine-3'-phosphate
  modified_base 14: mod_base = OTHER; note = 2'-deoxy-2'-fluorouridine-3'-phosphate
  modified_base 15: mod_base = OTHER; note = 2'-O-methylcytidine-3'-phosphate
  modified_base 16: mod_base = OTHER; note = 2'-deoxy-2'-fluoroadenosine-3'-phosphate
  modified_base 17: mod_base = OTHER; note = 2'-O-methyladenosine-3'-phosphate
  modified_base 18: mod_base = OTHER; note = 2'-O-methyluridine-3'-phosphate
  modified_base 19: mod_base = OTHER; note = 2'-O-methyladenosine-3'-phosphate
  modified_base 20: mod_base = OTHER; note = 2'-O-methyluridine-3'-phosphate
  modified_base 21: mod_base = OTHER; note = 2'-O-methylguanosine-3'-phosphate
  modified_base 22: mod_base = OTHER; note = 2'-O-methylcytidine-3'-phosphate
  modified_base 23: mod_base = OTHER; note = 2'-O-methylcytidine
tctgcaaaataactcaatatgcc

SEQ ID NO: 5037 - RNA, 23 nt, synthetic construct
  source 1..23: mol_type = other RNA
  modified_base 1: mod_base = OTHER; note = 2'-O-methyluridine-3'-phosphate 5'-(E)-Vinylphosphonate
  modified_base 2: mod_base = OTHER; note = 2'-deoxy-2'-fluorocytidine-3'-phosphate
  modified_base 3: mod_base = OTHER; note = 2'-O-methyladenosine-3'-phosphate
  modified_base 4: mod_base = OTHER; note = 2'-O-methyluridine-3'-phosphate
  modified_base 5: mod_base = OTHER; note = 2'-O-methyluridine-3'-phosphate
  modified_base 6: mod_base = OTHER; note = 2'-deoxy-2'-fluoroadenosine-3'-phosphate
  modified_base 7: mod_base = OTHER; note = 2'-O-methyluridine-3'-phosphate
  modified_base 8: mod_base = OTHER; note = 2'-O-methylguanosine-3'-phosphate
  modified_base 9: mod_base = OTHER; note = 2'-O-methyladenosine-3'-phosphate
  modified_base 10: mod_base = OTHER; note = 2'-O-methyluridine-3'-phosphate
  modified_base 11: mod_base = OTHER; note = 2'-O-methyluridine-3'-phosphate
  modified_base 12: mod_base = OTHER; note = 2'-O-methylcytidine-3'-phosphate
  modified_base 13: mod_base = OTHER; note = 2'-O-methyluridine-3'-phosphate
  modified_base 14: mod_base = OTHER; note = 2'-deoxy-2'-fluoroguanosine-3'-phosphate
  modified_base 15: mod_base = OTHER; note = 2'-O-methylcytidine-3'-phosphate
  modified_base 16: mod_base = OTHER; note = 2'-deoxy-2'-fluoroadenosine-3'-phosphate
  modified_base 17: mod_base = OTHER; note = 2'-O-methyladenosine-3'-phosphate
  modified_base 18: mod_base = OTHER; note = 2'-O-methyladenosine-3'-phosphate
  modified_base 19: mod_base = OTHER; note = 2'-O-methyladenosine-3'-phosphate
  modified_base 20: mod_base = OTHER; note = 2'-O-methyluridine-3'-phosphate
  modified_base 21: mod_base = OTHER; note = 2'-O-methyladenosine-3'-phosphate
  modified_base 22: mod_base = OTHER; note = 2'-O-methyladenosine-3'-phosphate
  modified_base 23: mod_base = OTHER; note = 2'-O-methylcytidine
tcattatgattctgcaaaataac

SEQ ID NO: 5038 - RNA, 23 nt, synthetic construct
  source 1..23: mol_type = other RNA
  modified_base 1: mod_base = OTHER; note = 2'-O-methyluridine-3'-phosphate 5'-(E)-Vinylphosphonate
  modified_base 2: mod_base = OTHER; note = 2'-deoxy-2'-fluorocytidine-3'-phosphate
  modified_base 3: mod_base = OTHER; note = 2'-O-methylcytidine-3'-phosphate
  modified_base 4: mod_base = OTHER; note = 2'-O-methyladenosine-3'-phosphate
  modified_base 5: mod_base = OTHER; note = 2'-O-methyluridine-3'-phosphate
  modified_base 6: mod_base = OTHER; note = 2'-deoxy-2'-fluorouridine-3'-phosphate
  modified_base 7: mod_base = OTHER; note = 2'-O-methyladenosine-3'-phosphate
  modified_base 8: mod_base = OTHER; note = 2'-O-methyluridine-3'-phosphate
  modified_base 9: mod_base = OTHER; note = 2'-O-methylguanosine-3'-phosphate
  modified_base 10: mod_base = OTHER; note = 2'-O-methyladenosine-3'-phosphate
  modified_base 11: mod_base = OTHER; note = 2'-O-methyluridine-3'-phosphate
  modified_base 12: mod_base = OTHER; note = 2'-O-methyluridine-3'-phosphate
  modified_base 13: mod_base = OTHER; note = 2'-O-methylcytidine-3'-phosphate
  modified_base 14: mod_base = OTHER; note = 2'-deoxy-2'-fluorouridine-3'-phosphate
  modified_base 15: mod_base = OTHER; note = 2'-O-methylguanosine-3'-phosphate
  modified_base 16: mod_base = OTHER; note = 2'-deoxy-2'-fluorocytidine-3'-phosphate
  modified_base 17: mod_base = OTHER; note = 2'-O-methyladenosine-3'-phosphate
  modified_base 18: mod_base = OTHER; note = 2'-O-methyladenosine-3'-phosphate
  modified_base 19: mod_base = OTHER; note = 2'-O-methyladenosine-3'-phosphate
  modified_base 20: mod_base = OTHER; note = 2'-O-methyladenosine-3'-phosphate
  modified_base 21: mod_base = OTHER; note = 2'-O-methyluridine-3'-phosphate
  modified_base 22: mod_base = OTHER; note = 2'-O-methyladenosine-3'-phosphate
  modified_base 23: mod_base = OTHER; note = 2'-O-methyladenosine
tccattatgattctgcaaaataa

SEQ ID NO: 5039 - RNA, 23 nt, synthetic construct
  source 1..23: mol_type = other RNA
  modified_base 1: mod_base = OTHER; note = 2'-O-methyluridine-3'-phosphate 5'-(E)-Vinylphosphonate
  modified_base 2: mod_base = OTHER; note = 2'-deoxy-2'-fluorouridine-3'-phosphate
  modified_base 3: mod_base = OTHER; note = 2'-O-methylcytidine-3'-phosphate
  modified_base 4: mod_base = OTHER; note = 2'-O-methylcytidine-3'-phosphate
  modified_base 5: mod_base = OTHER; note = 2'-O-methyladenosine-3'-phosphate
  modified_base 6: mod_base = OTHER; note = 2'-deoxy-2'-fluorouridine-3'-phosphate
  modified_base 7: mod_base = OTHER; note = 2'-O-methyluridine-3'-phosphate
  modified_base 8: mod_base = OTHER; note = 2'-O-methyladenosine-3'-phosphate
  modified_base 9: mod_base = OTHER; note = 2'-O-methyluridine-3'-phosphate
  modified_base 10: mod_base = OTHER; note = 2'-O-methylguanosine-3'-phosphate
  modified_base 11: mod_base = OTHER; note = 2'-O-methyladenosine-3'-phosphate
  modified_base 12: mod_base = OTHER; note = 2'-O-methyluridine-3'-phosphate
  modified_base 13: mod_base = OTHER; note = 2'-O-methyluridine-3'-phosphate
  modified_base 14: mod_base = OTHER; note = 2'-deoxy-2'-fluorocytidine-3'-phosphate
  modified_base 15: mod_base = OTHER; note = 2'-O-methyluridine-3'-phosphate
  modified_base 16: mod_base = OTHER; note = 2'-deoxy-2'-fluoroguanosine-3'-phosphate
  modified_base 17: mod_base = OTHER; note = 2'-O-methylcytidine-3'-phosphate
  modified_base 18: mod_base = OTHER; note = 2'-O-methyladenosine-3'-phosphate
  modified_base 19: mod_base = OTHER; note = 2'-O-methyladenosine-3'-phosphate
  modified_base 20: mod_base = OTHER; note = 2'-O-methyladenosine-3'-phosphate
  modified_base 21: mod_base = OTHER; note = 2'-O-methyladenosine-3'-phosphate
  modified_base 22: mod_base = OTHER; note = 2'-O-methyluridine-3'-phosphate
  modified_base 23: mod_base = OTHER; note = 2'-O-methyladenosine
ttccattatgattctgcaaaata

SEQ ID NO: 5040 - RNA, 23 nt, synthetic construct
  source 1..23: mol_type = other RNA
  modified_base 1: mod_base = OTHER; note = 2'-O-methyluridine-3'-phosphate 5'-(E)-Vinylphosphonate
  modified_base 2: mod_base = OTHER; note = 2'-deoxy-2'-fluoroguanosine-3'-phosphate
  modified_base 3: mod_base = OTHER; note = 2'-O-methyluridine-3'-phosphate
  modified_base 4: mod_base = OTHER; note = 2'-O-methylcytidine-3'-phosphate
  modified_base 5: mod_base = OTHER; note = 2'-O-methylcytidine-3'-phosphate
  modified_base 6: mod_base = OTHER; note = 2'-deoxy-2'-fluoroadenosine-3'-phosphate
  modified_base 7: mod_base = OTHER; note = 2'-O-methyluridine-3'-phosphate
  modified_base 8: mod_base = OTHER; note = 2'-O-methyluridine-3'-phosphate
  modified_base 9: mod_base = OTHER; note = 2'-O-methyladenosine-3'-phosphate
  modified_base 10: mod_base = OTHER; note = 2'-O-methyluridine-3'-phosphate
  modified_base 11: mod_base = OTHER; note = 2'-O-methylguanosine-3'-phosphate
  modified_base 12: mod_base = OTHER; note = 2'-O-methyladenosine-3'-phosphate
  modified_base 13: mod_base = OTHER; note = 2'-O-methyluridine-3'-phosphate
  modified_base 14: mod_base = OTHER; note = 2'-deoxy-2'-fluorouridine-3'-phosphate
  modified_base 15: mod_base = OTHER; note = 2'-O-methylcytidine-3'-phosphate
  modified_base 16: mod_base = OTHER; note = 2'-deoxy-2'-fluorouridine-3'-phosphate
  modified_base 17: mod_base = OTHER; note = 2'-O-methylguanosine-3'-phosphate
  modified_base 18: mod_base = OTHER; note = 2'-O-methylcytidine-3'-phosphate
  modified_base 19: mod_base = OTHER; note = 2'-O-methyladenosine-3'-phosphate
  modified_base 20: mod_base = OTHER; note = 2'-O-methyladenosine-3'-phosphate
  modified_base 21: mod_base = OTHER; note = 2'-O-methyladenosine-3'-phosphate
  modified_base 22: mod_base = OTHER; note = 2'-O-methyladenosine-3'-phosphate
  modified_base 23: mod_base = OTHER; note = 2'-O-methyluridine
tgtccattatgattctgcaaaat

SEQ ID NO: 5041 - RNA, 23 nt, synthetic construct
  source 1..23: mol_type = other RNA
  modified_base 1: mod_base = OTHER; note = 2'-O-methyluridine-3'-phosphate 5'-(E)-Vinylphosphonate
  modified_base 2: mod_base = OTHER; note = 2'-deoxy-2'-fluoroguanosine-3'-phosphate
  modified_base 3: mod_base = OTHER; note = 2'-O-methylguanosine-3'-phosphate
  modified_base 4: mod_base = OTHER; note = 2'-O-methyluridine-3'-phosphate
  modified_base 5: mod_base = OTHER; note = 2'-O-methylcytidine-3'-phosphate
  modified_base 6: mod_base = OTHER; note = 2'-deoxy-2'-fluorocytidine-3'-phosphate
  modified_base 7: mod_base = OTHER; note = 2'-O-methyladenosine-3'-phosphate
  modified_base 8: mod_base = OTHER; note = 2'-O-methyluridine-3'-phosphate
  modified_base 9: mod_base = OTHER; note = 2'-O-methyluridine-3'-phosphate
  modified_base 10: mod_base = OTHER; note = 2'-O-methyladenosine-3'-phosphate
  modified_base 11: mod_base = OTHER; note = 2'-O-methyluridine-3'-phosphate
  modified_base 12: mod_base = OTHER; note = 2'-O-methylguanosine-3'-phosphate
  modified_base 13: mod_base = OTHER; note = 2'-O-methyladenosine-3'-phosphate
  modified_base 14: mod_base = OTHER; note = 2'-deoxy-2'-fluorouridine-3'-phosphate
  modified_base 15: mod_base = OTHER; note = 2'-O-methyluridine-3'-phosphate
  modified_base 16: mod_base = OTHER; note = 2'-deoxy-2'-fluorocytidine-3'-phosphate
  modified_base 17: mod_base = OTHER; note = 2'-O-methyluridine-3'-phosphate
  modified_base 18: mod_base = OTHER; note = 2'-O-methylguanosine-3'-phosphate
  modified_base 19: mod_base = OTHER; note = 2'-O-methylcytidine-3'-phosphate
  modified_base 20: mod_base = OTHER; note = 2'-O-methyladenosine-3'-phosphate
  modified_base 21: mod_base = OTHER; note = 2'-O-methyladenosine-3'-phosphate
  modified_base 22: mod_base = OTHER; note = 2'-O-methyladenosine-3'-phosphate
  modified_base 23: mod_base = OTHER; note = 2'-O-methyladenosine
tggtccattatgattctgcaaaa

SEQ ID NO: 5042 - RNA, 23 nt, synthetic construct
  source 1..23: mol_type = other RNA
  modified_base 1: mod_base = OTHER; note = 2'-O-methyluridine-3'-phosphate 5'-(E)-Vinylphosphonate
  modified_base 2: mod_base = OTHER; note = 2'-deoxy-2'-fluoroguanosine-3'-phosphate
  modified_base 3: mod_base = OTHER; note = 2'-O-methylguanosine-3'-phosphate
  modified_base 4: mod_base = OTHER; note = 2'-O-methylguanosine-3'-phosphate
  modified_base 5: mod_base = OTHER; note = 2'-O-methyluridine-3'-phosphate
  modified_base 6: mod_base = OTHER; note = 2'-deoxy-2'-fluorocytidine-3'-phosphate
  modified_base 7: mod_base = OTHER; note = 2'-O-methylcytidine-3'-phosphate
  modified_base 8: mod_base = OTHER; note = 2'-O-methyladenosine-3'-phosphate
  modified_base 9: mod_base = OTHER; note = 2'-O-methyluridine-3'-phosphate
  modified_base 10: mod_base = OTHER; note = 2'-O-methyluridine-3'-phosphate
  modified_base 11: mod_base = OTHER; note = 2'-O-methyladenosine-3'-phosphate
  modified_base 12: mod_base = OTHER; note = 2'-O-methyluridine-3'-phosphate
  modified_base 13: mod_base = OTHER; note = 2'-O-methylguanosine-3'-phosphate
  modified_base 14: mod_base = OTHER; note = 2'-deoxy-2'-fluoroadenosine-3'-phosphate
  modified_base 15: mod_base = OTHER; note = 2'-O-methyluridine-3'-phosphate
  modified_base 16: mod_base = OTHER; note = 2'-deoxy-2'-fluorouridine-3'-phosphate
  modified_base 17: mod_base = OTHER; note = 2'-O-methylcytidine-3'-phosphate
  modified_base 18: mod_base = OTHER; note = 2'-O-methyluridine-3'-phosphate
  modified_base 19: mod_base = OTHER; note = 2'-O-methylguanosine-3'-phosphate
  modified_base 20: mod_base = OTHER; note = 2'-O-methylcytidine-3'-phosphate
  modified_base 21: mod_base = OTHER; note = 2'-O-methyladenosine-3'-phosphate
  modified_base 22: mod_base = OTHER; note = 2'-O-methyladenosine-3'-phosphate
  modified_base 23: mod_base = OTHER; note = 2'-O-methyladenosine
tgggtccattatgattctgcaaa

SEQ ID NO: 5043 - RNA, 23 nt, synthetic construct
  source 1..23: mol_type = other RNA
  modified_base 1: mod_base = OTHER; note = 2'-O-methyluridine-3'-phosphate 5'-(E)-Vinylphosphonate
  modified_base 2: mod_base = OTHER; note = 2'-deoxy-2'-fluorocytidine-3'-phosphate
  modified_base 3: mod_base = OTHER; note = 2'-O-methylguanosine-3'-phosphate
  modified_base 4: mod_base = OTHER; note = 2'-O-methylguanosine-3'-phosphate
  modified_base 5: mod_base = OTHER; note = 2'-O-methylguanosine-3'-phosphate
  modified_base 6: mod_base = OTHER; note = 2'-deoxy-2'-fluorouridine-3'-phosphate
  modified_base 7: mod_base = OTHER; note = 2'-O-methylcytidine-3'-phosphate
  modified_base 8: mod_base = OTHER; note = 2'-O-methylcytidine-3'-phosphate
  modified_base 9: mod_base = OTHER; note = 2'-O-methyladenosine-3'-phosphate
  modified_base 10: mod_base = OTHER; note = 2'-O-methyluridine-3'-phosphate
  modified_base 11: mod_base = OTHER; note = 2'-O-methyluridine-3'-phosphate
  modified_base 12: mod_base = OTHER; note = 2'-O-methyladenosine-3'-phosphate
  modified_base 13: mod_base = OTHER; note = 2'-O-methyluridine-3'-phosphate
  modified_base 14: mod_base = OTHER; note = 2'-deoxy-2'-fluoroguanosine-3'-phosphate
  modified_base 15: mod_base = OTHER; note = 2'-O-methyladenosine-3'-phosphate
  modified_base 16: mod_base = OTHER; note = 2'-deoxy-2'-fluorouridine-3'-phosphate
  modified_base 17: mod_base = OTHER; note = 2'-O-methyluridine-3'-phosphate
  modified_base 18: mod_base = OTHER; note = 2'-O-methylcytidine-3'-phosphate
  modified_base 19: mod_base = OTHER; note = 2'-O-methyluridine-3'-phosphate
  modified_base 20: mod_base = OTHER; note = 2'-O-methylguanosine-3'-phosphate
  modified_base 21: mod_base = OTHER; note = 2'-O-methylcytidine-3'-phosphate
  modified_base 22: mod_base = OTHER; note = 2'-O-methyladenosine-3'-phosphate
  modified_base 23: mod_base = OTHER; note = 2'-O-methyladenosine
tcgggtccattatgattctgcaa

SEQ ID NO: 5044 - RNA, 23 nt, synthetic construct
  source 1..23: mol_type = other RNA
  modified_base 1: mod_base = OTHER; note = 2'-O-methyluridine-3'-phosphate 5'-(E)-Vinylphosphonate
  modified_base 2: mod_base = OTHER; note = 2'-deoxy-2'-fluoroguanosine-3'-phosphate
  modified_base 3: mod_base = OTHER; note = 2'-O-methylcytidine-3'-phosphate
  modified_base 4: mod_base = OTHER; note = 2'-O-methylguanosine-3'-phosphate
  modified_base 5: mod_base = OTHER; note = 2'-O-methylguanosine-3'-phosphate
  modified_base 6: mod_base = OTHER; note = 2'-deoxy-2'-fluoroguanosine-3'-phosphate
  modified_base 7: mod_base = OTHER; note = 2'-O-methyluridine-3'-phosphate
  modified_base 8: mod_base = OTHER; note = 2'-O-methylcytidine-3'-phosphate
  modified_base 9: mod_base = OTHER; note = 2'-O-methylcytidine-3'-phosphate
  modified_base 10: mod_base = OTHER; note = 2'-O-methyladenosine-3'-phosphate
  modified_base 11: mod_base = OTHER; note = 2'-O-methyluridine-3'-phosphate
  modified_base 12: mod_base = OTHER; note = 2'-O-methyluridine-3'-phosphate
  modified_base 13: mod_base = OTHER; note = 2'-O-methyladenosine-3'-phosphate
  modified_base 14: mod_base = OTHER; note = 2'-deoxy-2'-fluorouridine-3'-phosphate
  modified_base 15: mod_base = OTHER; note = 2'-O-methylguanosine-3'-phosphate
  modified_base 16: mod_base = OTHER; note = 2'-deoxy-2'-fluoroadenosine-3'-phosphate
  modified_base 17: mod_base = OTHER; note = 2'-O-methyluridine-3'-phosphate
  modified_base 18: mod_base = OTHER; note = 2'-O-methyluridine-3'-phosphate
  modified_base 19: mod_base = OTHER; note = 2'-O-methylcytidine-3'-phosphate
  modified_base 20: mod_base = OTHER; note = 2'-O-methyluridine-3'-phosphate
  modified_base 21: mod_base = OTHER; note = 2'-O-methylguanosine-3'-phosphate
  modified_base 22: mod_base = OTHER; note = 2'-O-methylcytidine-3'-phosphate
  modified_base 23: mod_base = OTHER; note = 2'-O-methyladenosine
tgcgggtccattatgattctgca

SEQ ID NO: 5045 - RNA, 23 nt, synthetic construct
  source 1..23: mol_type = other RNA
  modified_base 1: mod_base = OTHER; note = 2'-O-methyluridine-3'-phosphate 5'-(E)-Vinylphosphonate
  modified_base 2: mod_base = OTHER; note = 2'-deoxy-2'-fluorouridine-3'-phosphate
  modified_base 3: mod_base = OTHER; note = 2'-O-methylguanosine-3'-phosphate
  modified_base 4: mod_base = OTHER; note = 2'-O-methylcytidine-3'-phosphate
  modified_base 5: mod_base = OTHER; note = 2'-O-methylguanosine-3'-phosphate
  modified_base 6: mod_base = OTHER; note = 2'-deoxy-2'-fluoroguanosine-3'-phosphate
  modified_base 7: mod_base = OTHER; note = 2'-O-methylguanosine-3'-phosphate
  modified_base 8: mod_base = OTHER; note = 2'-O-methyluridine-3'-phosphate
  modified_base 9: mod_base = OTHER; note = 2'-O-methylcytidine-3'-phosphate
  modified_base 10: mod_base = OTHER; note = 2'-O-methylcytidine-3'-phosphate
  modified_base 11: mod_base = OTHER; note = 2'-O-methyladenosine-3'-phosphate
  modified_base 12: mod_base = OTHER; note = 2'-O-methyluridine-3'-phosphate
  modified_base 13: mod_base = OTHER; note = 2'-O-methyluridine-3'-phosphate
  modified_base 14: mod_base = OTHER; note = 2'-deoxy-2'-fluoroadenosine-3'-phosphate
  modified_base 15: mod_base = OTHER; note = 2'-O-methyluridine-3'-phosphate
  modified_base 16: mod_base = OTHER; note = 2'-deoxy-2'-fluoroguanosine-3'-phosphate
  modified_base 17: mod_base = OTHER; note = 2'-O-methyladenosine-3'-phosphate
  modified_base 18: mod_base = OTHER; note = 2'-O-methyluridine-3'-phosphate
  modified_base 19: mod_base = OTHER; note = 2'-O-methyluridine-3'-phosphate
  modified_base 20: mod_base = OTHER; note = 2'-O-methylcytidine-3'-phosphate
  modified_base 21: mod_base = OTHER; note = 2'-O-methyluridine-3'-phosphate
  modified_base 22: mod_base = OTHER; note = 2'-O-methylguanosine-3'-phosphate
  modified_base 23: mod_base = OTHER; note = 2'-O-methylcytidine
ttgcgggtccattatgattctgc

SEQ ID NO: 5046 - RNA, 23 nt, synthetic construct
  source 1..23: mol_type = other RNA
  modified_base 1: mod_base = OTHER; note = 2'-O-methyluridine-3'-phosphate 5'-(E)-Vinylphosphonate
  modified_base 2: mod_base = OTHER; note = 2'-deoxy-2'-fluoroguanosine-3'-phosphate
  modified_base 3: mod_base = OTHER; note = 2'-O-methyluridine-3'-phosphate
  modified_base 4: mod_base = OTHER; note = 2'-O-methylguanosine-3'-phosphate
  modified_base 5: mod_base = OTHER; note = 2'-O-methylcytidine-3'-phosphate
  modified_base 6: mod_base = OTHER; note = 2'-deoxy-2'-fluoroguanosine-3'-phosphate
  modified_base 7: mod_base = OTHER; note = 2'-O-methylguanosine-3'-phosphate
  modified_base 8: mod_base = OTHER; note = 2'-O-methylguanosine-3'-phosphate
  modified_base 9: mod_base = OTHER; note = 2'-O-methyluridine-3'-phosphate
  modified_base 10: mod_base = OTHER; note = 2'-O-methylcytidine-3'-phosphate
  modified_base 11: mod_base = OTHER; note = 2'-O-methylcytidine-3'-phosphate
  modified_base 12: mod_base = OTHER; note = 2'-O-methyladenosine-3'-phosphate
  modified_base 13: mod_base = OTHER; note = 2'-O-methyluridine-3'-phosphate
  modified_base 14: mod_base = OTHER; note = 2'-deoxy-2'-fluorouridine-3'-phosphate
  modified_base 15: mod_base = OTHER; note = 2'-O-methyladenosine-3'-phosphate
  modified_base 16: mod_base = OTHER; note = 2'-deoxy-2'-fluorouridine-3'-phosphate
  modified_base 17: mod_base = OTHER; note = 2'-O-methylguanosine-3'-phosphate
  modified_base 18: mod_base = OTHER; note = 2'-O-methyladenosine-3'-phosphate
  modified_base 19: mod_base = OTHER; note = 2'-O-methyluridine-3'-phosphate
  modified_base 20: mod_base = OTHER; note = 2'-O-methyluridine-3'-phosphate
  modified_base 21: mod_base = OTHER; note = 2'-O-methylcytidine-3'-phosphate
  modified_base 22: mod_base = OTHER; note = 2'-O-methyluridine-3'-phosphate
  modified_base 23: mod_base = OTHER; note = 2'-O-methylguanosine
tgtgcgggtccattatgattctg

SEQ ID NO: 5047 - RNA, 23 nt, synthetic construct
  source 1..23: mol_type = other RNA
  modified_base 1: mod_base = OTHER; note = 2'-O-methyluridine-3'-phosphate 5'-(E)-Vinylphosphonate
  modified_base 2: mod_base = OTHER; note = 2'-deoxy-2'-fluorouridine-3'-phosphate
  modified_base 3: mod_base = OTHER; note = 2'-O-methylguanosine-3'-phosphate
  modified_base 4: mod_base = OTHER; note = 2'-O-methyluridine-3'-phosphate
  modified_base 5: mod_base = OTHER; note = 2'-O-methylguanosine-3'-phosphate
  modified_base 6: mod_base = OTHER; note = 2'-deoxy-2'-fluorocytidine-3'-phosphate
  modified_base 7: mod_base = OTHER; note = 2'-O-methylguanosine-3'-phosphate
  modified_base 8: mod_base = OTHER; note = 2'-O-methylguanosine-3'-phosphate
  modified_base 9: mod_base = OTHER; note = 2'-O-methylguanosine-3'-phosphate
  modified_base 10: mod_base = OTHER; note = 2'-O-methyluridine-3'-phosphate
  modified_base 11: mod_base = OTHER; note = 2'-O-methylcytidine-3'-phosphate
  modified_base 12: mod_base = OTHER; note = 2'-O-methylcytidine-3'-phosphate
  modified_base 13: mod_base = OTHER; note = 2'-O-methyladenosine-3'-phosphate
  modified_base 14: mod_base = OTHER; note = 2'-deoxy-2'-fluorouridine-3'-phosphate
  modified_base 15: mod_base = OTHER; note = 2'-O-methyluridine-3'-phosphate
  modified_base 16: mod_base = OTHER; note = 2'-deoxy-2'-fluoroadenosine-3'-phosphate
  modified_base 17: mod_base = OTHER; note = 2'-O-methyluridine-3'-phosphate
  modified_base 18: mod_base = OTHER; note = 2'-O-methylguanosine-3'-phosphate
  modified_base 19: mod_base = OTHER; note = 2'-O-methyladenosine-3'-phosphate
  modified_base 20: mod_base = OTHER; note = 2'-O-methyluridine-3'-phosphate
  modified_base 21: mod_base = OTHER; note = 2'-O-methyluridine-3'-phosphate
  modified_base 22: mod_base = OTHER; note = 2'-O-methylcytidine-3'-phosphate
  modified_base 23: mod_base = OTHER; note = 2'-O-methyluridine
ttgtgcgggtccattatgattct

SEQ ID NO: 5048 - RNA, 23 nt, synthetic construct
  source 1..23: mol_type = other RNA
  modified_base 1: mod_base = OTHER; note = 2'-O-methyluridine-3'-phosphate 5'-(E)-Vinylphosphonate
  modified_base 2: mod_base = OTHER; note = 2'-deoxy-2'-fluorouridine-3'-phosphate
  modified_base 3: mod_base = OTHER; note = 2'-O-methyluridine-3'-phosphate
  modified_base 4: mod_base = OTHER; note = 2'-O-methylguanosine-3'-phosphate
  modified_base 5: mod_base = OTHER; note = 2'-O-methyluridine-3'-phosphate
  modified_base 6: mod_base = OTHER; note = 2'-deoxy-2'-fluoroguanosine-3'-phosphate
  modified_base 7: mod_base = OTHER; note = 2'-O-methylcytidine-3'-phosphate
  modified_base 8: mod_base = OTHER; note = 2'-O-methylguanosine-3'-phosphate
  modified_base 9: mod_base = OTHER; note = 2'-O-methylguanosine-3'-phosphate
  modified_base 10: mod_base = OTHER; note = 2'-O-methylguanosine-3'-phosphate
  modified_base 11: mod_base = OTHER; note = 2'-O-methyluridine-3'-phosphate
  modified_base 12: mod_base = OTHER; note = 2'-O-methylcytidine-3'-phosphate
  modified_base 13: mod_base = OTHER; note = 2'-O-methylcytidine-3'-phosphate
  modified_base 14: mod_base = OTHER; note = 2'-deoxy-2'-fluoroadenosine-3'-phosphate
  modified_base 15: mod_base = OTHER; note = 2'-O-methyluridine-3'-phosphate
  modified_base 16: mod_base = OTHER; note = 2'-deoxy-2'-fluorouridine-3'-phosphate
  modified_base 17: mod_base = OTHER; note = 2'-O-methyladenosine-3'-phosphate
  modified_base 18: mod_base = OTHER; note = 2'-O-methyluridine-3'-phosphate
  modified_base 19: mod_base = OTHER; note = 2'-O-methylguanosine-3'-phosphate
  modified_base 20: mod_base = OTHER; note = 2'-O-methyladenosine-3'-phosphate
  modified_base 21: mod_base = OTHER; note = 2'-O-methyluridine-3'-phosphate
  modified_base 22: mod_base = OTHER; note = 2'-O-methyluridine-3'-phosphate
  modified_base 23: mod_base = OTHER; note = 2'-O-methylcytidine
tttgtgcgggtccattatgattc

SEQ ID NO: 5049 - RNA, 23 nt, synthetic construct
  source 1..23: mol_type = other RNA
  modified_base 1: mod_base = OTHER; note = 2'-O-methyluridine-3'-phosphate 5'-(E)-Vinylphosphonate
  modified_base 2: mod_base = OTHER; note = 2'-deoxy-2'-fluorouridine-3'-phosphate
  modified_base 3: mod_base = OTHER; note = 2'-O-methyluridine-3'-phosphate
  modified_base 4: mod_base = OTHER; note = 2'-O-methyluridine-3'-phosphate
  modified_base 5: mod_base = OTHER; note = 2'-O-methylguanosine-3'-phosphate
  modified_base 6: mod_base = OTHER; note = 2'-deoxy-2'-fluorouridine-3'-phosphate
  modified_base 7: mod_base = OTHER; note = 2'-O-methylguanosine-3'-phosphate
  modified_base 8: mod_base = OTHER; note = 2'-O-methylcytidine-3'-phosphate
  modified_base 9: mod_base = OTHER; note = 2'-O-methylguanosine-3'-phosphate
  modified_base 10: mod_base = OTHER; note = 2'-O-methylguanosine-3'-phosphate
  modified_base 11: mod_base = OTHER; note = 2'-O-methylguanosine-3'-phosphate
  modified_base 12: mod_base = OTHER; note = 2'-O-methyluridine-3'-phosphate
  modified_base 13: mod_base = OTHER; note = 2'-O-methylcytidine-3'-phosphate
  modified_base 14: mod_base = OTHER; note = 2'-deoxy-2'-fluorocytidine-3'-phosphate
  modified_base 15: mod_base = OTHER; note = 2'-O-methyladenosine-3'-phosphate
  modified_base 16: mod_base = OTHER; note = 2'-deoxy-2'-fluorouridine-3'-phosphate
  modified_base 17: mod_base = OTHER; note = 2'-O-methyluridine-3'-phosphate
  modified_base 18: mod_base = OTHER; note = 2'-O-methyladenosine-3'-phosphate
  modified_base 19: mod_base = OTHER; note = 2'-O-methyluridine-3'-phosphate
  modified_base 20: mod_base = OTHER; note = 2'-O-methylguanosine-3'-phosphate
  modified_base 21: mod_base = OTHER; note = 2'-O-methyladenosine-3'-phosphate
  modified_base 22: mod_base = OTHER; note = 2'-O-methyluridine-3'-phosphate
  modified_base 23: mod_base = OTHER; note = 2'-O-methyluridine
ttttgtgcgggtccattatgatt

SEQ ID NO: 5050 - RNA, 23 nt, synthetic construct
  source 1..23: mol_type = other RNA
  modified_base 1: mod_base = OTHER; note = 2'-O-methyluridine-3'-phosphate 5'-(E)-Vinylphosphonate
  modified_base 2: mod_base = OTHER; note = 2'-deoxy-2'-fluorouridine-3'-phosphate
  modified_base 3: mod_base = OTHER; note = 2'-O-methyluridine-3'-phosphate
  modified_base 4: mod_base = OTHER; note = 2'-O-methyluridine-3'-phosphate
  modified_base 5: mod_base = OTHER; note = 2'-O-methyluridine-3'-phosphate
  modified_base 6: mod_base = OTHER; note = 2'-deoxy-2'-fluoroguanosine-3'-phosphate
  modified_base 7: mod_base = OTHER; note = 2'-O-methyluridine-3'-phosphate
  modified_base 8: mod_base = OTHER; note = 2'-O-methylguanosine-3'-phosphate
  modified_base 9: mod_base = OTHER; note = 2'-O-methylcytidine-3'-phosphate
  modified_base 10: mod_base = OTHER; note = 2'-O-methylguanosine-3'-phosphate
  modified_base 11: mod_base = OTHER; note = 2'-O-methylguanosine-3'-phosphate
  modified_base 12: mod_base = OTHER; note = 2'-O-methylguanosine-3'-phosphate
  modified_base 13: mod_base = OTHER; note = 2'-O-methyluridine-3'-phosphate
  modified_base 14: mod_base = OTHER; note = 2'-deoxy-2'-fluorocytidine-3'-phosphate
  modified_base 15: mod_base = OTHER; note = 2'-O-methylcytidine-3'-phosphate
  modified_base 16: mod_base = OTHER; note = 2'-deoxy-2'-fluoroadenosine-3'-phosphate
  modified_base 17: mod_base = OTHER; note = 2'-O-methyluridine-3'-phosphate
  modified_base 18: mod_base = OTHER; note = 2'-O-methyluridine-3'-phosphate
  modified_base 19: mod_base = OTHER; note = 2'-O-methyladenosine-3'-phosphate
  modified_base 20: mod_base = OTHER; note = 2'-O-methyluridine-3'-phosphate
  modified_base 21: mod_base = OTHER; note = 2'-O-methylguanosine-3'-phosphate
  modified_base 22: mod_base = OTHER; note = 2'-O-methyladenosine-3'-phosphate
  modified_base 23: mod_base = OTHER; note = 2'-O-methyluridine
tttttgtgcgggtccattatgat

SEQ ID NO: 5051 - RNA, 23 nt, synthetic construct
  source 1..23: mol_type = other RNA
  modified_base 1: mod_base = OTHER; note = 2'-O-methyluridine-3'-phosphate 5'-(E)-Vinylphosphonate
  modified_base 2: mod_base = OTHER; note = 2'-deoxy-2'-fluoroadenosine-3'-phosphate
  modified_base 3: mod_base = OTHER; note = 2'-O-methyluridine-3'-phosphate
  modified_base 4: mod_base = OTHER; note = 2'-O-methyluridine-3'-phosphate
  modified_base 5: mod_base = OTHER; note = 2'-O-methyluridine-3'-phosphate
  modified_base 6: mod_base = OTHER; note = 2'-deoxy-2'-fluorouridine-3'-phosphate
  modified_base 7: mod_base = OTHER; note = 2'-O-methylguanosine-3'-phosphate
  modified_base 8: mod_base = OTHER; note = 2'-O-methyluridine-3'-phosphate
  modified_base 9: mod_base = OTHER; note = 2'-O-methylguanosine-3'-phosphate
  modified_base 10: mod_base = OTHER; note = 2'-O-methylcytidine-3'-phosphate
  modified_base 11: mod_base = OTHER; note = 2'-O-methylguanosine-3'-phosphate
  modified_base 12: mod_base = OTHER; note = 2'-O-methylguanosine-3'-phosphate
  modified_base 13: mod_base = OTHER; note = 2'-O-methylguanosine-3'-phosphate
  modified_base 14: mod_base = OTHER; note = 2'-deoxy-2'-fluorouridine-3'-phosphate
  modified_base 15: mod_base = OTHER; note = 2'-O-methylcytidine-3'-phosphate
  modified_base 16: mod_base = OTHER; note = 2'-deoxy-2'-fluorocytidine-3'-phosphate
  modified_base 17: mod_base = OTHER; note = 2'-O-methyladenosine-3'-phosphate
  modified_base 18: mod_base = OTHER; note = 2'-O-methyluridine-3'-phosphate
  modified_base 19: mod_base = OTHER; note = 2'-O-methyluridine-3'-phosphate
  modified_base 20: mod_base = OTHER; note = 2'-O-methyladenosine-3'-phosphate
  modified_base 21: mod_base = OTHER; note = 2'-O-methyluridine-3'-phosphate
  modified_base 22: mod_base = OTHER; note = 2'-O-methylguanosine-3'-phosphate
  modified_base 23: mod_base = OTHER; note = 2'-O-methyladenosine
tattttgtgcgggtccattatga

SEQ ID NO: 5052 - RNA, 23 nt, synthetic construct
  source 1..23: mol_type = other RNA
  modified_base 1: mod_base = OTHER; note = 2'-O-methyluridine-3'-phosphate 5'-(E)-Vinylphosphonate
  modified_base 2: mod_base = OTHER; note = 2'-deoxy-2'-fluoroguanosine-3'-phosphate
  modified_base 3: mod_base = OTHER; note = 2'-O-methyladenosine-3'-phosphate
  modified_base 4: mod_base = OTHER; note = 2'-O-methyluridine-3'-phosphate
  modified_base 5: mod_base = OTHER; note = 2'-O-methyluridine-3'-phosphate
  modified_base 6: mod_base = OTHER; note = 2'-deoxy-2'-fluorouridine-3'-phosphate
  modified_base 7: mod_base = OTHER; note = 2'-O-methyluridine-3'-phosphate
  modified_base 8: mod_base = OTHER; note = 2'-O-methylguanosine-3'-phosphate
  modified_base 9: mod_base = OTHER; note = 2'-O-methyluridine-3'-phosphate
  modified_base 10: mod_base = OTHER; note = 2'-O-methylguanosine-3'-phosphate
  modified_base 11: mod_base = OTHER; note = 2'-O-methylcytidine-3'-phosphate
  modified_base 12: mod_base = OTHER; note = 2'-O-methylguanosine-3'-phosphate
  modified_base 13: mod_base = OTHER; note = 2'-O-methylguanosine-3'-phosphate
  modified_base 14: mod_base = OTHER; note = 2'-deoxy-2'-fluoroguanosine-3'-phosphate
  modified_base 15: mod_base = OTHER; note = 2'-O-methyluridine-3'-phosphate
  modified_base 16: mod_base = OTHER; note = 2'-deoxy-2'-fluorocytidine-3'-phosphate
  modified_base 17: mod_base = OTHER; note = 2'-O-methylcytidine-3'-phosphate
  modified_base 18: mod_base = OTHER; note = 2'-O-methyladenosine-3'-phosphate
  modified_base 19: mod_base = OTHER; note = 2'-O-methyluridine-3'-phosphate
  modified_base 20: mod_base = OTHER; note = 2'-O-methyluridine-3'-phosphate
  modified_base 21: mod_base = OTHER; note = 2'-O-methyladenosine-3'-phosphate
  modified_base 22: mod_base = OTHER; note = 2'-O-methyluridine-3'-phosphate
  modified_base 23: mod_base = OTHER; note = 2'-O-methylguanosine
tgattttgtgcgggtccattatg

SEQ ID NO: 5053 - RNA, 23 nt, synthetic construct
  source 1..23: mol_type = other RNA
  modified_base 1: mod_base = OTHER; note = 2'-O-methyluridine-3'-phosphate 5'-(E)-Vinylphosphonate
  modified_base 2: mod_base = OTHER; note = 2'-deoxy-2'-fluoroadenosine-3'-phosphate
  modified_base 3: mod_base = OTHER; note = 2'-O-methylguanosine-3'-phosphate
  modified_base 4: mod_base = OTHER; note = 2'-O-methyladenosine-3'-phosphate
  modified_base 5: mod_base = OTHER; note = 2'-O-methyluridine-3'-phosphate
  modified_base 6: mod_base = OTHER; note = 2'-deoxy-2'-fluorouridine-3'-phosphate
  modified_base 7: mod_base = OTHER; note = 2'-O-methyluridine-3'-phosphate
  modified_base 8: mod_base = OTHER; note = 2'-O-methyluridine-3'-phosphate
  modified_base 9: mod_base = OTHER; note = 2'-O-methylguanosine-3'-phosphate
  modified_base 10: mod_base = OTHER; note = 2'-O-methyluridine-3'-phosphate
  modified_base 11: mod_base = OTHER; note = 2'-O-methylguanosine-3'-phosphate
  modified_base 12: mod_base = OTHER; note = 2'-O-methylcytidine-3'-phosphate
  modified_base 13: mod_base = OTHER; note = 2'-O-methylguanosine-3'-phosphate
  modified_base 14: mod_base = OTHER; note = 2'-deoxy-2'-fluoroguanosine-3'-phosphate
  modified_base 15: mod_base = OTHER; note = 2'-O-methylguanosine-3'-phosphate
  modified_base 16: mod_base = OTHER; note = 2'-deoxy-2'-fluorouridine-3'-phosphate
  modified_base 17: mod_base = OTHER; note = 2'-O-methylcytidine-3'-phosphate
  modified_base 18: mod_base = OTHER; note = 2'-O-methylcytidine-3'-phosphate
  modified_base 19: mod_base = OTHER; note = 2'-O-methyladenosine-3'-phosphate
  modified_base 20: mod_base = OTHER; note = 2'-O-methyluridine-3'-phosphate
  modified_base 21: mod_base = OTHER; note = 2'-O-methyluridine-3'-phosphate
  modified_base 22: mod_base = OTHER; note = 2'-O-methyladenosine-3'-phosphate
  modified_base 23: mod_base = OTHER; note = 2'-O-methyluridine
tagattttgtgcgggtccattat

SEQ ID NO: 5054 - RNA, 23 nt, synthetic construct
  source 1..23: mol_type = other RNA
  modified_base 1: mod_base = OTHER; note = 2'-O-methyluridine-3'-phosphate 5'-(E)-Vinylphosphonate
  modified_base 2: mod_base = OTHER; note = 2'-deoxy-2'-fluoroguanosine-3'-phosphate
  modified_base 3: mod_base = OTHER; note = 2'-O-methyladenosine-3'-phosphate
  modified_base 4: mod_base = OTHER; note = 2'-O-methylguanosine-3'-phosphate
  modified_base 5: mod_base = OTHER; note = 2'-O-methyladenosine-3'-phosphate
  modified_base 6: mod_base = OTHER; note = 2'-deoxy-2'-fluorouridine-3'-phosphate
  modified_base 7: mod_base = OTHER; note = 2'-O-methyluridine-3'-phosphate
  modified_base 8: mod_base = OTHER; note = 2'-O-methyluridine-3'-phosphate
  modified_base 9: mod_base = OTHER; note = 2'-O-methyluridine-3'-phosphate
  modified_base 10: mod_base = OTHER; note = 2'-O-methylguanosine-3'-phosphate
  modified_base 11: mod_base = OTHER; note = 2'-O-methyluridine-3'-phosphate
  modified_base 12: mod_base = OTHER; note = 2'-O-methylguanosine-3'-phosphate
  modified_base 13: mod_base = OTHER; note = 2'-O-methylcytidine-3'-phosphate
  modified_base 14: mod_base = OTHER; note = 2'-deoxy-2'-fluoroguanosine-3'-phosphate
  modified_base 15: mod_base = OTHER; note = 2'-O-methylguanosine-3'-phosphate
  modified_base 16: mod_base = OTHER; note = 2'-deoxy-2'-fluoroguanosine-3'-phosphate
  modified_base 17: mod_base = OTHER; note = 2'-O-methyluridine-3'-phosphate
  modified_base 18: mod_base = OTHER; note = 2'-O-methylcytidine-3'-phosphate
  modified_base 19: mod_base = OTHER; note = 2'-O-methylcytidine-3'-phosphate
  modified_base 20: mod_base = OTHER; note = 2'-O-methyladenosine-3'-phosphate
  modified_base 21: mod_base = OTHER; note = 2'-O-methyluridine-3'-phosphate
  modified_base 22: mod_base = OTHER; note = 2'-O-methyluridine-3'-phosphate
  modified_base 23: mod_base = OTHER; note = 2'-O-methyladenosine
tgagattttgtgcgggtccatta

SEQ ID NO: 5055 - RNA, 23 nt, synthetic construct
  source 1..23: mol_type = other RNA
  modified_base 1: mod_base = OTHER; note = 2'-O-methyluridine-3'-phosphate 5'-(E)-Vinylphosphonate
  modified_base 2: mod_base = OTHER; note = 2'-deoxy-2'-fluorouridine-3'-phosphate
  modified_base 3: mod_base = OTHER; note = 2'-O-methylguanosine-3'-phosphate
  modified_base 4: mod_base = OTHER; note = 2'-O-methyladenosine-3'-phosphate
  modified_base 5: mod_base = OTHER; note = 2'-O-methylguanosine-3'-phosphate
  modified_base 6: mod_base = OTHER; note = 2'-deoxy-2'-fluoroadenosine-3'-phosphate
  modified_base 7: mod_base = OTHER; note = 2'-O-methyluridine-3'-phosphate
  modified_base 8: mod_base = OTHER; note = 2'-O-methyluridine-3'-phosphate
  modified_base 9: mod_base = OTHER; note = 2'-O-methyluridine-3'-phosphate
  modified_base 10: mod_base = OTHER; note = 2'-O-methyluridine-3'-phosphate
  modified_base 11: mod_base = OTHER; note = 2'-O-methylguanosine-3'-phosphate
  modified_base 12: mod_base = OTHER; note = 2'-O-methyluridine-3'-phosphate
  modified_base 13: mod_base = OTHER; note = 2'-O-methylguanosine-3'-phosphate
  modified_base 14: mod_base = OTHER; note = 2'-deoxy-2'-fluorocytidine-3'-phosphate
  modified_base 15: mod_base = OTHER; note = 2'-O-methylguanosine-3'-phosphate
  modified_base 16: mod_base = OTHER; note = 2'-deoxy-2'-fluoroguanosine-3'-phosphate
  modified_base 17: mod_base = OTHER; note = 2'-O-methylguanosine-3'-phosphate
  modified_base 18: mod_base = OTHER; note = 2'-O-methyluridine-3'-phosphate
  modified_base 19: mod_base = OTHER; note = 2'-O-methylcytidine-3'-phosphate
  modified_base 20: mod_base = OTHER; note = 2'-O-methylcytidine-3'-phosphate
  modified_base 21: mod_base = OTHER; note = 2'-O-methyladenosine-3'-phosphate
  modified_base 22: mod_base = OTHER; note = 2'-O-methyluridine-3'-phosphate
  modified_base 23: mod_base = OTHER; note = 2'-O-methyluridine
ttgagattttgtgcgggtccatt

SEQ ID NO: 5056 - RNA, 23 nt, synthetic construct
  source 1..23: mol_type = other RNA
  modified_base 1: mod_base = OTHER; note = 2'-O-methyluridine-3'-phosphate 5'-(E)-Vinylphosphonate
  modified_base 2: mod_base = OTHER; note = 2'-deoxy-2'-fluorocytidine-3'-phosphate
  modified_base 3: mod_base = OTHER; note = 2'-O-methyluridine-3'-phosphate
  modified_base 4: mod_base = OTHER; note = 2'-O-methylguanosine-3'-phosphate
  modified_base 5: mod_base = OTHER; note = 2'-O-methyladenosine-3'-phosphate
  modified_base 6: mod_base = OTHER; note = 2'-deoxy-2'-fluoroguanosine-3'-phosphate
  modified_base 7: mod_base = OTHER; note = 2'-O-methyladenosine-3'-phosphate
  modified_base 8: mod_base = OTHER; note = 2'-O-methyluridine-3'-phosphate
  modified_base 9: mod_base = OTHER; note = 2'-O-methyluridine-3'-phosphate
  modified_base 10: mod_base = OTHER; note = 2'-O-methyluridine-3'-phosphate
  modified_base 11: mod_base = OTHER; note = 2'-O-methyluridine-3'-phosphate
  modified_base 12: mod_base = OTHER; note = 2'-O-methylguanosine-3'-phosphate
  modified_base 13: mod_base = OTHER; note = 2'-O-methyluridine-3'-phosphate
  modified_base 14: mod_base = OTHER; note = 2'-deoxy-2'-fluoroguanosine-3'-phosphate
  modified_base 15: mod_base = OTHER; note = 2'-O-methylcytidine-3'-phosphate
  modified_base 16: mod_base = OTHER; note = 2'-deoxy-2'-fluoroguanosine-3'-phosphate
  modified_base 17: mod_base = OTHER; note = 2'-O-methylguanosine-3'-phosphate
  modified_base 18: mod_base = OTHER; note = 2'-O-methylguanosine-3'-phosphate
  modified_base 19: mod_base = OTHER; note = 2'-O-methyluridine-3'-phosphate
  modified_base 20: mod_base = OTHER; note = 2'-O-methylcytidine-3'-phosphate
  modified_base 21: mod_base = OTHER; note = 2'-O-methylcytidine-3'-phosphate
  modified_base 22: mod_base = OTHER; note = 2'-O-methyladenosine-3'-phosphate
  modified_base 23: mod_base = OTHER; note = 2'-O-methyluridine
tctgagattttgtgcgggtccat

SEQ ID NO: 5057 - RNA, 23 nt, synthetic construct
  source 1..23: mol_type = other RNA
  modified_base 1: mod_base = OTHER; note = 2'-O-methyluridine-3'-phosphate 5'-(E)-Vinylphosphonate
  modified_base 2: mod_base = OTHER; note = 2'-deoxy-2'-fluorouridine-3'-phosphate
  modified_base 3: mod_base = OTHER; note = 2'-O-methylcytidine-3'-phosphate
  modified_base 4: mod_base = OTHER; note = 2'-O-methyluridine-3'-phosphate
  modified_base 5: mod_base = OTHER; note = 2'-O-methylguanosine-3'-phosphate
  modified_base 6: mod_base = OTHER; note = 2'-deoxy-2'-fluoroadenosine-3'-phosphate
  modified_base 7: mod_base = OTHER; note = 2'-O-methylguanosine-3'-phosphate
  modified_base 8: mod_base = OTHER; note = 2'-O-methyladenosine-3'-phosphate
  modified_base 9: mod_base = OTHER; note = 2'-O-methyluridine-3'-phosphate
  modified_base 10: mod_base = OTHER; note = 2'-O-methyluridine-3'-phosphate
  modified_base 11: mod_base = OTHER; note = 2'-O-methyluridine-3'-phosphate
  modified_base 12: mod_base = OTHER; note = 2'-O-methyluridine-3'-phosphate
  modified_base 13: mod_base = OTHER; note = 2'-O-methylguanosine-3'-phosphate
  modified_base 14: mod_base = OTHER; note = 2'-deoxy-2'-fluorouridine-3'-phosphate
  modified_base 15: mod_base = OTHER; note = 2'-O-methylguanosine-3'-phosphate
  modified_base 16: mod_base = OTHER; note = 2'-deoxy-2'-fluorocytidine-3'-phosphate
  modified_base 17: mod_base = OTHER; note = 2'-O-methylguanosine-3'-phosphate
  modified_base 18: mod_base = OTHER; note = 2'-O-methylguanosine-3'-phosphate
  modified_base 19: mod_base = OTHER; note = 2'-O-methylguanosine-3'-phosphate
  modified_base 20: mod_base = OTHER; note = 2'-O-methyluridine-3'-phosphate
  modified_base 21: mod_base = OTHER; note = 2'-O-methylcytidine-3'-phosphate
  modified_base 22: mod_base = OTHER; note = 2'-O-methylcytidine-3'-phosphate
  modified_base 23: mod_base = OTHER; note = 2'-O-methyladenosine
ttctgagattttgtgcgggtcca

SEQ ID NO: 5058 - RNA, 23 nt, synthetic construct
  source 1..23: mol_type = other RNA
  modified_base 1: mod_base = OTHER; note = 2'-O-methyluridine-3'-phosphate 5'-(E)-Vinylphosphonate
  modified_base 2: mod_base = OTHER; note = 2'-deoxy-2'-fluorouridine-3'-phosphate
  modified_base 3: mod_base = OTHER; note = 2'-O-methyluridine-3'-phosphate
  modified_base 4: mod_base = OTHER; note = 2'-O-methylcytidine-3'-phosphate
  modified_base 5: mod_base = OTHER; note = 2'-O-methyluridine-3'-phosphate
  modified_base 6: mod_base = OTHER; note = 2'-deoxy-2'-fluoroguanosine-3'-phosphate
  modified_base 7: mod_base = OTHER; note = 2'-O-methyladenosine-3'-phosphate
  modified_base 8: mod_base = OTHER; note = 2'-O-methylguanosine-3'-phosphate
  modified_base 9: mod_base = OTHER; note = 2'-O-methyladenosine-3'-phosphate
  modified_base 10: mod_base = OTHER; note = 2'-O-methyluridine-3'-phosphate
  modified_base 11: mod_base = OTHER; note = 2'-O-methyluridine-3'-phosphate
  modified_base 12: mod_base = OTHER; note = 2'-O-methyluridine-3'-phosphate
  modified_base 13: mod_base = OTHER; note = 2'-O-methyluridine-3'-phosphate
  modified_base 14: mod_base = OTHER; note = 2'-deoxy-2'-fluoroguanosine-3'-phosphate
  modified_base 15: mod_base = OTHER; note = 2'-O-methyluridine-3'-phosphate
  modified_base 16: mod_base = OTHER; note = 2'-deoxy-2'-fluoroguanosine-3'-phosphate
  modified_base 17: mod_base = OTHER; note = 2'-O-methylcytidine-3'-phosphate
  modified_base 18: mod_base = OTHER; note = 2'-O-methylguanosine-3'-phosphate
  modified_base 19: mod_base = OTHER; note = 2'-O-methylguanosine-3'-phosphate
  modified_base 20: mod_base = OTHER; note = 2'-O-methylguanosine-3'-phosphate
  modified_base 21: mod_base = OTHER; note = 2'-O-methyluridine-3'-phosphate
  modified_base 22: mod_base = OTHER; note = 2'-O-methylcytidine-3'-phosphate
  modified_base 23: mod_base = OTHER; note = 2'-O-methylcytidine
tttctgagattttgtgcgggtcc

SEQ ID NO: 5059 - RNA, 23 nt, synthetic construct
  source 1..23: mol_type = other RNA
  modified_base 1: mod_base = OTHER; note = 2'-O-methyluridine-3'-phosphate 5'-(E)-Vinylphosphonate
  modified_base 2: mod_base = OTHER; note = 2'-deoxy-2'-fluoroguanosine-3'-phosphate
  modified_base 3: mod_base = OTHER; note = 2'-O-methyluridine-3'-phosphate
  modified_base 4: mod_base = OTHER; note = 2'-O-methyluridine-3'-phosphate
  modified_base 5: mod_base = OTHER; note = 2'-O-methylcytidine-3'-phosphate
  modified_base 6: mod_base = OTHER; note = 2'-deoxy-2'-fluorouridine-3'-phosphate
  modified_base 7: mod_base = OTHER; note = 2'-O-methylguanosine-3'-phosphate
  modified_base 8: mod_base = OTHER; note = 2'-O-methyladenosine-3'-phosphate
  modified_base 9: mod_base = OTHER; note = 2'-O-methylguanosine-3'-phosphate
  modified_base 10: mod_base = OTHER; note = 2'-O-methyladenosine-3'-phosphate
  modified_base 11: mod_base = OTHER; note = 2'-O-methyluridine-3'-phosphate
  modified_base 12: mod_base = OTHER; note = 2'-O-methyluridine-3'-phosphate
  modified_base 13: mod_base = OTHER; note = 2'-O-methyluridine-3'-phosphate
  modified_base 14: mod_base = OTHER; note = 2'-deoxy-2'-fluorouridine-3'-phosphate
  modified_base 15: mod_base = OTHER; note = 2'-O-methylguanosine-3'-phosphate
  modified_base 16: mod_base = OTHER; note = 2'-deoxy-2'-fluorouridine-3'-phosphate
  modified_base 17: mod_base = OTHER; note = 2'-O-methylguanosine-3'-phosphate
  modified_base 18: mod_base = OTHER; note = 2'-O-methylcytidine-3'-phosphate
  modified_base 19: mod_base = OTHER; note = 2'-O-methylguanosine-3'-phosphate
  modified_base 20: mod_base = OTHER; note = 2'-O-methylguanosine-3'-phosphate
  modified_base 21: mod_base = OTHER; note = 2'-O-methylguanosine-3'-phosphate
  modified_base 22: mod_base = OTHER; note = 2'-O-methyluridine-3'-phosphate
  modified_base 23: mod_base = OTHER; note = 2'-O-methylcytidine
tgttctgagattttgtgcgggtc

SEQ ID NO: 5060 - RNA, 23 nt, synthetic construct
  source 1..23: mol_type = other RNA
  modified_base 1: mod_base = OTHER; note = 2'-O-methyluridine-3'-phosphate 5'-(E)-Vinylphosphonate
  modified_base 2: mod_base = OTHER; note = 2'-deoxy-2'-fluoroguanosine-3'-phosphate
  modified_base 3: mod_base = OTHER; note = 2'-O-methylguanosine-3'-phosphate
  modified_base 4: mod_base = OTHER; note = 2'-O-methyluridine-3'-phosphate
  modified_base 5: mod_base = OTHER; note = 2'-O-methyluridine-3'-phosphate
  modified_base 6: mod_base = OTHER; note = 2'-deoxy-2'-fluorocytidine-3'-phosphate
  modified_base 7: mod_base = OTHER; note = 2'-O-methyluridine-3'-phosphate
  modified_base 8: mod_base = OTHER; note = 2'-O-methylguanosine-3'-phosphate
  modified_base 9: mod_base = OTHER; note = 2'-O-methyladenosine-3'-phosphate
  modified_base 10: mod_base = OTHER; note = 2'-O-methylguanosine-3'-phosphate
  modified_base 11: mod_base = OTHER; note = 2'-O-methyladenosine-3'-phosphate
  modified_base 12: mod_base = OTHER; note = 2'-O-methyluridine-3'-phosphate
  modified_base 13: mod_base = OTHER; note = 2'-O-methyluridine-3'-phosphate
  modified_base 14: mod_base = OTHER; note = 2'-deoxy-2'-fluorouridine-3'-phosphate
  modified_base 15: mod_base = OTHER; note = 2'-O-methyluridine-3'-phosphate
  modified_base 16: mod_base = OTHER; note = 2'-deoxy-2'-fluoroguanosine-3'-phosphate
  modified_base 17: mod_base = OTHER; note = 2'-O-methyluridine-3'-phosphate
  modified_base 18: mod_base = OTHER; note = 2'-O-methylguanosine-3'-phosphate
  modified_base 19: mod_base = OTHER; note = 2'-O-methylcytidine-3'-phosphate
  modified_base 20: mod_base = OTHER; note = 2'-O-methylguanosine-3'-phosphate
  modified_base 21: mod_base = OTHER; note = 2'-O-methylguanosine-3'-phosphate
  modified_base 22: mod_base = OTHER; note = 2'-O-methylguanosine-3'-phosphate
  modified_base 23: mod_base = OTHER; note = 2'-O-methyluridine
tggttctgagattttgtgcgggt

SEQ ID NO: 5061 - RNA, 23 nt, synthetic construct
  source 1..23: mol_type = other RNA
  modified_base 1: mod_base = OTHER; note = 2'-O-methyluridine-3'-phosphate 5'-(E)-Vinylphosphonate
  modified_base 2: mod_base = OTHER; note = 2'-deoxy-2'-fluorouridine-3'-phosphate
  modified_base 3: mod_base = OTHER; note = 2'-O-methylguanosine-3'-phosphate
  modified_base 4: mod_base = OTHER; note = 2'-O-methylguanosine-3'-phosphate
  modified_base 5: mod_base = OTHER; note = 2'-O-methyluridine-3'-phosphate
  modified_base 6: mod_base = OTHER; note = 2'-deoxy-2'-fluorouridine-3'-phosphate
  modified_base 7: mod_base = OTHER; note = 2'-O-methylcytidine-3'-phosphate
  modified_base 8: mod_base = OTHER; note = 2'-O-methyluridine-3'-phosphate
  modified_base 9: mod_base = OTHER; note = 2'-O-methylguanosine-3'-phosphate
  modified_base 10: mod_base = OTHER; note = 2'-O-methyladenosine-3'-phosphate
  modified_base 11: mod_base = OTHER; note = 2'-O-methylguanosine-3'-phosphate
  modified_base 12: mod_base = OTHER; note = 2'-O-methyladenosine-3'-phosphate
  modified_base 13: mod_base = OTHER; note = 2'-O-methyluridine-3'-phosphate
  modified_base 14: mod_base = OTHER; note = 2'-deoxy-2'-fluorouridine-3'-phosphate
  modified_base 15: mod_base = OTHER; note = 2'-O-methyluridine-3'-phosphate
  modified_base 16: mod_base = OTHER; note = 2'-deoxy-2'-fluorouridine-3'-phosphate
  modified_base 17: mod_base = OTHER; note = 2'-O-methylguanosine-3'-phosphate
  modified_base 18: mod_base = OTHER; note = 2'-O-methyluridine-3'-phosphate
  modified_base 19: mod_base = OTHER; note = 2'-O-methylguanosine-3'-phosphate
  modified_base 20: mod_base = OTHER; note = 2'-O-methylcytidine-3'-phosphate
  modified_base 21: mod_base = OTHER; note = 2'-O-methylguanosine-3'-phosphate
  modified_base 22: mod_base = OTHER; note = 2'-O-methylguanosine-3'-phosphate
  modified_base 23: mod_base = OTHER; note = 2'-O-methylguanosine
ttggttctgagattttgtgcggg

SEQ ID NO: 5062 - RNA, 23 nt, synthetic construct
  source 1..23: mol_type = other RNA
  modified_base 1: mod_base = OTHER; note = 2'-O-methyluridine-3'-phosphate 5'-(E)-Vinylphosphonate
  modified_base 2: mod_base = OTHER; note = 2'-deoxy-2'-fluoroadenosine-3'-phosphate
  modified_base 3: mod_base = OTHER; note = 2'-O-methyluridine-3'-phosphate
  modified_base 4: mod_base = OTHER; note = 2'-O-methylguanosine-3'-phosphate
  modified_base 5: mod_base = OTHER; note = 2'-O-methylguanosine-3'-phosphate
  modified_base 6: mod_base = OTHER; note = 2'-deoxy-2'-fluorouridine-3'-phosphate
  modified_base 7: mod_base = OTHER; note = 2'-O-methyluridine-3'-phosphate
  modified_base 8: mod_base = OTHER; note = 2'-O-methylcytidine-3'-phosphate
  modified_base 9: mod_base = OTHER; note = 2'-O-methyluridine-3'-phosphate
  modified_base 10: mod_base = OTHER; note = 2'-O-methylguanosine-3'-phosphate
  modified_base 11: mod_base = OTHER; note = 2'-O-methyladenosine-3'-phosphate
  modified_base 12: mod_base = OTHER; note = 2'-O-methylguanosine-3'-phosphate
  modified_base 13: mod_base = OTHER; note = 2'-O-methyladenosine-3'-phosphate
  modified_base 14: mod_base = OTHER; note = 2'-deoxy-2'-fluorouridine-3'-phosphate
  modified_base 15: mod_base = OTHER; note = 2'-O-methyluridine-3'-phosphate
  modified_base 16: mod_base = OTHER; note = 2'-deoxy-2'-fluorouridine-3'-phosphate
  modified_base 17: mod_base = OTHER; note = 2'-O-methyluridine-3'-phosphate
  modified_base 18: mod_base = OTHER; note = 2'-O-methylguanosine-3'-phosphate
  modified_base 19: mod_base = OTHER; note = 2'-O-methyluridine-3'-phosphate
  modified_base 20: mod_base = OTHER; note = 2'-O-methylguanosine-3'-phosphate
  modified_base 21: mod_base = OTHER; note = 2'-O-methylcytidine-3'-phosphate
  modified_base 22: mod_base = OTHER; note = 2'-O-methylguanosine-3'-phosphate
  modified_base 23: mod_base = OTHER; note = 2'-O-methylguanosine
tatggttctgagattttgtgcgg

SEQ ID NO: 5063 - RNA, 23 nt, synthetic construct
  source 1..23: mol_type = other RNA
  modified_base 1: mod_base = OTHER; note = 2'-O-methyluridine-3'-phosphate 5'-(E)-Vinylphosphonate
  modified_base 2: mod_base = OTHER; note = 2'-deoxy-2'-fluorouridine-3'-phosphate
  modified_base 3: mod_base = OTHER; note = 2'-O-methyladenosine-3'-phosphate
  modified_base 4: mod_base = OTHER; note = 2'-O-methyluridine-3'-phosphate
  modified_base 5: mod_base = OTHER; note = 2'-O-methylguanosine-3'-phosphate
  modified_base 6: mod_base = OTHER; note = 2'-deoxy-2'-fluoroguanosine-3'-phosphate
  modified_base 7: mod_base = OTHER; note = 2'-O-methyluridine-3'-phosphate
  modified_base 8: mod_base = OTHER; note = 2'-O-methyluridine-3'-phosphate
  modified_base 9: mod_base = OTHER; note = 2'-O-methylcytidine-3'-phosphate
  modified_base 10: mod_base = OTHER; note = 2'-O-methyluridine-3'-phosphate
  modified_base 11: mod_base = OTHER; note = 2'-O-methylguanosine-3'-phosphate
  modified_base 12: mod_base = OTHER; note = 2'-O-methyladenosine-3'-phosphate
  modified_base 13: mod_base = OTHER; note = 2'-O-methylguanosine-3'-phosphate
  modified_base 14: mod_base = OTHER; note = 2'-deoxy-2'-fluoroadenosine-3'-phosphate
  modified_base 15: mod_base = OTHER; note = 2'-O-methyluridine-3'-phosphate
  modified_base 16: mod_base = OTHER; note = 2'-deoxy-2'-fluorouridine-3'-phosphate
  modified_base 17: mod_base = OTHER; note = 2'-O-methyluridine-3'-phosphate
  modified_base 18: mod_base = OTHER; note = 2'-O-methyluridine-3'-phosphate
  modified_base 19: mod_base = OTHER; note = 2'-O-methylguanosine-3'-phosphate
  modified_base 20: mod_base = OTHER; note = 2'-O-methyluridine-3'-phosphate
  modified_base 21: mod_base = OTHER; note = 2'-O-methylguanosine-3'-phosphate
  modified_base 22: mod_base = OTHER; note = 2'-O-methylcytidine-3'-phosphate
  modified_base 23: mod_base = OTHER; note = 2'-O-methylguanosine
ttatggttctgagattttgtgcg

SEQ ID NO: 5064 - RNA, 23 nt, synthetic construct
  source 1..23: mol_type = other RNA
  modified_base 1: mod_base = OTHER; note = 2'-O-methyluridine-3'-phosphate 5'-(E)-Vinylphosphonate
  modified_base 2: mod_base = OTHER; note = 2'-deoxy-2'-fluoroadenosine-3'-phosphate
  modified_base 3: mod_base = OTHER; note = 2'-O-methyluridine-3'-phosphate
  modified_base 4: mod_base = OTHER; note = 2'-O-methyladenosine-3'-phosphate
  modified_base 5: mod_base = OTHER; note = 2'-O-methyluridine-3'-phosphate
  modified_base 6: mod_base = OTHER; note = 2'-deoxy-2'-fluoroguanosine-3'-phosphate
  modified_base 7: mod_base = OTHER; note = 2'-O-methylguanosine-3'-phosphate
  modified_base 8: mod_base = OTHER; note = 2'-O-methyluridine-3'-phosphate
  modified_base 9: mod_base = OTHER; note = 2'-O-methyluridine-3'-phosphate
  modified_base 10: mod_base = OTHER; note = 2'-O-methylcytidine-3'-phosphate
  modified_base 11: mod_base = OTHER; note = 2'-O-methyluridine-3'-phosphate
  modified_base 12: mod_base = OTHER; note = 2'-O-methylguanosine-3'-phosphate
  modified_base 13: mod_base = OTHER; note = 2'-O-methyladenosine-3'-phosphate
  modified_base 14: mod_base = OTHER; note = 2'-deoxy-2'-fluoroguanosine-3'-phosphate
  modified_base 15: mod_base = OTHER; note = 2'-O-methyladenosine-3'-phosphate
  modified_base 16: mod_base = OTHER; note = 2'-deoxy-2'-fluorouridine-3'-phosphate
  modified_base 17: mod_base = OTHER; note = 2'-O-methyluridine-3'-phosphate
  modified_base 18: mod_base = OTHER; note = 2'-O-methyluridine-3'-phosphate
  modified_base 19: mod_base = OTHER; note = 2'-O-methyluridine-3'-phosphate
  modified_base 20: mod_base = OTHER; note = 2'-O-methylguanosine-3'-phosphate
  modified_base 21: mod_base = OTHER; note = 2'-O-methyluridine-3'-phosphate
  modified_base 22: mod_base = OTHER; note = 2'-O-methylguanosine-3'-phosphate
  modified_base 23: mod_base = OTHER; note = 2'-O-methylcytidine
tatatggttctgagattttgtgc

SEQ ID NO: 5065 - RNA, 23 nt, synthetic construct
  source 1..23: mol_type = other RNA
  modified_base 1: mod_base = OTHER; note = 2'-O-methyluridine-3'-phosphate 5'-(E)-Vinylphosphonate
  modified_base 2: mod_base = OTHER; note = 2'-deoxy-2'-fluoroguanosine-3'-phosphate
  modified_base 3: mod_base = OTHER; note = 2'-O-methyladenosine-3'-phosphate
  modified_base 4: mod_base = OTHER; note = 2'-O-methyluridine-3'-phosphate
  modified_base 5: mod_base = OTHER; note = 2'-O-methyladenosine-3'-phosphate
  modified_base 6: mod_base = OTHER; note = 2'-deoxy-2'-fluorouridine-3'-phosphate
  modified_base 7: mod_base = OTHER; note = 2'-O-methylguanosine-3'-phosphate
  modified_base 8: mod_base = OTHER; note = 2'-O-methylguanosine-3'-phosphate
  modified_base 9: mod_base = OTHER; note = 2'-O-methyluridine-3'-phosphate
  modified_base 10: mod_base = OTHER; note = 2'-O-methyluridine-3'-phosphate
  modified_base 11: mod_base = OTHER; note = 2'-O-methylcytidine-3'-phosphate
  modified_base 12: mod_base = OTHER; note = 2'-O-methyluridine-3'-phosphate
  modified_base 13: mod_base = OTHER; note = 2'-O-methylguanosine-3'-phosphate
  modified_base 14: mod_base = OTHER; note = 2'-deoxy-2'-fluoroadenosine-3'-phosphate
  modified_base 15: mod_base = OTHER; note = 2'-O-methylguanosine-3'-phosphate
  modified_base 16: mod_base = OTHER; note = 2'-deoxy-2'-fluoroadenosine-3'-phosphate
  modified_base 17: mod_base = OTHER; note = 2'-O-methyluridine-3'-phosphate
  modified_base 18: mod_base = OTHER; note = 2'-O-methyluridine-3'-phosphate
  modified_base 19: mod_base = OTHER; note = 2'-O-methyluridine-3'-phosphate
  modified_base 20: mod_base = OTHER; note = 2'-O-methyluridine-3'-phosphate
  modified_base 21: mod_base = OTHER; note = 2'-O-methylguanosine-3'-phosphate
  modified_base 22: mod_base = OTHER; note = 2'-O-methyluridine-3'-phosphate
  modified_base 23: mod_base = OTHER; note = 2'-O-methylguanosine
tgatatggttctgagattttgtg

SEQ ID NO: 5066 - RNA, 23 nt, synthetic construct
  source 1..23: mol_type = other RNA
  modified_base 1: mod_base = OTHER; note = 2'-O-methyluridine-3'-phosphate 5'-(E)-Vinylphosphonate
  modified_base 2: mod_base = OTHER; note = 2'-deoxy-2'-fluoroadenosine-3'-phosphate
  modified_base 3: mod_base = OTHER; note = 2'-O-methylguanosine-3'-phosphate
  modified_base 4: mod_base = OTHER; note = 2'-O-methyladenosine-3'-phosphate
  modified_base 5: mod_base = OTHER; note = 2'-O-methyluridine-3'-phosphate
  modified_base 6: mod_base = OTHER; note = 2'-deoxy-2'-fluoroadenosine-3'-phosphate
  modified_base 7: mod_base = OTHER; note = 2'-O-methyluridine-3'-phosphate
  modified_base 8: mod_base = OTHER; note = 2'-O-methylguanosine-3'-phosphate
  modified_base 9: mod_base = OTHER; note = 2'-O-methylguanosine-3'-phosphate
  modified_base 10: mod_base = OTHER; note = 2'-O-methyluridine-3'-phosphate
  modified_base 11: mod_base = OTHER; note = 2'-O-methyluridine-3'-phosphate
  modified_base 12: mod_base = OTHER; note = 2'-O-methylcytidine-3'-phosphate
  modified_base 13: mod_base = OTHER; note = 2'-O-methyluridine-3'-phosphate
  modified_base 14: mod_base = OTHER; note = 2'-deoxy-2'-fluoroguanosine-3'-phosphate
  modified_base 15: mod_base = OTHER; note = 2'-O-methyladenosine-3'-phosphate
  modified_base 16: mod_base = OTHER; note = 2'-deoxy-2'-fluoroguanosine-3'-phosphate
  modified_base 17: mod_base = OTHER; note = 2'-O-methyladenosine-3'-phosphate
  modified_base 18: mod_base = OTHER; note = 2'-O-methyluridine-3'-phosphate
  modified_base 19: mod_base = OTHER; note = 2'-O-methyluridine-3'-phosphate
  modified_base 20: mod_base = OTHER; note = 2'-O-methyluridine-3'-phosphate
  modified_base 21: mod_base = OTHER; note = 2'-O-methyluridine-3'-phosphate
  modified_base 22: mod_base = OTHER; note = 2'-O-methylguanosine-3'-phosphate
  modified_base 23: mod_base = OTHER; note = 2'-O-methyluridine
tagatatggttctgagattttgt

SEQ ID NO: 5067 - RNA, 23 nt, synthetic construct
  source 1..23: mol_type = other RNA
  modified_base 1: mod_base = OTHER; note = 2'-O-methyluridine-3'-phosphate 5'-(E)-Vinylphosphonate
  modified_base 2: mod_base = OTHER; note = 2'-deoxy-2'-fluorocytidine-3'-phosphate
  modified_base 3: mod_base = OTHER; note = 2'-O-methyladenosine-3'-phosphate
  modified_base 4: mod_base = OTHER; note = 2'-O-methylguanosine-3'-phosphate
  modified_base 5: mod_base = OTHER; note = 2'-O-methyladenosine-3'-phosphate
  modified_base 6: mod_base = OTHER; note = 2'-deoxy-2'-fluorouridine-3'-phosphate
  modified_base 7: mod_base = OTHER; note = 2'-O-methyladenosine-3'-phosphate
  modified_base 8: mod_base = OTHER; note = 2'-O-methyluridine-3'-phosphate
  modified_base 9: mod_base = OTHER; note = 2'-O-methylguanosine-3'-phosphate
  modified_base 10: mod_base = OTHER; note = 2'-O-methylguanosine-3'-phosphate
  modified_base 11: mod_base = OTHER; note = 2'-O-methyluridine-3'-phosphate
  modified_base 12: mod_base = OTHER; note = 2'-O-methyluridine-3'-phosphate
  modified_base 13: mod_base = OTHER; note = 2'-O-methylcytidine-3'-phosphate
  modified_base 14: mod_base = OTHER; note = 2'-deoxy-2'-fluorouridine-3'-phosphate
  modified_base 15: mod_base = OTHER; note = 2'-O-methylguanosine-3'-phosphate
  modified_base 16: mod_base = OTHER; note = 2'-deoxy-2'-fluoroadenosine-3'-phosphate
  modified_base 17: mod_base = OTHER; note = 2'-O-methylguanosine-3'-phosphate
  modified_base 18: mod_base = OTHER; note = 2'-O-methyladenosine-3'-phosphate
  modified_base 19: mod_base = OTHER; note = 2'-O-methyluridine-3'-phosphate
  modified_base 20: mod_base = OTHER; note = 2'-O-methyluridine-3'-phosphate
  modified_base 21: mod_base = OTHER; note = 2'-O-methyluridine-3'-phosphate
  modified_base 22: mod_base = OTHER; note = 2'-O-methyluridine-3'-phosphate
  modified_base 23: mod_base = OTHER; note = 2'-O-methylguanosine
tcagatatggttctgagattttg

SEQ ID NO: 5068 - RNA, 23 nt, synthetic construct
  source 1..23: mol_type = other RNA
  modified_base 1: mod_base = OTHER; note = 2'-O-methyluridine-3'-phosphate 5'-(E)-Vinylphosphonate
  modified_base 2: mod_base = OTHER; note = 2'-deoxy-2'-fluoroadenosine-3'-phosphate
  modified_base 3: mod_base = OTHER; note = 2'-O-methylcytidine-3'-phosphate
  modified_base 4: mod_base = OTHER; note = 2'-O-methyladenosine-3'-phosphate
  modified_base 5: mod_base = OTHER; note = 2'-O-methylguanosine-3'-phosphate
  modified_base 6: mod_base = OTHER; note = 2'-deoxy-2'-fluoroadenosine-3'-phosphate
  modified_base 7: mod_base = OTHER; note = 2'-O-methyluridine-3'-phosphate
  modified_base 8: mod_base = OTHER; note = 2'-O-methyladenosine-3'-phosphate
  modified_base 9: mod_base = OTHER; note = 2'-O-methyluridine-3'-phosphate
  modified_base 10: mod_base = OTHER; note = 2'-O-methylguanosine-3'-phosphate
  modified_base 11: mod_base = OTHER; note = 2'-O-methylguanosine-3'-phosphate
  modified_base 12: mod_base = OTHER; note = 2'-O-methyluridine-3'-phosphate
  modified_base 13: mod_base = OTHER; note = 2'-O-methyluridine-3'-phosphate
  modified_base 14: mod_base = OTHER; note = 2'-deoxy-2'-fluorocytidine-3'-phosphate
  modified_base 15: mod_base = OTHER; note = 2'-O-methyluridine-3'-phosphate
  modified_base 16: mod_base = OTHER; note = 2'-deoxy-2'-fluoroguanosine-3'-phosphate
  modified_base 17: mod_base = OTHER; note = 2'-O-methyladenosine-3'-phosphate
  modified_base 18: mod_base = OTHER; note = 2'-O-methylguanosine-3'-phosphate
  modified_base 19: mod_base = OTHER; note = 2'-O-methyladenosine-3'-phosphate
  modified_base 20: mod_base = OTHER; note = 2'-O-methyluridine-3'-phosphate
  modified_base 21: mod_base = OTHER; note = 2'-O-methyluridine-3'-phosphate
  modified_base 22: mod_base = OTHER; note = 2'-O-methyluridine-3'-phosphate
  modified_base 23: mod_base = OTHER; note = 2'-O-methyluridine
tacagatatggttctgagatttt

SEQ ID NO: 5069 - RNA, 23 nt, synthetic construct
  source 1..23: mol_type = other RNA
  modified_base 1: mod_base = OTHER; note = 2'-O-methyluridine-3'-phosphate 5'-(E)-Vinylphosphonate
  modified_base 2: mod_base = OTHER; note = 2'-deoxy-2'-fluoroadenosine-3'-phosphate
  modified_base 3: mod_base = OTHER; note = 2'-O-methyladenosine-3'-phosphate
  modified_base 4: mod_base = OTHER; note = 2'-O-methylcytidine-3'-phosphate
  modified_base 5: mod_base = OTHER; note = 2'-O-methyladenosine-3'-phosphate
  modified_base 6: mod_base = OTHER; note = 2'-deoxy-2'-fluoroguanosine-3'-phosphate
  modified_base 7: mod_base = OTHER; note = 2'-O-methyladenosine-3'-phosphate
  modified_base 8: mod_base = OTHER; note = 2'-O-methyluridine-3'-phosphate
  modified_base 9: mod_base = OTHER; note = 2'-O-methyladenosine-3'-phosphate
  modified_base 10: mod_base = OTHER; note = 2'-O-methyluridine-3'-phosphate
  modified_base 11: mod_base = OTHER; note = 2'-O-methylguanosine-3'-phosphate
  modified_base 12: mod_base = OTHER; note = 2'-O-methylguanosine-3'-phosphate
  modified_base 13: mod_base = OTHER; note = 2'-O-methyluridine-3'-phosphate
  modified_base 14: mod_base = OTHER; note = 2'-deoxy-2'-fluorouridine-3'-phosphate
  modified_base 15: mod_base = OTHER; note = 2'-O-methylcytidine-3'-phosphate
  modified_base 16: mod_base = OTHER; note = 2'-deoxy-2'-fluorouridine-3'-phosphate
  modified_base 17: mod_base = OTHER; note = 2'-O-methylguanosine-3'-phosphate
  modified_base 18: mod_base = OTHER; note = 2'-O-methyladenosine-3'-phosphate
  modified_base 19: mod_base = OTHER; note = 2'-O-methylguanosine-3'-phosphate
  modified_base 20: mod_base = OTHER; note = 2'-O-methyladenosine-3'-phosphate
  modified_base 21: mod_base = OTHER; note = 2'-O-methyluridine-3'-phosphate
  modified_base 22: mod_base = OTHER; note = 2'-O-methyluridine-3'-phosphate
  modified_base 23: mod_base = OTHER; note = 2'-O-methyluridine
taacagatatggttctgagattt

SEQ ID NO: 5070 - RNA, 23 nt, synthetic construct
  source 1..23: mol_type = other RNA
  modified_base 1: mod_base = OTHER; note = 2'-O-methyluridine-3'-phosphate 5'-(E)-Vinylphosphonate
  modified_base 2: mod_base = OTHER; note = 2'-deoxy-2'-fluorocytidine-3'-phosphate
  modified_base 3: mod_base = OTHER; note = 2'-O-methyladenosine-3'-phosphate
  modified_base 4: mod_base = OTHER; note = 2'-O-methyladenosine-3'-phosphate
  modified_base 5: mod_base = OTHER; note = 2'-O-methylcytidine-3'-phosphate
  modified_base 6: mod_base = OTHER; note = 2'-deoxy-2'-fluoroadenosine-3'-phosphate
  modified_base 7: mod_base = OTHER; note = 2'-O-methylguanosine-3'-phosphate
  modified_base 8: mod_base = OTHER; note = 2'-O-methyladenosine-3'-phosphate
  modified_base 9: mod_base = OTHER; note = 2'-O-methyluridine-3'-phosphate
  modified_base 10: mod_base = OTHER; note = 2'-O-methyladenosine-3'-phosphate
  modified_base 11: mod_base = OTHER; note = 2'-O-methyluridine-3'-phosphate
  modified_base 12: mod_base = OTHER; note = 2'-O-methylguanosine-3'-phosphate
  modified_base 13: mod_base = OTHER; note = 2'-O-methylguanosine-3'-phosphate
  modified_base 14: mod_base = OTHER; note = 2'-deoxy-2'-fluorouridine-3'-phosphate
  modified_base 15: mod_base = OTHER; note = 2'-O-methyluridine-3'-phosphate
  modified_base 16: mod_base = OTHER; note = 2'-deoxy-2'-fluorocytidine-3'-phosphate
  modified_base 17: mod_base = OTHER; note = 2'-O-methyluridine-3'-phosphate
  modified_base 18: mod_base = OTHER; note = 2'-O-methylguanosine-3'-phosphate
  modified_base 19: mod_base = OTHER; note = 2'-O-methyladenosine-3'-phosphate
  modified_base 20: mod_base = OTHER; note = 2'-O-methylguanosine-3'-phosphate
  modified_base 21: mod_base = OTHER; note = 2'-O-methyladenosine-3'-phosphate
  modified_base 22: mod_base = OTHER; note = 2'-O-methyluridine-3'-phosphate
  modified_base 23: mod_base = OTHER; note = 2'-O-methyluridine
tcaacagatatggttctgagatt

SEQ ID NO: 5071 - RNA, 23 nt, synthetic construct
  source 1..23: mol_type = other RNA
  modified_base 1: mod_base = OTHER; note = 2'-O-methyluridine-3'-phosphate 5'-(E)-Vinylphosphonate
  modified_base 2: mod_base = OTHER; note = 2'-deoxy-2'-fluorouridine-3'-phosphate
  modified_base 3: mod_base = OTHER; note = 2'-O-methylcytidine-3'-phosphate
  modified_base 4: mod_base = OTHER; note = 2'-O-methyladenosine-3'-phosphate
  modified_base 5: mod_base = OTHER; note = 2'-O-methyladenosine-3'-phosphate
  modified_base 6: mod_base = OTHER; note = 2'-deoxy-2'-fluorocytidine-3'-phosphate
  modified_base 7: mod_base = OTHER; note = 2'-O-methyladenosine-3'-phosphate
  modified_base 8: mod_base = OTHER; note = 2'-O-methylguanosine-3'-phosphate
  modified_base 9: mod_base = OTHER; note = 2'-O-methyladenosine-3'-phosphate
  modified_base 10: mod_base = OTHER; note = 2'-O-methyluridine-3'-phosphate
  modified_base 11: mod_base = OTHER; note = 2'-O-methyladenosine-3'-phosphate
  modified_base 12: mod_base = OTHER; note = 2'-O-methyluridine-3'-phosphate
  modified_base 13: mod_base = OTHER; note = 2'-O-methylguanosine-3'-phosphate
  modified_base 14: mod_base = OTHER; note = 2'-deoxy-2'-fluoroguanosine-3'-phosphate
  modified_base 15: mod_base = OTHER; note = 2'-O-methyluridine-3'-phosphate
  modified_base 16: mod_base = OTHER; note = 2'-deoxy-2'-fluorouridine-3'-phosphate
  modified_base 17: mod_base = OTHER; note = 2'-O-methylcytidine-3'-phosphate
  modified_base 18: mod_base = OTHER; note = 2'-O-methyluridine-3'-phosphate
  modified_base 19: mod_base = OTHER; note = 2'-O-methylguanosine-3'-phosphate
  modified_base 20: mod_base = OTHER; note = 2'-O-methyladenosine-3'-phosphate
  modified_base 21: mod_base = OTHER; note = 2'-O-methylguanosine-3'-phosphate
  modified_base 22: mod_base = OTHER; note = 2'-O-methyladenosine-3'-phosphate
  modified_base 23: mod_base = OTHER; note = 2'-O-methyluridine
ttcaacagatatggttctgagat

SEQ ID NO: 5072 - RNA, 23 nt, synthetic construct
  source 1..23: mol_type = other RNA
  modified_base 1: mod_base = OTHER; note = 2'-O-methyluridine-3'-phosphate 5'-(E)-Vinylphosphonate
  modified_base 2: mod_base = OTHER; note = 2'-deoxy-2'-fluoroguanosine-3'-phosphate
  modified_base 3: mod_base = OTHER; note = 2'-O-methyluridine-3'-phosphate
  modified_base 4: mod_base = OTHER; note = 2'-O-methylcytidine-3'-phosphate
  modified_base 5: mod_base = OTHER; note = 2'-O-methyladenosine-3'-phosphate
  modified_base 6: mod_base = OTHER; note = 2'-deoxy-2'-fluoroadenosine-3'-phosphate
  modified_base 7: mod_base = OTHER; note = 2'-O-methylcytidine-3'-phosphate
  modified_base 8: mod_base = OTHER; note = 2'-O-methyladenosine-3'-phosphate
  modified_base 9: mod_base = OTHER; note = 2'-O-methylguanosine-3'-phosphate
  modified_base 10: mod_base = OTHER; note = 2'-O-methyladenosine-3'-phosphate
  modified_base 11: mod_base = OTHER; note = 2'-O-methyluridine-3'-phosphate
  modified_base 12: mod_base = OTHER; note = 2'-O-methyladenosine-3'-phosphate
  modified_base 13: mod_base = OTHER; note = 2'-O-methyluridine-3'-phosphate
  modified_base 14: mod_base = OTHER; note = 2'-deoxy-2'-fluoroguanosine-3'-phosphate
  modified_base 15: mod_base = OTHER; note = 2'-O-methylguanosine-3'-phosphate
  modified_base 16: mod_base = OTHER; note = 2'-deoxy-2'-fluorouridine-3'-phosphate
  modified_base 17: mod_base = OTHER; note = 2'-O-methyluridine-3'-phosphate
  modified_base 18: mod_base = OTHER; note = 2'-O-methylcytidine-3'-phosphate
  modified_base 19: mod_base = OTHER; note = 2'-O-methyluridine-3'-phosphate
  modified_base 20: mod_base = OTHER; note = 2'-O-methylguanosine-3'-phosphate
  modified_base 21: mod_base = OTHER; note = 2'-O-methyladenosine-3'-phosphate
  modified_base 22: mod_base = OTHER; note = 2'-O-methylguanosine-3'-phosphate
  modified_base 23: mod_base = OTHER; note = 2'-O-methyladenosine
tgtcaacagatatggttctgaga

SEQ ID NO: 5073 - RNA, 23 nt, synthetic construct
  source 1..23: mol_type = other RNA
  modified_base 1: mod_base = OTHER; note = 2'-O-methyluridine-3'-phosphate 5'-(E)-Vinylphosphonate
  modified_base 2: mod_base = OTHER; note = 2'-deoxy-2'-fluorouridine-3'-phosphate
  modified_base 3: mod_base = OTHER; note = 2'-O-methylguanosine-3'-phosphate
  modified_base 4: mod_base = OTHER; note = 2'-O-methyluridine-3'-phosphate
  modified_base 5: mod_base = OTHER; note = 2'-O-methylcytidine-3'-phosphate
  modified_base 6: mod_base = OTHER; note = 2'-deoxy-2'-fluoroadenosine-3'-phosphate
  modified_base 7: mod_base = OTHER; note = 2'-O-methyladenosine-3'-phosphate
  modified_base 8: mod_base = OTHER; note = 2'-O-methylcytidine-3'-phosphate
  modified_base 9: mod_base = OTHER; note = 2'-O-methyladenosine-3'-phosphate
  modified_base 10: mod_base = OTHER; note = 2'-O-methylguanosine-3'-phosphate
  modified_base 11: mod_base = OTHER; note = 2'-O-methyladenosine-3'-phosphate
  modified_base 12: mod_base = OTHER; note = 2'-O-methyluridine-3'-phosphate
  modified_base 13: mod_base = OTHER; note = 2'-O-methyladenosine-3'-phosphate
  modified_base 14: mod_base = OTHER; note = 2'-deoxy-2'-fluorouridine-3'-phosphate
  modified_base 15: mod_base = OTHER; note = 2'-O-methylguanosine-3'-phosphate
  modified_base 16: mod_base = OTHER; note = 2'-deoxy-2'-fluoroguanosine-3'-phosphate
  modified_base 17: mod_base = OTHER; note = 2'-O-methyluridine-3'-phosphate
  modified_base 18: mod_base = OTHER; note = 2'-O-methyluridine-3'-phosphate
  modified_base 19: mod_base = OTHER; note = 2'-O-methylcytidine-3'-phosphate
  modified_base 20: mod_base = OTHER; note = 2'-O-methyluridine-3'-phosphate
  modified_base 21: mod_base = OTHER; note = 2'-O-methylguanosine-3'-phosphate
  modified_base 22: mod_base = OTHER; note = 2'-O-methyladenosine-3'-phosphate
  modified_base 23: mod_base = OTHER; note = 2'-O-methylguanosine
ttgtcaacagatatggttctgag

SEQ ID NO: 5074 - RNA, 23 nt, synthetic construct
  source 1..23: mol_type = other RNA
  modified_base 1: mod_base = OTHER; note = 2'-O-methyluridine-3'-phosphate 5'-(E)-Vinylphosphonate
  modified_base 2: mod_base = OTHER; note = 2'-deoxy-2'-fluoroadenosine-3'-phosphate
  modified_base 3: mod_base = OTHER; note = 2'-O-methyluridine-3'-phosphate
  modified_base 4: mod_base = OTHER; note = 2'-O-methylguanosine-3'-phosphate
  modified_base 5: mod_base = OTHER; note = 2'-O-methyluridine-3'-phosphate
  modified_base 6: mod_base = OTHER; note = 2'-deoxy-2'-fluorocytidine-3'-phosphate
  modified_base 7: mod_base = OTHER; note = 2'-O-methyladenosine-3'-phosphate
  modified_base 8: mod_base = OTHER; note = 2'-O-methyladenosine-3'-phosphate
  modified_base 9: mod_base = OTHER; note = 2'-O-methylcytidine-3'-phosphate
  modified_base 10: mod_base = OTHER; note = 2'-O-methyladenosine-3'-phosphate
  modified_base 11: mod_base = OTHER; note = 2'-O-methylguanosine-3'-phosphate
  modified_base 12: mod_base = OTHER; note = 2'-O-methyladenosine-3'-phosphate
  modified_base 13: mod_base = OTHER; note = 2'-O-methyluridine-3'-phosphate
  modified_base 14: mod_base = OTHER; note = 2'-deoxy-2'-fluoroadenosine-3'-phosphate
  modified_base 15: mod_base = OTHER; note = 2'-O-methyluridine-3'-phosphate
  modified_base 16: mod_base = OTHER; note = 2'-deoxy-2'-fluoroguanosine-3'-phosphate
  modified_base 17: mod_base = OTHER; note = 2'-O-methylguanosine-3'-phosphate
  modified_base 18: mod_base = OTHER; note = 2'-O-methyluridine-3'-phosphate
  modified_base 19: mod_base = OTHER; note = 2'-O-methyluridine-3'-phosphate
  modified_base 20: mod_base = OTHER; note = 2'-O-methylcytidine-3'-phosphate
  modified_base 21: mod_base = OTHER; note = 2'-O-methyluridine-3'-phosphate
  modified_base 22: mod_base = OTHER; note = 2'-O-methylguanosine-3'-phosphate
  modified_base 23: mod_base = OTHER; note = 2'-O-methyladenosine
tatgtcaacagatatggttctga

SEQ ID NO: 5075 - RNA, 23 nt, synthetic construct
  source 1..23: mol_type = other RNA
  modified_base 1: mod_base = OTHER; note = 2'-O-methyluridine-3'-phosphate 5'-(E)-Vinylphosphonate
  modified_base 2: mod_base = OTHER; note = 2'-deoxy-2'-fluoroadenosine-3'-phosphate
  modified_base 3: mod_base = OTHER; note = 2'-O-methyladenosine-3'-phosphate
  modified_base 4: mod_base = OTHER; note = 2'-O-methyluridine-3'-phosphate
  modified_base 5: mod_base = OTHER; note = 2'-O-methylguanosine-3'-phosphate
  modified_base 6: mod_base = OTHER; note = 2'-deoxy-2'-fluorouridine-3'-phosphate
  modified_base 7: mod_base = OTHER; note = 2'-O-methylcytidine-3'-phosphate
  modified_base 8: mod_base = OTHER; note = 2'-O-methyladenosine-3'-phosphate
  modified_base 9: mod_base = OTHER; note = 2'-O-methyladenosine-3'-phosphate
  modified_base 10: mod_base = OTHER; note = 2'-O-methylcytidine-3'-phosphate
  modified_base 11: mod_base = OTHER; note = 2'-O-methyladenosine-3'-phosphate
  modified_base 12: mod_base = OTHER; note = 2'-O-methylguanosine-3'-phosphate
  modified_base 13: mod_base = OTHER; note = 2'-O-methyladenosine-3'-phosphate
  modified_base 14: mod_base = OTHER; note = 2'-deoxy-2'-fluorouridine-3'-phosphate
  modified_base 15: mod_base = OTHER; note = 2'-O-methyladenosine-3'-phosphate
  modified_base 16: mod_base = OTHER; note = 2'-deoxy-2'-fluorouridine-3'-phosphate
  modified_base 17: mod_base = OTHER; note = 2'-O-methylguanosine-3'-phosphate
  modified_base 18: mod_base = OTHER; note = 2'-O-methylguanosine-3'-phosphate
  modified_base 19: mod_base = OTHER; note = 2'-O-methyluridine-3'-phosphate
  modified_base 20: mod_base = OTHER; note = 2'-O-methyluridine-3'-phosphate
  modified_base 21: mod_base = OTHER; note = 2'-O-methylcytidine-3'-phosphate
  modified_base 22: mod_base = OTHER; note = 2'-O-methyluridine-3'-phosphate
  modified_base 23: mod_base = OTHER; note = 2'-O-methylguanosine
taatgtcaacagatatggttctg

SEQ ID NO: 5076 - RNA, 23 nt, synthetic construct
  source 1..23: mol_type = other RNA
  modified_base 1: mod_base = OTHER; note = 2'-O-methyluridine-3'-phosphate 5'-(E)-Vinylphosphonate
  modified_base 2: mod_base = OTHER; note = 2'-deoxy-2'-fluoroadenosine-3'-phosphate
  modified_base 3: mod_base = OTHER; note = 2'-O-methyladenosine-3'-phosphate
  modified_base 4: mod_base = OTHER; note = 2'-O-methyladenosine-3'-phosphate
  modified_base 5: mod_base = OTHER; note = 2'-O-methyluridine-3'-phosphate
  modified_base 6: mod_base = OTHER; note = 2'-deoxy-2'-fluoroguanosine-3'-phosphate
  modified_base 7: mod_base = OTHER; note = 2'-O-methyluridine-3'-phosphate
  modified_base 8: mod_base = OTHER; note = 2'-O-methylcytidine-3'-phosphate
  modified_base 9: mod_base = OTHER; note = 2'-O-methyladenosine-3'-phosphate
  modified_base 10: mod_base = OTHER; note = 2'-O-methyladenosine-3'-phosphate
  modified_base 11: mod_base = OTHER; note = 2'-O-methylcytidine-3'-phosphate
  modified_base 12: mod_base = OTHER; note = 2'-O-methyladenosine-3'-phosphate
  modified_base 13: mod_base = OTHER; note = 2'-O-methylguanosine-3'-phosphate
  modified_base 14: mod_base = OTHER; note = 2'-deoxy-2'-fluoroadenosine-3'-phosphate
  modified_base 15: mod_base = OTHER; note = 2'-O-methyluridine-3'-phosphate
  modified_base 16: mod_base = OTHER; note = 2'-deoxy-2'-fluoroadenosine-3'-phosphate
  modified_base 17: mod_base = OTHER; note = 2'-O-methyluridine-3'-phosphate
  modified_base 18: mod_base = OTHER; note = 2'-O-methylguanosine-3'-phosphate
  modified_base 19: mod_base = OTHER; note = 2'-O-methylguanosine-3'-phosphate
  modified_base 20: mod_base = OTHER; note = 2'-O-methyluridine-3'-phosphate
  modified_base 21: mod_base = OTHER; note = 2'-O-methyluridine-3'-phosphate
  modified_base 22: mod_base = OTHER; note = 2'-O-methylcytidine-3'-phosphate
  modified_base 23: mod_base = OTHER; note = 2'-O-methyluridine
taaatgtcaacagatatggttct

SEQ ID NO: 5077 - RNA, 23 nt, synthetic construct
  source 1..23: mol_type = other RNA
  modified_base 1: mod_base = OTHER; note = 2'-O-methyluridine-3'-phosphate 5'-(E)-Vinylphosphonate
  modified_base 2: mod_base = OTHER; note = 2'-deoxy-2'-fluoroadenosine-3'-phosphate
  modified_base 3: mod_base = OTHER; note = 2'-O-methyladenosine-3'-phosphate
  modified_base 4: mod_base = OTHER; note = 2'-O-methyladenosine-3'-phosphate
  modified_base 5: mod_base = OTHER; note = 2'-O-methyladenosine-3'-phosphate
  modified_base 6: mod_base = OTHER; note = 2'-deoxy-2'-fluorouridine-3'-phosphate
  modified_base 7: mod_base = OTHER; note = 2'-O-methylguanosine-3'-phosphate
  modified_base 8: mod_base = OTHER; note = 2'-O-methyluridine-3'-phosphate
  modified_base 9: mod_base = OTHER; note = 2'-O-methylcytidine-3'-phosphate
  modified_base 10: mod_base = OTHER; note = 2'-O-methyladenosine-3'-phosphate
  modified_base 11: mod_base = OTHER; note = 2'-O-methyladenosine-3'-phosphate
  modified_base 12: mod_base = OTHER; note = 2'-O-methylcytidine-3'-phosphate
  modified_base 13: mod_base = OTHER; note = 2'-O-methyladenosine-3'-phosphate
  modified_base 14: mod_base = OTHER; note = 2'-deoxy-2'-fluoroguanosine-3'-phosphate
  modified_base 15: mod_base = OTHER; note = 2'-O-methyladenosine-3'-phosphate
  modified_base 16: mod_base = OTHER; note = 2'-deoxy-2'-fluorouridine-3'-phosphate
  modified_base 17: mod_base = OTHER; note = 2'-O-methyladenosine-3'-phosphate
  modified_base 18: mod_base = OTHER; note = 2'-O-methyluridine-3'-phosphate
  modified_base 19: mod_base = OTHER; note = 2'-O-methylguanosine-3'-phosphate
  modified_base 20: mod_base = OTHER; note = 2'-O-methylguanosine-3'-phosphate
  modified_base 21: mod_base = OTHER; note = 2'-O-methyluridine-3'-phosphate
  modified_base 22: mod_base = OTHER; note = 2'-O-methyluridine-3'-phosphate
  modified_base 23: mod_base = OTHER; note = 2'-O-methylcytidine
taaaatgtcaacagatatggttc

SEQ ID NO: 5078 - RNA, 23 nt, synthetic construct
  source 1..23: mol_type = other RNA
  modified_base 1: mod_base = OTHER; note = 2'-O-methyluridine-3'-phosphate 5'-(E)-Vinylphosphonate
  modified_base 2: mod_base = OTHER; note = 2'-deoxy-2'-fluoroadenosine-3'-phosphate
  modified_base 3: mod_base = OTHER; note = 2'-O-methyladenosine-3'-phosphate
  modified_base 4: mod_base = OTHER; note = 2'-O-methyladenosine-3'-phosphate
  modified_base 5: mod_base = OTHER; note = 2'-O-methyladenosine-3'-phosphate
  modified_base 6: mod_base = OTHER; note = 2'-deoxy-2'-fluoroadenosine-3'-phosphate
  modified_base 7: mod_base = OTHER; note = 2'-O-methyluridine-3'-phosphate
  modified_base 8: mod_base = OTHER; note = 2'-O-methylguanosine-3'-phosphate
  modified_base 9: mod_base = OTHER; note = 2'-O-methyluridine-3'-phosphate
  modified_base 10: mod_base = OTHER; note = 2'-O-methylcytidine-3'-phosphate
  modified_base 11: mod_base = OTHER; note = 2'-O-methyladenosine-3'-phosphate
  modified_base 12: mod_base = OTHER; note = 2'-O-methyladenosine-3'-phosphate
  modified_base 13: mod_base = OTHER; note = 2'-O-methylcytidine-3'-phosphate
  modified_base 14: mod_base = OTHER; note = 2'-deoxy-2'-fluoroadenosine-3'-phosphate
  modified_base 15: mod_base = OTHER; note = 2'-O-methylguanosine-3'-phosphate
  modified_base 16: mod_base = OTHER; note = 2'-deoxy-2'-fluoroadenosine-3'-phosphate
  modified_base 17: mod_base = OTHER; note = 2'-O-methyluridine-3'-phosphate
  modified_base 18: mod_base = OTHER; note = 2'-O-methyladenosine-3'-phosphate
  modified_base 19: mod_base = OTHER; note = 2'-O-methyluridine-3'-phosphate
  modified_base 20: mod_base = OTHER; note = 2'-O-methylguanosine-3'-phosphate
  modified_base 21: mod_base = OTHER; note = 2'-O-methylguanosine-3'-phosphate
  modified_base 22: mod_base = OTHER; note = 2'-O-methyluridine-3'-phosphate
  modified_base 23: mod_base = OTHER; note = 2'-O-methyluridine
taaaaatgtcaacagatatggtt

SEQ ID NO: 5079 - RNA, 23 nt, synthetic construct
  source 1..23: mol_type = other RNA
  modified_base 1: mod_base = OTHER; note = 2'-O-methyluridine-3'-phosphate 5'-(E)-Vinylphosphonate
  modified_base 2: mod_base = OTHER; note = 2'-deoxy-2'-fluoroadenosine-3'-phosphate
  modified_base 3: mod_base = OTHER; note = 2'-O-methyladenosine-3'-phosphate
  modified_base 4: mod_base = OTHER; note = 2'-O-methyladenosine-3'-phosphate
  modified_base 5: mod_base = OTHER; note = 2'-O-methyladenosine-3'-phosphate
  modified_base 6: mod_base = OTHER; note = 2'-deoxy-2'-fluoroadenosine-3'-phosphate
  modified_base 7: mod_base = OTHER; note = 2'-O-methyladenosine-3'-phosphate
  modified_base 8: mod_base = OTHER; note = 2'-O-methyluridine-3'-phosphate
  modified_base 9: mod_base = OTHER; note = 2'-O-methylguanosine-3'-phosphate
  modified_base 10: mod_base = OTHER; note = 2'-O-methyluridine-3'-phosphate
  modified_base 11: mod_base = OTHER; note = 2'-O-methylcytidine-3'-phosphate
  modified_base 12: mod_base = OTHER; note = 2'-O-methyladenosine-3'-phosphate
  modified_base 13: mod_base = OTHER; note = 2'-O-methyladenosine-3'-phosphate
  modified_base 14: mod_base = OTHER; note = 2'-deoxy-2'-fluorocytidine-3'-phosphate
  modified_base 15: mod_base = OTHER; note = 2'-O-methyladenosine-3'-phosphate
  modified_base 16: mod_base = OTHER; note = 2'-deoxy-2'-fluoroguanosine-3'-phosphate
  modified_base 17: mod_base = OTHER; note = 2'-O-methyladenosine-3'-phosphate
  modified_base 18: mod_base = OTHER; note = 2'-O-methyluridine-3'-phosphate
  modified_base 19: mod_base = OTHER; note = 2'-O-methyladenosine-3'-phosphate
  modified_base 20: mod_base = OTHER; note = 2'-O-methyluridine-3'-phosphate
  modified_base 21: mod_base = OTHER; note = 2'-O-methylguanosine-3'-phosphate
  modified_base 22: mod_base = OTHER; note = 2'-O-methylguanosine-3'-phosphate
  modified_base 23: mod_base = OTHER; note = 2'-O-methyluridine
taaaaaatgtcaacagatatggt

SEQ ID NO: 5080 - RNA, 23 nt, synthetic construct
  source 1..23: mol_type = other RNA
  modified_base 1: mod_base = OTHER; note = 2'-O-methyluridine-3'-phosphate 5'-(E)-Vinylphosphonate
  modified_base 2: mod_base = OTHER; note = 2'-deoxy-2'-fluoroguanosine-3'-phosphate
  modified_base 3: mod_base = OTHER; note = 2'-O-methyladenosine-3'-phosphate
  modified_base 4: mod_base = OTHER; note = 2'-O-methyladenosine-3'-phosphate
  modified_base 5: mod_base = OTHER; note = 2'-O-methyladenosine-3'-phosphate
  modified_base 6: mod_base = OTHER; note = 2'-deoxy-2'-fluoroadenosine-3'-phosphate
  modified_base 7: mod_base = OTHER; note = 2'-O-methyladenosine-3'-phosphate
  modified_base 8: mod_base = OTHER; note = 2'-O-methyladenosine-3'-phosphate
  modified_base 9: mod_base = OTHER; note = 2'-O-methyluridine-3'-phosphate
  modified_base 10: mod_base = OTHER; note = 2'-O-methylguanosine-3'-phosphate
  modified_base 11: mod_base = OTHER; note = 2'-O-methyluridine-3'-phosphate
  modified_base 12: mod_base = OTHER; note = 2'-O-methylcytidine-3'-phosphate
  modified_base 13: mod_base = OTHER; note = 2'-O-methyladenosine-3'-phosphate
  modified_base 14: mod_base = OTHER; note = 2'-deoxy-2'-fluoroadenosine-3'-phosphate
  modified_base 15: mod_base = OTHER; note = 2'-O-methylcytidine-3'-phosphate
  modified_base 16: mod_base = OTHER; note = 2'-deoxy-2'-fluoroadenosine-3'-phosphate
  modified_base 17: mod_base = OTHER; note = 2'-O-methylguanosine-3'-phosphate
  modified_base 18: mod_base = OTHER; note = 2'-O-methyladenosine-3'-phosphate
  modified_base 19: mod_base = OTHER; note = 2'-O-methyluridine-3'-phosphate
  modified_base 20: mod_base = OTHER; note = 2'-O-methyladenosine-3'-phosphate
  modified_base 21: mod_base = OTHER; note = 2'-O-methyluridine-3'-phosphate
  modified_base 22: mod_base = OTHER; note = 2'-O-methylguanosine-3'-phosphate
  modified_base 23: mod_base = OTHER; note = 2'-O-methylguanosine
tgaaaaaatgtcaacagatatgg

SEQ ID NO: 5081 - RNA, 23 nt, synthetic construct
  source 1..23: mol_type = other RNA
  modified_base 1: mod_base = OTHER; note = 2'-O-methyluridine-3'-phosphate 5'-(E)-Vinylphosphonate
  modified_base 2: mod_base = OTHER; note = 2'-deoxy-2'-fluoroadenosine-3'-phosphate
  modified_base 3: mod_base = OTHER; note = 2'-O-methylguanosine-3'-phosphate
  modified_base 4: mod_base = OTHER; note = 2'-O-methyladenosine-3'-phosphate
  modified_base 5: mod_base = OTHER; note = 2'-O-methyladenosine-3'-phosphate
  modified_base 6: mod_base = OTHER; note = 2'-deoxy-2'-fluoroadenosine-3'-phosphate
  modified_base 7: mod_base = OTHER; note = 2'-O-methyladenosine-3'-phosphate
  modified_base 8: mod_base = OTHER; note = 2'-O-methyladenosine-3'-phosphate
  modified_base 9: mod_base = OTHER; note = 2'-O-methyladenosine-3'-phosphate
  modified_base 10: mod_base = OTHER; note = 2'-O-methyluridine-3'-phosphate
  modified_base 11: mod_base = OTHER; note = 2'-O-methylguanosine-3'-phosphate
  modified_base 12: mod_base = OTHER; note = 2'-O-methyluridine-3'-phosphate
  modified_base 13: mod_base = OTHER; note = 2'-O-methylcytidine-3'-phosphate
  modified_base 14: mod_base = OTHER; note = 2'-deoxy-2'-fluoroadenosine-3'-phosphate
  modified_base 15: mod_base = OTHER; note = 2'-O-methyladenosine-3'-phosphate
  modified_base 16: mod_base = OTHER; note = 2'-deoxy-2'-fluorocytidine-3'-phosphate
  modified_base 17: mod_base = OTHER; note = 2'-O-methyladenosine-3'-phosphate
  modified_base 18: mod_base = OTHER; note = 2'-O-methylguanosine-3'-phosphate
  modified_base 19: mod_base = OTHER; note = 2'-O-methyladenosine-3'-phosphate
  modified_base 20: mod_base = OTHER; note = 2'-O-methyluridine-3'-phosphate
  modified_base 21: mod_base = OTHER; note = 2'-O-methyladenosine-3'-phosphate
  modified_base 22: mod_base = OTHER; note = 2'-O-methyluridine-3'-phosphate
  modified_base 23: mod_base = OTHER; note = 2'-O-methylguanosine
tagaaaaaatgtcaacagatatg

SEQ ID NO: 5082 - RNA, 23 nt, synthetic construct
  source 1..23: mol_type = other RNA
  modified_base 1: mod_base = OTHER; note = 2'-O-methyluridine-3'-phosphate 5'-(E)-Vinylphosphonate
  modified_base 2: mod_base = OTHER; note = 2'-deoxy-2'-fluoroguanosine-3'-phosphate
  modified_base 3: mod_base = OTHER; note = 2'-O-methyladenosine-3'-phosphate
  modified_base 4: mod_base = OTHER; note = 2'-O-methylguanosine-3'-phosphate
  modified_base 5: mod_base = OTHER; note = 2'-O-methyladenosine-3'-phosphate
  modified_base 6: mod_base = OTHER; note = 2'-deoxy-2'-fluoroadenosine-3'-phosphate
  modified_base 7: mod_base = OTHER; note = 2'-O-methyladenosine-3'-phosphate
  modified_base 8: mod_base = OTHER; note = 2'-O-methyladenosine-3'-phosphate
  modified_base 9: mod_base = OTHER; note = 2'-O-methyladenosine-3'-phosphate
  modified_base 10: mod_base = OTHER; note = 2'-O-methyladenosine-3'-phosphate
  modified_base 11: mod_base = OTHER; note = 2'-O-methyluridine-3'-phosphate
  modified_base 12: mod_base = OTHER; note = 2'-O-methylguanosine-3'-phosphate
  modified_base 13: mod_base = OTHER; note = 2'-O-methyluridine-3'-phosphate
  modified_base 14: mod_base = OTHER; note = 2'-deoxy-2'-fluorocytidine-3'-phosphate
  modified_base 15: mod_base = OTHER; note = 2'-O-methyladenosine-3'-phosphate
  modified_base 16: mod_base = OTHER; note = 2'-deoxy-2'-fluoroadenosine-3'-phosphate
  modified_base 17: mod_base = OTHER; note = 2'-O-methylcytidine-3'-phosphate
  modified_base 18: mod_base = OTHER; note = 2'-O-methyladenosine-3'-phosphate
  modified_base 19: mod_base = OTHER; note = 2'-O-methylguanosine-3'-phosphate
  modified_base 20: mod_base = OTHER; note = 2'-O-methyladenosine-3'-phosphate
  modified_base 21: mod_base = OTHER; note = 2'-O-methyluridine-3'-phosphate
  modified_base 22: mod_base = OTHER; note = 2'-O-methyladenosine-3'-phosphate
  modified_base 23: mod_base = OTHER; note = 2'-O-methyluridine
tgagaaaaaatgtcaacagatat

SEQ ID NO: 5083 - RNA, 23 nt, synthetic construct
  source 1..23: mol_type = other RNA
  modified_base 1: mod_base = OTHER; note = 2'-O-methyluridine-3'-phosphate 5'-(E)-Vinylphosphonate
  modified_base 2: mod_base = OTHER; note = 2'-deoxy-2'-fluorouridine-3'-phosphate
  modified_base 3: mod_base = OTHER; note = 2'-O-methylguanosine-3'-phosphate
  modified_base 4: mod_base = OTHER; note = 2'-O-methyladenosine-3'-phosphate
  modified_base 5: mod_base = OTHER; note = 2'-O-methylguanosine-3'-phosphate
  modified_base 6: mod_base = OTHER; note = 2'-deoxy-2'-fluoroadenosine-3'-phosphate
  modified_base 7: mod_base = OTHER; note = 2'-O-methyladenosine-3'-phosphate
  modified_base 8: mod_base = OTHER; note = 2'-O-methyladenosine-3'-phosphate
  modified_base 9: mod_base = OTHER; note = 2'-O-methyladenosine-3'-phosphate
  modified_base 10: mod_base = OTHER; note = 2'-O-methyladenosine-3'-phosphate
  modified_base 11: mod_base = OTHER; note = 2'-O-methyladenosine-3'-phosphate
  modified_base 12: mod_base = OTHER; note = 2'-O-methyluridine-3'-phosphate
  modified_base 13: mod_base = OTHER; note = 2'-O-methylguanosine-3'-phosphate
  modified_base 14: mod_base = OTHER; note = 2'-deoxy-2'-fluorouridine-3'-phosphate
  modified_base 15: mod_base = OTHER; note = 2'-O-methylcytidine-3'-phosphate
  modified_base 16: mod_base = OTHER; note = 2'-deoxy-2'-fluoroadenosine-3'-phosphate
  modified_base 17: mod_base = OTHER; note = 2'-O-methyladenosine-3'-phosphate
  modified_base 18: mod_base = OTHER; note = 2'-O-methylcytidine-3'-phosphate
  modified_base 19: mod_base = OTHER; note = 2'-O-methyladenosine-3'-phosphate
  modified_base 20: mod_base = OTHER; note = 2'-O-methylguanosine-3'-phosphate
  modified_base 21: mod_base = OTHER; note = 2'-O-methyladenosine-3'-phosphate
  modified_base 22: mod_base = OTHER; note = 2'-O-methyluridine-3'-phosphate
  modified_base 23: mod_base = OTHER; note = 2'-O-methyladenosine
ttgagaaaaaatgtcaacagata

SEQ ID NO: 5084 - RNA, 23 nt, synthetic construct
  source 1..23: mol_type = other RNA
  modified_base 1: mod_base = OTHER; note = 2'-O-methyluridine-3'-phosphate 5'-(E)-Vinylphosphonate
  modified_base 2: mod_base = OTHER; note = 2'-deoxy-2'-fluoroadenosine-3'-phosphate
  modified_base 3: mod_base = OTHER; note = 2'-O-methyluridine-3'-phosphate
  modified_base 4: mod_base = OTHER; note = 2'-O-methylguanosine-3'-phosphate
  modified_base 5: mod_base = OTHER; note = 2'-O-methyladenosine-3'-phosphate
  modified_base 6: mod_base = OTHER; note = 2'-deoxy-2'-fluoroguanosine-3'-phosphate
  modified_base 7: mod_base = OTHER; note = 2'-O-methyladenosine-3'-phosphate
  modified_base 8: mod_base = OTHER; note = 2'-O-methyladenosine-3'-phosphate
  modified_base 9: mod_base = OTHER; note = 2'-O-methyladenosine-3'-phosphate
  modified_base 10: mod_base = OTHER; note = 2'-O-methyladenosine-3'-phosphate
  modified_base 11: mod_base = OTHER; note = 2'-O-methyladenosine-3'-phosphate
  modified_base 12: mod_base = OTHER; note = 2'-O-methyladenosine-3'-phosphate
  modified_base 13: mod_base = OTHER; note = 2'-O-methyluridine-3'-phosphate
  modified_base 14: mod_base = OTHER; note = 2'-deoxy-2'-fluoroguanosine-3'-phosphate
  modified_base 15: mod_base = OTHER; note = 2'-O-methyluridine-3'-phosphate
  modified_base 16: mod_base = OTHER; note = 2'-deoxy-2'-fluorocytidine-3'-phosphate
  modified_base 17: mod_base = OTHER; note = 2'-O-methyladenosine-3'-phosphate
  modified_base 18: mod_base = OTHER; note = 2'-O-methyladenosine-3'-phosphate
  modified_base 19: mod_base = OTHER; note = 2'-O-methylcytidine-3'-phosphate
  modified_base 20: mod_base = OTHER; note = 2'-O-methyladenosine-3'-phosphate
  modified_base 21: mod_base = OTHER; note = 2'-O-methylguanosine-3'-phosphate
  modified_base 22: mod_base = OTHER; note = 2'-O-methyladenosine-3'-phosphate
  modified_base 23: mod_base = OTHER; note = 2'-O-methyluridine
tatgagaaaaaatgtcaacagat

SEQ ID NO: 5085 - RNA, 23 nt, synthetic construct
  source 1..23: mol_type = other RNA
  modified_base 1: mod_base = OTHER; note = 2'-O-methyluridine-3'-phosphate 5'-(E)-Vinylphosphonate
  modified_base 2: mod_base = OTHER; note = 2'-deoxy-2'-fluorouridine-3'-phosphate
  modified_base 3: mod_base = OTHER; note = 2'-O-methyladenosine-3'-phosphate
  modified_base 4: mod_base = OTHER; note = 2'-O-methyluridine-3'-phosphate
  modified_base 5: mod_base = OTHER; note = 2'-O-methylguanosine-3'-phosphate
  modified_base 6: mod_base = OTHER; note = 2'-deoxy-2'-fluoroadenosine-3'-phosphate
  modified_base 7: mod_base = OTHER; note = 2'-O-methylguanosine-3'-phosphate
  modified_base 8: mod_base = OTHER; note = 2'-O-methyladenosine-3'-phosphate
  modified_base 9: mod_base = OTHER; note = 2'-O-methyladenosine-3'-phosphate
  modified_base 10: mod_base = OTHER; note = 2'-O-methyladenosine-3'-phosphate
  modified_base 11: mod_base = OTHER; note = 2'-O-methyladenosine-3'-phosphate
  modified_base 12: mod_base = OTHER; note = 2'-O-methyladenosine-3'-phosphate
  modified_base 13: mod_base = OTHER; note = 2'-O-methyladenosine-3'-phosphate
  modified_base 14: mod_base = OTHER; note = 2'-deoxy-2'-fluorouridine-3'-phosphate
  modified_base 15: mod_base = OTHER; note = 2'-O-methylguanosine-3'-phosphate
  modified_base 16: mod_base = OTHER; note = 2'-deoxy-2'-fluorouridine-3'-phosphate
  modified_base 17: mod_base = OTHER; note = 2'-O-methylcytidine-3'-phosphate
  modified_base 18: mod_base = OTHER; note = 2'-O-methyladenosine-3'-phosphate
  modified_base 19: mod_base = OTHER; note = 2'-O-methyladenosine-3'-phosphate
  modified_base 20: mod_base = OTHER; note = 2'-O-methylcytidine-3'-phosphate
  modified_base 21: mod_base = OTHER; note = 2'-O-methyladenosine-3'-phosphate
  modified_base 22: mod_base = OTHER; note = 2'-O-methylguanosine-3'-phosphate
  modified_base 23: mod_base = OTHER; note = 2'-O-methyladenosine
ttatgagaaaaaatgtcaacaga

SEQ ID NO: 5086 - RNA, 23 nt, synthetic construct
  source 1..23: mol_type = other RNA
  modified_base 1: mod_base = OTHER; note = 2'-O-methyluridine-3'-phosphate 5'-(E)-Vinylphosphonate
  modified_base 2: mod_base = OTHER; note = 2'-deoxy-2'-fluorocytidine-3'-phosphate
  modified_base 3: mod_base = OTHER; note = 2'-O-methyluridine-3'-phosphate
  modified_base 4: mod_base = OTHER; note = 2'-O-methyladenosine-3'-phosphate
  modified_base 5: mod_base = OTHER; note = 2'-O-methyluridine-3'-phosphate
  modified_base 6: mod_base = OTHER; note = 2'-deoxy-2'-fluoroguanosine-3'-phosphate
  modified_base 7: mod_base = OTHER; note = 2'-O-methyladenosine-3'-phosphate
  modified_base 8: mod_base = OTHER; note = 2'-O-methylguanosine-3'-phosphate
  modified_base 9: mod_base = OTHER; note = 2'-O-methyladenosine-3'-phosphate
  modified_base 10: mod_base = OTHER; note = 2'-O-methyladenosine-3'-phosphate
  modified_base 11: mod_base = OTHER; note = 2'-O-methyladenosine-3'-phosphate
  modified_base 12: mod_base = OTHER; note = 2'-O-methyladenosine-3'-phosphate
  modified_base 13: mod_base = OTHER; note = 2'-O-methyladenosine-3'-phosphate
  modified_base 14: mod_base = OTHER; note = 2'-deoxy-2'-fluoroadenosine-3'-phosphate
  modified_base 15: mod_base = OTHER; note = 2'-O-methyluridine-3'-phosphate
  modified_base 16: mod_base = OTHER; note = 2'-deoxy-2'-fluoroguanosine-3'-phosphate
  modified_base 17: mod_base = OTHER; note = 2'-O-methyluridine-3'-phosphate
  modified_base 18: mod_base = OTHER; note = 2'-O-methylcytidine-3'-phosphate
  modified_base 19: mod_base = OTHER; note = 2'-O-methyladenosine-3'-phosphate
  modified_base 20: mod_base = OTHER; note = 2'-O-methyladenosine-3'-phosphate
  modified_base 21: mod_base = OTHER; note = 2'-O-methylcytidine-3'-phosphate
  modified_base 22: mod_base = OTHER; note = 2'-O-methyladenosine-3'-phosphate
  modified_base 23: mod_base = OTHER; note = 2'-O-methylguanosine
tctatgagaaaaaatgtcaacag

SEQ ID NO: 5087 - RNA, 23 nt, synthetic construct
  source 1..23: mol_type = other RNA
  modified_base 1: mod_base = OTHER; note = 2'-O-methyluridine-3'-phosphate 5'-(E)-Vinylphosphonate
  modified_base 2: mod_base = OTHER; note = 2'-deoxy-2'-fluorouridine-3'-phosphate
  modified_base 3: mod_base = OTHER; note = 2'-O-methylcytidine-3'-phosphate
  modified_base 4: mod_base = OTHER; note = 2'-O-methyluridine-3'-phosphate
  modified_base 5: mod_base = OTHER; note = 2'-O-methyladenosine-3'-phosphate
  modified_base 6: mod_base = OTHER; note = 2'-deoxy-2'-fluorouridine-3'-phosphate
  modified_base 7: mod_base = OTHER; note = 2'-O-methylguanosine-3'-phosphate
  modified_base 8: mod_base = OTHER; note = 2'-O-methyladenosine-3'-phosphate
  modified_base 9: mod_base = OTHER; note = 2'-O-methylguanosine-3'-phosphate
  modified_base 10: mod_base = OTHER; note = 2'-O-methyladenosine-3'-phosphate
  modified_base 11: mod_base = OTHER; note = 2'-O-methyladenosine-3'-phosphate
  modified_base 12: mod_base = OTHER; note = 2'-O-methyladenosine-3'-phosphate
  modified_base 13: mod_base = OTHER; note = 2'-O-methyladenosine-3'-phosphate
  modified_base 14: mod_base = OTHER; note = 2'-deoxy-2'-fluoroadenosine-3'-phosphate
  modified_base 15: mod_base = OTHER; note = 2'-O-methyladenosine-3'-phosphate
  modified_base 16: mod_base = OTHER; note = 2'-deoxy-2'-fluorouridine-3'-phosphate
  modified_base 17: mod_base = OTHER; note = 2'-O-methylguanosine-3'-phosphate
  modified_base 18: mod_base = OTHER; note = 2'-O-methyluridine-3'-phosphate
  modified_base 19: mod_base = OTHER; note = 2'-O-methylcytidine-3'-phosphate
  modified_base 20: mod_base = OTHER; note = 2'-O-methyladenosine-3'-phosphate
  modified_base 21: mod_base = OTHER; note = 2'-O-methyladenosine-3'-phosphate
  modified_base 22: mod_base = OTHER; note = 2'-O-methylcytidine-3'-phosphate
  modified_base 23: mod_base = OTHER; note = 2'-O-methyladenosine
ttctatgagaaaaaatgtcaaca

SEQ ID NO: 5088 - RNA, 23 nt, synthetic construct
  source 1..23: mol_type = other RNA
  modified_base 1: mod_base = OTHER; note = 2'-O-methyluridine-3'-phosphate 5'-(E)-Vinylphosphonate
  modified_base 2: mod_base = OTHER; note = 2'-deoxy-2'-fluorouridine-3'-phosphate
  modified_base 3: mod_base = OTHER; note = 2'-O-methyluridine-3'-phosphate
  modified_base 4: mod_base = OTHER; note = 2'-O-methylcytidine-3'-phosphate
  modified_base 5: mod_base = OTHER; note = 2'-O-methyluridine-3'-phosphate
  modified_base 6: mod_base = OTHER; note = 2'-deoxy-2'-fluoroadenosine-3'-phosphate
  modified_base 7: mod_base = OTHER; note = 2'-O-methyluridine-3'-phosphate
  modified_base 8: mod_base = OTHER; note = 2'-O-methylguanosine-3'-phosphate
  modified_base 9: mod_base = OTHER; note = 2'-O-methyladenosine-3'-phosphate
  modified_base 10: mod_base = OTHER; note = 2'-O-methylguanosine-3'-phosphate
  modified_base 11: mod_base = OTHER; note = 2'-O-methyladenosine-3'-phosphate
  modified_base 12: mod_base = OTHER; note = 2'-O-methyladenosine-3'-phosphate
  modified_base 13: mod_base = OTHER; note = 2'-O-methyladenosine-3'-phosphate
  modified_base 14: mod_base = OTHER; note = 2'-deoxy-2'-fluoroadenosine-3'-phosphate
  modified_base 15: mod_base = OTHER; note = 2'-O-methyladenosine-3'-phosphate
  modified_base 16: mod_base = OTHER; note = 2'-deoxy-2'-fluoroadenosine-3'-phosphate
  modified_base 17: mod_base = OTHER; note = 2'-O-methyluridine-3'-phosphate
  modified_base 18: mod_base = OTHER; note = 2'-O-methylguanosine-3'-phosphate
  modified_base 19: mod_base = OTHER; note = 2'-O-methyluridine-3'-phosphate
  modified_base 20: mod_base = OTHER; note = 2'-O-methylcytidine-3'-phosphate
  modified_base 21: mod_base = OTHER; note = 2'-O-methyladenosine-3'-phosphate
  modified_base 22: mod_base = OTHER; note = 2'-O-methyladenosine-3'-phosphate
  modified_base 23: mod_base = OTHER; note = 2'-O-methylcytidine
tttctatgagaaaaaatgtcaac

SEQ ID NO: 5089 - RNA, 23 nt, synthetic construct
  source 1..23: mol_type = other RNA
  modified_base 1: mod_base = OTHER; note = 2'-O-methyluridine-3'-phosphate 5'-(E)-Vinylphosphonate
  modified_base 2: mod_base = OTHER; note = 2'-deoxy-2'-fluoroadenosine-3'-phosphate
  modified_base 3: mod_base = OTHER; note = 2'-O-methylcytidine-3'-phosphate
  modified_base 4: mod_base = OTHER; note = 2'-O-methylcytidine-3'-phosphate
  modified_base 5: mod_base = OTHER; note = 2'-O-methyladenosine-3'-phosphate
  modified_base 6: mod_base = OTHER; note = 2'-deoxy-2'-fluorouridine-3'-phosphate
  modified_base 7: mod_base = OTHER; note = 2'-O-methylguanosine-3'-phosphate
  modified_base 8: mod_base = OTHER; note = 2'-O-methyladenosine-3'-phosphate
  modified_base 9: mod_base = OTHER; note = 2'-O-methyluridine-3'-phosphate
  modified_base 10: mod_base = OTHER; note = 2'-O-methyladenosine-3'-phosphate
  modified_base 11: mod_base = OTHER; note = 2'-O-methyluridine-3'-phosphate
  modified_base 12: mod_base = OTHER; note = 2'-O-methyluridine-3'-phosphate
  modified_base 13: mod_base = OTHER; note = 2'-O-methyluridine-3'-phosphate
  modified_base 14: mod_base = OTHER; note = 2'-deoxy-2'-fluorocytidine-3'-phosphate
  modified_base 15: mod_base = OTHER; note = 2'-O-methyluridine-3'-phosphate
  modified_base 16: mod_base = OTHER; note = 2'-deoxy-2'-fluoroadenosine-3'-phosphate
  modified_base 17: mod_base = OTHER; note = 2'-O-methyluridine-3'-phosphate
  modified_base 18: mod_base = OTHER; note = 2'-O-methylguanosine-3'-phosphate
  modified_base 19: mod_base = OTHER; note = 2'-O-methyladenosine-3'-phosphate
  modified_base 20: mod_base = OTHER; note = 2'-O-methylguanosine-3'-phosphate
  modified_base 21: mod_base = OTHER; note = 2'-O-methyladenosine-3'-phosphate
  modified_base 22: mod_base = OTHER; note = 2'-O-methyladenosine-3'-phosphate
  modified_base 23: mod_base = OTHER; note = 2'-O-methyladenosine
taccatgatatttctatgagaaa

SEQ ID NO: 5090 - RNA, 23 nt, synthetic construct
  source 1..23: mol_type = other RNA
  modified_base 1: mod_base = OTHER; note = 2'-O-methyluridine-3'-phosphate 5'-(E)-Vinylphosphonate
  modified_base 2: mod_base = OTHER; note = 2'-deoxy-2'-fluoroadenosine-3'-phosphate
  modified_base 3: mod_base = OTHER; note = 2'-O-methyladenosine-3'-phosphate
  modified_base 4: mod_base = OTHER; note = 2'-O-methylcytidine-3'-phosphate
  modified_base 5: mod_base = OTHER; note = 2'-O-methylcytidine-3'-phosphate
  modified_base 6: mod_base = OTHER; note = 2'-deoxy-2'-fluoroadenosine-3'-phosphate
  modified_base 7: mod_base = OTHER; note = 2'-O-methyluridine-3'-phosphate
  modified_base 8: mod_base = OTHER; note = 2'-O-methylguanosine-3'-phosphate
  modified_base 9: mod_base = OTHER; note = 2'-O-methyladenosine-3'-phosphate
  modified_base 10: mod_base = OTHER; note = 2'-O-methyluridine-3'-phosphate
  modified_base 11: mod_base = OTHER; note = 2'-O-methyladenosine-3'-phosphate
  modified_base 12: mod_base = OTHER; note = 2'-O-methyluridine-3'-phosphate
  modified_base 13: mod_base = OTHER; note = 2'-O-methyluridine-3'-phosphate
  modified_base 14: mod_base = OTHER; note = 2'-deoxy-2'-fluorouridine-3'-phosphate
  modified_base 15: mod_base = OTHER; note = 2'-O-methylcytidine-3'-phosphate
  modified_base 16: mod_base = OTHER; note = 2'-deoxy-2'-fluorouridine-3'-phosphate
  modified_base 17: mod_base = OTHER; note = 2'-O-methyladenosine-3'-phosphate
  modified_base 18: mod_base = OTHER; note = 2'-O-methyluridine-3'-phosphate
  modified_base 19: mod_base = OTHER; note = 2'-O-methylguanosine-3'-phosphate
  modified_base 20: mod_base = OTHER; note = 2'-O-methyladenosine-3'-phosphate
  modified_base 21: mod_base = OTHER; note = 2'-O-methylguanosine-3'-phosphate
  modified_base 22: mod_base = OTHER; note = 2'-O-methyladenosine-3'-phosphate
  modified_base 23: mod_base = OTHER; note = 2'-O-methyladenosine
taaccatgatatttctatgagaa

SEQ ID NO: 5091 - RNA, 23 nt, synthetic construct
  source 1..23: mol_type = other RNA
  modified_base 1: mod_base = OTHER; note = 2'-O-methyluridine-3'-phosphate 5'-(E)-Vinylphosphonate
  modified_base 2: mod_base = OTHER; note = 2'-deoxy-2'-fluorouridine-3'-phosphate
  modified_base 3: mod_base = OTHER; note = 2'-O-methyladenosine-3'-phosphate
  modified_base 4: mod_base = OTHER; note = 2'-O-methyladenosine-3'-phosphate
  modified_base 5: mod_base = OTHER; note = 2'-O-methylcytidine-3'-phosphate
  modified_base 6: mod_base = OTHER; note = 2'-deoxy-2'-fluorocytidine-3'-phosphate
  modified_base 7: mod_base = OTHER; note = 2'-O-methyladenosine-3'-phosphate
  modified_base 8: mod_base = OTHER; note = 2'-O-methyluridine-3'-phosphate
  modified_base 9: mod_base = OTHER; note = 2'-O-methylguanosine-3'-phosphate
  modified_base 10: mod_base = OTHER; note = 2'-O-methyladenosine-3'-phosphate
  modified_base 11: mod_base = OTHER; note = 2'-O-methyluridine-3'-phosphate
  modified_base 12: mod_base = OTHER; note = 2'-O-methyladenosine-3'-phosphate
  modified_base 13: mod_base = OTHER; note = 2'-O-methyluridine-3'-phosphate
  modified_base 14: mod_base = OTHER; note = 2'-deoxy-2'-fluorouridine-3'-phosphate
  modified_base 15: mod_base = OTHER; note = 2'-O-methyluridine-3'-phosphate
  modified_base 16: mod_base = OTHER; note = 2'-deoxy-2'-fluorocytidine-3'-phosphate
  modified_base 17: mod_base = OTHER; note = 2'-O-methyluridine-3'-phosphate
  modified_base 18: mod_base = OTHER; note = 2'-O-methyladenosine-3'-phosphate
  modified_base 19: mod_base = OTHER; note = 2'-O-methyluridine-3'-phosphate
  modified_base 20: mod_base = OTHER; note = 2'-O-methylguanosine-3'-phosphate
  modified_base 21: mod_base = OTHER; note = 2'-O-methyladenosine-3'-phosphate
  modified_base 22: mod_base = OTHER; note = 2'-O-methylguanosine-3'-phosphate
  modified_base 23: mod_base = OTHER; note = 2'-O-methyladenosine
ttaaccatgatatttctatgaga

SEQ ID NO: 5092 - RNA, 23 nt, synthetic construct
  source 1..23: mol_type = other RNA
  modified_base 1: mod_base = OTHER; note = 2'-O-methyluridine-3'-phosphate 5'-(E)-Vinylphosphonate
  modified_base 2: mod_base = OTHER; note = 2'-deoxy-2'-fluorouridine-3'-phosphate
  modified_base 3: mod_base = OTHER; note = 2'-O-methyluridine-3'-phosphate
  modified_base 4: mod_base = OTHER; note = 2'-O-methyladenosine-3'-phosphate
  modified_base 5: mod_base = OTHER; note = 2'-O-methyladenosine-3'-phosphate
  modified_base 6: mod_base = OTHER; note = 2'-deoxy-2'-fluorouridine-3'-phosphate
  modified_base 7: mod_base = OTHER; note = 2'-O-methylguanosine-3'-phosphate
  modified_base 8: mod_base = OTHER; note = 2'-O-methylcytidine-3'-phosphate
  modified_base 9: mod_base = OTHER; note = 2'-O-methyluridine-3'-phosphate
  modified_base 10: mod_base = OTHER; note = 2'-O-methylcytidine-3'-phosphate
  modified_base 11: mod_base = OTHER; note = 2'-O-methyladenosine-3'-phosphate
  modified_base 12: mod_base = OTHER; note = 2'-O-methyluridine-3'-phosphate
  modified_base 13: mod_base = OTHER; note = 2'-O-methyluridine-3'-phosphate
  modified_base 14: mod_base = OTHER; note = 2'-deoxy-2'-fluoroadenosine-3'-phosphate
  modified_base 15: mod_base = OTHER; note = 2'-O-methyladenosine-3'-phosphate
  modified_base 16: mod_base = OTHER; note = 2'-deoxy-2'-fluorocytidine-3'-phosphate
  modified_base 17: mod_base = OTHER; note = 2'-O-methyladenosine-3'-phosphate
  modified_base 18: mod_base = OTHER; note = 2'-O-methyladenosine-3'-phosphate
  modified_base 19: mod_base = OTHER; note = 2'-O-methyladenosine-3'-phosphate
  modified_base 20: mod_base = OTHER; note = 2'-O-methyluridine-3'-phosphate
  modified_base 21: mod_base = OTHER; note = 2'-O-methylguanosine-3'-phosphate
  modified_base 22: mod_base = OTHER; note = 2'-O-methylguanosine-3'-phosphate
  modified_base 23: mod_base = OTHER; note = 2'-O-methylguanosine
tttaatgctcattaacaaatggg

SEQ ID NO: 5093 - RNA, 23 nt, synthetic construct
  source 1..23: mol_type = other RNA
  modified_base 1: mod_base = OTHER; note = 2'-O-methyluridine-3'-phosphate 5'-(E)-Vinylphosphonate
  modified_base 2: mod_base = OTHER; note = 2'-deoxy-2'-fluorocytidine-3'-phosphate
  modified_base 3: mod_base = OTHER; note = 2'-O-methyladenosine-3'-phosphate
  modified_base 4: mod_base = OTHER; note = 2'-O-methyluridine-3'-phosphate
  modified_base 5: mod_base = OTHER; note = 2'-O-methyluridine-3'-phosphate
  modified_base 6: mod_base = OTHER; note = 2'-deoxy-2'-fluoroadenosine-3'-phosphate
  modified_base 7: mod_base = OTHER; note = 2'-O-methyladenosine-3'-phosphate
  modified_base 8: mod_base = OTHER; note = 2'-O-methyluridine-3'-phosphate
  modified_base 9: mod_base = OTHER; note = 2'-O-methylguanosine-3'-phosphate
  modified_base 10: mod_base = OTHER; note = 2'-O-methylcytidine-3'-phosphate
  modified_base 11: mod_base = OTHER; note = 2'-O-methyluridine-3'-phosphate
  modified_base 12: mod_base = OTHER; note = 2'-O-methylcytidine-3'-phosphate
  modified_base 13: mod_base = OTHER; note = 2'-O-methyladenosine-3'-phosphate
  modified_base 14: mod_base = OTHER; note = 2'-deoxy-2'-fluorouridine-3'-phosphate
  modified_base 15: mod_base = OTHER; note = 2'-O-methyluridine-3'-phosphate
  modified_base 16: mod_base = OTHER; note = 2'-deoxy-2'-fluoroadenosine-3'-phosphate
  modified_base 17: mod_base = OTHER; note = 2'-O-methyladenosine-3'-phosphate
  modified_base 18: mod_base = OTHER; note = 2'-O-methylcytidine-3'-phosphate
  modified_base 19: mod_base = OTHER; note = 2'-O-methyladenosine-3'-phosphate
  modified_base 20: mod_base = OTHER; note = 2'-O-methyladenosine-3'-phosphate
  modified_base 21: mod_base = OTHER; note = 2'-O-methyladenosine-3'-phosphate
  modified_base 22: mod_base = OTHER; note = 2'-O-methyluridine-3'-phosphate
  modified_base 23: mod_base = OTHER; note = 2'-O-methylguanosine
tcattaatgctcattaacaaatg

SEQ ID NO: 5094 - RNA, 23 nt, synthetic construct
  source 1..23: mol_type = other RNA
  modified_base 1: mod_base = OTHER; note = 2'-O-methyluridine-3'-phosphate 5'-(E)-Vinylphosphonate
  modified_base 2: mod_base = OTHER; note = 2'-deoxy-2'-fluoroguanosine-3'-phosphate
  modified_base 3: mod_base = OTHER; note = 2'-O-methyladenosine-3'-phosphate
  modified_base 4: mod_base = OTHER; note = 2'-O-methyladenosine-3'-phosphate
  modified_base 5: mod_base = OTHER; note = 2'-O-methyladenosine-3'-phosphate
  modified_base 6: mod_base = OTHER; note = 2'-deoxy-2'-fluoroadenosine-3'-phosphate
  modified_base 7: mod_base = OTHER; note = 2'-O-methylcytidine-3'-phosphate
  modified_base 8: mod_base = OTHER; note = 2'-O-methyladenosine-3'-phosphate
  modified_base 9: mod_base = OTHER; note = 2'-O-methyluridine-3'-phosphate
  modified_base 10: mod_base = OTHER; note = 2'-O-methyluridine-3'-phosphate
  modified_base 11: mod_base = OTHER; note = 2'-O-methyladenosine-3'-phosphate
  modified_base 12: mod_base = OTHER; note = 2'-O-methyladenosine-3'-phosphate
  modified_base 13: mod_base = OTHER; note = 2'-O-methyluridine-3'-phosphate
  modified_base 14: mod_base = OTHER; note = 2'-deoxy-2'-fluoroguanosine-3'-phosphate
  modified_base 15: mod_base = OTHER; note = 2'-O-methylcytidine-3'-phosphate
  modified_base 16: mod_base = OTHER; note = 2'-deoxy-2'-fluorouridine-3'-phosphate
  modified_base 17: mod_base = OTHER; note = 2'-O-methylcytidine-3'-phosphate
  modified_base 18: mod_base = OTHER; note = 2'-O-methyladenosine-3'-phosphate
  modified_base 19: mod_base = OTHER; note = 2'-O-methyluridine-3'-phosphate
  modified_base 20: mod_base = OTHER; note = 2'-O-methyluridine-3'-phosphate
  modified_base 21: mod_base = OTHER; note = 2'-O-methyladenosine-3'-phosphate
  modified_base 22: mod_base = OTHER; note = 2'-O-methyladenosine-3'-phosphate
  modified_base 23: mod_base = OTHER; note = 2'-O-methylcytidine
tgaaaacattaatgctcattaac

SEQ ID NO: 5095 - RNA, 23 nt, synthetic construct
  source 1..23: mol_type = other RNA
  modified_base 1: mod_base = OTHER; note = 2'-O-methyluridine-3'-phosphate 5'-(E)-Vinylphosphonate
  modified_base 2: mod_base = OTHER; note = 2'-deoxy-2'-fluorocytidine-3'-phosphate
  modified_base 3: mod_base = OTHER; note = 2'-O-methyladenosine-3'-phosphate
  modified_base 4: mod_base = OTHER; note = 2'-O-methylguanosine-3'-phosphate
  modified_base 5: mod_base = OTHER; note = 2'-O-methyladenosine-3'-phosphate
  modified_base 6: mod_base = OTHER; note = 2'-deoxy-2'-fluoroadenosine-3'-phosphate
  modified_base 7: mod_base = OTHER; note = 2'-O-methyladenosine-3'-phosphate
  modified_base 8: mod_base = OTHER; note = 2'-O-methyladenosine-3'-phosphate
  modified_base 9: mod_base = OTHER; note = 2'-O-methylcytidine-3'-phosphate
  modified_base 10: mod_base = OTHER; note = 2'-O-methyladenosine-3'-phosphate
  modified_base 11: mod_base = OTHER; note = 2'-O-methyluridine-3'-phosphate
  modified_base 12: mod_base = OTHER; note = 2'-O-methyluridine-3'-phosphate
  modified_base 13: mod_base = OTHER; note = 2'-O-methyladenosine-3'-phosphate
  modified_base 14: mod_base = OTHER; note = 2'-deoxy-2'-fluoroadenosine-3'-phosphate
  modified_base 15: mod_base = OTHER; note = 2'-O-methyluridine-3'-phosphate
  modified_base 16: mod_base = OTHER; note = 2'-deoxy-2'-fluoroguanosine-3'-phosphate
  modified_base 17: mod_base = OTHER; note = 2'-O-methylcytidine-3'-phosphate
  modified_base 18: mod_base = OTHER; note = 2'-O-methyluridine-3'-phosphate
  modified_base 19: mod_base = OTHER; note = 2'-O-methylcytidine-3'-phosphate
  modified_base 20: mod_base = OTHER; note = 2'-O-methyladenosine-3'-phosphate
  modified_base 21: mod_base = OTHER; note = 2'-O-methyluridine-3'-phosphate
  modified_base 22: mod_base = OTHER; note = 2'-O-methyluridine-3'-phosphate
  modified_base 23: mod_base = OTHER; note = 2'-O-methyladenosine
tcagaaaacattaatgctcatta

SEQ ID NO: 5096 - RNA, 23 nt, synthetic construct
  source 1..23: mol_type = other RNA
  modified_base 1: mod_base = OTHER; note = 2'-O-methyluridine-3'-phosphate 5'-(E)-Vinylphosphonate
  modified_base 2: mod_base = OTHER; note = 2'-deoxy-2'-fluorouridine-3'-phosphate
  modified_base 3: mod_base = OTHER; note = 2'-O-methylcytidine-3'-phosphate
  modified_base 4: mod_base = OTHER; note = 2'-O-methyladenosine-3'-phosphate
  modified_base 5: mod_base = OTHER; note = 2'-O-methylguanosine-3'-phosphate
  modified_base 6: mod_base = OTHER; note = 2'-deoxy-2'-fluoroadenosine-3'-phosphate
  modified_base 7: mod_base = OTHER; note = 2'-O-methyladenosine-3'-phosphate
  modified_base 8: mod_base = OTHER; note = 2'-O-methyladenosine-3'-phosphate
  modified_base 9: mod_base = OTHER; note = 2'-O-methyladenosine-3'-phosphate
  modified_base 10: mod_base = OTHER; note = 2'-O-methylcytidine-3'-phosphate
  modified_base 11: mod_base = OTHER; note = 2'-O-methyladenosine-3'-phosphate
  modified_base 12: mod_base = OTHER; note = 2'-O-methyluridine-3'-phosphate
  modified_base 13: mod_base = OTHER; note = 2'-O-methyluridine-3'-phosphate
  modified_base 14: mod_base = OTHER; note = 2'-deoxy-2'-fluoroadenosine-3'-phosphate
  modified_base 15: mod_base = OTHER; note = 2'-O-methyladenosine-3'-phosphate
  modified_base 16: mod_base = OTHER; note = 2'-deoxy-2'-fluorouridine-3'-phosphate
  modified_base 17: mod_base = OTHER; note = 2'-O-methylguanosine-3'-phosphate
  modified_base 18: mod_base = OTHER; note = 2'-O-methylcytidine-3'-phosphate
  modified_base 19: mod_base = OTHER; note = 2'-O-methyluridine-3'-phosphate
  modified_base 20: mod_base = OTHER; note = 2'-O-methylcytidine-3'-phosphate
  modified_base 21: mod_base = OTHER; note = 2'-O-methyladenosine-3'-phosphate
  modified_base 22: mod_base = OTHER; note = 2'-O-methyluridine-3'-phosphate
  modified_base 23: mod_base = OTHER; note = 2'-O-methyluridine
ttcagaaaacattaatgctcatt

SEQ ID NO: 5097 - RNA, 23 nt, synthetic construct
  source 1..23: mol_type = other RNA
  modified_base 1: mod_base = OTHER; note = 2'-O-methyluridine-3'-phosphate 5'-(E)-Vinylphosphonate
  modified_base 2: mod_base = OTHER; note = 2'-deoxy-2'-fluorouridine-3'-phosphate
  modified_base 3: mod_base = OTHER; note = 2'-O-methyluridine-3'-phosphate
  modified_base 4: mod_base = OTHER; note = 2'-O-methylcytidine-3'-phosphate
  modified_base 5: mod_base = OTHER; note = 2'-O-methyladenosine-3'-phosphate
  modified_base 6: mod_base = OTHER; note = 2'-deoxy-2'-fluoroguanosine-3'-phosphate
  modified_base 7: mod_base = OTHER; note = 2'-O-methyladenosine-3'-phosphate
  modified_base 8: mod_base = OTHER; note = 2'-O-methyladenosine-3'-phosphate
  modified_base 9: mod_base = OTHER; note = 2'-O-methyladenosine-3'-phosphate
  modified_base 10: mod_base = OTHER; note = 2'-O-methyladenosine-3'-phosphate
  modified_base 11: mod_base = OTHER; note = 2'-O-methylcytidine-3'-phosphate
  modified_base 12: mod_base = OTHER; note = 2'-O-methyladenosine-3'-phosphate
  modified_base 13: mod_base = OTHER; note = 2'-O-methyluridine-3'-phosphate
  modified_base 14: mod_base = OTHER; note = 2'-deoxy-2'-fluorouridine-3'-phosphate
  modified_base 15: mod_base = OTHER; note = 2'-O-methyladenosine-3'-phosphate
  modified_base 16: mod_base = OTHER; note = 2'-deoxy-2'-fluoroadenosine-3'-phosphate
  modified_base 17: mod_base = OTHER; note = 2'-O-methyluridine-3'-phosphate
  modified_base 18: mod_base = OTHER; note = 2'-O-methylguanosine-3'-phosphate
  modified_base 19: mod_base = OTHER; note = 2'-O-methylcytidine-3'-phosphate
  modified_base 20: mod_base = OTHER; note = 2'-O-methyluridine-3'-phosphate
  modified_base 21: mod_base = OTHER; note = 2'-O-methylcytidine-3'-phosphate
  modified_base 22: mod_base = OTHER; note = 2'-O-methyladenosine-3'-phosphate
  modified_base 23: mod_base = OTHER; note = 2'-O-methyluridine
tttcagaaaacattaatgctcat

SEQ ID NO: 5098 - RNA, 23 nt, synthetic construct
  source 1..23: mol_type = other RNA
  modified_base 1: mod_base = OTHER; note = 2'-O-methyluridine-3'-phosphate 5'-(E)-Vinylphosphonate
  modified_base 2: mod_base = OTHER; note = 2'-deoxy-2'-fluoroguanosine-3'-phosphate
  modified_base 3: mod_base = OTHER; note = 2'-O-methyluridine-3'-phosphate
  modified_base 4: mod_base = OTHER; note = 2'-O-methyluridine-3'-phosphate
  modified_base 5: mod_base = OTHER; note = 2'-O-methylcytidine-3'-phosphate
  modified_base 6: mod_base = OTHER; note = 2'-deoxy-2'-fluoroadenosine-3'-phosphate
  modified_base 7: mod_base = OTHER; note = 2'-O-methylguanosine-3'-phosphate
  modified_base 8: mod_base = OTHER; note = 2'-O-methyladenosine-3'-phosphate
  modified_base 9: mod_base = OTHER; note = 2'-O-methyladenosine-3'-phosphate
  modified_base 10: mod_base = OTHER; note = 2'-O-methyladenosine-3'-phosphate
  modified_base 11: mod_base = OTHER; note = 2'-O-methyladenosine-3'-phosphate
  modified_base 12: mod_base = OTHER; note = 2'-O-methylcytidine-3'-phosphate
  modified_base 13: mod_base = OTHER; note = 2'-O-methyladenosine-3'-phosphate
  modified_base 14: mod_base = OTHER; note = 2'-deoxy-2'-fluorouridine-3'-phosphate
  modified_base 15: mod_base = OTHER; note = 2'-O-methyluridine-3'-phosphate
  modified_base 16: mod_base = OTHER; note = 2'-deoxy-2'-fluoroadenosine-3'-phosphate
  modified_base 17: mod_base = OTHER; note = 2'-O-methyladenosine-3'-phosphate
  modified_base 18: mod_base = OTHER; note = 2'-O-methyluridine-3'-phosphate
  modified_base 19: mod_base = OTHER; note = 2'-O-methylguanosine-3'-phosphate
  modified_base 20: mod_base = OTHER; note = 2'-O-methylcytidine-3'-phosphate
  modified_base 21: mod_base = OTHER; note = 2'-O-methyluridine-3'-phosphate
  modified_base 22: mod_base = OTHER; note = 2'-O-methylcytidine-3'-phosphate
  modified_base 23: mod_base = OTHER; note = 2'-O-methyladenosine
tgttcagaaaacattaatgctca

SEQ ID NO: 5099 - RNA, 23 nt, synthetic construct
  source 1..23: mol_type = other RNA
  modified_base 1: mod_base = OTHER; note = 2'-O-methyluridine-3'-phosphate 5'-(E)-Vinylphosphonate
  modified_base 2: mod_base = OTHER; note = 2'-deoxy-2'-fluorouridine-3'-phosphate
  modified_base 3: mod_base = OTHER; note = 2'-O-methylguanosine-3'-phosphate
  modified_base 4: mod_base = OTHER; note = 2'-O-methyluridine-3'-phosphate
  modified_base 5: mod_base = OTHER; note = 2'-O-methyluridine-3'-phosphate
  modified_base 6: mod_base = OTHER; note = 2'-deoxy-2'-fluorocytidine-3'-phosphate
  modified_base 7: mod_base = OTHER; note = 2'-O-methyladenosine-3'-phosphate
  modified_base 8: mod_base = OTHER; note = 2'-O-methylguanosine-3'-phosphate
  modified_base 9: mod_base = OTHER; note = 2'-O-methyladenosine-3'-phosphate
  modified_base 10: mod_base = OTHER; note = 2'-O-methyladenosine-3'-phosphate
  modified_base 11: mod_base = OTHER; note = 2'-O-methyladenosine-3'-phosphate
  modified_base 12: mod_base = OTHER; note = 2'-O-methyladenosine-3'-phosphate
  modified_base 13: mod_base = OTHER; note = 2'-O-methylcytidine-3'-phosphate
  modified_base 14: mod_base = OTHER; note = 2'-deoxy-2'-fluoroadenosine-3'-phosphate
  modified_base 15: mod_base = OTHER; note = 2'-O-methyluridine-3'-phosphate
  modified_base 16: mod_base = OTHER; note = 2'-deoxy-2'-fluorouridine-3'-phosphate
  modified_base 17: mod_base = OTHER; note = 2'-O-methyladenosine-3'-phosphate
  modified_base 18: mod_base = OTHER; note = 2'-O-methyladenosine-3'-phosphate
  modified_base 19: mod_base = OTHER; note = 2'-O-methyluridine-3'-phosphate
  modified_base 20: mod_base = OTHER; note = 2'-O-methylguanosine-3'-phosphate
  modified_base 21: mod_base = OTHER; note = 2'-O-methylcytidine-3'-phosphate
  modified_base 22: mod_base = OTHER; note = 2'-O-methyluridine-3'-phosphate
  modified_base 23: mod_base = OTHER; note = 2'-O-methylcytidine
ttgttcagaaaacattaatgctc

SEQ ID NO: 5100 - RNA, 23 nt, synthetic construct
  source 1..23: mol_type = other RNA
  modified_base 1: mod_base = OTHER; note = 2'-O-methyluridine-3'-phosphate 5'-(E)-Vinylphosphonate
  modified_base 2: mod_base = OTHER; note = 2'-deoxy-2'-fluoroguanosine-3'-phosphate
  modified_base 3: mod_base = OTHER; note = 2'-O-methyluridine-3'-phosphate
  modified_base 4: mod_base = OTHER; note = 2'-O-methylguanosine-3'-phosphate
  modified_base 5: mod_base = OTHER; note = 2'-O-methyluridine-3'-phosphate
  modified_base 6: mod_base = OTHER; note = 2'-deoxy-2'-fluorouridine-3'-phosphate
  modified_base 7: mod_base = OTHER; note = 2'-O-methylcytidine-3'-phosphate
  modified_base 8: mod_base = OTHER; note = 2'-O-methyladenosine-3'-phosphate
  modified_base 9: mod_base = OTHER; note = 2'-O-methylguanosine-3'-phosphate
  modified_base 10: mod_base = OTHER; note = 2'-O-methyladenosine-3'-phosphate
  modified_base 11: mod_base = OTHER; note = 2'-O-methyladenosine-3'-phosphate
  modified_base 12: mod_base = OTHER; note = 2'-O-methyladenosine-3'-phosphate
  modified_base 13: mod_base = OTHER; note = 2'-O-methyladenosine-3'-phosphate
  modified_base 14: mod_base = OTHER; note = 2'-deoxy-2'-fluorocytidine-3'-phosphate
  modified_base 15: mod_base = OTHER; note = 2'-O-methyladenosine-3'-phosphate
  modified_base 16: mod_base = OTHER; note = 2'-deoxy-2'-fluorouridine-3'-phosphate
  modified_base 17: mod_base = OTHER; note = 2'-O-methyluridine-3'-phosphate
  modified_base 18: mod_base = OTHER; note = 2'-O-methyladenosine-3'-phosphate
  modified_base 19: mod_base = OTHER; note = 2'-O-methyladenosine-3'-phosphate
  modified_base 20: mod_base = OTHER; note = 2'-O-methyluridine-3'-phosphate
  modified_base 21: mod_base = OTHER; note = 2'-O-methylguanosine-3'-phosphate
  modified_base 22: mod_base = OTHER; note = 2'-O-methylcytidine-3'-phosphate
  modified_base 23: mod_base = OTHER; note = 2'-O-methyluridine
tgtgttcagaaaacattaatgct

SEQ ID NO: 5101 - RNA, 23 nt, synthetic construct
  source 1..23: mol_type = other RNA
  modified_base 1: mod_base = OTHER; note = 2'-O-methyluridine-3'-phosphate 5'-(E)-Vinylphosphonate
  modified_base 2: mod_base = OTHER; note = 2'-deoxy-2'-fluoroadenosine-3'-phosphate
  modified_base 3: mod_base = OTHER; note = 2'-O-methylguanosine-3'-phosphate
  modified_base 4: mod_base = OTHER; note = 2'-O-methyluridine-3'-phosphate
  modified_base 5: mod_base = OTHER; note = 2'-O-methylguanosine-3'-phosphate
  modified_base 6: mod_base = OTHER; note = 2'-deoxy-2'-fluorouridine-3'-phosphate
  modified_base 7: mod_base = OTHER; note = 2'-O-methyluridine-3'-phosphate
  modified_base 8: mod_base = OTHER; note = 2'-O-methylcytidine-3'-phosphate
  modified_base 9: mod_base = OTHER; note = 2'-O-methyladenosine-3'-phosphate
  modified_base 10: mod_base = OTHER; note = 2'-O-methylguanosine-3'-phosphate
  modified_base 11: mod_base = OTHER; note = 2'-O-methyladenosine-3'-phosphate
  modified_base 12: mod_base = OTHER; note = 2'-O-methyladenosine-3'-phosphate
  modified_base 13: mod_base = OTHER; note = 2'-O-methyladenosine-3'-phosphate
  modified_base 14: mod_base = OTHER; note = 2'-deoxy-2'-fluoroadenosine-3'-phosphate
  modified_base 15: mod_base = OTHER; note = 2'-O-methylcytidine-3'-phosphate
  modified_base 16: mod_base = OTHER; note = 2'-deoxy-2'-fluoroadenosine-3'-phosphate
  modified_base 17: mod_base = OTHER; note = 2'-O-methyluridine-3'-phosphate
  modified_base 18: mod_base = OTHER; note = 2'-O-methyluridine-3'-phosphate
  modified_base 19: mod_base = OTHER; note = 2'-O-methyladenosine-3'-phosphate
  modified_base 20: mod_base = OTHER; note = 2'-O-methyladenosine-3'-phosphate
  modified_base 21: mod_base = OTHER; note = 2'-O-methyluridine-3'-phosphate
  modified_base 22: mod_base = OTHER; note = 2'-O-methylguanosine-3'-phosphate
  modified_base 23: mod_base = OTHER; note = 2'-O-methylcytidine
tagtgttcagaaaacattaatgc

SEQ ID NO: 5102 - RNA, 23 nt, synthetic construct
  source 1..23: mol_type = other RNA
  modified_base 1: mod_base = OTHER; note = 2'-O-methyluridine-3'-phosphate 5'-(E)-Vinylphosphonate
  modified_base 2: mod_base = OTHER; note = 2'-deoxy-2'-fluoroadenosine-3'-phosphate
  modified_base 3: mod_base = OTHER; note = 2'-O-methyladenosine-3'-phosphate
  modified_base 4: mod_base = OTHER; note = 2'-O-methylguanosine-3'-phosphate
  modified_base 5: mod_base = OTHER; note = 2'-O-methyluridine-3'-phosphate
  modified_base 6: mod_base = OTHER; note = 2'-deoxy-2'-fluoroguanosine-3'-phosphate
  modified_base 7: mod_base = OTHER; note = 2'-O-methyluridine-3'-phosphate
  modified_base 8: mod_base = OTHER; note = 2'-O-methyluridine-3'-phosphate
  modified_base 9: mod_base = OTHER; note = 2'-O-methylcytidine-3'-phosphate
  modified_base 10: mod_base = OTHER; note = 2'-O-methyladenosine-3'-phosphate
  modified_base 11: mod_base = OTHER; note = 2'-O-methylguanosine-3'-phosphate
  modified_base 12: mod_base = OTHER; note = 2'-O-methyladenosine-3'-phosphate
  modified_base 13: mod_base = OTHER; note = 2'-O-methyladenosine-3'-phosphate
  modified_base 14: mod_base = OTHER; note = 2'-deoxy-2'-fluoroadenosine-3'-phosphate
  modified_base 15: mod_base = OTHER; note = 2'-O-methyladenosine-3'-phosphate
  modified_base 16: mod_base = OTHER; note = 2'-deoxy-2'-fluorocytidine-3'-phosphate
  modified_base 17: mod_base = OTHER; note = 2'-O-methyladenosine-3'-phosphate
  modified_base 18: mod_base = OTHER; note = 2'-O-methyluridine-3'-phosphate
  modified_base 19: mod_base = OTHER; note = 2'-O-methyluridine-3'-phosphate
  modified_base 20: mod_base = OTHER; note = 2'-O-methyladenosine-3'-phosphate
  modified_base 21: mod_base = OTHER; note = 2'-O-methyladenosine-3'-phosphate
  modified_base 22: mod_base = OTHER; note = 2'-O-methyluridine-3'-phosphate
  modified_base 23: mod_base = OTHER; note = 2'-O-methylguanosine
taagtgttcagaaaacattaatg

SEQ ID NO: 5103 - RNA, 23 nt, synthetic construct
  source 1..23: mol_type = other RNA
  modified_base 1: mod_base = OTHER; note = 2'-O-methyluridine-3'-phosphate 5'-(E)-Vinylphosphonate
  modified_base 2: mod_base = OTHER; note = 2'-deoxy-2'-fluoroadenosine-3'-phosphate
  modified_base 3: mod_base = OTHER; note = 2'-O-methyladenosine-3'-phosphate
  modified_base 4: mod_base = OTHER; note = 2'-O-methyluridine-3'-phosphate
  modified_base 5: mod_base = OTHER; note = 2'-O-methylcytidine-3'-phosphate
  modified_base 6: mod_base = OTHER; note = 2'-deoxy-2'-fluorouridine-3'-phosphate
  modified_base 7: mod_base = OTHER; note = 2'-O-methyluridine-3'-phosphate
  modified_base 8: mod_base = OTHER; note = 2'-O-methyluridine-3'-phosphate
  modified_base 9: mod_base = OTHER; note = 2'-O-methylguanosine-3'-phosphate
  modified_base 10: mod_base = OTHER; note = 2'-O-methylguanosine-3'-phosphate
  modified_base 11: mod_base = OTHER; note = 2'-O-methyladenosine-3'-phosphate
  modified_base 12: mod_base = OTHER; note = 2'-O-methyladenosine-3'-phosphate
  modified_base 13: mod_base = OTHER; note = 2'-O-methylguanosine-3'-phosphate
  modified_base 14: mod_base = OTHER; note = 2'-deoxy-2'-fluorouridine-3'-phosphate
  modified_base 15: mod_base = OTHER; note = 2'-O-methylguanosine-3'-phosphate
  modified_base 16: mod_base = OTHER; note = 2'-deoxy-2'-fluorouridine-3'-phosphate
  modified_base 17: mod_base = OTHER; note = 2'-O-methyluridine-3'-phosphate
  modified_base 18: mod_base = OTHER; note = 2'-O-methylcytidine-3'-phosphate
  modified_base 19: mod_base = OTHER; note = 2'-O-methyladenosine-3'-phosphate
  modified_base 20: mod_base = OTHER; note = 2'-O-methylguanosine-3'-phosphate
  modified_base 21: mod_base = OTHER; note = 2'-O-methyladenosine-3'-phosphate
  modified_base 22: mod_base = OTHER; note = 2'-O-methyladenosine-3'-phosphate
  modified_base 23: mod_base = OTHER; note = 2'-O-methyladenosine
taatctttggaagtgttcagaaa

SEQ ID NO: 5104 - RNA, 23 nt, synthetic construct
  source 1..23: mol_type = other RNA
  modified_base 1: mod_base = OTHER; note = 2'-O-methyluridine-3'-phosphate 5'-(E)-Vinylphosphonate
  modified_base 2: mod_base = OTHER; note = 2'-deoxy-2'-fluorouridine-3'-phosphate
  modified_base 3: mod_base = OTHER; note = 2'-O-methyladenosine-3'-phosphate
  modified_base 4: mod_base = OTHER; note = 2'-O-methyladenosine-3'-phosphate
  modified_base 5: mod_base = OTHER; note = 2'-O-methyluridine-3'-phosphate
  modified_base 6: mod_base = OTHER; note = 2'-deoxy-2'-fluorocytidine-3'-phosphate
  modified_base 7: mod_base = OTHER; note = 2'-O-methyluridine-3'-phosphate
  modified_base 8: mod_base = OTHER; note = 2'-O-methyluridine-3'-phosphate
  modified_base 9: mod_base = OTHER; note = 2'-O-methyluridine-3'-phosphate
  modified_base 10: mod_base = OTHER; note = 2'-O-methylguanosine-3'-phosphate
  modified_base 11: mod_base = OTHER; note = 2'-O-methylguanosine-3'-phosphate
  modified_base 12: mod_base = OTHER; note = 2'-O-methyladenosine-3'-phosphate
  modified_base 13: mod_base = OTHER; note = 2'-O-methyladenosine-3'-phosphate
  modified_base 14: mod_base = OTHER; note = 2'-deoxy-2'-fluoroguanosine-3'-phosphate
  modified_base 15: mod_base = OTHER; note = 2'-O-methyluridine-3'-phosphate
  modified_base 16: mod_base = OTHER; note = 2'-deoxy-2'-fluoroguanosine-3'-phosphate
  modified_base 17: mod_base = OTHER; note = 2'-O-methyluridine-3'-phosphate
  modified_base 18: mod_base = OTHER; note = 2'-O-methyluridine-3'-phosphate
  modified_base 19: mod_base = OTHER; note = 2'-O-methylcytidine-3'-phosphate
  modified_base 20: mod_base = OTHER; note = 2'-O-methyladenosine-3'-phosphate
  modified_base 21: mod_base = OTHER; note = 2'-O-methylguanosine-3'-phosphate
  modified_base 22: mod_base = OTHER; note = 2'-O-methyladenosine-3'-phosphate
  modified_base 23: mod_base = OTHER; note = 2'-O-methyladenosine
ttaatctttggaagtgttcagaa

SEQ ID NO: 5105 - RNA, 23 nt, synthetic construct
  source 1..23: mol_type = other RNA
  modified_base 1: mod_base = OTHER; note = 2'-O-methyluridine-3'-phosphate 5'-(E)-Vinylphosphonate
  modified_base 2: mod_base = OTHER; note = 2'-deoxy-2'-fluorouridine-3'-phosphate
  modified_base 3: mod_base = OTHER; note = 2'-O-methyluridine-3'-phosphate
  modified_base 4: mod_base = OTHER; note = 2'-O-methyladenosine-3'-phosphate
  modified_base 5: mod_base = OTHER; note = 2'-O-methyladenosine-3'-phosphate
  modified_base 6: mod_base = OTHER; note = 2'-deoxy-2'-fluorouridine-3'-phosphate
  modified_base 7: mod_base = OTHER; note = 2'-O-methylcytidine-3'-phosphate
  modified_base 8: mod_base = OTHER; note = 2'-O-methyluridine-3'-phosphate
  modified_base 9: mod_base = OTHER; note = 2'-O-methyluridine-3'-phosphate
  modified_base 10: mod_base = OTHER; note = 2'-O-methyluridine-3'-phosphate
  modified_base 11: mod_base = OTHER; note = 2'-O-methylguanosine-3'-phosphate
  modified_base 12: mod_base = OTHER; note = 2'-O-methylguanosine-3'-phosphate
  modified_base 13: mod_base = OTHER; note = 2'-O-methyladenosine-3'-phosphate
  modified_base 14: mod_base = OTHER; note = 2'-deoxy-2'-fluoroadenosine-3'-phosphate
  modified_base 15: mod_base = OTHER; note = 2'-O-methylguanosine-3'-phosphate
  modified_base 16: mod_base = OTHER; note = 2'-deoxy-2'-fluorouridine-3'-phosphate
  modified_base 17: mod_base = OTHER; note = 2'-O-methylguanosine-3'-phosphate
  modified_base 18: mod_base = OTHER; note = 2'-O-methyluridine-3'-phosphate
  modified_base 19: mod_base = OTHER; note = 2'-O-methyluridine-3'-phosphate
  modified_base 20: mod_base = OTHER; note = 2'-O-methylcytidine-3'-phosphate
  modified_base 21: mod_base = OTHER; note = 2'-O-methyladenosine-3'-phosphate
  modified_base 22: mod_base = OTHER; note = 2'-O-methylguanosine-3'-phosphate
  modified_base 23: mod_base = OTHER; note = 2'-O-methyladenosine
tttaatctttggaagtgttcaga

SEQ ID NO: 5106 - RNA, 23 nt, synthetic construct
  source 1..23: mol_type = other RNA
  modified_base 1: mod_base = OTHER; note = 2'-O-methyluridine-3'-phosphate 5'-(E)-Vinylphosphonate
  modified_base 2: mod_base = OTHER; note = 2'-deoxy-2'-fluoroadenosine-3'-phosphate
  modified_base 3: mod_base = OTHER; note = 2'-O-methyluridine-3'-phosphate
  modified_base 4: mod_base = OTHER; note = 2'-O-methyluridine-3'-phosphate
  modified_base 5: mod_base = OTHER; note = 2'-O-methyladenosine-3'-phosphate
  modified_base 6: mod_base = OTHER; note = 2'-deoxy-2'-fluoroadenosine-3'-phosphate
  modified_base 7: mod_base = OTHER; note = 2'-O-methyluridine-3'-phosphate
  modified_base 8: mod_base = OTHER; note = 2'-O-methylcytidine-3'-phosphate
  modified_base 9: mod_base = OTHER; note = 2'-O-methyluridine-3'-phosphate
  modified_base 10: mod_base = OTHER; note = 2'-O-methyluridine-3'-phosphate
  modified_base 11: mod_base = OTHER; note = 2'-O-methyluridine-3'-phosphate
  modified_base 12: mod_base = OTHER; note = 2'-O-methylguanosine-3'-phosphate
  modified_base 13: mod_base = OTHER; note = 2'-O-methylguanosine-3'-phosphate
  modified_base 14: mod_base = OTHER; note = 2'-deoxy-2'-fluoroadenosine-3'-phosphate
  modified_base 15: mod_base = OTHER; note = 2'-O-methyladenosine-3'-phosphate
  modified_base 16: mod_base = OTHER; note = 2'-deoxy-2'-fluoroguanosine-3'-phosphate
  modified_base 17: mod_base = OTHER; note = 2'-O-methyluridine-3'-phosphate
  modified_base 18: mod_base = OTHER; note = 2'-O-methylguanosine-3'-phosphate
  modified_base 19: mod_base = OTHER; note = 2'-O-methyluridine-3'-phosphate
  modified_base 20: mod_base = OTHER; note = 2'-O-methyluridine-3'-phosphate
  modified_base 21: mod_base = OTHER; note = 2'-O-methylcytidine-3'-phosphate
  modified_base 22: mod_base = OTHER; note = 2'-O-methyladenosine-3'-phosphate
  modified_base 23: mod_base = OTHER; note = 2'-O-methylguanosine
tattaatctttggaagtgttcag

SEQ ID NO: 5107 - RNA, 23 nt, synthetic construct
  source 1..23: mol_type = other RNA
  modified_base 1: mod_base = OTHER; note = 2'-O-methyluridine-3'-phosphate 5'-(E)-Vinylphosphonate
  modified_base 2: mod_base = OTHER; note = 2'-deoxy-2'-fluoroguanosine-3'-phosphate
  modified_base 3: mod_base = OTHER; note = 2'-O-methyladenosine-3'-phosphate
  modified_base 4: mod_base = OTHER; note = 2'-O-methyluridine-3'-phosphate
  modified_base 5: mod_base = OTHER; note = 2'-O-methyluridine-3'-phosphate
  modified_base 6: mod_base = OTHER; note = 2'-deoxy-2'-fluoroadenosine-3'-phosphate
  modified_base 7: mod_base = OTHER; note = 2'-O-methyladenosine-3'-phosphate
  modified_base 8: mod_base = OTHER; note = 2'-O-methyluridine-3'-phosphate
  modified_base 9: mod_base = OTHER; note = 2'-O-methylcytidine-3'-phosphate
  modified_base 10: mod_base = OTHER; note = 2'-O-methyluridine-3'-phosphate
  modified_base 11: mod_base = OTHER; note = 2'-O-methyluridine-3'-phosphate
  modified_base 12: mod_base = OTHER; note = 2'-O-methyluridine-3'-phosphate
  modified_base 13: mod_base = OTHER; note = 2'-O-methylguanosine-3'-phosphate
  modified_base 14: mod_base = OTHER; note = 2'-deoxy-2'-fluoroguanosine-3'-phosphate
  modified_base 15: mod_base = OTHER; note = 2'-O-methyladenosine-3'-phosphate
  modified_base 16: mod_base = OTHER; note = 2'-deoxy-2'-fluoroadenosine-3'-phosphate
  modified_base 17: mod_base = OTHER; note = 2'-O-methylguanosine-3'-phosphate
  modified_base 18: mod_base = OTHER; note = 2'-O-methyluridine-3'-phosphate
  modified_base 19: mod_base = OTHER; note = 2'-O-methylguanosine-3'-phosphate
  modified_base 20: mod_base = OTHER; note = 2'-O-methyluridine-3'-phosphate
  modified_base 21: mod_base = OTHER; note = 2'-O-methyluridine-3'-phosphate
  modified_base 22: mod_base = OTHER; note = 2'-O-methylcytidine-3'-phosphate
  modified_base 23: mod_base = OTHER; note = 2'-O-methyladenosine
tgattaatctttggaagtgttca

SEQ ID NO: 5108 - RNA, 23 nt, synthetic construct
  source 1..23: mol_type = other RNA
  modified_base 1: mod_base = OTHER; note = 2'-O-methyluridine-3'-phosphate 5'-(E)-Vinylphosphonate
  modified_base 2: mod_base = OTHER; note = 2'-deoxy-2'-fluorouridine-3'-phosphate
  modified_base 3: mod_base = OTHER; note = 2'-O-methylguanosine-3'-phosphate
  modified_base 4: mod_base = OTHER; note = 2'-O-methyladenosine-3'-phosphate
  modified_base 5: mod_base = OTHER; note = 2'-O-methyluridine-3'-phosphate
  modified_base 6: mod_base = OTHER; note = 2'-deoxy-2'-fluorouridine-3'-phosphate
  modified_base 7: mod_base = OTHER; note = 2'-O-methyladenosine-3'-phosphate
  modified_base 8: mod_base = OTHER; note = 2'-O-methyladenosine-3'-phosphate
  modified_base 9: mod_base = OTHER; note = 2'-O-methyluridine-3'-phosphate
  modified_base 10: mod_base = OTHER; note = 2'-O-methylcytidine-3'-phosphate
  modified_base 11: mod_base = OTHER; note = 2'-O-methyluridine-3'-phosphate
  modified_base 12: mod_base = OTHER; note = 2'-O-methyluridine-3'-phosphate
  modified_base 13: mod_base = OTHER; note = 2'-O-methyluridine-3'-phosphate
  modified_base 14: mod_base = OTHER; note = 2'-deoxy-2'-fluoroguanosine-3'-phosphate
  modified_base 15: mod_base = OTHER; note = 2'-O-methylguanosine-3'-phosphate
  modified_base 16: mod_base = OTHER; note = 2'-deoxy-2'-fluoroadenosine-3'-phosphate
  modified_base 17: mod_base = OTHER; note = 2'-O-methyladenosine-3'-phosphate
  modified_base 18: mod_base = OTHER; note = 2'-O-methylguanosine-3'-phosphate
  modified_base 19: mod_base = OTHER; note = 2'-O-methyluridine-3'-phosphate
  modified_base 20: mod_base = OTHER; note = 2'-O-methylguanosine-3'-phosphate
  modified_base 21: mod_base = OTHER; note = 2'-O-methyluridine-3'-phosphate
  modified_base 22: mod_base = OTHER; note = 2'-O-methyluridine-3'-phosphate
  modified_base 23: mod_base = OTHER; note = 2'-O-methylcytidine
ttgattaatctttggaagtgttc

SEQ ID NO: 5109 - RNA, 23 nt, synthetic construct
  source 1..23: mol_type = other RNA
  modified_base 1: mod_base = OTHER; note = 2'-O-methyluridine-3'-phosphate 5'-(E)-Vinylphosphonate
  modified_base 2: mod_base = OTHER; note = 2'-deoxy-2'-fluorouridine-3'-phosphate
  modified_base 3: mod_base = OTHER; note = 2'-O-methyluridine-3'-phosphate
  modified_base 4: mod_base = OTHER; note = 2'-O-methylguanosine-3'-phosphate
  modified_base 5: mod_base = OTHER; note = 2'-O-methyladenosine-3'-phosphate
  modified_base 6: mod_base = OTHER; note = 2'-deoxy-2'-fluorouridine-3'-phosphate
  modified_base 7: mod_base = OTHER; note = 2'-O-methyluridine-3'-phosphate
  modified_base 8: mod_base = OTHER; note = 2'-O-methyladenosine-3'-phosphate
  modified_base 9: mod_base = OTHER; note = 2'-O-methyladenosine-3'-phosphate
  modified_base 10: mod_base = OTHER; note = 2'-O-methyluridine-3'-phosphate
  modified_base 11: mod_base = OTHER; note = 2'-O-methylcytidine-3'-phosphate
  modified_base 12: mod_base = OTHER; note = 2'-O-methyluridine-3'-phosphate
  modified_base 13: mod_base = OTHER; note = 2'-O-methyluridine-3'-phosphate
  modified_base 14: mod_base = OTHER; note = 2'-deoxy-2'-fluorouridine-3'-phosphate
  modified_base 15: mod_base = OTHER; note = 2'-O-methylguanosine-3'-phosphate
  modified_base 16: mod_base = OTHER; note = 2'-deoxy-2'-fluoroguanosine-3'-phosphate
  modified_base 17: mod_base = OTHER; note = 2'-O-methyladenosine-3'-phosphate
  modified_base 18: mod_base = OTHER; note = 2'-O-methyladenosine-3'-phosphate
  modified_base 19: mod_base = OTHER; note = 2'-O-methylguanosine-3'-phosphate
  modified_base 20: mod_base = OTHER; note = 2'-O-methyluridine-3'-phosphate
  modified_base 21: mod_base = OTHER; note = 2'-O-methylguanosine-3'-phosphate
  modified_base 22: mod_base = OTHER; note = 2'-O-methyluridine-3'-phosphate
  modified_base 23: mod_base = OTHER; note = 2'-O-methyluridine
tttgattaatctttggaagtgtt

SEQ ID NO: 5110 - RNA, 23 nt, synthetic construct
  source 1..23: mol_type = other RNA
  modified_base 1: mod_base = OTHER; note = 2'-O-methyluridine-3'-phosphate 5'-(E)-Vinylphosphonate
  modified_base 2: mod_base = OTHER; note = 2'-deoxy-2'-fluorouridine-3'-phosphate
  modified_base 3: mod_base = OTHER; note = 2'-O-methyluridine-3'-phosphate
  modified_base 4: mod_base = OTHER; note = 2'-O-methyluridine-3'-phosphate
  modified_base 5: mod_base = OTHER; note = 2'-O-methylguanosine-3'-phosphate
  modified_base 6: mod_base = OTHER; note = 2'-deoxy-2'-fluoroadenosine-3'-phosphate
  modified_base 7: mod_base = OTHER; note = 2'-O-methyluridine-3'-phosphate
  modified_base 8: mod_base = OTHER; note = 2'-O-methyluridine-3'-phosphate
  modified_base 9: mod_base = OTHER; note = 2'-O-methyladenosine-3'-phosphate
  modified_base 10: mod_base = OTHER; note = 2'-O-methyladenosine-3'-phosphate
  modified_base 11: mod_base = OTHER; note = 2'-O-methyluridine-3'-phosphate
  modified_base 12: mod_base = OTHER; note = 2'-O-methylcytidine-3'-phosphate
  modified_base 13: mod_base = OTHER; note = 2'-O-methyluridine-3'-phosphate
  modified_base 14: mod_base = OTHER; note = 2'-deoxy-2'-fluorouridine-3'-phosphate
  modified_base 15: mod_base = OTHER; note = 2'-O-methyluridine-3'-phosphate
  modified_base 16: mod_base = OTHER; note = 2'-deoxy-2'-fluoroguanosine-3'-phosphate
  modified_base 17: mod_base = OTHER; note = 2'-O-methylguanosine-3'-phosphate
  modified_base 18: mod_base = OTHER; note = 2'-O-methyladenosine-3'-phosphate
  modified_base 19: mod_base = OTHER; note = 2'-O-methyladenosine-3'-phosphate
  modified_base 20: mod_base = OTHER; note = 2'-O-methylguanosine-3'-phosphate
  modified_base 21: mod_base = OTHER; note = 2'-O-methyluridine-3'-phosphate
  modified_base 22: mod_base = OTHER; note = 2'-O-methylguanosine-3'-phosphate
  modified_base 23: mod_base = OTHER; note = 2'-O-methyluridine
ttttgattaatctttggaagtgt

SEQ ID NO: 5111 - RNA, 23 nt, synthetic construct
  source 1..23: mol_type = other RNA
  modified_base 1: mod_base = OTHER; note = 2'-O-methyluridine-3'-phosphate 5'-(E)-Vinylphosphonate
  modified_base 2: mod_base = OTHER; note = 2'-deoxy-2'-fluoroguanosine-3'-phosphate
  modified_base 3: mod_base = OTHER; note = 2'-O-methyluridine-3'-phosphate
  modified_base 4: mod_base = OTHER; note = 2'-O-methyluridine-3'-phosphate
  modified_base 5: mod_base = OTHER; note = 2'-O-methyluridine-3'-phosphate
  modified_base 6: mod_base = OTHER; note = 2'-deoxy-2'-fluoroguanosine-3'-phosphate
  modified_base 7: mod_base = OTHER; note = 2'-O-methyladenosine-3'-phosphate
  modified_base 8: mod_base = OTHER; note = 2'-O-methyluridine-3'-phosphate
  modified_base 9: mod_base = OTHER; note = 2'-O-methyluridine-3'-phosphate
  modified_base 10: mod_base = OTHER; note = 2'-O-methyladenosine-3'-phosphate
  modified_base 11: mod_base = OTHER; note = 2'-O-methyladenosine-3'-phosphate
  modified_base 12: mod_base = OTHER; note = 2'-O-methyluridine-3'-phosphate
  modified_base 13: mod_base = OTHER; note = 2'-O-methylcytidine-3'-phosphate
  modified_base 14: mod_base = OTHER; note = 2'-deoxy-2'-fluorouridine-3'-phosphate
  modified_base 15: mod_base = OTHER; note = 2'-O-methyluridine-3'-phosphate
  modified_base 16: mod_base = OTHER; note = 2'-deoxy-2'-fluorouridine-3'-phosphate
  modified_base 17: mod_base = OTHER; note = 2'-O-methylguanosine-3'-phosphate
  modified_base 18: mod_base = OTHER; note = 2'-O-methylguanosine-3'-phosphate
  modified_base 19: mod_base = OTHER; note = 2'-O-methyladenosine-3'-phosphate
  modified_base 20: mod_base = OTHER; note = 2'-O-methyladenosine-3'-phosphate
  modified_base 21: mod_base = OTHER; note = 2'-O-methylguanosine-3'-phosphate
  modified_base 22: mod_base = OTHER; note = 2'-O-methyluridine-3'-phosphate
  modified_base 23: mod_base = OTHER; note = 2'-O-methylguanosine
tgtttgattaatctttggaagtg

SEQ ID NO: 5112 - RNA, 23 nt, synthetic construct
  source 1..23: mol_type = other RNA
  modified_base 1: mod_base = OTHER; note = 2'-O-methyluridine-3'-phosphate 5'-(E)-Vinylphosphonate
  modified_base 2: mod_base = OTHER; note = 2'-deoxy-2'-fluorouridine-3'-phosphate
  modified_base 3: mod_base = OTHER; note = 2'-O-methylguanosine-3'-phosphate
  modified_base 4: mod_base = OTHER; note = 2'-O-methyluridine-3'-phosphate
  modified_base 5: mod_base = OTHER; note = 2'-O-methyluridine-3'-phosphate
  modified_base 6: mod_base = OTHER; note = 2'-deoxy-2'-fluorouridine-3'-phosphate
  modified_base 7: mod_base = OTHER; note = 2'-O-methylguanosine-3'-phosphate
  modified_base 8: mod_base = OTHER; note = 2'-O-methyladenosine-3'-phosphate
  modified_base 9: mod_base = OTHER; note = 2'-O-methyluridine-3'-phosphate
  modified_base 10: mod_base = OTHER; note = 2'-O-methyluridine-3'-phosphate
  modified_base 11: mod_base = OTHER; note = 2'-O-methyladenosine-3'-phosphate
  modified_base 12: mod_base = OTHER; note = 2'-O-methyladenosine-3'-phosphate
  modified_base 13: mod_base = OTHER; note = 2'-O-methyluridine-3'-phosphate
  modified_base 14: mod_base = OTHER; note = 2'-deoxy-2'-fluorocytidine-3'-phosphate
  modified_base 15: mod_base = OTHER; note = 2'-O-methyluridine-3'-phosphate
  modified_base 16: mod_base = OTHER; note = 2'-deoxy-2'-fluorouridine-3'-phosphate
  modified_base 17: mod_base = OTHER; note = 2'-O-methyluridine-3'-phosphate
  modified_base 18: mod_base = OTHER; note = 2'-O-methylguanosine-3'-phosphate
  modified_base 19: mod_base = OTHER; note = 2'-O-methylguanosine-3'-phosphate
  modified_base 20: mod_base = OTHER; note = 2'-O-methyladenosine-3'-phosphate
  modified_base 21: mod_base = OTHER; note = 2'-O-methyladenosine-3'-phosphate
  modified_base 22: mod_base = OTHER; note = 2'-O-methylguanosine-3'-phosphate
  modified_base 23: mod_base = OTHER; note = 2'-O-methyluridine
ttgtttgattaatctttggaagt

SEQ ID NO: 5113 - RNA, 23 nt, synthetic construct
  source 1..23: mol_type = other RNA
  modified_base 1: mod_base = OTHER; note = 2'-O-methyluridine-3'-phosphate 5'-(E)-Vinylphosphonate
  modified_base 2: mod_base = OTHER; note = 2'-deoxy-2'-fluoroadenosine-3'-phosphate
  modified_base 3: mod_base = OTHER; note = 2'-O-methyluridine-3'-phosphate
  modified_base 4: mod_base = OTHER; note = 2'-O-methylguanosine-3'-phosphate
  modified_base 5: mod_base = OTHER; note = 2'-O-methyluridine-3'-phosphate
  modified_base 6: mod_base = OTHER; note = 2'-deoxy-2'-fluorouridine-3'-phosphate
  modified_base 7: mod_base = OTHER; note = 2'-O-methyluridine-3'-phosphate
  modified_base 8: mod_base = OTHER; note = 2'-O-methylguanosine-3'-phosphate
  modified_base 9: mod_base = OTHER; note = 2'-O-methyladenosine-3'-phosphate
  modified_base 10: mod_base = OTHER; note = 2'-O-methyluridine-3'-phosphate
  modified_base 11: mod_base = OTHER; note = 2'-O-methyluridine-3'-phosphate
  modified_base 12: mod_base = OTHER; note = 2'-O-methyladenosine-3'-phosphate
  modified_base 13: mod_base = OTHER; note = 2'-O-methyladenosine-3'-phosphate
  modified_base 14: mod_base = OTHER; note = 2'-deoxy-2'-fluorouridine-3'-phosphate
  modified_base 15: mod_base = OTHER; note = 2'-O-methylcytidine-3'-phosphate
  modified_base 16: mod_base = OTHER; note = 2'-deoxy-2'-fluorouridine-3'-phosphate
  modified_base 17: mod_base = OTHER; note = 2'-O-methyluridine-3'-phosphate
  modified_base 18: mod_base = OTHER; note = 2'-O-methyluridine-3'-phosphate
  modified_base 19: mod_base = OTHER; note = 2'-O-methylguanosine-3'-phosphate
  modified_base 20: mod_base = OTHER; note = 2'-O-methylguanosine-3'-phosphate
  modified_base 21: mod_base = OTHER; note = 2'-O-methyladenosine-3'-phosphate
  modified_base 22: mod_base = OTHER; note = 2'-O-methyladenosine-3'-phosphate
  modified_base 23: mod_base = OTHER; note = 2'-O-methylguanosine
tatgtttgattaatctttggaag

SEQ ID NO: 5114 - RNA, 23 nt, synthetic construct
  source 1..23: mol_type = other RNA
  modified_base 1: mod_base = OTHER; note = 2'-O-methyluridine-3'-phosphate 5'-(E)-Vinylphosphonate
  modified_base 2: mod_base = OTHER; note = 2'-deoxy-2'-fluoroguanosine-3'-phosphate
  modified_base 3: mod_base = OTHER; note = 2'-O-methyladenosine-3'-phosphate
  modified_base 4: mod_base = OTHER; note = 2'-O-methylcytidine-3'-phosphate
  modified_base 5: mod_base = OTHER; note = 2'-O-methyladenosine-3'-phosphate
  modified_base 6: mod_base = OTHER; note = 2'-deoxy-2'-fluorouridine-3'-phosphate
  modified_base 7: mod_base = OTHER; note = 2'-O-methyluridine-3'-phosphate
  modified_base 8: mod_base = OTHER; note = 2'-O-methyluridine-3'-phosphate
  modified_base 9: mod_base = OTHER; note = 2'-O-methyluridine-3'-phosphate
  modified_base 10: mod_base = OTHER; note = 2'-O-methylcytidine-3'-phosphate
  modified_base 11: mod_base = OTHER; note = 2'-O-methyladenosine-3'-phosphate
  modified_base 12: mod_base = OTHER; note = 2'-O-methylguanosine-3'-phosphate
  modified_base 13: mod_base = OTHER; note = 2'-O-methyladenosine-3'-phosphate
  modified_base 14: mod_base = OTHER; note = 2'-deoxy-2'-fluorocytidine-3'-phosphate
  modified_base 15: mod_base = OTHER; note = 2'-O-methyladenosine-3'-phosphate
  modified_base 16: mod_base = OTHER; note = 2'-deoxy-2'-fluoroadenosine-3'-phosphate
  modified_base 17: mod_base = OTHER; note = 2'-O-methyluridine-3'-phosphate
  modified_base 18: mod_base = OTHER; note = 2'-O-methylguanosine-3'-phosphate
  modified_base 19: mod_base = OTHER; note = 2'-O-methyladenosine-3'-phosphate
  modified_base 20: mod_base = OTHER; note = 2'-O-methyladenosine-3'-phosphate
  modified_base 21: mod_base = OTHER; note = 2'-O-methyluridine-3'-phosphate
  modified_base 22: mod_base = OTHER; note = 2'-O-methyladenosine-3'-phosphate
  modified_base 23: mod_base = OTHER; note = 2'-O-methyluridine
tgacattttcagacaatgaatat

SEQ ID NO: 5115 - RNA, 23 nt, synthetic construct
  source 1..23: mol_type = other RNA
  modified_base 1: mod_base = OTHER; note = 2'-O-methyluridine-3'-phosphate 5'-(E)-Vinylphosphonate
  modified_base 2: mod_base = OTHER; note = 2'-deoxy-2'-fluoroadenosine-3'-phosphate
  modified_base 3: mod_base = OTHER; note = 2'-O-methyladenosine-3'-phosphate
  modified_base 4: mod_base = OTHER; note = 2'-O-methyladenosine-3'-phosphate
  modified_base 5: mod_base = OTHER; note = 2'-O-methylguanosine-3'-phosphate
  modified_base 6: mod_base = OTHER; note = 2'-deoxy-2'-fluoroadenosine-3'-phosphate
  modified_base 7: mod_base = OTHER; note = 2'-O-methylcytidine-3'-phosphate
  modified_base 8: mod_base = OTHER; note = 2'-O-methyladenosine-3'-phosphate
  modified_base 9: mod_base = OTHER; note = 2'-O-methyluridine-3'-phosphate
  modified_base 10: mod_base = OTHER; note = 2'-O-methyluridine-3'-phosphate
  modified_base 11: mod_base = OTHER; note = 2'-O-methyluridine-3'-phosphate
  modified_base 12: mod_base = OTHER; note = 2'-O-methyluridine-3'-phosphate
  modified_base 13: mod_base = OTHER; note = 2'-O-methylcytidine-3'-phosphate
  modified_base 14: mod_base = OTHER; note = 2'-deoxy-2'-fluoroadenosine-3'-phosphate
  modified_base 15: mod_base = OTHER; note = 2'-O-methylguanosine-3'-phosphate
  modified_base 16: mod_base = OTHER; note = 2'-deoxy-2'-fluoroadenosine-3'-phosphate
  modified_base 17: mod_base = OTHER; note = 2'-O-methylcytidine-3'-phosphate
  modified_base 18: mod_base = OTHER; note = 2'-O-methyladenosine-3'-phosphate
  modified_base 19: mod_base = OTHER; note = 2'-O-methyladenosine-3'-phosphate
  modified_base 20: mod_base = OTHER; note = 2'-O-methyluridine-3'-phosphate
  modified_base 21: mod_base = OTHER; note = 2'-O-methylguanosine-3'-phosphate
  modified_base 22: mod_base = OTHER; note = 2'-O-methyladenosine-3'-phosphate
  modified_base 23: mod_base = OTHER; note = 2'-O-methyladenosine
taaagacattttcagacaatgaa

SEQ ID NO: 5116 - RNA, 23 nt, synthetic construct
  source 1..23: mol_type = other RNA
  modified_base 1: mod_base = OTHER; note = 2'-O-methyluridine-3'-phosphate 5'-(E)-Vinylphosphonate
  modified_base 2: mod_base = OTHER; note = 2'-deoxy-2'-fluorouridine-3'-phosphate
  modified_base 3: mod_base = OTHER; note = 2'-O-methyladenosine-3'-phosphate
  modified_base 4: mod_base = OTHER; note = 2'-O-methyladenosine-3'-phosphate
  modified_base 5: mod_base = OTHER; note = 2'-O-methyladenosine-3'-phosphate
  modified_base 6: mod_base = OTHER; note = 2'-deoxy-2'-fluoroguanosine-3'-phosphate
  modified_base 7: mod_base = OTHER; note = 2'-O-methyladenosine-3'-phosphate
  modified_base 8: mod_base = OTHER; note = 2'-O-methylcytidine-3'-phosphate
  modified_base 9: mod_base = OTHER; note = 2'-O-methyladenosine-3'-phosphate
  modified_base 10: mod_base = OTHER; note = 2'-O-methyluridine-3'-phosphate
  modified_base 11: mod_base = OTHER; note = 2'-O-methyluridine-3'-phosphate
  modified_base 12: mod_base = OTHER; note = 2'-O-methyluridine-3'-phosphate
  modified_base 13: mod_base = OTHER; note = 2'-O-methyluridine-3'-phosphate
  modified_base 14: mod_base = OTHER; note = 2'-deoxy-2'-fluorocytidine-3'-phosphate
  modified_base 15: mod_base = OTHER; note = 2'-O-methyladenosine-3'-phosphate
  modified_base 16: mod_base = OTHER; note = 2'-deoxy-2'-fluoroguanosine-3'-phosphate
  modified_base 17: mod_base = OTHER; note = 2'-O-methyladenosine-3'-phosphate
  modified_base 18: mod_base = OTHER; note = 2'-O-methylcytidine-3'-phosphate
  modified_base 19: mod_base = OTHER; note = 2'-O-methyladenosine-3'-phosphate
  modified_base 20: mod_base = OTHER; note = 2'-O-methyladenosine-3'-phosphate
  modified_base 21: mod_base = OTHER; note = 2'-O-methyluridine-3'-phosphate
  modified_base 22: mod_base = OTHER; note = 2'-O-methylguanosine-3'-phosphate
  modified_base 23: mod_base = OTHER; note = 2'-O-methyladenosine
ttaaagacattttcagacaatga

SEQ ID NO: 5117 - RNA, 23 nt, synthetic construct
  source 1..23: mol_type = other RNA
  modified_base 1: mod_base = OTHER; note = 2'-O-methyluridine-3'-phosphate 5'-(E)-Vinylphosphonate
  modified_base 2: mod_base = OTHER; note = 2'-deoxy-2'-fluorouridine-3'-phosphate
  modified_base 3: mod_base = OTHER; note = 2'-O-methyluridine-3'-phosphate
  modified_base 4: mod_base = OTHER; note = 2'-O-methyladenosine-3'-phosphate
  modified_base 5: mod_base = OTHER; note = 2'-O-methyladenosine-3'-phosphate
  modified_base 6: mod_base = OTHER; note = 2'-deoxy-2'-fluoroadenosine-3'-phosphate
  modified_base 7: mod_base = OTHER; note = 2'-O-methylguanosine-3'-phosphate
  modified_base 8: mod_base = OTHER; note = 2'-O-methyladenosine-3'-phosphate
  modified_base 9: mod_base = OTHER; note = 2'-O-methylcytidine-3'-phosphate
  modified_base 10: mod_base = OTHER; note = 2'-O-methyladenosine-3'-phosphate
  modified_base 11: mod_base = OTHER; note = 2'-O-methyluridine-3'-phosphate
  modified_base 12: mod_base = OTHER; note = 2'-O-methyluridine-3'-phosphate
  modified_base 13: mod_base = OTHER; note = 2'-O-methyluridine-3'-phosphate
  modified_base 14: mod_base = OTHER; note = 2'-deoxy-2'-fluorouridine-3'-phosphate
  modified_base 15: mod_base = OTHER; note = 2'-O-methylcytidine-3'-phosphate
  modified_base 16: mod_base = OTHER; note = 2'-deoxy-2'-fluoroadenosine-3'-phosphate
  modified_base 17: mod_base = OTHER; note = 2'-O-methylguanosine-3'-phosphate
  modified_base 18: mod_base = OTHER; note = 2'-O-methyladenosine-3'-phosphate
  modified_base 19: mod_base = OTHER; note = 2'-O-methylcytidine-3'-phosphate
  modified_base 20: mod_base = OTHER; note = 2'-O-methyladenosine-3'-phosphate
  modified_base 21: mod_base = OTHER; note = 2'-O-methyladenosine-3'-phosphate
  modified_base 22: mod_base = OTHER; note = 2'-O-methyluridine-3'-phosphate
  modified_base 23: mod_base = OTHER; note = 2'-O-methylguanosine
tttaaagacattttcagacaatg

SEQ ID NO: 5118 - RNA, 23 nt, synthetic construct
  source 1..23: mol_type = other RNA
  modified_base 1: mod_base = OTHER; note = 2'-O-methyluridine-3'-phosphate 5'-(E)-Vinylphosphonate
  modified_base 2: mod_base = OTHER; note = 2'-deoxy-2'-fluorouridine-3'-phosphate
  modified_base 3: mod_base = OTHER; note = 2'-O-methylcytidine-3'-phosphate
  modified_base 4: mod_base = OTHER; note = 2'-O-methyluridine-3'-phosphate
  modified_base 5: mod_base = OTHER; note = 2'-O-methyluridine-3'-phosphate
  modified_base 6: mod_base = OTHER; note = 2'-deoxy-2'-fluoroadenosine-3'-phosphate
  modified_base 7: mod_base = OTHER; note = 2'-O-methyladenosine-3'-phosphate
  modified_base 8: mod_base = OTHER; note = 2'-O-methyladenosine-3'-phosphate
  modified_base 9: mod_base = OTHER; note = 2'-O-methylguanosine-3'-phosphate
  modified_base 10: mod_base = OTHER; note = 2'-O-methyladenosine-3'-phosphate
  modified_base 11: mod_base = OTHER; note = 2'-O-methylcytidine-3'-phosphate
  modified_base 12: mod_base = OTHER; note = 2'-O-methyladenosine-3'-phosphate
  modified_base 13: mod_base = OTHER; note = 2'-O-methyluridine-3'-phosphate
  modified_base 14: mod_base = OTHER; note = 2'-deoxy-2'-fluorouridine-3'-phosphate
  modified_base 15: mod_base = OTHER; note = 2'-O-methyluridine-3'-phosphate
  modified_base 16: mod_base = OTHER; note = 2'-deoxy-2'-fluorouridine-3'-phosphate
  modified_base 17: mod_base = OTHER; note = 2'-O-methylcytidine-3'-phosphate
  modified_base 18: mod_base = OTHER; note = 2'-O-methyladenosine-3'-phosphate
  modified_base 19: mod_base = OTHER; note = 2'-O-methylguanosine-3'-phosphate
  modified_base 20: mod_base = OTHER; note = 2'-O-methyladenosine-3'-phosphate
  modified_base 21: mod_base = OTHER; note = 2'-O-methylcytidine-3'-phosphate
  modified_base 22: mod_base = OTHER; note = 2'-O-methyladenosine-3'-phosphate
  modified_base 23: mod_base = OTHER; note = 2'-O-methyladenosine
ttcttaaagacattttcagacaa

SEQ ID NO: 5119 - RNA, 23 nt, synthetic construct
  source 1..23: mol_type = other RNA
  modified_base 1: mod_base = OTHER; note = 2'-O-methyluridine-3'-phosphate 5'-(E)-Vinylphosphonate
  modified_base 2: mod_base = OTHER; note = 2'-deoxy-2'-fluorouridine-3'-phosphate
  modified_base 3: mod_base = OTHER; note = 2'-O-methyladenosine-3'-phosphate
  modified_base 4: mod_base = OTHER; note = 2'-O-methyluridine-3'-phosphate
  modified_base 5: mod_base = OTHER; note = 2'-O-methylcytidine-3'-phosphate
  modified_base 6: mod_base = OTHER; note = 2'-deoxy-2'-fluorouridine-3'-phosphate
  modified_base 7: mod_base = OTHER; note = 2'-O-methyluridine-3'-phosphate
  modified_base 8: mod_base = OTHER; note = 2'-O-methyladenosine-3'-phosphate
  modified_base 9: mod_base = OTHER; note = 2'-O-methyladenosine-3'-phosphate
  modified_base 10: mod_base = OTHER; note = 2'-O-methyladenosine-3'-phosphate
  modified_base 11: mod_base = OTHER; note = 2'-O-methylguanosine-3'-phosphate
  modified_base 12: mod_base = OTHER; note = 2'-O-methyladenosine-3'-phosphate
  modified_base 13: mod_base = OTHER; note = 2'-O-methylcytidine-3'-phosphate
  modified_base 14: mod_base = OTHER; note = 2'-deoxy-2'-fluoroadenosine-3'-phosphate
  modified_base 15: mod_base = OTHER; note = 2'-O-methyluridine-3'-phosphate
  modified_base 16: mod_base = OTHER; note = 2'-deoxy-2'-fluorouridine-3'-phosphate
  modified_base 17: mod_base = OTHER; note = 2'-O-methyluridine-3'-phosphate
  modified_base 18: mod_base = OTHER; note = 2'-O-methyluridine-3'-phosphate
  modified_base 19: mod_base = OTHER; note = 2'-O-methylcytidine-3'-phosphate
  modified_base 20: mod_base = OTHER; note = 2'-O-methyladenosine-3'-phosphate
  modified_base 21: mod_base = OTHER; note = 2'-O-methylguanosine-3'-phosphate
  modified_base 22: mod_base = OTHER; note = 2'-O-methyladenosine-3'-phosphate
  modified_base 23: mod_base = OTHER; note = 2'-O-methylcytidine
ttatcttaaagacattttcagac

SEQ ID NO: 5120 - RNA, 23 nt, synthetic construct
  source 1..23: mol_type = other RNA
  modified_base 1: mod_base = OTHER; note = 2'-O-methyluridine-3'-phosphate 5'-(E)-Vinylphosphonate
  modified_base 2: mod_base = OTHER; note = 2'-deoxy-2'-fluorouridine-3'-phosphate
  modified_base 3: mod_base = OTHER; note = 2'-O-methyladenosine-3'-phosphate
  modified_base 4: mod_base = OTHER; note = 2'-O-methylcytidine-3'-phosphate
  modified_base 5: mod_base = OTHER; note = 2'-O-methyladenosine-3'-phosphate
  modified_base 6: mod_base = OTHER; note = 2'-deoxy-2'-fluoroadenosine-3'-phosphate
  modified_base 7: mod_base = OTHER; note = 2'-O-methyladenosine-3'-phosphate
  modified_base 8: mod_base = OTHER; note = 2'-O-methylguanosine-3'-phosphate
  modified_base 9: mod_base = OTHER; note = 2'-O-methylguanosine-3'-phosphate
  modified_base 10: mod_base = OTHER; note = 2'-O-methyladenosine-3'-phosphate
  modified_base 11: mod_base = OTHER; note = 2'-O-methyladenosine-3'-phosphate
  modified_base 12: mod_base = OTHER; note = 2'-O-methyladenosine-3'-phosphate
  modified_base 13: mod_base = OTHER; note = 2'-O-methyluridine-3'-phosphate
  modified_base 14: mod_base = OTHER; note = 2'-deoxy-2'-fluoroadenosine-3'-phosphate
  modified_base 15: mod_base = OTHER; note = 2'-O-methylguanosine-3'-phosphate
  modified_base 16: mod_base = OTHER; note = 2'-deoxy-2'-fluoroguanosine-3'-phosphate
  modified_base 17: mod_base = OTHER; note = 2'-O-methylguanosine-3'-phosphate
  modified_base 18: mod_base = OTHER; note = 2'-O-methyladenosine-3'-phosphate
  modified_base 19: mod_base = OTHER; note = 2'-O-methylcytidine-3'-phosphate
  modified_base 20: mod_base = OTHER; note = 2'-O-methylcytidine-3'-phosphate
  modified_base 21: mod_base = OTHER; note = 2'-O-methyluridine-3'-phosphate
  modified_base 22: mod_base = OTHER; note = 2'-O-methylcytidine-3'-phosphate
  modified_base 23: mod_base = OTHER; note = 2'-O-methyluridine
ttacaaaggaaatagggacctct

SEQ ID NO: 5121 - RNA, 23 nt, synthetic construct
  source 1..23: mol_type = other RNA
  modified_base 1: mod_base = OTHER; note = 2'-O-methyluridine-3'-phosphate 5'-(E)-Vinylphosphonate
  modified_base 2: mod_base = OTHER; note = 2'-deoxy-2'-fluoroguanosine-3'-phosphate
  modified_base 3: mod_base = OTHER; note = 2'-O-methyluridine-3'-phosphate
  modified_base 4: mod_base = OTHER; note = 2'-O-methyladenosine-3'-phosphate
  modified_base 5: mod_base = OTHER; note = 2'-O-methylcytidine-3'-phosphate
  modified_base 6: mod_base = OTHER; note = 2'-deoxy-2'-fluoroadenosine-3'-phosphate
  modified_base 7: mod_base = OTHER; note = 2'-O-methyladenosine-3'-phosphate
  modified_base 8: mod_base = OTHER; note = 2'-O-methyladenosine-3'-phosphate
  modified_base 9: mod_base = OTHER; note = 2'-O-methylguanosine-3'-phosphate
  modified_base 10: mod_base = OTHER; note = 2'-O-methylguanosine-3'-phosphate
  modified_base 11: mod_base = OTHER; note = 2'-O-methyladenosine-3'-phosphate
  modified_base 12: mod_base = OTHER; note = 2'-O-methyladenosine-3'-phosphate
  modified_base 13: mod_base = OTHER; note = 2'-O-methyladenosine-3'-phosphate
  modified_base 14: mod_base = OTHER; note = 2'-deoxy-2'-fluorouridine-3'-phosphate
  modified_base 15: mod_base = OTHER; note = 2'-O-methyladenosine-3'-phosphate
  modified_base 16: mod_base = OTHER; note = 2'-deoxy-2'-fluoroguanosine-3'-phosphate
  modified_base 17: mod_base = OTHER; note = 2'-O-methylguanosine-3'-phosphate
  modified_base 18: mod_base = OTHER; note = 2'-O-methylguanosine-3'-phosphate
  modified_base 19: mod_base = OTHER; note = 2'-O-methyladenosine-3'-phosphate
  modified_base 20: mod_base = OTHER; note = 2'-O-methylcytidine-3'-phosphate
  modified_base 21: mod_base = OTHER; note = 2'-O-methylcytidine-3'-phosphate
  modified_base 22: mod_base = OTHER; note = 2'-O-methyluridine-3'-phosphate
  modified_base 23: mod_base = OTHER; note = 2'-O-methylcytidine
tgtacaaaggaaatagggacctc

SEQ ID NO: 5122 - RNA, 23 nt, synthetic construct
  source 1..23: mol_type = other RNA
  modified_base 1: mod_base = OTHER; note = 2'-O-methyluridine-3'-phosphate 5'-(E)-Vinylphosphonate
  modified_base 2: mod_base = OTHER; note = 2'-deoxy-2'-fluorouridine-3'-phosphate
  modified_base 3: mod_base = OTHER; note = 2'-O-methylguanosine-3'-phosphate
  modified_base 4: mod_base = OTHER; note = 2'-O-methyluridine-3'-phosphate
  modified_base 5: mod_base = OTHER; note = 2'-O-methyladenosine-3'-phosphate
  modified_base 6: mod_base = OTHER; note = 2'-deoxy-2'-fluorocytidine-3'-phosphate
  modified_base 7: mod_base = OTHER; note = 2'-O-methyladenosine-3'-phosphate
  modified_base 8: mod_base = OTHER; note = 2'-O-methyladenosine-3'-phosphate
  modified_base 9: mod_base = OTHER; note = 2'-O-methyladenosine-3'-phosphate
  modified_base 10: mod_base = OTHER; note = 2'-O-methylguanosine-3'-phosphate
  modified_base 11: mod_base = OTHER; note = 2'-O-methylguanosine-3'-phosphate
  modified_base 12: mod_base = OTHER; note = 2'-O-methyladenosine-3'-phosphate
  modified_base 13: mod_base = OTHER; note = 2'-O-methyladenosine-3'-phosphate
  modified_base 14: mod_base = OTHER; note = 2'-deoxy-2'-fluoroadenosine-3'-phosphate
  modified_base 15: mod_base = OTHER; note = 2'-O-methyluridine-3'-phosphate
  modified_base 16: mod_base = OTHER; note = 2'-deoxy-2'-fluoroadenosine-3'-phosphate
  modified_base 17: mod_base = OTHER; note = 2'-O-methylguanosine-3'-phosphate
  modified_base 18: mod_base = OTHER; note = 2'-O-methylguanosine-3'-phosphate
  modified_base 19: mod_base = OTHER; note = 2'-O-methylguanosine-3'-phosphate
  modified_base 20: mod_base = OTHER; note = 2'-O-methyladenosine-3'-phosphate
  modified_base 21: mod_base = OTHER; note = 2'-O-methylcytidine-3'-phosphate
  modified_base 22: mod_base = OTHER; note = 2'-O-methylcytidine-3'-phosphate
  modified_base 23: mod_base = OTHER; note = 2'-O-methyluridine
ttgtacaaaggaaatagggacct

SEQ ID NO: 5123 - RNA, 23 nt, synthetic construct
  source 1..23: mol_type = other RNA
  modified_base 1: mod_base = OTHER; note = 2'-O-methyluridine-3'-phosphate 5'-(E)-Vinylphosphonate
  modified_base 2: mod_base = OTHER; note = 2'-deoxy-2'-fluoroadenosine-3'-phosphate
  modified_base 3: mod_base = OTHER; note = 2'-O-methyluridine-3'-phosphate
  modified_base 4: mod_base = OTHER; note = 2'-O-methylguanosine-3'-phosphate
  modified_base 5: mod_base = OTHER; note = 2'-O-methyluridine-3'-phosphate
  modified_base 6: mod_base = OTHER; note = 2'-deoxy-2'-fluoroadenosine-3'-phosphate
  modified_base 7: mod_base = OTHER; note = 2'-O-methylcytidine-3'-phosphate
  modified_base 8: mod_base = OTHER; note = 2'-O-methyladenosine-3'-phosphate
  modified_base 9: mod_base = OTHER; note = 2'-O-methyladenosine-3'-phosphate
  modified_base 10: mod_base = OTHER; note = 2'-O-methyladenosine-3'-phosphate
  modified_base 11: mod_base = OTHER; note = 2'-O-methylguanosine-3'-phosphate
  modified_base 12: mod_base = OTHER; note = 2'-O-methylguanosine-3'-phosphate
  modified_base 13: mod_base = OTHER; note = 2'-O-methyladenosine-3'-phosphate
  modified_base 14: mod_base = OTHER; note = 2'-deoxy-2'-fluoroadenosine-3'-phosphate
  modified_base 15: mod_base = OTHER; note = 2'-O-methyladenosine-3'-phosphate
  modified_base 16: mod_base = OTHER; note = 2'-deoxy-2'-fluorouridine-3'-phosphate
  modified_base 17: mod_base = OTHER; note = 2'-O-methyladenosine-3'-phosphate
  modified_base 18: mod_base = OTHER; note = 2'-O-methylguanosine-3'-phosphate
  modified_base 19: mod_base = OTHER; note = 2'-O-methylguanosine-3'-phosphate
  modified_base 20: mod_base = OTHER; note = 2'-O-methylguanosine-3'-phosphate
  modified_base 21: mod_base = OTHER; note = 2'-O-methyladenosine-3'-phosphate
  modified_base 22: mod_base = OTHER; note = 2'-O-methylcytidine-3'-phosphate
  modified_base 23: mod_base = OTHER; note = 2'-O-methylcytidine
tatgtacaaaggaaatagggacc

SEQ ID NO: 5124 - RNA, 23 nt, synthetic construct
  source 1..23: mol_type = other RNA
  modified_base 1: mod_base = OTHER; note = 2'-O-methyluridine-3'-phosphate 5'-(E)-Vinylphosphonate
  modified_base 2: mod_base = OTHER; note = 2'-deoxy-2'-fluorouridine-3'-phosphate
  modified_base 3: mod_base = OTHER; note = 2'-O-methyladenosine-3'-phosphate
  modified_base 4: mod_base = OTHER; note = 2'-O-methyluridine-3'-phosphate
  modified_base 5: mod_base = OTHER; note = 2'-O-methylguanosine-3'-phosphate
  modified_base 6: mod_base = OTHER; note = 2'-deoxy-2'-fluorouridine-3'-phosphate
  modified_base 7: mod_base = OTHER; note = 2'-O-methyladenosine-3'-phosphate
  modified_base 8: mod_base = OTHER; note = 2'-O-methylcytidine-3'-phosphate
  modified_base 9: mod_base = OTHER; note = 2'-O-methyladenosine-3'-phosphate
  modified_base 10: mod_base = OTHER; note = 2'-O-methyladenosine-3'-phosphate
  modified_base 11: mod_base = OTHER; note = 2'-O-methyladenosine-3'-phosphate
  modified_base 12: mod_base = OTHER; note = 2'-O-methylguanosine-3'-phosphate
  modified_base 13: mod_base = OTHER; note = 2'-O-methylguanosine-3'-phosphate
  modified_base 14: mod_base = OTHER; note = 2'-deoxy-2'-fluoroadenosine-3'-phosphate
  modified_base 15: mod_base = OTHER; note = 2'-O-methyladenosine-3'-phosphate
  modified_base 16: mod_base = OTHER; note = 2'-deoxy-2'-fluoroadenosine-3'-phosphate
  modified_base 17: mod_base = OTHER; note = 2'-O-methyluridine-3'-phosphate
  modified_base 18: mod_base = OTHER; note = 2'-O-methyladenosine-3'-phosphate
  modified_base 19: mod_base = OTHER; note = 2'-O-methylguanosine-3'-phosphate
  modified_base 20: mod_base = OTHER; note = 2'-O-methylguanosine-3'-phosphate
  modified_base 21: mod_base = OTHER; note = 2'-O-methylguanosine-3'-phosphate
  modified_base 22: mod_base = OTHER; note = 2'-O-methyladenosine-3'-phosphate
  modified_base 23: mod_base = OTHER; note = 2'-O-methylcytidine
ttatgtacaaaggaaatagggac

SEQ ID NO: 5125 - RNA, 23 nt, synthetic construct
  source 1..23: mol_type = other RNA
  modified_base 1: mod_base = OTHER; note = 2'-O-methyluridine-3'-phosphate 5'-(E)-Vinylphosphonate
  modified_base 2: mod_base = OTHER; note = 2'-deoxy-2'-fluoroguanosine-3'-phosphate
  modified_base 3: mod_base = OTHER; note = 2'-O-methyluridine-3'-phosphate
  modified_base 4: mod_base = OTHER; note = 2'-O-methyladenosine-3'-phosphate
  modified_base 5: mod_base = OTHER; note = 2'-O-methyluridine-3'-phosphate
  modified_base 6: mod_base = OTHER; note = 2'-deoxy-2'-fluoroguanosine-3'-phosphate
  modified_base 7: mod_base = OTHER; note = 2'-O-methyluridine-3'-phosphate
  modified_base 8: mod_base = OTHER; note = 2'-O-methyladenosine-3'-phosphate
  modified_base 9: mod_base = OTHER; note = 2'-O-methylcytidine-3'-phosphate
  modified_base 10: mod_base = OTHER; note = 2'-O-methyladenosine-3'-phosphate
  modified_base 11: mod_base = OTHER; note = 2'-O-methyladenosine-3'-phosphate
  modified_base 12: mod_base = OTHER; note = 2'-O-methyladenosine-3'-phosphate
  modified_base 13: mod_base = OTHER; note = 2'-O-methylguanosine-3'-phosphate
  modified_base 14: mod_base = OTHER; note = 2'-deoxy-2'-fluoroguanosine-3'-phosphate
  modified_base 15: mod_base = OTHER; note = 2'-O-methyladenosine-3'-phosphate
  modified_base 16: mod_base = OTHER; note = 2'-deoxy-2'-fluoroadenosine-3'-phosphate
  modified_base 17: mod_base = OTHER; note = 2'-O-methyladenosine-3'-phosphate
  modified_base 18: mod_base = OTHER; note = 2'-O-methyluridine-3'-phosphate
  modified_base 19: mod_base = OTHER; note = 2'-O-methyladenosine-3'-phosphate
  modified_base 20: mod_base = OTHER; note = 2'-O-methylguanosine-3'-phosphate
  modified_base 21: mod_base = OTHER; note = 2'-O-methylguanosine-3'-phosphate
  modified_base 22: mod_base = OTHER; note = 2'-O-methylguanosine-3'-phosphate
  modified_base 23: mod_base = OTHER; note = 2'-O-methyladenosine
tgtatgtacaaaggaaataggga

SEQ ID NO: 5126 - RNA, 23 nt, synthetic construct
  source 1..23: mol_type = other RNA
  modified_base 1: mod_base = OTHER; note = 2'-O-methyluridine-3'-phosphate 5'-(E)-Vinylphosphonate
  modified_base 2: mod_base = OTHER; note = 2'-deoxy-2'-fluorouridine-3'-phosphate
  modified_base 3: mod_base = OTHER; note = 2'-O-methylguanosine-3'-phosphate
  modified_base 4: mod_base = OTHER; note = 2'-O-methyluridine-3'-phosphate
  modified_base 5: mod_base = OTHER; note = 2'-O-methyladenosine-3'-phosphate
  modified_base 6: mod_base = OTHER; note = 2'-deoxy-2'-fluorouridine-3'-phosphate
  modified_base 7: mod_base = OTHER; note = 2'-O-methylguanosine-3'-phosphate
  modified_base 8: mod_base = OTHER; note = 2'-O-methyluridine-3'-phosphate
  modified_base 9: mod_base = OTHER; note = 2'-O-methyladenosine-3'-phosphate
  modified_base 10: mod_base = OTHER; note = 2'-O-methylcytidine-3'-phosphate
  modified_base 11: mod_base = OTHER; note = 2'-O-methyladenosine-3'-phosphate
  modified_base 12: mod_base = OTHER; note = 2'-O-methyladenosine-3'-phosphate
  modified_base 13: mod_base = OTHER; note = 2'-O-methyladenosine-3'-phosphate
  modified_base 14: mod_base = OTHER; note = 2'-deoxy-2'-fluoroguanosine-3'-phosphate
  modified_base 15: mod_base = OTHER; note = 2'-O-methylguanosine-3'-phosphate
  modified_base 16: mod_base = OTHER; note = 2'-deoxy-2'-fluoroadenosine-3'-phosphate
  modified_base 17: mod_base = OTHER; note = 2'-O-methyladenosine-3'-phosphate
  modified_base 18: mod_base = OTHER; note = 2'-O-methyladenosine-3'-phosphate
  modified_base 19: mod_base = OTHER; note = 2'-O-methyluridine-3'-phosphate
  modified_base 20: mod_base = OTHER; note = 2'-O-methyladenosine-3'-phosphate
  modified_base 21: mod_base = OTHER; note = 2'-O-methylguanosine-3'-phosphate
  modified_base 22: mod_base = OTHER; note = 2'-O-methylguanosine-3'-phosphate
  modified_base 23: mod_base = OTHER; note = 2'-O-methylguanosine
ttgtatgtacaaaggaaataggg

SEQ ID NO: 5127 - RNA, 23 nt, synthetic construct
  source 1..23: mol_type = other RNA
  modified_base 1: mod_base = OTHER; note = 2'-O-methyluridine-3'-phosphate 5'-(E)-Vinylphosphonate
  modified_base 2: mod_base = OTHER; note = 2'-deoxy-2'-fluoroguanosine-3'-phosphate
  modified_base 3: mod_base = OTHER; note = 2'-O-methyluridine-3'-phosphate
  modified_base 4: mod_base = OTHER; note = 2'-O-methylguanosine-3'-phosphate
  modified_base 5: mod_base = OTHER; note = 2'-O-methyluridine-3'-phosphate
  modified_base 6: mod_base = OTHER; note = 2'-deoxy-2'-fluoroadenosine-3'-phosphate
  modified_base 7: mod_base = OTHER; note = 2'-O-methyluridine-3'-phosphate
  modified_base 8: mod_base = OTHER; note = 2'-O-methylguanosine-3'-phosphate
  modified_base 9: mod_base = OTHER; note = 2'-O-methyluridine-3'-phosphate
  modified_base 10: mod_base = OTHER; note = 2'-O-methyladenosine-3'-phosphate
  modified_base 11: mod_base = OTHER; note = 2'-O-methylcytidine-3'-phosphate
  modified_base 12: mod_base = OTHER; note = 2'-O-methyladenosine-3'-phosphate
  modified_base 13: mod_base = OTHER; note = 2'-O-methyladenosine-3'-phosphate
  modified_base 14: mod_base = OTHER; note = 2'-deoxy-2'-fluoroadenosine-3'-phosphate
  modified_base 15: mod_base = OTHER; note = 2'-O-methylguanosine-3'-phosphate
  modified_base 16: mod_base = OTHER; note = 2'-deoxy-2'-fluoroguanosine-3'-phosphate
  modified_base 17: mod_base = OTHER; note = 2'-O-methyladenosine-3'-phosphate
  modified_base 18: mod_base = OTHER; note = 2'-O-methyladenosine-3'-phosphate
  modified_base 19: mod_base = OTHER; note = 2'-O-methyladenosine-3'-phosphate
  modified_base 20: mod_base = OTHER; note = 2'-O-methyluridine-3'-phosphate
  modified_base 21: mod_base = OTHER; note = 2'-O-methyladenosine-3'-phosphate
  modified_base 22: mod_base = OTHER; note = 2'-O-methylguanosine-3'-phosphate
  modified_base 23: mod_base = OTHER; note = 2'-O-methylguanosine
tgtgtatgtacaaaggaaatagg

SEQ ID NO: 5128 - RNA, 23 nt, synthetic construct
  source 1..23: mol_type = other RNA
  modified_base 1: mod_base = OTHER; note = 2'-O-methyluridine-3'-phosphate 5'-(E)-Vinylphosphonate
  modified_base 2: mod_base = OTHER; note = 2'-deoxy-2'-fluorocytidine-3'-phosphate
  modified_base 3: mod_base = OTHER; note = 2'-O-methyluridine-3'-phosphate
  modified_base 4: mod_base = OTHER; note = 2'-O-methylguanosine-3'-phosphate
  modified_base 5: mod_base = OTHER; note = 2'-O-methyluridine-3'-phosphate
  modified_base 6: mod_base = OTHER; note = 2'-deoxy-2'-fluorocytidine-3'-phosphate
  modified_base 7: mod_base = OTHER; note = 2'-O-methyluridine-3'-phosphate
  modified_base 8: mod_base = OTHER; note = 2'-O-methyluridine-3'-phosphate
  modified_base 9: mod_base = OTHER; note = 2'-O-methyluridine-3'-phosphate
  modified_base 10: mod_base = OTHER; note = 2'-O-methyluridine-3'-phosphate
  modified_base 11: mod_base = OTHER; note = 2'-O-methylcytidine-3'-phosphate
  modified_base 12: mod_base = OTHER; note = 2'-O-methyluridine-3'-phosphate
  modified_base 13: mod_base = OTHER; note = 2'-O-methyluridine-3'-phosphate
  modified_base 14: mod_base = OTHER; note = 2'-deoxy-2'-fluorouridine-3'-phosphate
  modified_base 15: mod_base = OTHER; note = 2'-O-methylcytidine-3'-phosphate
  modified_base 16: mod_base = OTHER; note = 2'-deoxy-2'-fluorouridine-3'-phosphate
  modified_base 17: mod_base = OTHER; note = 2'-O-methyladenosine-3'-phosphate
  modified_base 18: mod_base = OTHER; note = 2'-O-methyladenosine-3'-phosphate
  modified_base 19: mod_base = OTHER; note = 2'-O-methylguanosine-3'-phosphate
  modified_base 20: mod_base = OTHER; note = 2'-O-methyluridine-3'-phosphate
  modified_base 21: mod_base = OTHER; note = 2'-O-methylguanosine-3'-phosphate
  modified_base 22: mod_base = OTHER; note = 2'-O-methyluridine-3'-phosphate
  modified_base 23: mod_base = OTHER; note = 2'-O-methylguanosine
tctgtcttttctttctaagtgtg

SEQ ID NO: 5129 - RNA, 23 nt, synthetic construct
  source 1..23: mol_type = other RNA
  modified_base 1: mod_base = OTHER; note = 2'-O-methyluridine-3'-phosphate 5'-(E)-Vinylphosphonate
  modified_base 2: mod_base = OTHER; note = 2'-deoxy-2'-fluorouridine-3'-phosphate
  modified_base 3: mod_base = OTHER; note = 2'-O-methylcytidine-3'-phosphate
  modified_base 4: mod_base = OTHER; note = 2'-O-methyluridine-3'-phosphate
  modified_base 5: mod_base = OTHER; note = 2'-O-methylguanosine-3'-phosphate
  modified_base 6: mod_base = OTHER; note = 2'-deoxy-2'-fluorouridine-3'-phosphate
  modified_base 7: mod_base = OTHER; note = 2'-O-methylcytidine-3'-phosphate
  modified_base 8: mod_base = OTHER; note = 2'-O-methyluridine-3'-phosphate
  modified_base 9: mod_base = OTHER; note = 2'-O-methyluridine-3'-phosphate
  modified_base 10: mod_base = OTHER; note = 2'-O-methyluridine-3'-phosphate
  modified_base 11: mod_base = OTHER; note = 2'-O-methyluridine-3'-phosphate
  modified_base 12: mod_base = OTHER; note = 2'-O-methylcytidine-3'-phosphate
  modified_base 13: mod_base = OTHER; note = 2'-O-methyluridine-3'-phosphate
  modified_base 14: mod_base = OTHER; note = 2'-deoxy-2'-fluorouridine-3'-phosphate
  modified_base 15: mod_base = OTHER; note = 2'-O-methyluridine-3'-phosphate
  modified_base 16: mod_base = OTHER; note = 2'-deoxy-2'-fluorocytidine-3'-phosphate
  modified_base 17: mod_base = OTHER; note = 2'-O-methyluridine-3'-phosphate
  modified_base 18: mod_base = OTHER; note = 2'-O-methyladenosine-3'-phosphate
  modified_base 19: mod_base = OTHER; note = 2'-O-methyladenosine-3'-phosphate
  modified_base 20: mod_base = OTHER; note = 2'-O-methylguanosine-3'-phosphate
  modified_base 21: mod_base = OTHER; note = 2'-O-methyluridine-3'-phosphate
  modified_base 22: mod_base = OTHER; note = 2'-O-methylguanosine-3'-phosphate
  modified_base 23: mod_base = OTHER; note = 2'-O-methyluridine
ttctgtcttttctttctaagtgt

SEQ ID NO: 5130 - RNA, 23 nt, synthetic construct
  source 1..23: mol_type = other RNA
  modified_base 1: mod_base = OTHER; note = 2'-O-methyluridine-3'-phosphate 5'-(E)-Vinylphosphonate
  modified_base 2: mod_base = OTHER; note = 2'-deoxy-2'-fluorouridine-3'-phosphate
  modified_base 3: mod_base = OTHER; note = 2'-O-methyluridine-3'-phosphate
  modified_base 4: mod_base = OTHER; note = 2'-O-methylcytidine-3'-phosphate
  modified_base 5: mod_base = OTHER; note = 2'-O-methyluridine-3'-phosphate
  modified_base 6: mod_base = OTHER; note = 2'-deoxy-2'-fluoroguanosine-3'-phosphate
  modified_base 7: mod_base = OTHER; note = 2'-O-methyluridine-3'-phosphate
  modified_base 8: mod_base = OTHER; note = 2'-O-methylcytidine-3'-phosphate
  modified_base 9: mod_base = OTHER; note = 2'-O-methyluridine-3'-phosphate
  modified_base 10: mod_base = OTHER; note = 2'-O-methyluridine-3'-phosphate
  modified_base 11: mod_base = OTHER; note = 2'-O-methyluridine-3'-phosphate
  modified_base 12: mod_base = OTHER; note = 2'-O-methyluridine-3'-phosphate
  modified_base 13: mod_base = OTHER; note = 2'-O-methylcytidine-3'-phosphate
  modified_base 14: mod_base = OTHER; note = 2'-deoxy-2'-fluorouridine-3'-phosphate
  modified_base 15: mod_base = OTHER; note = 2'-O-methyluridine-3'-phosphate
  modified_base 16: mod_base = OTHER; note = 2'-deoxy-2'-fluorouridine-3'-phosphate
  modified_base 17: mod_base = OTHER; note = 2'-O-methylcytidine-3'-phosphate
  modified_base 18: mod_base = OTHER; note = 2'-O-methyluridine-3'-phosphate
  modified_base 19: mod_base = OTHER; note = 2'-O-methyladenosine-3'-phosphate
  modified_base 20: mod_base = OTHER; note = 2'-O-methyladenosine-3'-phosphate
  modified_base 21: mod_base = OTHER; note = 2'-O-methylguanosine-3'-phosphate
  modified_base 22: mod_base = OTHER; note = 2'-O-methyluridine-3'-phosphate
  modified_base 23: mod_base = OTHER; note = 2'-O-methylguanosine
tttctgtcttttctttctaagtg

SEQ ID NO: 5131 - RNA, 23 nt, synthetic construct
  source 1..23: mol_type = other RNA
  modified_base 1: mod_base = OTHER; note = 2'-O-methyluridine-3'-phosphate 5'-(E)-Vinylphosphonate
  modified_base 2: mod_base = OTHER; note = 2'-deoxy-2'-fluorouridine-3'-phosphate
  modified_base 3: mod_base = OTHER; note = 2'-O-methyluridine-3'-phosphate
  modified_base 4: mod_base = OTHER; note = 2'-O-methyluridine-3'-phosphate
  modified_base 5: mod_base = OTHER; note = 2'-O-methylcytidine-3'-phosphate
  modified_base 6: mod_base = OTHER; note = 2'-deoxy-2'-fluorouridine-3'-phosphate
  modified_base 7: mod_base = OTHER; note = 2'-O-methylguanosine-3'-phosphate
  modified_base 8: mod_base = OTHER; note = 2'-O-methyluridine-3'-phosphate
  modified_base 9: mod_base = OTHER; note = 2'-O-methylcytidine-3'-phosphate
  modified_base 10: mod_base = OTHER; note = 2'-O-methyluridine-3'-phosphate
  modified_base 11: mod_base = OTHER; note = 2'-O-methyluridine-3'-phosphate
  modified_base 12: mod_base = OTHER; note = 2'-O-methyluridine-3'-phosphate
  modified_base 13: mod_base = OTHER; note = 2'-O-methyluridine-3'-phosphate
  modified_base 14: mod_base = OTHER; note = 2'-deoxy-2'-fluorocytidine-3'-phosphate
  modified_base 15: mod_base = OTHER; note = 2'-O-methyluridine-3'-phosphate
  modified_base 16: mod_base = OTHER; note = 2'-deoxy-2'-fluorouridine-3'-phosphate
  modified_base 17: mod_base = OTHER; note = 2'-O-methyluridine-3'-phosphate
  modified_base 18: mod_base = OTHER; note = 2'-O-methylcytidine-3'-phosphate
  modified_base 19: mod_base = OTHER; note = 2'-O-methyluridine-3'-phosphate
  modified_base 20: mod_base = OTHER; note = 2'-O-methyladenosine-3'-phosphate
  modified_base 21: mod_base = OTHER; note = 2'-O-methyladenosine-3'-phosphate
  modified_base 22: mod_base = OTHER; note = 2'-O-methylguanosine-3'-phosphate
  modified_base 23: mod_base = OTHER; note = 2'-O-methyluridine
ttttctgtcttttctttctaagt

SEQ ID NO: 5132 - RNA, 23 nt, synthetic construct
  source 1..23: mol_type = other RNA
  modified_base 1: mod_base = OTHER; note = 2'-O-methyluridine-3'-phosphate 5'-(E)-Vinylphosphonate
  modified_base 2: mod_base = OTHER; note = 2'-deoxy-2'-fluorouridine-3'-phosphate
  modified_base 3: mod_base = OTHER; note = 2'-O-methyluridine-3'-phosphate
  modified_base 4: mod_base = OTHER; note = 2'-O-methyluridine-3'-phosphate
  modified_base 5: mod_base = OTHER; note = 2'-O-methyluridine-3'-phosphate
  modified_base 6: mod_base = OTHER; note = 2'-deoxy-2'-fluorocytidine-3'-phosphate
  modified_base 7: mod_base = OTHER; note = 2'-O-methyluridine-3'-phosphate
  modified_base 8: mod_base = OTHER; note = 2'-O-methylguanosine-3'-phosphate
  modified_base 9: mod_base = OTHER; note = 2'-O-methyluridine-3'-phosphate
  modified_base 10: mod_base = OTHER; note = 2'-O-methylcytidine-3'-phosphate
  modified_base 11: mod_base = OTHER; note = 2'-O-methyluridine-3'-phosphate
  modified_base 12: mod_base = OTHER; note = 2'-O-methyluridine-3'-phosphate
  modified_base 13: mod_base = OTHER; note = 2'-O-methyluridine-3'-phosphate
  modified_base 14: mod_base = OTHER; note = 2'-deoxy-2'-fluorouridine-3'-phosphate
  modified_base 15: mod_base = OTHER; note = 2'-O-methylcytidine-3'-phosphate
  modified_base 16: mod_base = OTHER; note = 2'-deoxy-2'-fluorouridine-3'-phosphate
  modified_base 17: mod_base = OTHER; note = 2'-O-methyluridine-3'-phosphate
  modified_base 18: mod_base = OTHER; note = 2'-O-methyluridine-3'-phosphate
  modified_base 19: mod_base = OTHER; note = 2'-O-methylcytidine-3'-phosphate
  modified_base 20: mod_base = OTHER; note = 2'-O-methyluridine-3'-phosphate
  modified_base 21: mod_base = OTHER; note = 2'-O-methyladenosine-3'-phosphate
  modified_base 22: mod_base = OTHER; note = 2'-O-methyladenosine-3'-phosphate
  modified_base 23: mod_base = OTHER; note = 2'-O-methylguanosine
tttttctgtcttttctttctaag

SEQ ID NO: 5133 - RNA, 23 nt, synthetic construct
  source 1..23: mol_type = other RNA
  modified_base 1: mod_base = OTHER; note = 2'-O-methyluridine-3'-phosphate 5'-(E)-Vinylphosphonate
  modified_base 2: mod_base = OTHER; note = 2'-deoxy-2'-fluoroadenosine-3'-phosphate
  modified_base 3: mod_base = OTHER; note = 2'-O-methyladenosine-3'-phosphate
  modified_base 4: mod_base = OTHER; note = 2'-O-methyladenosine-3'-phosphate
  modified_base 5: mod_base = OTHER; note = 2'-O-methyluridine-3'-phosphate
  modified_base 6: mod_base = OTHER; note = 2'-deoxy-2'-fluoroadenosine-3'-phosphate
  modified_base 7: mod_base = OTHER; note = 2'-O-methyluridine-3'-phosphate
  modified_base 8: mod_base = OTHER; note = 2'-O-methyluridine-3'-phosphate
  modified_base 9: mod_base = OTHER; note = 2'-O-methyluridine-3'-phosphate
  modified_base 10: mod_base = OTHER; note = 2'-O-methylcytidine-3'-phosphate
  modified_base 11: mod_base = OTHER; note = 2'-O-methylcytidine-3'-phosphate
  modified_base 12: mod_base = OTHER; note = 2'-O-methyluridine-3'-phosphate
  modified_base 13: mod_base = OTHER; note = 2'-O-methyluridine-3'-phosphate
  modified_base 14: mod_base = OTHER; note = 2'-deoxy-2'-fluorocytidine-3'-phosphate
  modified_base 15: mod_base = OTHER; note = 2'-O-methylcytidine-3'-phosphate
  modified_base 16: mod_base = OTHER; note = 2'-deoxy-2'-fluorouridine-3'-phosphate
  modified_base 17: mod_base = OTHER; note = 2'-O-methyluridine-3'-phosphate
  modified_base 18: mod_base = OTHER; note = 2'-O-methylcytidine-3'-phosphate
  modified_base 19: mod_base = OTHER; note = 2'-O-methylcytidine-3'-phosphate
  modified_base 20: mod_base = OTHER; note = 2'-O-methyluridine-3'-phosphate
  modified_base 21: mod_base = OTHER; note = 2'-O-methylcytidine-3'-phosphate
  modified_base 22: mod_base = OTHER; note = 2'-O-methyluridine-3'-phosphate
  modified_base 23: mod_base = OTHER; note = 2'-O-methyluridine
taaatatttccttccttcctctt

SEQ ID NO: 5134 - RNA, 23 nt, synthetic construct
  source 1..23: mol_type = other RNA
  modified_base 1: mod_base = OTHER; note = 2'-O-methyluridine-3'-phosphate 5'-(E)-Vinylphosphonate
  modified_base 2: mod_base = OTHER; note = 2'-deoxy-2'-fluoroadenosine-3'-phosphate
  modified_base 3: mod_base = OTHER; note = 2'-O-methyladenosine-3'-phosphate
  modified_base 4: mod_base = OTHER; note = 2'-O-methyladenosine-3'-phosphate
  modified_base 5: mod_base = OTHER; note = 2'-O-methyladenosine-3'-phosphate
  modified_base 6: mod_base = OTHER; note = 2'-deoxy-2'-fluorouridine-3'-phosphate
  modified_base 7: mod_base = OTHER; note = 2'-O-methyladenosine-3'-phosphate
  modified_base 8: mod_base = OTHER; note = 2'-O-methyluridine-3'-phosphate
  modified_base 9: mod_base = OTHER; note = 2'-O-methyluridine-3'-phosphate
  modified_base 10: mod_base = OTHER; note = 2'-O-methyluridine-3'-phosphate
  modified_base 11: mod_base = OTHER; note = 2'-O-methylcytidine-3'-phosphate
  modified_base 12: mod_base = OTHER; note = 2'-O-methylcytidine-3'-phosphate
  modified_base 13: mod_base = OTHER; note = 2'-O-methyluridine-3'-phosphate
  modified_base 14: mod_base = OTHER; note = 2'-deoxy-2'-fluorouridine-3'-phosphate
  modified_base 15: mod_base = OTHER; note = 2'-O-methylcytidine-3'-phosphate
  modified_base 16: mod_base = OTHER; note = 2'-deoxy-2'-fluorocytidine-3'-phosphate
  modified_base 17: mod_base = OTHER; note = 2'-O-methyluridine-3'-phosphate
  modified_base 18: mod_base = OTHER; note = 2'-O-methyluridine-3'-phosphate
  modified_base 19: mod_base = OTHER; note = 2'-O-methylcytidine-3'-phosphate
  modified_base 20: mod_base = OTHER; note = 2'-O-methylcytidine-3'-phosphate
  modified_base 21: mod_base = OTHER; note = 2'-O-methyluridine-3'-phosphate
  modified_base 22: mod_base = OTHER; note = 2'-O-methylcytidine-3'-phosphate
  modified_base 23: mod_base = OTHER; note = 2'-O-methyluridine
taaaatatttccttccttcctct

SEQ ID NO: 5135 - RNA, 23 nt, synthetic construct
  source 1..23: mol_type = other RNA
  modified_base 1: mod_base = OTHER; note = 2'-O-methyluridine-3'-phosphate 5'-(E)-Vinylphosphonate
  modified_base 2: mod_base = OTHER; note = 2'-deoxy-2'-fluorouridine-3'-phosphate
  modified_base 3: mod_base = OTHER; note = 2'-O-methyluridine-3'-phosphate
  modified_base 4: mod_base = OTHER; note = 2'-O-methylcytidine-3'-phosphate
  modified_base 5: mod_base = OTHER; note = 2'-O-methyluridine-3'-phosphate
  modified_base 6: mod_base = OTHER; note = 2'-deoxy-2'-fluorocytidine-3'-phosphate
  modified_base 7: mod_base = OTHER; note = 2'-O-methyladenosine-3'-phosphate
  modified_base 8: mod_base = OTHER; note = 2'-O-methyladenosine-3'-phosphate
  modified_base 9: mod_base = OTHER; note = 2'-O-methyladenosine-3'-phosphate
  modified_base 10: mod_base = OTHER; note = 2'-O-methyladenosine-3'-phosphate
  modified_base 11: mod_base = OTHER; note = 2'-O-methyluridine-3'-phosphate
  modified_base 12: mod_base = OTHER; note = 2'-O-methyladenosine-3'-phosphate
  modified_base 13: mod_base = OTHER; note = 2'-O-methyluridine-3'-phosphate
  modified_base 14: mod_base = OTHER; note = 2'-deoxy-2'-fluorouridine-3'-phosphate
  modified_base 15: mod_base = OTHER; note = 2'-O-methyluridine-3'-phosphate
  modified_base 16: mod_base = OTHER; note = 2'-deoxy-2'-fluorocytidine-3'-phosphate
  modified_base 17: mod_base = OTHER; note = 2'-O-methylcytidine-3'-phosphate
  modified_base 18: mod_base = OTHER; note = 2'-O-methyluridine-3'-phosphate
  modified_base 19: mod_base = OTHER; note = 2'-O-methyluridine-3'-phosphate
  modified_base 20: mod_base = OTHER; note = 2'-O-methylcytidine-3'-phosphate
  modified_base 21: mod_base = OTHER; note = 2'-O-methylcytidine-3'-phosphate
  modified_base 22: mod_base = OTHER; note = 2'-O-methyluridine-3'-phosphate
  modified_base 23: mod_base = OTHER; note = 2'-O-methyluridine
tttctcaaaatatttccttcctt

SEQ ID NO: 5136 - RNA, 23 nt, synthetic construct
  source 1..23: mol_type = other RNA
  modified_base 1: mod_base = OTHER; note = 2'-O-methyluridine-3'-phosphate 5'-(E)-Vinylphosphonate
  modified_base 2: mod_base = OTHER; note = 2'-deoxy-2'-fluoroadenosine-3'-phosphate
  modified_base 3: mod_base = OTHER; note = 2'-O-methyladenosine-3'-phosphate
  modified_base 4: mod_base = OTHER; note = 2'-O-methylguanosine-3'-phosphate
  modified_base 5: mod_base = OTHER; note = 2'-O-methyladenosine-3'-phosphate
  modified_base 6: mod_base = OTHER; note = 2'-deoxy-2'-fluoroguanosine-3'-phosphate
  modified_base 7: mod_base = OTHER; note = 2'-O-methyluridine-3'-phosphate
  modified_base 8: mod_base = OTHER; note = 2'-O-methyluridine-3'-phosphate
  modified_base 9: mod_base = OTHER; note = 2'-O-methyluridine-3'-phosphate
  modified_base 10: mod_base = OTHER; note = 2'-O-methyluridine-3'-phosphate
  modified_base 11: mod_base = OTHER; note = 2'-O-methylcytidine-3'-phosphate
  modified_base 12: mod_base = OTHER; note = 2'-O-methyluridine-3'-phosphate
  modified_base 13: mod_base = OTHER; note = 2'-O-methyluridine-3'-phosphate
  modified_base 14: mod_base = OTHER; note = 2'-deoxy-2'-fluoroadenosine-3'-phosphate
  modified_base 15: mod_base = OTHER; note = 2'-O-methyladenosine-3'-phosphate
  modified_base 16: mod_base = OTHER; note = 2'-deoxy-2'-fluorouridine-3'-phosphate
  modified_base 17: mod_base = OTHER; note = 2'-O-methyluridine-3'-phosphate
  modified_base 18: mod_base = OTHER; note = 2'-O-methylcytidine-3'-phosphate
  modified_base 19: mod_base = OTHER; note = 2'-O-methyluridine-3'-phosphate
  modified_base 20: mod_base = OTHER; note = 2'-O-methyluridine-3'-phosphate
  modified_base 21: mod_base = OTHER; note = 2'-O-methylcytidine-3'-phosphate
  modified_base 22: mod_base = OTHER; note = 2'-O-methyluridine-3'-phosphate
  modified_base 23: mod_base = OTHER; note = 2'-O-methylcytidine
taagagttttcttaattcttctc

SEQ ID NO: 5137 - RNA, 23 nt, synthetic construct
  source 1..23: mol_type = other RNA
  modified_base 1: mod_base = OTHER; note = 2'-O-methyluridine-3'-phosphate 5'-(E)-Vinylphosphonate
  modified_base 2: mod_base = OTHER; note = 2'-deoxy-2'-fluoroadenosine-3'-phosphate
  modified_base 3: mod_base = OTHER; note = 2'-O-methyladenosine-3'-phosphate
  modified_base 4: mod_base = OTHER; note = 2'-O-methylcytidine-3'-phosphate
  modified_base 5: mod_base = OTHER; note = 2'-O-methyladenosine-3'-phosphate
  modified_base 6: mod_base = OTHER; note = 2'-deoxy-2'-fluorocytidine-3'-phosphate
  modified_base 7: mod_base = OTHER; note = 2'-O-methyluridine-3'-phosphate
  modified_base 8: mod_base = OTHER; note = 2'-O-methyluridine-3'-phosphate
  modified_base 9: mod_base = OTHER; note = 2'-O-methylcytidine-3'-phosphate
  modified_base 10: mod_base = OTHER; note = 2'-O-methyladenosine-3'-phosphate
  modified_base 11: mod_base = OTHER; note = 2'-O-methyluridine-3'-phosphate
  modified_base 12: mod_base = OTHER; note = 2'-O-methyluridine-3'-phosphate
  modified_base 13: mod_base = OTHER; note = 2'-O-methylguanosine-3'-phosphate
  modified_base 14: mod_base = OTHER; note = 2'-deoxy-2'-fluoroadenosine-3'-phosphate
  modified_base 15: mod_base = OTHER; note = 2'-O-methyladenosine-3'-phosphate
  modified_base 16: mod_base = OTHER; note = 2'-deoxy-2'-fluoroguanosine-3'-phosphate
  modified_base 17: mod_base = OTHER; note = 2'-O-methyladenosine-3'-phosphate
  modified_base 18: mod_base = OTHER; note = 2'-O-methylguanosine-3'-phosphate
  modified_base 19: mod_base = OTHER; note = 2'-O-methyluridine-3'-phosphate
  modified_base 20: mod_base = OTHER; note = 2'-O-methyluridine-3'-phosphate
  modified_base 21: mod_base = OTHER; note = 2'-O-methyluridine-3'-phosphate
  modified_base 22: mod_base = OTHER; note = 2'-O-methyluridine-3'-phosphate
  modified_base 23: mod_base = OTHER; note = 2'-O-methylcytidine
taacacttcattgaagagttttc

SEQ ID NO: 5138 - RNA, 23 nt, synthetic construct
  source 1..23: mol_type = other RNA
  modified_base 1: mod_base = OTHER; note = 2'-O-methyluridine-3'-phosphate 5'-(E)-Vinylphosphonate
  modified_base 2: mod_base = OTHER; note = 2'-deoxy-2'-fluorouridine-3'-phosphate
  modified_base 3: mod_base = OTHER; note = 2'-O-methyluridine-3'-phosphate
  modified_base 4: mod_base = OTHER; note = 2'-O-methylguanosine-3'-phosphate
  modified_base 5: mod_base = OTHER; note = 2'-O-methyluridine-3'-phosphate
  modified_base 6: mod_base = OTHER; note = 2'-deoxy-2'-fluorouridine-3'-phosphate
  modified_base 7: mod_base = OTHER; note = 2'-O-methyladenosine-3'-phosphate
  modified_base 8: mod_base = OTHER; note = 2'-O-methyladenosine-3'-phosphate
  modified_base 9: mod_base = OTHER; note = 2'-O-methylcytidine-3'-phosphate
  modified_base 10: mod_base = OTHER; note = 2'-O-methyladenosine-3'-phosphate
  modified_base 11: mod_base = OTHER; note = 2'-O-methylcytidine-3'-phosphate
  modified_base 12: mod_base = OTHER; note = 2'-O-methyluridine-3'-phosphate
  modified_base 13: mod_base = OTHER; note = 2'-O-methyluridine-3'-phosphate
  modified_base 14: mod_base = OTHER; note = 2'-deoxy-2'-fluorocytidine-3'-phosphate
  modified_base 15: mod_base = OTHER; note = 2'-O-methyladenosine-3'-phosphate
  modified_base 16: mod_base = OTHER; note = 2'-deoxy-2'-fluorouridine-3'-phosphate
  modified_base 17: mod_base = OTHER; note = 2'-O-methyluridine-3'-phosphate
  modified_base 18: mod_base = OTHER; note = 2'-O-methylguanosine-3'-phosphate
  modified_base 19: mod_base = OTHER; note = 2'-O-methyladenosine-3'-phosphate
  modified_base 20: mod_base = OTHER; note = 2'-O-methyladenosine-3'-phosphate
  modified_base 21: mod_base = OTHER; note = 2'-O-methylguanosine-3'-phosphate
  modified_base 22: mod_base = OTHER; note = 2'-O-methyladenosine-3'-phosphate
  modified_base 23: mod_base = OTHER; note = 2'-O-methylguanosine
tttgttaacacttcattgaagag

SEQ ID NO: 5139 - RNA, 23 nt, synthetic construct
  source 1..23: mol_type = other RNA
  modified_base 1: mod_base = OTHER; note = 2'-O-methyluridine-3'-phosphate 5'-(E)-Vinylphosphonate
  modified_base 2: mod_base = OTHER; note = 2'-deoxy-2'-fluorouridine-3'-phosphate
  modified_base 3: mod_base = OTHER; note = 2'-O-methyluridine-3'-phosphate
  modified_base 4: mod_base = OTHER; note = 2'-O-methylguanosine-3'-phosphate
  modified_base 5: mod_base = OTHER; note = 2'-O-methylguanosine-3'-phosphate
  modified_base 6: mod_base = OTHER; note = 2'-deoxy-2'-fluorouridine-3'-phosphate
  modified_base 7: mod_base = OTHER; note = 2'-O-methyluridine-3'-phosphate
  modified_base 8: mod_base = OTHER; note = 2'-O-methylguanosine-3'-phosphate
  modified_base 9: mod_base = OTHER; note = 2'-O-methyluridine-3'-phosphate
  modified_base 10: mod_base = OTHER; note = 2'-O-methyluridine-3'-phosphate
  modified_base 11: mod_base = OTHER; note = 2'-O-methyladenosine-3'-phosphate
  modified_base 12: mod_base = OTHER; note = 2'-O-methyladenosine-3'-phosphate
  modified_base 13: mod_base = OTHER; note = 2'-O-methylcytidine-3'-phosphate
  modified_base 14: mod_base = OTHER; note = 2'-deoxy-2'-fluoroadenosine-3'-phosphate
  modified_base 15: mod_base = OTHER; note = 2'-O-methylcytidine-3'-phosphate
  modified_base 16: mod_base = OTHER; note = 2'-deoxy-2'-fluorouridine-3'-phosphate
  modified_base 17: mod_base = OTHER; note = 2'-O-methyluridine-3'-phosphate
  modified_base 18: mod_base = OTHER; note = 2'-O-methylcytidine-3'-phosphate
  modified_base 19: mod_base = OTHER; note = 2'-O-methyladenosine-3'-phosphate
  modified_base 20: mod_base = OTHER; note = 2'-O-methyluridine-3'-phosphate
  modified_base 21: mod_base = OTHER; note = 2'-O-methyluridine-3'-phosphate
  modified_base 22: mod_base = OTHER; note = 2'-O-methylguanosine-3'-phosphate
  modified_base 23: mod_base = OTHER; note = 2'-O-methyladenosine
tttggttgttaacacttcattga

SEQ ID NO: 5140 - RNA, 23 nt, synthetic construct
  source 1..23: mol_type = other RNA
  modified_base 1: mod_base = OTHER; note = 2'-O-methyluridine-3'-phosphate 5'-(E)-Vinylphosphonate
  modified_base 2: mod_base = OTHER; note = 2'-deoxy-2'-fluorouridine-3'-phosphate
  modified_base 3: mod_base = OTHER; note = 2'-O-methyluridine-3'-phosphate
  modified_base 4: mod_base = OTHER; note = 2'-O-methyluridine-3'-phosphate
  modified_base 5: mod_base = OTHER; note = 2'-O-methylguanosine-3'-phosphate
  modified_base 6: mod_base = OTHER; note = 2'-deoxy-2'-fluoroguanosine-3'-phosphate
  modified_base 7: mod_base = OTHER; note = 2'-O-methyluridine-3'-phosphate
  modified_base 8: mod_base = OTHER; note = 2'-O-methyluridine-3'-phosphate
  modified_base 9: mod_base = OTHER; note = 2'-O-methylguanosine-3'-phosphate
  modified_base 10: mod_base = OTHER; note = 2'-O-methyluridine-3'-phosphate
  modified_base 11: mod_base = OTHER; note = 2'-O-methyluridine-3'-phosphate
  modified_base 12: mod_base = OTHER; note = 2'-O-methyladenosine-3'-phosphate
  modified_base 13: mod_base = OTHER; note = 2'-O-methyladenosine-3'-phosphate
  modified_base 14: mod_base = OTHER; note = 2'-deoxy-2'-fluorocytidine-3'-phosphate
  modified_base 15: mod_base = OTHER; note = 2'-O-methyladenosine-3'-phosphate
  modified_base 16: mod_base = OTHER; note = 2'-deoxy-2'-fluorocytidine-3'-phosphate
  modified_base 17: mod_base = OTHER; note = 2'-O-methyluridine-3'-phosphate
  modified_base 18: mod_base = OTHER; note = 2'-O-methyluridine-3'-phosphate
  modified_base 19: mod_base = OTHER; note = 2'-O-methylcytidine-3'-phosphate
  modified_base 20: mod_base = OTHER; note = 2'-O-methyladenosine-3'-phosphate
  modified_base 21: mod_base = OTHER; note = 2'-O-methyluridine-3'-phosphate
  modified_base 22: mod_base = OTHER; note = 2'-O-methyluridine-3'-phosphate
  modified_base 23: mod_base = OTHER; note = 2'-O-methylguanosine
ttttggttgttaacacttcattg

SEQ ID NO: 5141 - RNA, 23 nt, synthetic construct
  source 1..23: mol_type = other RNA
  modified_base 1: mod_base = OTHER; note = 2'-O-methyluridine-3'-phosphate 5'-(E)-Vinylphosphonate
  modified_base 2: mod_base = OTHER; note = 2'-deoxy-2'-fluorouridine-3'-phosphate
  modified_base 3: mod_base = OTHER; note = 2'-O-methylguanosine-3'-phosphate
  modified_base 4: mod_base = OTHER; note = 2'-O-methyluridine-3'-phosphate
  modified_base 5: mod_base = OTHER; note = 2'-O-methyluridine-3'-phosphate
  modified_base 6: mod_base = OTHER; note = 2'-deoxy-2'-fluorouridine-3'-phosphate
  modified_base 7: mod_base = OTHER; note = 2'-O-methylcytidine-3'-phosphate
  modified_base 8: mod_base = OTHER; note = 2'-O-methyluridine-3'-phosphate
  modified_base 9: mod_base = OTHER; note = 2'-O-methylguanosine-3'-phosphate
  modified_base 10: mod_base = OTHER; note = 2'-O-methyladenosine-3'-phosphate
  modified_base 11: mod_base = OTHER; note = 2'-O-methyluridine-3'-phosphate
  modified_base 12: mod_base = OTHER; note = 2'-O-methyladenosine-3'-phosphate
  modified_base 13: mod_base = OTHER; note = 2'-O-methylcytidine-3'-phosphate
  modified_base 14: mod_base = OTHER; note = 2'-deoxy-2'-fluorocytidine-3'-phosphate
  modified_base 15: mod_base = OTHER; note = 2'-O-methylguanosine-3'-phosphate
  modified_base 16: mod_base = OTHER; note = 2'-deoxy-2'-fluorouridine-3'-phosphate
  modified_base 17: mod_base = OTHER; note = 2'-O-methylcytidine-3'-phosphate
  modified_base 18: mod_base = OTHER; note = 2'-O-methyluridine-3'-phosphate
  modified_base 19: mod_base = OTHER; note = 2'-O-methylguanosine-3'-phosphate
  modified_base 20: mod_base = OTHER; note = 2'-O-methyluridine-3'-phosphate
  modified_base 21: mod_base = OTHER; note = 2'-O-methyladenosine-3'-phosphate
  modified_base 22: mod_base = OTHER; note = 2'-O-methylguanosine-3'-phosphate
  modified_base 23: mod_base = OTHER; note = 2'-O-methylguanosine
ttgtttctgataccgtctgtagg

SEQ ID NO: 5142 - RNA, 23 nt, synthetic construct
  source 1..23: mol_type = other RNA
  modified_base 1: mod_base = OTHER; note = 2'-O-methyluridine-3'-phosphate 5'-(E)-Vinylphosphonate
  modified_base 2: mod_base = OTHER; note = 2'-deoxy-2'-fluoroadenosine-3'-phosphate
  modified_base 3: mod_base = OTHER; note = 2'-O-methyluridine-3'-phosphate
  modified_base 4: mod_base = OTHER; note = 2'-O-methyluridine-3'-phosphate
  modified_base 5: mod_base = OTHER; note = 2'-O-methyluridine-3'-phosphate
  modified_base 6: mod_base = OTHER; note = 2'-deoxy-2'-fluoroguanosine-3'-phosphate
  modified_base 7: mod_base = OTHER; note = 2'-O-methylcytidine-3'-phosphate
  modified_base 8: mod_base = OTHER; note = 2'-O-methyluridine-3'-phosphate
  modified_base 9: mod_base = OTHER; note = 2'-O-methylguanosine-3'-phosphate
  modified_base 10: mod_base = OTHER; note = 2'-O-methyluridine-3'-phosphate
  modified_base 11: mod_base = OTHER; note = 2'-O-methyluridine-3'-phosphate
  modified_base 12: mod_base = OTHER; note = 2'-O-methyluridine-3'-phosphate
  modified_base 13: mod_base = OTHER; note = 2'-O-methylcytidine-3'-phosphate
  modified_base 14: mod_base = OTHER; note = 2'-deoxy-2'-fluorouridine-3'-phosphate
  modified_base 15: mod_base = OTHER; note = 2'-O-methylguanosine-3'-phosphate
  modified_base 16: mod_base = OTHER; note = 2'-deoxy-2'-fluoroadenosine-3'-phosphate
  modified_base 17: mod_base = OTHER; note = 2'-O-methyluridine-3'-phosphate
  modified_base 18: mod_base = OTHER; note = 2'-O-methyladenosine-3'-phosphate
  modified_base 19: mod_base = OTHER; note = 2'-O-methylcytidine-3'-phosphate
  modified_base 20: mod_base = OTHER; note = 2'-O-methylcytidine-3'-phosphate
  modified_base 21: mod_base = OTHER; note = 2'-O-methylguanosine-3'-phosphate
  modified_base 22: mod_base = OTHER; note = 2'-O-methyluridine-3'-phosphate
  modified_base 23: mod_base = OTHER; note = 2'-O-methylcytidine
tatttgctgtttctgataccgtc

SEQ ID NO: 5143 - RNA, 23 nt, synthetic construct
  source 1..23: mol_type = other RNA
  modified_base 1: mod_base = OTHER; note = 2'-O-methyluridine-3'-phosphate 5'-(E)-Vinylphosphonate
  modified_base 2: mod_base = OTHER; note = 2'-deoxy-2'-fluoroadenosine-3'-phosphate
  modified_base 3: mod_base = OTHER; note = 2'-O-methyluridine-3'-phosphate
  modified_base 4: mod_base = OTHER; note = 2'-O-methylcytidine-3'-phosphate
  modified_base 5: mod_base = OTHER; note = 2'-O-methyluridine-3'-phosphate
  modified_base 6: mod_base = OTHER; note = 2'-deoxy-2'-fluoroadenosine-3'-phosphate
  modified_base 7: mod_base = OTHER; note = 2'-O-methyluridine-3'-phosphate
  modified_base 8: mod_base = OTHER; note = 2'-O-methyluridine-3'-phosphate
  modified_base 9: mod_base = OTHER; note = 2'-O-methyluridine-3'-phosphate
  modified_base 10: mod_base = OTHER; note = 2'-O-methylguanosine-3'-phosphate
  modified_base 11: mod_base = OTHER; note = 2'-O-methylcytidine-3'-phosphate
  modified_base 12: mod_base = OTHER; note = 2'-O-methyluridine-3'-phosphate
  modified_base 13: mod_base = OTHER; note = 2'-O-methylguanosine-3'-phosphate
  modified_base 14: mod_base = OTHER; note = 2'-deoxy-2'-fluorouridine-3'-phosphate
  modified_base 15: mod_base = OTHER; note = 2'-O-methyluridine-3'-phosphate
  modified_base 16: mod_base = OTHER; note = 2'-deoxy-2'-fluorouridine-3'-phosphate
  modified_base 17: mod_base = OTHER; note = 2'-O-methylcytidine-3'-phosphate
  modified_base 18: mod_base = OTHER; note = 2'-O-methyluridine-3'-phosphate
  modified_base 19: mod_base = OTHER; note = 2'-O-methylguanosine-3'-phosphate
  modified_base 20: mod_base = OTHER; note = 2'-O-methyladenosine-3'-phosphate
  modified_base 21: mod_base = OTHER; note = 2'-O-methyluridine-3'-phosphate
  modified_base 22: mod_base = OTHER; note = 2'-O-methyladenosine-3'-phosphate
  modified_base 23: mod_base = OTHER; note = 2'-O-methylcytidine
tatctatttgctgtttctgatac

SEQ ID NO: 5144 - RNA, 23 nt, synthetic construct
  source 1..23: mol_type = other RNA
  modified_base 1: mod_base = OTHER; note = 2'-O-methyluridine-3'-phosphate 5'-(E)-Vinylphosphonate
  modified_base 2: mod_base = OTHER; note = 2'-deoxy-2'-fluoroadenosine-3'-phosphate
  modified_base 3: mod_base = OTHER; note = 2'-O-methyluridine-3'-phosphate
  modified_base 4: mod_base = OTHER; note = 2'-O-methyladenosine-3'-phosphate
  modified_base 5: mod_base = OTHER; note = 2'-O-methyluridine-3'-phosphate
  modified_base 6: mod_base = OTHER; note = 2'-deoxy-2'-fluorocytidine-3'-phosphate
  modified_base 7: mod_base = OTHER; note = 2'-O-methyluridine-3'-phosphate
  modified_base 8: mod_base = OTHER; note = 2'-O-methyladenosine-3'-phosphate
  modified_base 9: mod_base = OTHER; note = 2'-O-methyluridine-3'-phosphate
  modified_base 10: mod_base = OTHER; note = 2'-O-methyluridine-3'-phosphate
  modified_base 11: mod_base = OTHER; note = 2'-O-methyluridine-3'-phosphate
  modified_base 12: mod_base = OTHER; note = 2'-O-methylguanosine-3'-phosphate
  modified_base 13: mod_base = OTHER; note = 2'-O-methylcytidine-3'-phosphate
  modified_base 14: mod_base = OTHER; note = 2'-deoxy-2'-fluorouridine-3'-phosphate
  modified_base 15: mod_base = OTHER; note = 2'-O-methylguanosine-3'-phosphate
  modified_base 16: mod_base = OTHER; note = 2'-deoxy-2'-fluorouridine-3'-phosphate
  modified_base 17: mod_base = OTHER; note = 2'-O-methyluridine-3'-phosphate
  modified_base 18: mod_base = OTHER; note = 2'-O-methyluridine-3'-phosphate
  modified_base 19: mod_base = OTHER; note = 2'-O-methylcytidine-3'-phosphate
  modified_base 20: mod_base = OTHER; note = 2'-O-methyluridine-3'-phosphate
  modified_base 21: mod_base = OTHER; note = 2'-O-methylguanosine-3'-phosphate
  modified_base 22: mod_base = OTHER; note = 2'-O-methyladenosine-3'-phosphate
  modified_base 23: mod_base = OTHER; note = 2'-O-methyluridine
tatatctatttgctgtttctgat

SEQ ID NO: 5145 - RNA, 23 nt, synthetic construct
  source 1..23: mol_type = other RNA
  modified_base 1: mod_base = OTHER; note = 2'-O-methyluridine-3'-phosphate 5'-(E)-Vinylphosphonate
  modified_base 2: mod_base = OTHER; note = 2'-deoxy-2'-fluoroadenosine-3'-phosphate
  modified_base 3: mod_base = OTHER; note = 2'-O-methyladenosine-3'-phosphate
  modified_base 4: mod_base = OTHER; note = 2'-O-methyluridine-3'-phosphate
  modified_base 5: mod_base = OTHER; note = 2'-O-methyladenosine-3'-phosphate
  modified_base 6: mod_base = OTHER; note = 2'-deoxy-2'-fluorouridine-3'-phosphate
  modified_base 7: mod_base = OTHER; note = 2'-O-methylcytidine-3'-phosphate
  modified_base 8: mod_base = OTHER; note = 2'-O-methyluridine-3'-phosphate
  modified_base 9: mod_base = OTHER; note = 2'-O-methyladenosine-3'-phosphate
  modified_base 10: mod_base = OTHER; note = 2'-O-methyluridine-3'-phosphate
  modified_base 11: mod_base = OTHER; note = 2'-O-methyluridine-3'-phosphate
  modified_base 12: mod_base = OTHER; note = 2'-O-methyluridine-3'-phosphate
  modified_base 13: mod_base = OTHER; note = 2'-O-methylguanosine-3'-phosphate
  modified_base 14: mod_base = OTHER; note = 2'-deoxy-2'-fluorocytidine-3'-phosphate
  modified_base 15: mod_base = OTHER; note = 2'-O-methyluridine-3'-phosphate
  modified_base 16: mod_base = OTHER; note = 2'-deoxy-2'-fluoroguanosine-3'-phosphate
  modified_base 17: mod_base = OTHER; note = 2'-O-methyluridine-3'-phosphate
  modified_base 18: mod_base = OTHER; note = 2'-O-methyluridine-3'-phosphate
  modified_base 19: mod_base = OTHER; note = 2'-O-methyluridine-3'-phosphate
  modified_base 20: mod_base = OTHER; note = 2'-O-methylcytidine-3'-phosphate
  modified_base 21: mod_base = OTHER; note = 2'-O-methyluridine-3'-phosphate
  modified_base 22: mod_base = OTHER; note = 2'-O-methylguanosine-3'-phosphate
  modified_base 23: mod_base = OTHER; note = 2'-O-methyladenosine
taatatctatttgctgtttctga

SEQ ID NO: 5146 - RNA, 23 nt, synthetic construct
  source 1..23: mol_type = other RNA
  modified_base 1: mod_base = OTHER; note = 2'-O-methyluridine-3'-phosphate 5'-(E)-Vinylphosphonate
  modified_base 2: mod_base = OTHER; note = 2'-deoxy-2'-fluoroguanosine-3'-phosphate
  modified_base 3: mod_base = OTHER; note = 2'-O-methyladenosine-3'-phosphate
  modified_base 4: mod_base = OTHER; note = 2'-O-methyladenosine-3'-phosphate
  modified_base 5: mod_base = OTHER; note = 2'-O-methyluridine-3'-phosphate
  modified_base 6: mod_base = OTHER; note = 2'-deoxy-2'-fluoroadenosine-3'-phosphate
  modified_base 7: mod_base = OTHER; note = 2'-O-methyluridine-3'-phosphate
  modified_base 8: mod_base = OTHER; note = 2'-O-methylcytidine-3'-phosphate
  modified_base 9: mod_base = OTHER; note = 2'-O-methyluridine-3'-phosphate
  modified_base 10: mod_base = OTHER; note = 2'-O-methyladenosine-3'-phosphate
  modified_base 11: mod_base = OTHER; note = 2'-O-methyluridine-3'-phosphate
  modified_base 12: mod_base = OTHER; note = 2'-O-methyluridine-3'-phosphate
  modified_base 13: mod_base = OTHER; note = 2'-O-methyluridine-3'-phosphate
  modified_base 14: mod_base = OTHER; note = 2'-deoxy-2'-fluoroguanosine-3'-phosphate
  modified_base 15: mod_base = OTHER; note = 2'-O-methylcytidine-3'-phosphate
  modified_base 16: mod_base = OTHER; note = 2'-deoxy-2'-fluorouridine-3'-phosphate
  modified_base 17: mod_base = OTHER; note = 2'-O-methylguanosine-3'-phosphate
  modified_base 18: mod_base = OTHER; note = 2'-O-methyluridine-3'-phosphate
  modified_base 19: mod_base = OTHER; note = 2'-O-methyluridine-3'-phosphate
  modified_base 20: mod_base = OTHER; note = 2'-O-methyluridine-3'-phosphate
  modified_base 21: mod_base = OTHER; note = 2'-O-methylcytidine-3'-phosphate
  modified_base 22: mod_base = OTHER; note = 2'-O-methyluridine-3'-phosphate
  modified_base 23: mod_base = OTHER; note = 2'-O-methylguanosine
tgaatatctatttgctgtttctg

SEQ ID NO: 5147 - RNA, 23 nt, synthetic construct
  source 1..23: mol_type = other RNA
  modified_base 1: mod_base = OTHER; note = 2'-O-methyluridine-3'-phosphate 5'-(E)-Vinylphosphonate
  modified_base 2: mod_base = OTHER; note = 2'-deoxy-2'-fluoroadenosine-3'-phosphate
  modified_base 3: mod_base = OTHER; note = 2'-O-methylguanosine-3'-phosphate
  modified_base 4: mod_base = OTHER; note = 2'-O-methylguanosine-3'-phosphate
  modified_base 5: mod_base = OTHER; note = 2'-O-methyladenosine-3'-phosphate
  modified_base 6: mod_base = OTHER; note = 2'-deoxy-2'-fluoroadenosine-3'-phosphate
  modified_base 7: mod_base = OTHER; note = 2'-O-methyluridine-3'-phosphate
  modified_base 8: mod_base = OTHER; note = 2'-O-methyladenosine-3'-phosphate
  modified_base 9: mod_base = OTHER; note = 2'-O-methyluridine-3'-phosphate
  modified_base 10: mod_base = OTHER; note = 2'-O-methylcytidine-3'-phosphate
  modified_base 11: mod_base = OTHER; note = 2'-O-methyluridine-3'-phosphate
  modified_base 12: mod_base = OTHER; note = 2'-O-methyladenosine-3'-phosphate
  modified_base 13: mod_base = OTHER; note = 2'-O-methyluridine-3'-phosphate
  modified_base 14: mod_base = OTHER; note = 2'-deoxy-2'-fluorouridine-3'-phosphate
  modified_base 15: mod_base = OTHER; note = 2'-O-methyluridine-3'-phosphate
  modified_base 16: mod_base = OTHER; note = 2'-deoxy-2'-fluoroguanosine-3'-phosphate
  modified_base 17: mod_base = OTHER; note = 2'-O-methylcytidine-3'-phosphate
  modified_base 18: mod_base = OTHER; note = 2'-O-methyluridine-3'-phosphate
  modified_base 19: mod_base = OTHER; note = 2'-O-methylguanosine-3'-phosphate
  modified_base 20: mod_base = OTHER; note = 2'-O-methyluridine-3'-phosphate
  modified_base 21: mod_base = OTHER; note = 2'-O-methyluridine-3'-phosphate
  modified_base 22: mod_base = OTHER; note = 2'-O-methyluridine-3'-phosphate
  modified_base 23: mod_base = OTHER; note = 2'-O-methylcytidine
taggaatatctatttgctgtttc

SEQ ID NO: 5148 - RNA, 23 nt, synthetic construct
  source 1..23: mol_type = other RNA
  modified_base 1: mod_base = OTHER; note = 2'-O-methyluridine-3'-phosphate 5'-(E)-Vinylphosphonate
  modified_base 2: mod_base = OTHER; note = 2'-deoxy-2'-fluoroadenosine-3'-phosphate
  modified_base 3: mod_base = OTHER; note = 2'-O-methylguanosine-3'-phosphate
  modified_base 4: mod_base = OTHER; note = 2'-O-methyladenosine-3'-phosphate
  modified_base 5: mod_base = OTHER; note = 2'-O-methylguanosine-3'-phosphate
  modified_base 6: mod_base = OTHER; note = 2'-deoxy-2'-fluoroguanosine-3'-phosphate
  modified_base 7: mod_base = OTHER; note = 2'-O-methyladenosine-3'-phosphate
  modified_base 8: mod_base = OTHER; note = 2'-O-methyladenosine-3'-phosphate
  modified_base 9: mod_base = OTHER; note = 2'-O-methyluridine-3'-phosphate
  modified_base 10: mod_base = OTHER; note = 2'-O-methyladenosine-3'-phosphate
  modified_base 11: mod_base = OTHER; note = 2'-O-methyluridine-3'-phosphate
  modified_base 12: mod_base = OTHER; note = 2'-O-methylcytidine-3'-phosphate
  modified_base 13: mod_base = OTHER; note = 2'-O-methyluridine-3'-phosphate
  modified_base 14: mod_base = OTHER; note = 2'-deoxy-2'-fluoroadenosine-3'-phosphate
  modified_base 15: mod_base = OTHER; note = 2'-O-methyluridine-3'-phosphate
  modified_base 16: mod_base = OTHER; note = 2'-deoxy-2'-fluorouridine-3'-phosphate
  modified_base 17: mod_base = OTHER; note = 2'-O-methyluridine-3'-phosphate
  modified_base 18: mod_base = OTHER; note = 2'-O-methylguanosine-3'-phosphate
  modified_base 19: mod_base = OTHER; note = 2'-O-methylcytidine-3'-phosphate
  modified_base 20: mod_base = OTHER; note = 2'-O-methyluridine-3'-phosphate
  modified_base 21: mod_base = OTHER; note = 2'-O-methylguanosine-3'-phosphate
  modified_base 22: mod_base = OTHER; note = 2'-O-methyluridine-3'-phosphate
  modified_base 23: mod_base = OTHER; note = 2'-O-methyluridine
tagaggaatatctatttgctgtt

SEQ ID NO: 5149 - RNA, 23 nt, synthetic construct
  source 1..23: mol_type = other RNA
  modified_base 1: mod_base = OTHER; note = 2'-O-methyluridine-3'-phosphate 5'-(E)-Vinylphosphonate
  modified_base 2: mod_base = OTHER; note = 2'-deoxy-2'-fluorouridine-3'-phosphate
  modified_base 3: mod_base = OTHER; note = 2'-O-methyladenosine-3'-phosphate
  modified_base 4: mod_base = OTHER; note = 2'-O-methylguanosine-3'-phosphate
  modified_base 5: mod_base = OTHER; note = 2'-O-methyladenosine-3'-phosphate
  modified_base 6: mod_base = OTHER; note = 2'-deoxy-2'-fluoroguanosine-3'-phosphate
  modified_base 7: mod_base = OTHER; note = 2'-O-methylguanosine-3'-phosphate
  modified_base 8: mod_base = OTHER; note = 2'-O-methyladenosine-3'-phosphate
  modified_base 9: mod_base = OTHER; note = 2'-O-methyladenosine-3'-phosphate
  modified_base 10: mod_base = OTHER; note = 2'-O-methyluridine-3'-phosphate
  modified_base 11: mod_base = OTHER; note = 2'-O-methyladenosine-3'-phosphate
  modified_base 12: mod_base = OTHER; note = 2'-O-methyluridine-3'-phosphate
  modified_base 13: mod_base = OTHER; note = 2'-O-methylcytidine-3'-phosphate
  modified_base 14: mod_base = OTHER; note = 2'-deoxy-2'-fluorouridine-3'-phosphate
  modified_base 15: mod_base = OTHER; note = 2'-O-methyladenosine-3'-phosphate
  modified_base 16: mod_base = OTHER; note = 2'-deoxy-2'-fluorouridine-3'-phosphate
  modified_base 17: mod_base = OTHER; note = 2'-O-methyluridine-3'-phosphate
  modified_base 18: mod_base = OTHER; note = 2'-O-methyluridine-3'-phosphate
  modified_base 19: mod_base = OTHER; note = 2'-O-methylguanosine-3'-phosphate
  modified_base 20: mod_base = OTHER; note = 2'-O-methylcytidine-3'-phosphate
  modified_base 21: mod_base = OTHER; note = 2'-O-methyluridine-3'-phosphate
  modified_base 22: mod_base = OTHER; note = 2'-O-methylguanosine-3'-phosphate
  modified_base 23: mod_base = OTHER; note = 2'-O-methyluridine
ttagaggaatatctatttgctgt

SEQ ID NO: 5150 - RNA, 23 nt, synthetic construct
  source 1..23: mol_type = other RNA
  modified_base 1: mod_base = OTHER; note = 2'-O-methyluridine-3'-phosphate 5'-(E)-Vinylphosphonate
  modified_base 2: mod_base = OTHER; note = 2'-deoxy-2'-fluoroguanosine-3'-phosphate
  modified_base 3: mod_base = OTHER; note = 2'-O-methylguanosine-3'-phosphate
  modified_base 4: mod_base = OTHER; note = 2'-O-methyluridine-3'-phosphate
  modified_base 5: mod_base = OTHER; note = 2'-O-methyladenosine-3'-phosphate
  modified_base 6: mod_base = OTHER; note = 2'-deoxy-2'-fluoroguanosine-3'-phosphate
  modified_base 7: mod_base = OTHER; note = 2'-O-methyladenosine-3'-phosphate
  modified_base 8: mod_base = OTHER; note = 2'-O-methylguanosine-3'-phosphate
  modified_base 9: mod_base = OTHER; note = 2'-O-methylguanosine-3'-phosphate
  modified_base 10: mod_base = OTHER; note = 2'-O-methyladenosine-3'-phosphate
  modified_base 11: mod_base = OTHER; note = 2'-O-methyladenosine-3'-phosphate
  modified_base 12: mod_base = OTHER; note = 2'-O-methyluridine-3'-phosphate
  modified_base 13: mod_base = OTHER; note = 2'-O-methyladenosine-3'-phosphate
  modified_base 14: mod_base = OTHER; note = 2'-deoxy-2'-fluorouridine-3'-phosphate
  modified_base 15: mod_base = OTHER; note = 2'-O-methylcytidine-3'-phosphate
  modified_base 16: mod_base = OTHER; note = 2'-deoxy-2'-fluorouridine-3'-phosphate
  modified_base 17: mod_base = OTHER; note = 2'-O-methyladenosine-3'-phosphate
  modified_base 18: mod_base = OTHER; note = 2'-O-methyluridine-3'-phosphate
  modified_base 19: mod_base = OTHER; note = 2'-O-methyluridine-3'-phosphate
  modified_base 20: mod_base = OTHER; note = 2'-O-methyluridine-3'-phosphate
  modified_base 21: mod_base = OTHER; note = 2'-O-methylguanosine-3'-phosphate
  modified_base 22: mod_base = OTHER; note = 2'-O-methylcytidine-3'-phosphate
  modified_base 23: mod_base = OTHER; note = 2'-O-methyluridine
tggtagaggaatatctatttgct

SEQ ID NO: 5151 - RNA, 23 nt, synthetic construct
  source 1..23: mol_type = other RNA
  modified_base 1: mod_base = OTHER; note = 2'-O-methyluridine-3'-phosphate 5'-(E)-Vinylphosphonate
  modified_base 2: mod_base = OTHER; note = 2'-deoxy-2'-fluorouridine-3'-phosphate
  modified_base 3: mod_base = OTHER; note = 2'-O-methylguanosine-3'-phosphate
  modified_base 4: mod_base = OTHER; note = 2'-O-methyladenosine-3'-phosphate
  modified_base 5: mod_base = OTHER; note = 2'-O-methylguanosine-3'-phosphate
  modified_base 6: mod_base = OTHER; note = 2'-deoxy-2'-fluorocytidine-3'-phosphate
  modified_base 7: mod_base = OTHER; note = 2'-O-methyladenosine-3'-phosphate
  modified_base 8: mod_base = OTHER; note = 2'-O-methyluridine-3'-phosphate
  modified_base 9: mod_base = OTHER; note = 2'-O-methyluridine-3'-phosphate
  modified_base 10: mod_base = OTHER; note = 2'-O-methylcytidine-3'-phosphate
  modified_base 11: mod_base = OTHER; note = 2'-O-methyluridine-3'-phosphate
  modified_base 12: mod_base = OTHER; note = 2'-O-methyluridine-3'-phosphate
  modified_base 13: mod_base = OTHER; note = 2'-O-methylcytidine-3'-phosphate
  modified_base 14: mod_base = OTHER; note = 2'-deoxy-2'-fluorouridine-3'-phosphate
  modified_base 15: mod_base = OTHER; note = 2'-O-methylguanosine-3'-phosphate
  modified_base 16: mod_base = OTHER; note = 2'-deoxy-2'-fluorouridine-3'-phosphate
  modified_base 17: mod_base = OTHER; note = 2'-O-methyladenosine-3'-phosphate
  modified_base 18: mod_base = OTHER; note = 2'-O-methylcytidine-3'-phosphate
  modified_base 19: mod_base = OTHER; note = 2'-O-methyluridine-3'-phosphate
  modified_base 20: mod_base = OTHER; note = 2'-O-methylcytidine-3'-phosphate
  modified_base 21: mod_base = OTHER; note = 2'-O-methyladenosine-3'-phosphate
  modified_base 22: mod_base = OTHER; note = 2'-O-methylcytidine-3'-phosphate
  modified_base 23: mod_base = OTHER; note = 2'-O-methyluridine
ttgagcattcttctgtactcact

SEQ ID NO: 5152 - RNA, 23 nt, synthetic construct
  source 1..23: mol_type = other RNA
  modified_base 1: mod_base = OTHER; note = 2'-O-methyluridine-3'-phosphate 5'-(E)-Vinylphosphonate
  modified_base 2: mod_base = OTHER; note = 2'-deoxy-2'-fluorouridine-3'-phosphate
  modified_base 3: mod_base = OTHER; note = 2'-O-methylcytidine-3'-phosphate
  modified_base 4: mod_base = OTHER; note = 2'-O-methyladenosine-3'-phosphate
  modified_base 5: mod_base = OTHER; note = 2'-O-methyluridine-3'-phosphate
  modified_base 6: mod_base = OTHER; note = 2'-deoxy-2'-fluoroguanosine-3'-phosphate
  modified_base 7: mod_base = OTHER; note = 2'-O-methyladenosine-3'-phosphate
  modified_base 8: mod_base = OTHER; note = 2'-O-methylguanosine-3'-phosphate
  modified_base 9: mod_base = OTHER; note = 2'-O-methylcytidine-3'-phosphate
  modified_base 10: mod_base = OTHER; note = 2'-O-methyladenosine-3'-phosphate
  modified_base 11: mod_base = OTHER; note = 2'-O-methyluridine-3'-phosphate
  modified_base 12: mod_base = OTHER; note = 2'-O-methyluridine-3'-phosphate
  modified_base 13: mod_base = OTHER; note = 2'-O-methylcytidine-3'-phosphate
  modified_base 14: mod_base = OTHER; note = 2'-deoxy-2'-fluorouridine-3'-phosphate
  modified_base 15: mod_base = OTHER; note = 2'-O-methyluridine-3'-phosphate
  modified_base 16: mod_base = OTHER; note = 2'-deoxy-2'-fluorocytidine-3'-phosphate
  modified_base 17: mod_base = OTHER; note = 2'-O-methyluridine-3'-phosphate
  modified_base 18: mod_base = OTHER; note = 2'-O-methylguanosine-3'-phosphate
  modified_base 19: mod_base = OTHER; note = 2'-O-methyluridine-3'-phosphate
  modified_base 20: mod_base = OTHER; note = 2'-O-methyladenosine-3'-phosphate
  modified_base 21: mod_base = OTHER; note = 2'-O-methylcytidine-3'-phosphate
  modified_base 22: mod_base = OTHER; note = 2'-O-methyluridine-3'-phosphate
  modified_base 23: mod_base = OTHER; note = 2'-O-methylcytidine
ttcatgagcattcttctgtactc

SEQ ID NO: 5153 - RNA, 23 nt, synthetic construct
  source 1..23: mol_type = other RNA
  modified_base 1: mod_base = OTHER; note = 2'-O-methyluridine-3'-phosphate 5'-(E)-Vinylphosphonate
  modified_base 2: mod_base = OTHER; note = 2'-deoxy-2'-fluoroadenosine-3'-phosphate
  modified_base 3: mod_base = OTHER; note = 2'-O-methyluridine-3'-phosphate
  modified_base 4: mod_base = OTHER; note = 2'-O-methylcytidine-3'-phosphate
  modified_base 5: mod_base = OTHER; note = 2'-O-methyladenosine-3'-phosphate
  modified_base 6: mod_base = OTHER; note = 2'-deoxy-2'-fluorouridine-3'-phosphate
  modified_base 7: mod_base = OTHER; note = 2'-O-methylguanosine-3'-phosphate
  modified_base 8: mod_base = OTHER; note = 2'-O-methyladenosine-3'-phosphate
  modified_base 9: mod_base = OTHER; note = 2'-O-methylguanosine-3'-phosphate
  modified_base 10: mod_base = OTHER; note = 2'-O-methylcytidine-3'-phosphate
  modified_base 11: mod_base = OTHER; note = 2'-O-methyladenosine-3'-phosphate
  modified_base 12: mod_base = OTHER; note = 2'-O-methyluridine-3'-phosphate
  modified_base 13: mod_base = OTHER; note = 2'-O-methyluridine-3'-phosphate
  modified_base 14: mod_base = OTHER; note = 2'-deoxy-2'-fluorocytidine-3'-phosphate
  modified_base 15: mod_base = OTHER; note = 2'-O-methyluridine-3'-phosphate
  modified_base 16: mod_base = OTHER; note = 2'-deoxy-2'-fluorouridine-3'-phosphate
  modified_base 17: mod_base = OTHER; note = 2'-O-methylcytidine-3'-phosphate
  modified_base 18: mod_base = OTHER; note = 2'-O-methyluridine-3'-phosphate
  modified_base 19: mod_base = OTHER; note = 2'-O-methylguanosine-3'-phosphate
  modified_base 20: mod_base = OTHER; note = 2'-O-methyluridine-3'-phosphate
  modified_base 21: mod_base = OTHER; note = 2'-O-methyladenosine-3'-phosphate
  modified_base 22: mod_base = OTHER; note = 2'-O-methylcytidine-3'-phosphate
  modified_base 23: mod_base = OTHER; note = 2'-O-methyluridine
tatcatgagcattcttctgtact

SEQ ID NO: 5154 - RNA, 23 nt, synthetic construct
  source 1..23: mol_type = other RNA
  modified_base 1: mod_base = OTHER; note = 2'-O-methyluridine-3'-phosphate 5'-(E)-Vinylphosphonate
  modified_base 2: mod_base = OTHER; note = 2'-deoxy-2'-fluorouridine-3'-phosphate
  modified_base 3: mod_base = OTHER; note = 2'-O-methyladenosine-3'-phosphate
  modified_base 4: mod_base = OTHER; note = 2'-O-methyluridine-3'-phosphate
  modified_base 5: mod_base = OTHER; note = 2'-O-methylcytidine-3'-phosphate
  modified_base 6: mod_base = OTHER; note = 2'-deoxy-2'-fluoroadenosine-3'-phosphate
  modified_base 7: mod_base = OTHER; note = 2'-O-methyluridine-3'-phosphate
  modified_base 8: mod_base = OTHER; note = 2'-O-methylguanosine-3'-phosphate
  modified_base 9: mod_base = OTHER; note = 2'-O-methyladenosine-3'-phosphate
  modified_base 10: mod_base = OTHER; note = 2'-O-methylguanosine-3'-phosphate
  modified_base 11: mod_base = OTHER; note = 2'-O-methylcytidine-3'-phosphate
  modified_base 12: mod_base = OTHER; note = 2'-O-methyladenosine-3'-phosphate
  modified_base 13: mod_base = OTHER; note = 2'-O-methyluridine-3'-phosphate
  modified_base 14: mod_base = OTHER; note = 2'-deoxy-2'-fluorouridine-3'-phosphate
  modified_base 15: mod_base = OTHER; note = 2'-O-methylcytidine-3'-phosphate
  modified_base 16: mod_base = OTHER; note = 2'-deoxy-2'-fluorouridine-3'-phosphate
  modified_base 17: mod_base = OTHER; note = 2'-O-methyluridine-3'-phosphate
  modified_base 18: mod_base = OTHER; note = 2'-O-methylcytidine-3'-phosphate
  modified_base 19: mod_base = OTHER; note = 2'-O-methyluridine-3'-phosphate
  modified_base 20: mod_base = OTHER; note = 2'-O-methylguanosine-3'-phosphate
  modified_base 21: mod_base = OTHER; note = 2'-O-methyluridine-3'-phosphate
  modified_base 22: mod_base = OTHER; note = 2'-O-methyladenosine-3'-phosphate
  modified_base 23: mod_base = OTHER; note = 2'-O-methylcytidine
ttatcatgagcattcttctgtac

SEQ ID NO: 5155 - RNA, 23 nt, synthetic construct
  source 1..23: mol_type = other RNA
  modified_base 1: mod_base = OTHER; note = 2'-O-methyluridine-3'-phosphate 5'-(E)-Vinylphosphonate
  modified_base 2: mod_base = OTHER; note = 2'-deoxy-2'-fluoroadenosine-3'-phosphate
  modified_base 3: mod_base = OTHER; note = 2'-O-methyladenosine-3'-phosphate
  modified_base 4: mod_base = OTHER; note = 2'-O-methyladenosine-3'-phosphate
  modified_base 5: mod_base = OTHER; note = 2'-O-methylcytidine-3'-phosphate
  modified_base 6: mod_base = OTHER; note = 2'-deoxy-2'-fluorouridine-3'-phosphate
  modified_base 7: mod_base = OTHER; note = 2'-O-methyladenosine-3'-phosphate
  modified_base 8: mod_base = OTHER; note = 2'-O-methyluridine-3'-phosphate
  modified_base 9: mod_base = OTHER; note = 2'-O-methylcytidine-3'-phosphate
  modified_base 10: mod_base = OTHER; note = 2'-O-methyladenosine-3'-phosphate
  modified_base 11: mod_base = OTHER; note = 2'-O-methyluridine-3'-phosphate
  modified_base 12: mod_base = OTHER; note = 2'-O-methylguanosine-3'-phosphate
  modified_base 13: mod_base = OTHER; note = 2'-O-methyladenosine-3'-phosphate
  modified_base 14: mod_base = OTHER; note = 2'-deoxy-2'-fluoroguanosine-3'-phosphate
  modified_base 15: mod_base = OTHER; note = 2'-O-methylcytidine-3'-phosphate
  modified_base 16: mod_base = OTHER; note = 2'-deoxy-2'-fluoroadenosine-3'-phosphate
  modified_base 17: mod_base = OTHER; note = 2'-O-methyluridine-3'-phosphate
  modified_base 18: mod_base = OTHER; note = 2'-O-methyluridine-3'-phosphate
  modified_base 19: mod_base = OTHER; note = 2'-O-methylcytidine-3'-phosphate
  modified_base 20: mod_base = OTHER; note = 2'-O-methyluridine-3'-phosphate
  modified_base 21: mod_base = OTHER; note = 2'-O-methyluridine-3'-phosphate
  modified_base 22: mod_base = OTHER; note = 2'-O-methylcytidine-3'-phosphate
  modified_base 23: mod_base = OTHER; note = 2'-O-methyluridine
taaactatcatgagcattcttct

SEQ ID NO: 5156 - RNA, 23 nt, synthetic construct
  source 1..23: mol_type = other RNA
  modified_base 1: mod_base = OTHER; note = 2'-O-methyluridine-3'-phosphate 5'-(E)-Vinylphosphonate
  modified_base 2: mod_base = OTHER; note = 2'-deoxy-2'-fluoroadenosine-3'-phosphate
  modified_base 3: mod_base = OTHER; note = 2'-O-methyladenosine-3'-phosphate
  modified_base 4: mod_base = OTHER; note = 2'-O-methyladenosine-3'-phosphate
  modified_base 5: mod_base = OTHER; note = 2'-O-methyladenosine-3'-phosphate
  modified_base 6: mod_base = OTHER; note = 2'-deoxy-2'-fluorocytidine-3'-phosphate
  modified_base 7: mod_base = OTHER; note = 2'-O-methyluridine-3'-phosphate
  modified_base 8: mod_base = OTHER; note = 2'-O-methyladenosine-3'-phosphate
  modified_base 9: mod_base = OTHER; note = 2'-O-methyluridine-3'-phosphate
  modified_base 10: mod_base = OTHER; note = 2'-O-methylcytidine-3'-phosphate
  modified_base 11: mod_base = OTHER; note = 2'-O-methyladenosine-3'-phosphate
  modified_base 12: mod_base = OTHER; note = 2'-O-methyluridine-3'-phosphate
  modified_base 13: mod_base = OTHER; note = 2'-O-methylguanosine-3'-phosphate
  modified_base 14: mod_base = OTHER; note = 2'-deoxy-2'-fluoroadenosine-3'-phosphate
  modified_base 15: mod_base = OTHER; note = 2'-O-methylguanosine-3'-phosphate
  modified_base 16: mod_base = OTHER; note = 2'-deoxy-2'-fluorocytidine-3'-phosphate
  modified_base 17: mod_base = OTHER; note = 2'-O-methyladenosine-3'-phosphate
  modified_base 18: mod_base = OTHER; note = 2'-O-methyluridine-3'-phosphate
  modified_base 19: mod_base = OTHER; note = 2'-O-methyluridine-3'-phosphate
  modified_base 20: mod_base = OTHER; note = 2'-O-methylcytidine-3'-phosphate
  modified_base 21: mod_base = OTHER; note = 2'-O-methyluridine-3'-phosphate
  modified_base 22: mod_base = OTHER; note = 2'-O-methyluridine-3'-phosphate
  modified_base 23: mod_base = OTHER; note = 2'-O-methylcytidine
taaaactatcatgagcattcttc

SEQ ID NO: 5157 - RNA, 23 nt, synthetic construct
  source 1..23: mol_type = other RNA
  modified_base 1: mod_base = OTHER; note = 2'-O-methyluridine-3'-phosphate 5'-(E)-Vinylphosphonate
  modified_base 2: mod_base = OTHER; note = 2'-deoxy-2'-fluoroguanosine-3'-phosphate
  modified_base 3: mod_base = OTHER; note = 2'-O-methylcytidine-3'-phosphate
  modified_base 4: mod_base = OTHER; note = 2'-O-methyladenosine-3'-phosphate
  modified_base 5: mod_base = OTHER; note = 2'-O-methyladenosine-3'-phosphate
  modified_base 6: mod_base = OTHER; note = 2'-deoxy-2'-fluoroadenosine-3'-phosphate
  modified_base 7: mod_base = OTHER; note = 2'-O-methyladenosine-3'-phosphate
  modified_base 8: mod_base = OTHER; note = 2'-O-methylcytidine-3'-phosphate
  modified_base 9: mod_base = OTHER; note = 2'-O-methyluridine-3'-phosphate
  modified_base 10: mod_base = OTHER; note = 2'-O-methyladenosine-3'-phosphate
  modified_base 11: mod_base = OTHER; note = 2'-O-methyluridine-3'-phosphate
  modified_base 12: mod_base = OTHER; note = 2'-O-methylcytidine-3'-phosphate
  modified_base 13: mod_base = OTHER; note = 2'-O-methyladenosine-3'-phosphate
  modified_base 14: mod_base = OTHER; note = 2'-deoxy-2'-fluorouridine-3'-phosphate
  modified_base 15: mod_base = OTHER; note = 2'-O-methylguanosine-3'-phosphate
  modified_base 16: mod_base = OTHER; note = 2'-deoxy-2'-fluoroadenosine-3'-phosphate
  modified_base 17: mod_base = OTHER; note = 2'-O-methylguanosine-3'-phosphate
  modified_base 18: mod_base = OTHER; note = 2'-O-methylcytidine-3'-phosphate
  modified_base 19: mod_base = OTHER; note = 2'-O-methyladenosine-3'-phosphate
  modified_base 20: mod_base = OTHER; note = 2'-O-methyluridine-3'-phosphate
  modified_base 21: mod_base = OTHER; note = 2'-O-methyluridine-3'-phosphate
  modified_base 22: mod_base = OTHER; note = 2'-O-methylcytidine-3'-phosphate
  modified_base 23: mod_base = OTHER; note = 2'-O-methyluridine
tgcaaaactatcatgagcattct

SEQ ID NO: 5158 - RNA, 23 nt, synthetic construct
  source 1..23: mol_type = other RNA
  modified_base 1: mod_base = OTHER; note = 2'-O-methyluridine-3'-phosphate 5'-(E)-Vinylphosphonate
  modified_base 2: mod_base = OTHER; note = 2'-deoxy-2'-fluoroadenosine-3'-phosphate
  modified_base 3: mod_base = OTHER; note = 2'-O-methyladenosine-3'-phosphate
  modified_base 4: mod_base = OTHER; note = 2'-O-methylguanosine-3'-phosphate
  modified_base 5: mod_base = OTHER; note = 2'-O-methylguanosine-3'-phosphate
  modified_base 6: mod_base = OTHER; note = 2'-deoxy-2'-fluorocytidine-3'-phosphate
  modified_base 7: mod_base = OTHER; note = 2'-O-methyladenosine-3'-phosphate
  modified_base 8: mod_base = OTHER; note = 2'-O-methyladenosine-3'-phosphate
  modified_base 9: mod_base = OTHER; note = 2'-O-methyladenosine-3'-phosphate
  modified_base 10: mod_base = OTHER; note = 2'-O-methyladenosine-3'-phosphate
  modified_base 11: mod_base = OTHER; note = 2'-O-methylcytidine-3'-phosphate
  modified_base 12: mod_base = OTHER; note = 2'-O-methyluridine-3'-phosphate
  modified_base 13: mod_base = OTHER; note = 2'-O-methyladenosine-3'-phosphate
  modified_base 14: mod_base = OTHER; note = 2'-deoxy-2'-fluorouridine-3'-phosphate
  modified_base 15: mod_base = OTHER; note = 2'-O-methylcytidine-3'-phosphate
  modified_base 16: mod_base = OTHER; note = 2'-deoxy-2'-fluoroadenosine-3'-phosphate
  modified_base 17: mod_base = OTHER; note = 2'-O-methyluridine-3'-phosphate
  modified_base 18: mod_base = OTHER; note = 2'-O-methylguanosine-3'-phosphate
  modified_base 19: mod_base = OTHER; note = 2'-O-methyladenosine-3'-phosphate
  modified_base 20: mod_base = OTHER; note = 2'-O-methylguanosine-3'-phosphate
  modified_base 21: mod_base = OTHER; note = 2'-O-methylcytidine-3'-phosphate
  modified_base 22: mod_base = OTHER; note = 2'-O-methyladenosine-3'-phosphate
  modified_base 23: mod_base = OTHER; note = 2'-O-methyluridine
taaggcaaaactatcatgagcat

SEQ ID NO: 5159 - RNA, 23 nt, synthetic construct
  source 1..23: mol_type = other RNA
  modified_base 1: mod_base = OTHER; note = 2'-O-methyluridine-3'-phosphate 5'-(E)-Vinylphosphonate
  modified_base 2: mod_base = OTHER; note = 2'-deoxy-2'-fluorouridine-3'-phosphate
  modified_base 3: mod_base = OTHER; note = 2'-O-methylguanosine-3'-phosphate
  modified_base 4: mod_base = OTHER; note = 2'-O-methyladenosine-3'-phosphate
  modified_base 5: mod_base = OTHER; note = 2'-O-methyladenosine-3'-phosphate
  modified_base 6: mod_base = OTHER; note = 2'-deoxy-2'-fluoroguanosine-3'-phosphate
  modified_base 7: mod_base = OTHER; note = 2'-O-methylguanosine-3'-phosphate
  modified_base 8: mod_base = OTHER; note = 2'-O-methylcytidine-3'-phosphate
  modified_base 9: mod_base = OTHER; note = 2'-O-methyladenosine-3'-phosphate
  modified_base 10: mod_base = OTHER; note = 2'-O-methyladenosine-3'-phosphate
  modified_base 11: mod_base = OTHER; note = 2'-O-methyladenosine-3'-phosphate
  modified_base 12: mod_base = OTHER; note = 2'-O-methyladenosine-3'-phosphate
  modified_base 13: mod_base = OTHER; note = 2'-O-methylcytidine-3'-phosphate
  modified_base 14: mod_base = OTHER; note = 2'-deoxy-2'-fluorouridine-3'-phosphate
  modified_base 15: mod_base = OTHER; note = 2'-O-methyladenosine-3'-phosphate
  modified_base 16: mod_base = OTHER; note = 2'-deoxy-2'-fluorouridine-3'-phosphate
  modified_base 17: mod_base = OTHER; note = 2'-O-methylcytidine-3'-phosphate
  modified_base 18: mod_base = OTHER; note = 2'-O-methyladenosine-3'-phosphate
  modified_base 19: mod_base = OTHER; note = 2'-O-methyluridine-3'-phosphate
  modified_base 20: mod_base = OTHER; note = 2'-O-methylguanosine-3'-phosphate
  modified_base 21: mod_base = OTHER; note = 2'-O-methyladenosine-3'-phosphate
  modified_base 22: mod_base = OTHER; note = 2'-O-methylguanosine-3'-phosphate
  modified_base 23: mod_base = OTHER; note = 2'-O-methylcytidine
ttgaaggcaaaactatcatgagc

SEQ ID NO: 5160 - RNA, 23 nt, synthetic construct
  source 1..23: mol_type = other RNA
  modified_base 1: mod_base = OTHER; note = 2'-O-methyluridine-3'-phosphate 5'-(E)-Vinylphosphonate
  modified_base 2: mod_base = OTHER; note = 2'-deoxy-2'-fluoroadenosine-3'-phosphate
  modified_base 3: mod_base = OTHER; note = 2'-O-methyladenosine-3'-phosphate
  modified_base 4: mod_base = OTHER; note = 2'-O-methyluridine-3'-phosphate
  modified_base 5: mod_base = OTHER; note = 2'-O-methylguanosine-3'-phosphate
  modified_base 6: mod_base = OTHER; note = 2'-deoxy-2'-fluoroadenosine-3'-phosphate
  modified_base 7: mod_base = OTHER; note = 2'-O-methyladenosine-3'-phosphate
  modified_base 8: mod_base = OTHER; note = 2'-O-methylguanosine-3'-phosphate
  modified_base 9: mod_base = OTHER; note = 2'-O-methylguanosine-3'-phosphate
  modified_base 10: mod_base = OTHER; note = 2'-O-methylcytidine-3'-phosphate
  modified_base 11: mod_base = OTHER; note = 2'-O-methyladenosine-3'-phosphate
  modified_base 12: mod_base = OTHER; note = 2'-O-methyladenosine-3'-phosphate
  modified_base 13: mod_base = OTHER; note = 2'-O-methyladenosine-3'-phosphate
  modified_base 14: mod_base = OTHER; note = 2'-deoxy-2'-fluoroadenosine-3'-phosphate
  modified_base 15: mod_base = OTHER; note = 2'-O-methylcytidine-3'-phosphate
  modified_base 16: mod_base = OTHER; note = 2'-deoxy-2'-fluorouridine-3'-phosphate
  modified_base 17: mod_base = OTHER; note = 2'-O-methyladenosine-3'-phosphate
  modified_base 18: mod_base = OTHER; note = 2'-O-methyluridine-3'-phosphate
  modified_base 19: mod_base = OTHER; note = 2'-O-methylcytidine-3'-phosphate
  modified_base 20: mod_base = OTHER; note = 2'-O-methyladenosine-3'-phosphate
  modified_base 21: mod_base = OTHER; note = 2'-O-methyluridine-3'-phosphate
  modified_base 22: mod_base = OTHER; note = 2'-O-methylguanosine-3'-phosphate
  modified_base 23: mod_base = OTHER; note = 2'-O-methyladenosine
taatgaaggcaaaactatcatga

SEQ ID NO: 5161 - RNA, 23 nt, synthetic construct
  source 1..23: mol_type = other RNA
  modified_base 1: mod_base = OTHER; note = 2'-O-methyluridine-3'-phosphate 5'-(E)-Vinylphosphonate
  modified_base 2: mod_base = OTHER; note = 2'-deoxy-2'-fluoroguanosine-3'-phosphate
  modified_base 3: mod_base = OTHER; note = 2'-O-methyladenosine-3'-phosphate
  modified_base 4: mod_base = OTHER; note = 2'-O-methyladenosine-3'-phosphate
  modified_base 5: mod_base = OTHER; note = 2'-O-methyluridine-3'-phosphate
  modified_base 6: mod_base = OTHER; note = 2'-deoxy-2'-fluoroguanosine-3'-phosphate
  modified_base 7: mod_base = OTHER; note = 2'-O-methyladenosine-3'-phosphate
  modified_base 8: mod_base = OTHER; note = 2'-O-methyladenosine-3'-phosphate
  modified_base 9: mod_base = OTHER; note = 2'-O-methylguanosine-3'-phosphate
  modified_base 10: mod_base = OTHER; note = 2'-O-methylguanosine-3'-phosphate
  modified_base 11: mod_base = OTHER; note = 2'-O-methylcytidine-3'-phosphate
  modified_base 12: mod_base = OTHER; note = 2'-O-methyladenosine-3'-phosphate
  modified_base 13: mod_base = OTHER; note = 2'-O-methyladenosine-3'-phosphate
  modified_base 14: mod_base = OTHER; note = 2'-deoxy-2'-fluoroadenosine-3'-phosphate
  modified_base 15: mod_base = OTHER; note = 2'-O-methyladenosine-3'-phosphate
  modified_base 16: mod_base = OTHER; note = 2'-deoxy-2'-fluorocytidine-3'-phosphate
  modified_base 17: mod_base = OTHER; note = 2'-O-methyluridine-3'-phosphate
  modified_base 18: mod_base = OTHER; note = 2'-O-methyladenosine-3'-phosphate
  modified_base 19: mod_base = OTHER; note = 2'-O-methyluridine-3'-phosphate
  modified_base 20: mod_base = OTHER; note = 2'-O-methylcytidine-3'-phosphate
  modified_base 21: mod_base = OTHER; note = 2'-O-methyladenosine-3'-phosphate
  modified_base 22: mod_base = OTHER; note = 2'-O-methyluridine-3'-phosphate
  modified_base 23: mod_base = OTHER; note = 2'-O-methylguanosine
tgaatgaaggcaaaactatcatg

SEQ ID NO: 5162 - RNA, 23 nt, synthetic construct
  source 1..23: mol_type = other RNA
  modified_base 1: mod_base = OTHER; note = 2'-O-methyluridine-3'-phosphate 5'-(E)-Vinylphosphonate
  modified_base 2: mod_base = OTHER; note = 2'-deoxy-2'-fluorouridine-3'-phosphate
  modified_base 3: mod_base = OTHER; note = 2'-O-methyladenosine-3'-phosphate
  modified_base 4: mod_base = OTHER; note = 2'-O-methylguanosine-3'-phosphate
  modified_base 5: mod_base = OTHER; note = 2'-O-methyladenosine-3'-phosphate
  modified_base 6: mod_base = OTHER; note = 2'-deoxy-2'-fluoroadenosine-3'-phosphate
  modified_base 7: mod_base = OTHER; note = 2'-O-methyluridine-3'-phosphate
  modified_base 8: mod_base = OTHER; note = 2'-O-methylguanosine-3'-phosphate
  modified_base 9: mod_base = OTHER; note = 2'-O-methyladenosine-3'-phosphate
  modified_base 10: mod_base = OTHER; note = 2'-O-methyladenosine-3'-phosphate
  modified_base 11: mod_base = OTHER; note = 2'-O-methylguanosine-3'-phosphate
  modified_base 12: mod_base = OTHER; note = 2'-O-methylguanosine-3'-phosphate
  modified_base 13: mod_base = OTHER; note = 2'-O-methylcytidine-3'-phosphate
  modified_base 14: mod_base = OTHER; note = 2'-deoxy-2'-fluoroadenosine-3'-phosphate
  modified_base 15: mod_base = OTHER; note = 2'-O-methyladenosine-3'-phosphate
  modified_base 16: mod_base = OTHER; note = 2'-deoxy-2'-fluoroadenosine-3'-phosphate
  modified_base 17: mod_base = OTHER; note = 2'-O-methyladenosine-3'-phosphate
  modified_base 18: mod_base = OTHER; note = 2'-O-methylcytidine-3'-phosphate
  modified_base 19: mod_base = OTHER; note = 2'-O-methyluridine-3'-phosphate
  modified_base 20: mod_base = OTHER; note = 2'-O-methyladenosine-3'-phosphate
  modified_base 21: mod_base = OTHER; note = 2'-O-methyluridine-3'-phosphate
  modified_base 22: mod_base = OTHER; note = 2'-O-methylcytidine-3'-phosphate
  modified_base 23: mod_base = OTHER; note = 2'-O-methyladenosine
ttagaatgaaggcaaaactatca

SEQ ID NO: 5163 - RNA, 23 nt, synthetic construct
  source 1..23: mol_type = other RNA
  modified_base 1: mod_base = OTHER; note = 2'-O-methyluridine-3'-phosphate 5'-(E)-Vinylphosphonate
  modified_base 2: mod_base = OTHER; note = 2'-deoxy-2'-fluorouridine-3'-phosphate
  modified_base 3: mod_base = OTHER; note = 2'-O-methyladenosine-3'-phosphate
  modified_base 4: mod_base = OTHER; note = 2'-O-methyluridine-3'-phosphate
  modified_base 5: mod_base = OTHER; note = 2'-O-methyluridine-3'-phosphate
  modified_base 6: mod_base = OTHER; note = 2'-deoxy-2'-fluorocytidine-3'-phosphate
  modified_base 7: mod_base = OTHER; note = 2'-O-methyladenosine-3'-phosphate
  modified_base 8: mod_base = OTHER; note = 2'-O-methyluridine-3'-phosphate
  modified_base 9: mod_base = OTHER; note = 2'-O-methyluridine-3'-phosphate
  modified_base 10: mod_base = OTHER; note = 2'-O-methyladenosine-3'-phosphate
  modified_base 11: mod_base = OTHER; note = 2'-O-methylcytidine-3'-phosphate
  modified_base 12: mod_base = OTHER; note = 2'-O-methyluridine-3'-phosphate
  modified_base 13: mod_base = OTHER; note = 2'-O-methylcytidine-3'-phosphate
  modified_base 14: mod_base = OTHER; note = 2'-deoxy-2'-fluorouridine-3'-phosphate
  modified_base 15: mod_base = OTHER; note = 2'-O-methylguanosine-3'-phosphate
  modified_base 16: mod_base = OTHER; note = 2'-deoxy-2'-fluorouridine-3'-phosphate
  modified_base 17: mod_base = OTHER; note = 2'-O-methylguanosine-3'-phosphate
  modified_base 18: mod_base = OTHER; note = 2'-O-methyluridine-3'-phosphate
  modified_base 19: mod_base = OTHER; note = 2'-O-methylcytidine-3'-phosphate
  modified_base 20: mod_base = OTHER; note = 2'-O-methylcytidine-3'-phosphate
  modified_base 21: mod_base = OTHER; note = 2'-O-methyladenosine-3'-phosphate
  modified_base 22: mod_base = OTHER; note = 2'-O-methylcytidine-3'-phosphate
  modified_base 23: mod_base = OTHER; note = 2'-O-methyladenosine
ttattcattactctgtgtccaca

SEQ ID NO: 5164 - RNA, 23 nt, synthetic construct
  source 1..23: mol_type = other RNA
  modified_base 1: mod_base = OTHER; note = 2'-O-methyluridine-3'-phosphate 5'-(E)-Vinylphosphonate
  modified_base 2: mod_base = OTHER; note = 2'-deoxy-2'-fluoroadenosine-3'-phosphate
  modified_base 3: mod_base = OTHER; note = 2'-O-methyladenosine-3'-phosphate
  modified_base 4: mod_base = OTHER; note = 2'-O-methyladenosine-3'-phosphate
  modified_base 5: mod_base = OTHER; note = 2'-O-methyluridine-3'-phosphate
  modified_base 6: mod_base = OTHER; note = 2'-deoxy-2'-fluoroadenosine-3'-phosphate
  modified_base 7: mod_base = OTHER; note = 2'-O-methyluridine-3'-phosphate
  modified_base 8: mod_base = OTHER; note = 2'-O-methyluridine-3'-phosphate
  modified_base 9: mod_base = OTHER; note = 2'-O-methylcytidine-3'-phosphate
  modified_base 10: mod_base = OTHER; note = 2'-O-methyladenosine-3'-phosphate
  modified_base 11: mod_base = OTHER; note = 2'-O-methyluridine-3'-phosphate
  modified_base 12: mod_base = OTHER; note = 2'-O-methyluridine-3'-phosphate
  modified_base 13: mod_base = OTHER; note = 2'-O-methyladenosine-3'-phosphate
  modified_base 14: mod_base = OTHER; note = 2'-deoxy-2'-fluorocytidine-3'-phosphate
  modified_base 15: mod_base = OTHER; note = 2'-O-methyluridine-3'-phosphate
  modified_base 16: mod_base = OTHER; note = 2'-deoxy-2'-fluorocytidine-3'-phosphate
  modified_base 17: mod_base = OTHER; note = 2'-O-methyluridine-3'-phosphate
  modified_base 18: mod_base = OTHER; note = 2'-O-methylguanosine-3'-phosphate
  modified_base 19: mod_base = OTHER; note = 2'-O-methyluridine-3'-phosphate
  modified_base 20: mod_base = OTHER; note = 2'-O-methylguanosine-3'-phosphate
  modified_base 21: mod_base = OTHER; note = 2'-O-methyluridine-3'-phosphate
  modified_base 22: mod_base = OTHER; note = 2'-O-methylcytidine-3'-phosphate
  modified_base 23: mod_base = OTHER; note = 2'-O-methylcytidine
taaatattcattactctgtgtcc

SEQ ID NO: 5165 - RNA, 23 nt, synthetic construct
  source 1..23: mol_type = other RNA
  modified_base 1: mod_base = OTHER; note = 2'-O-methyluridine-3'-phosphate 5'-(E)-Vinylphosphonate
  modified_base 2: mod_base = OTHER; note = 2'-deoxy-2'-fluorocytidine-3'-phosphate
  modified_base 3: mod_base = OTHER; note = 2'-O-methylcytidine-3'-phosphate
  modified_base 4: mod_base = OTHER; note = 2'-O-methylcytidine-3'-phosphate
  modified_base 5: mod_base = OTHER; note = 2'-O-methyladenosine-3'-phosphate
  modified_base 6: mod_base = OTHER; note = 2'-deoxy-2'-fluorouridine-3'-phosphate
  modified_base 7: mod_base = OTHER; note = 2'-O-methyluridine-3'-phosphate
  modified_base 8: mod_base = OTHER; note = 2'-O-methyladenosine-3'-phosphate
  modified_base 9: mod_base = OTHER; note = 2'-O-methyladenosine-3'-phosphate
  modified_base 10: mod_base = OTHER; note = 2'-O-methyladenosine-3'-phosphate
  modified_base 11: mod_base = OTHER; note = 2'-O-methyluridine-3'-phosphate
  modified_base 12: mod_base = OTHER; note = 2'-O-methyladenosine-3'-phosphate
  modified_base 13: mod_base = OTHER; note = 2'-O-methyluridine-3'-phosphate
  modified_base 14: mod_base = OTHER; note = 2'-deoxy-2'-fluorouridine-3'-phosphate
  modified_base 15: mod_base = OTHER; note = 2'-O-methylcytidine-3'-phosphate
  modified_base 16: mod_base = OTHER; note = 2'-deoxy-2'-fluoroadenosine-3'-phosphate
  modified_base 17: mod_base = OTHER; note = 2'-O-methyluridine-3'-phosphate
  modified_base 18: mod_base = OTHER; note = 2'-O-methyluridine-3'-phosphate
  modified_base 19: mod_base = OTHER; note = 2'-O-methyladenosine-3'-phosphate
  modified_base 20: mod_base = OTHER; note = 2'-O-methylcytidine-3'-phosphate
  modified_base 21: mod_base = OTHER; note = 2'-O-methyluridine-3'-phosphate
  modified_base 22: mod_base = OTHER; note = 2'-O-methylcytidine-3'-phosphate
  modified_base 23: mod_base = OTHER; note = 2'-O-methyluridine
tcccattaaatattcattactct

SEQ ID NO: 5166 - RNA, 23 nt, synthetic construct
  source 1..23: mol_type = other RNA
  modified_base 1: mod_base = OTHER; note = 2'-O-methyluridine-3'-phosphate 5'-(E)-Vinylphosphonate
  modified_base 2: mod_base = OTHER; note = 2'-deoxy-2'-fluoroguanosine-3'-phosphate
  modified_base 3: mod_base = OTHER; note = 2'-O-methylguanosine-3'-phosphate
  modified_base 4: mod_base = OTHER; note = 2'-O-methylcytidine-3'-phosphate
  modified_base 5: mod_base = OTHER; note = 2'-O-methyladenosine-3'-phosphate
  modified_base 6: mod_base = OTHER; note = 2'-deoxy-2'-fluorouridine-3'-phosphate
  modified_base 7: mod_base = OTHER; note = 2'-O-methyladenosine-3'-phosphate
  modified_base 8: mod_base = OTHER; note = 2'-O-methyluridine-3'-phosphate
  modified_base 9: mod_base = OTHER; note = 2'-O-methyluridine-3'-phosphate
  modified_base 10: mod_base = OTHER; note = 2'-O-methyluridine-3'-phosphate
  modified_base 11: mod_base = OTHER; note = 2'-O-methyladenosine-3'-phosphate
  modified_base 12: mod_base = OTHER; note = 2'-O-methyladenosine-3'-phosphate
  modified_base 13: mod_base = OTHER; note = 2'-O-methyluridine-3'-phosphate
  modified_base 14: mod_base = OTHER; note = 2'-deoxy-2'-fluoroguanosine-3'-phosphate
  modified_base 15: mod_base = OTHER; note = 2'-O-methyluridine-3'-phosphate
  modified_base 16: mod_base = OTHER; note = 2'-deoxy-2'-fluorocytidine-3'-phosphate
  modified_base 17: mod_base = OTHER; note = 2'-O-methylcytidine-3'-phosphate
  modified_base 18: mod_base = OTHER; note = 2'-O-methylcytidine-3'-phosphate
  modified_base 19: mod_base = OTHER; note = 2'-O-methyladenosine-3'-phosphate
  modified_base 20: mod_base = OTHER; note = 2'-O-methyluridine-3'-phosphate
  modified_base 21: mod_base = OTHER; note = 2'-O-methyluridine-3'-phosphate
  modified_base 22: mod_base = OTHER; note = 2'-O-methyladenosine-3'-phosphate
  modified_base 23: mod_base = OTHER; note = 2'-O-methyladenosine
tggcatatttaatgtcccattaa

SEQ ID NO: 5167 - RNA, 23 nt, synthetic construct
  source 1..23: mol_type = other RNA
  modified_base 1: mod_base = OTHER; note = 2'-O-methyluridine-3'-phosphate 5'-(E)-Vinylphosphonate
  modified_base 2: mod_base = OTHER; note = 2'-deoxy-2'-fluoroguanosine-3'-phosphate
  modified_base 3: mod_base = OTHER; note = 2'-O-methylguanosine-3'-phosphate
  modified_base 4: mod_base = OTHER; note = 2'-O-methylguanosine-3'-phosphate
  modified_base 5: mod_base = OTHER; note = 2'-O-methylcytidine-3'-phosphate
  modified_base 6: mod_base = OTHER; note = 2'-deoxy-2'-fluoroadenosine-3'-phosphate
  modified_base 7: mod_base = OTHER; note = 2'-O-methyluridine-3'-phosphate
  modified_base 8: mod_base = OTHER; note = 2'-O-methyladenosine-3'-phosphate
  modified_base 9: mod_base = OTHER; note = 2'-O-methyluridine-3'-phosphate
  modified_base 10: mod_base = OTHER; note = 2'-O-methyluridine-3'-phosphate
  modified_base 11: mod_base = OTHER; note = 2'-O-methyluridine-3'-phosphate
  modified_base 12: mod_base = OTHER; note = 2'-O-methyladenosine-3'-phosphate
  modified_base 13: mod_base = OTHER; note = 2'-O-methyladenosine-3'-phosphate
  modified_base 14: mod_base = OTHER; note = 2'-deoxy-2'-fluorouridine-3'-phosphate
  modified_base 15: mod_base = OTHER; note = 2'-O-methylguanosine-3'-phosphate
  modified_base 16: mod_base = OTHER; note = 2'-deoxy-2'-fluorouridine-3'-phosphate
  modified_base 17: mod_base = OTHER; note = 2'-O-methylcytidine-3'-phosphate
  modified_base 18: mod_base = OTHER; note = 2'-O-methylcytidine-3'-phosphate
  modified_base 19: mod_base = OTHER; note = 2'-O-methylcytidine-3'-phosphate
  modified_base 20: mod_base = OTHER; note = 2'-O-methyladenosine-3'-phosphate
  modified_base 21: mod_base = OTHER; note = 2'-O-methyluridine-3'-phosphate
  modified_base 22: mod_base = OTHER; note = 2'-O-methyluridine-3'-phosphate
  modified_base 23: mod_base = OTHER; note = 2'-O-methyladenosine
tgggcatatttaatgtcccatta

SEQ ID NO: 5168 - RNA, 23 nt, synthetic construct
  source 1..23: mol_type = other RNA
  modified_base 1: mod_base = OTHER; note = 2'-O-methyluridine-3'-phosphate 5'-(E)-Vinylphosphonate
  modified_base 2: mod_base = OTHER; note = 2'-deoxy-2'-fluoroadenosine-3'-phosphate
  modified_base 3: mod_base = OTHER; note = 2'-O-methylguanosine-3'-phosphate
  modified_base 4: mod_base = OTHER; note = 2'-O-methylguanosine-3'-phosphate
  modified_base 5: mod_base = OTHER; note = 2'-O-methylguanosine-3'-phosphate
  modified_base 6: mod_base = OTHER; note = 2'-deoxy-2'-fluorocytidine-3'-phosphate
  modified_base 7: mod_base = OTHER; note = 2'-O-methyladenosine-3'-phosphate
  modified_base 8: mod_base = OTHER; note = 2'-O-methyluridine-3'-phosphate
  modified_base 9: mod_base = OTHER; note = 2'-O-methyladenosine-3'-phosphate
  modified_base 10: mod_base = OTHER; note = 2'-O-methyluridine-3'-phosphate
  modified_base 11: mod_base = OTHER; note = 2'-O-methyluridine-3'-phosphate
  modified_base 12: mod_base = OTHER; note = 2'-O-methyluridine-3'-phosphate
  modified_base 13: mod_base = OTHER; note = 2'-O-methyladenosine-3'-phosphate
  modified_base 14: mod_base = OTHER; note = 2'-deoxy-2'-fluoroadenosine-3'-phosphate
  modified_base 15: mod_base = OTHER; note = 2'-O-methyluridine-3'-phosphate
  modified_base 16: mod_base = OTHER; note = 2'-deoxy-2'-fluoroguanosine-3'-phosphate
  modified_base 17: mod_base = OTHER; note = 2'-O-methyluridine-3'-phosphate
  modified_base 18: mod_base = OTHER; note = 2'-O-methylcytidine-3'-phosphate
  modified_base 19: mod_base = OTHER; note = 2'-O-methylcytidine-3'-phosphate
  modified_base 20: mod_base = OTHER; note = 2'-O-methylcytidine-3'-phosphate
  modified_base 21: mod_base = OTHER; note = 2'-O-methyladenosine-3'-phosphate
  modified_base 22: mod_base = OTHER; note = 2'-O-methyluridine-3'-phosphate
  modified_base 23: mod_base = OTHER; note = 2'-O-methyluridine
tagggcatatttaatgtcccatt

SEQ ID NO: 5169 - RNA, 23 nt, synthetic construct
  source 1..23: mol_type = other RNA
  modified_base 1: mod_base = OTHER; note = 2'-O-methyluridine-3'-phosphate 5'-(E)-Vinylphosphonate
  modified_base 2: mod_base = OTHER; note = 2'-deoxy-2'-fluoroadenosine-3'-phosphate
  modified_base 3: mod_base = OTHER; note = 2'-O-methyladenosine-3'-phosphate
  modified_base 4: mod_base = OTHER; note = 2'-O-methylguanosine-3'-phosphate
  modified_base 5: mod_base = OTHER; note = 2'-O-methylguanosine-3'-phosphate
  modified_base 6: mod_base = OTHER; note = 2'-deoxy-2'-fluoroguanosine-3'-phosphate
  modified_base 7: mod_base = OTHER; note = 2'-O-methylcytidine-3'-phosphate
  modified_base 8: mod_base = OTHER; note = 2'-O-methyladenosine-3'-phosphate
  modified_base 9: mod_base = OTHER; note = 2'-O-methyluridine-3'-phosphate
  modified_base 10: mod_base = OTHER; note = 2'-O-methyladenosine-3'-phosphate
  modified_base 11: mod_base = OTHER; note = 2'-O-methyluridine-3'-phosphate
  modified_base 12: mod_base = OTHER; note = 2'-O-methyluridine-3'-phosphate
  modified_base 13: mod_base = OTHER; note = 2'-O-methyluridine-3'-phosphate
  modified_base 14: mod_base = OTHER; note = 2'-deoxy-2'-fluoroadenosine-3'-phosphate
  modified_base 15: mod_base = OTHER; note = 2'-O-methyladenosine-3'-phosphate
  modified_base 16: mod_base = OTHER; note = 2'-deoxy-2'-fluorouridine-3'-phosphate
  modified_base 17: mod_base = OTHER; note = 2'-O-methylguanosine-3'-phosphate
  modified_base 18: mod_base = OTHER; note = 2'-O-methyluridine-3'-phosphate
  modified_base 19: mod_base = OTHER; note = 2'-O-methylcytidine-3'-phosphate
  modified_base 20: mod_base = OTHER; note = 2'-O-methylcytidine-3'-phosphate
  modified_base 21: mod_base = OTHER; note = 2'-O-methylcytidine-3'-phosphate
  modified_base 22: mod_base = OTHER; note = 2'-O-methyladenosine-3'-phosphate
  modified_base 23: mod_base = OTHER; note = 2'-O-methyluridine
taagggcatatttaatgtcccat

SEQ ID NO: 5170 - RNA, 23 nt, synthetic construct
  source 1..23: mol_type = other RNA
  modified_base 1: mod_base = OTHER; note = 2'-O-methyluridine-3'-phosphate 5'-(E)-Vinylphosphonate
  modified_base 2: mod_base = OTHER; note = 2'-deoxy-2'-fluoroguanosine-3'-phosphate
  modified_base 3: mod_base = OTHER; note = 2'-O-methyladenosine-3'-phosphate
  modified_base 4: mod_base = OTHER; note = 2'-O-methyladenosine-3'-phosphate
  modified_base 5: mod_base = OTHER; note = 2'-O-methylguanosine-3'-phosphate
  modified_base 6: mod_base = OTHER; note = 2'-deoxy-2'-fluoroguanosine-3'-phosphate
  modified_base 7: mod_base = OTHER; note = 2'-O-methylguanosine-3'-phosphate
  modified_base 8: mod_base = OTHER; note = 2'-O-methylcytidine-3'-phosphate
  modified_base 9: mod_base = OTHER; note = 2'-O-methyladenosine-3'-phosphate
  modified_base 10: mod_base = OTHER; note = 2'-O-methyluridine-3'-phosphate
  modified_base 11: mod_base = OTHER; note = 2'-O-methyladenosine-3'-phosphate
  modified_base 12: mod_base = OTHER; note = 2'-O-methyluridine-3'-phosphate
  modified_base 13: mod_base = OTHER; note = 2'-O-methyluridine-3'-phosphate
  modified_base 14: mod_base = OTHER; note = 2'-deoxy-2'-fluorouridine-3'-phosphate
  modified_base 15: mod_base = OTHER; note = 2'-O-methyladenosine-3'-phosphate
  modified_base 16: mod_base = OTHER; note = 2'-deoxy-2'-fluoroadenosine-3'-phosphate
  modified_base 17: mod_base = OTHER; note = 2'-O-methyluridine-3'-phosphate
  modified_base 18: mod_base = OTHER; note = 2'-O-methylguanosine-3'-phosphate
  modified_base 19: mod_base = OTHER; note = 2'-O-methyluridine-3'-phosphate
  modified_base 20: mod_base = OTHER; note = 2'-O-methylcytidine-3'-phosphate
  modified_base 21: mod_base = OTHER; note = 2'-O-methylcytidine-3'-phosphate
  modified_base 22: mod_base = OTHER; note = 2'-O-methylcytidine-3'-phosphate
  modified_base 23: mod_base = OTHER; note = 2'-O-methyladenosine
tgaagggcatatttaatgtccca

SEQ ID NO: 5171 - RNA, 23 nt, synthetic construct
  source 1..23: mol_type = other RNA
  modified_base 1: mod_base = OTHER; note = 2'-O-methyluridine-3'-phosphate 5'-(E)-Vinylphosphonate
  modified_base 2: mod_base = OTHER; note = 2'-deoxy-2'-fluorouridine-3'-phosphate
  modified_base 3: mod_base = OTHER; note = 2'-O-methylguanosine-3'-phosphate
  modified_base 4: mod_base = OTHER; note = 2'-O-methyladenosine-3'-phosphate
  modified_base 5: mod_base = OTHER; note = 2'-O-methyladenosine-3'-phosphate
  modified_base 6: mod_base = OTHER; note = 2'-deoxy-2'-fluoroguanosine-3'-phosphate
  modified_base 7: mod_base = OTHER; note = 2'-O-methylguanosine-3'-phosphate
  modified_base 8: mod_base = OTHER; note = 2'-O-methylguanosine-3'-phosphate
  modified_base 9: mod_base = OTHER; note = 2'-O-methylcytidine-3'-phosphate
  modified_base 10: mod_base = OTHER; note = 2'-O-methyladenosine-3'-phosphate
  modified_base 11: mod_base = OTHER; note = 2'-O-methyluridine-3'-phosphate
  modified_base 12: mod_base = OTHER; note = 2'-O-methyladenosine-3'-phosphate
  modified_base 13: mod_base = OTHER; note = 2'-O-methyluridine-3'-phosphate
  modified_base 14: mod_base = OTHER; note = 2'-deoxy-2'-fluorouridine-3'-phosphate
  modified_base 15: mod_base = OTHER; note = 2'-O-methyluridine-3'-phosphate
  modified_base 16: mod_base = OTHER; note = 2'-deoxy-2'-fluoroadenosine-3'-phosphate
  modified_base 17: mod_base = OTHER; note = 2'-O-methyladenosine-3'-phosphate
  modified_base 18: mod_base = OTHER; note = 2'-O-methyluridine-3'-phosphate
  modified_base 19: mod_base = OTHER; note = 2'-O-methylguanosine-3'-phosphate
  modified_base 20: mod_base = OTHER; note = 2'-O-methyluridine-3'-phosphate
  modified_base 21: mod_base = OTHER; note = 2'-O-methylcytidine-3'-phosphate
  modified_base 22: mod_base = OTHER; note = 2'-O-methylcytidine-3'-phosphate
  modified_base 23: mod_base = OTHER; note = 2'-O-methylcytidine
ttgaagggcatatttaatgtccc

SEQ ID NO: 5172 - RNA, 23 nt, synthetic construct
  source 1..23: mol_type = other RNA
  modified_base 1: mod_base = OTHER; note = 2'-O-methyluridine-3'-phosphate 5'-(E)-Vinylphosphonate
  modified_base 2: mod_base = OTHER; note = 2'-deoxy-2'-fluorouridine-3'-phosphate
  modified_base 3: mod_base = OTHER; note = 2'-O-methyluridine-3'-phosphate
  modified_base 4: mod_base = OTHER; note = 2'-O-methylguanosine-3'-phosphate
  modified_base 5: mod_base = OTHER; note = 2'-O-methyladenosine-3'-phosphate
  modified_base 6: mod_base = OTHER; note = 2'-deoxy-2'-fluoroadenosine-3'-phosphate
  modified_base 7: mod_base = OTHER; note = 2'-O-methylguanosine-3'-phosphate
  modified_base 8: mod_base = OTHER; note = 2'-O-methylguanosine-3'-phosphate
  modified_base 9: mod_base = OTHER; note = 2'-O-methylguanosine-3'-phosphate
  modified_base 10: mod_base = OTHER; note = 2'-O-methylcytidine-3'-phosphate
  modified_base 11: mod_base = OTHER; note = 2'-O-methyladenosine-3'-phosphate
  modified_base 12: mod_base = OTHER; note = 2'-O-methyluridine-3'-phosphate
  modified_base 13: mod_base = OTHER; note = 2'-O-methyladenosine-3'-phosphate
  modified_base 14: mod_base = OTHER; note = 2'-deoxy-2'-fluorouridine-3'-phosphate
  modified_base 15: mod_base = OTHER; note = 2'-O-methyluridine-3'-phosphate
  modified_base 16: mod_base = OTHER; note = 2'-deoxy-2'-fluorouridine-3'-phosphate
  modified_base 17: mod_base = OTHER; note = 2'-O-methyladenosine-3'-phosphate
  modified_base 18: mod_base = OTHER; note = 2'-O-methyladenosine-3'-phosphate
  modified_base 19: mod_base = OTHER; note = 2'-O-methyluridine-3'-phosphate
  modified_base 20: mod_base = OTHER; note = 2'-O-methylguanosine-3'-phosphate
  modified_base 21: mod_base = OTHER; note = 2'-O-methyluridine-3'-phosphate
  modified_base 22: mod_base = OTHER; note = 2'-O-methylcytidine-3'-phosphate
  modified_base 23: mod_base = OTHER; note = 2'-O-methylcytidine
tttgaagggcatatttaatgtcc

SEQ ID NO: 5173 - RNA, 23 nt, synthetic construct
  source 1..23: mol_type = other RNA
  modified_base 1: mod_base = OTHER; note = 2'-O-methyluridine-3'-phosphate 5'-(E)-Vinylphosphonate
  modified_base 2: mod_base = OTHER; note = 2'-deoxy-2'-fluorouridine-3'-phosphate
  modified_base 3: mod_base = OTHER; note = 2'-O-methyluridine-3'-phosphate
  modified_base 4: mod_base = OTHER; note = 2'-O-methyluridine-3'-phosphate
  modified_base 5: mod_base = OTHER; note = 2'-O-methylguanosine-3'-phosphate
  modified_base 6: mod_base = OTHER; note = 2'-deoxy-2'-fluoroadenosine-3'-phosphate
  modified_base 7: mod_base = OTHER; note = 2'-O-methyladenosine-3'-phosphate
  modified_base 8: mod_base = OTHER; note = 2'-O-methylguanosine-3'-phosphate
  modified_base 9: mod_base = OTHER; note = 2'-O-methylguanosine-3'-phosphate
  modified_base 10: mod_base = OTHER; note = 2'-O-methylguanosine-3'-phosphate
  modified_base 11: mod_base = OTHER; note = 2'-O-methylcytidine-3'-phosphate
  modified_base 12: mod_base = OTHER; note = 2'-O-methyladenosine-3'-phosphate
  modified_base 13: mod_base = OTHER; note = 2'-O-methyluridine-3'-phosphate
  modified_base 14: mod_base = OTHER; note = 2'-deoxy-2'-fluoroadenosine-3'-phosphate
  modified_base 15: mod_base = OTHER; note = 2'-O-methyluridine-3'-phosphate
  modified_base 16: mod_base = OTHER; note = 2'-deoxy-2'-fluorouridine-3'-phosphate
  modified_base 17: mod_base = OTHER; note = 2'-O-methyluridine-3'-phosphate
  modified_base 18: mod_base = OTHER; note = 2'-O-methyladenosine-3'-phosphate
  modified_base 19: mod_base = OTHER; note = 2'-O-methyladenosine-3'-phosphate
  modified_base 20: mod_base = OTHER; note = 2'-O-methyluridine-3'-phosphate
  modified_base 21: mod_base = OTHER; note = 2'-O-methylguanosine-3'-phosphate
  modified_base 22: mod_base = OTHER; note = 2'-O-methyluridine-3'-phosphate
  modified_base 23: mod_base = OTHER; note = 2'-O-methylcytidine
ttttgaagggcatatttaatgtc

SEQ ID NO: 5174 - RNA, 23 nt, synthetic construct
  source 1..23: mol_type = other RNA
  modified_base 1: mod_base = OTHER; note = 2'-O-methyluridine-3'-phosphate 5'-(E)-Vinylphosphonate
  modified_base 2: mod_base = OTHER; note = 2'-deoxy-2'-fluoroadenosine-3'-phosphate
  modified_base 3: mod_base = OTHER; note = 2'-O-methyluridine-3'-phosphate
  modified_base 4: mod_base = OTHER; note = 2'-O-methyluridine-3'-phosphate
  modified_base 5: mod_base = OTHER; note = 2'-O-methyluridine-3'-phosphate
  modified_base 6: mod_base = OTHER; note = 2'-deoxy-2'-fluoroguanosine-3'-phosphate
  modified_base 7: mod_base = OTHER; note = 2'-O-methyladenosine-3'-phosphate
  modified_base 8: mod_base = OTHER; note = 2'-O-methyladenosine-3'-phosphate
  modified_base 9: mod_base = OTHER; note = 2'-O-methylguanosine-3'-phosphate
  modified_base 10: mod_base = OTHER; note = 2'-O-methylguanosine-3'-phosphate
  modified_base 11: mod_base = OTHER; note = 2'-O-methylguanosine-3'-phosphate
  modified_base 12: mod_base = OTHER; note = 2'-O-methylcytidine-3'-phosphate
  modified_base 13: mod_base = OTHER; note = 2'-O-methyladenosine-3'-phosphate
  modified_base 14: mod_base = OTHER; note = 2'-deoxy-2'-fluorouridine-3'-phosphate
  modified_base 15: mod_base = OTHER; note = 2'-O-methyladenosine-3'-phosphate
  modified_base 16: mod_base = OTHER; note = 2'-deoxy-2'-fluorouridine-3'-phosphate
  modified_base 17: mod_base = OTHER; note = 2'-O-methyluridine-3'-phosphate
  modified_base 18: mod_base = OTHER; note = 2'-O-methyluridine-3'-phosphate
  modified_base 19: mod_base = OTHER; note = 2'-O-methyladenosine-3'-phosphate
  modified_base 20: mod_base = OTHER; note = 2'-O-methyladenosine-3'-phosphate
  modified_base 21: mod_base = OTHER; note = 2'-O-methyluridine-3'-phosphate
  modified_base 22: mod_base = OTHER; note = 2'-O-methylguanosine-3'-phosphate
  modified_base 23: mod_base = OTHER; note = 2'-O-methyluridine
tatttgaagggcatatttaatgt

SEQ ID NO: 5175 - RNA, 23 nt, synthetic construct
  source 1..23: mol_type = other RNA
  modified_base 1: mod_base = OTHER; note = 2'-O-methyluridine-3'-phosphate 5'-(E)-Vinylphosphonate
  modified_base 2: mod_base = OTHER; note = 2'-deoxy-2'-fluoroguanosine-3'-phosphate
  modified_base 3: mod_base = OTHER; note = 2'-O-methyladenosine-3'-phosphate
  modified_base 4: mod_base = OTHER; note = 2'-O-methyluridine-3'-phosphate
  modified_base 5: mod_base = OTHER; note = 2'-O-methyluridine-3'-phosphate
  modified_base 6: mod_base = OTHER; note = 2'-deoxy-2'-fluorouridine-3'-phosphate
  modified_base 7: mod_base = OTHER; note = 2'-O-methylguanosine-3'-phosphate
  modified_base 8: mod_base = OTHER; note = 2'-O-methyladenosine-3'-phosphate
  modified_base 9: mod_base = OTHER; note = 2'-O-methyladenosine-3'-phosphate
  modified_base 10: mod_base = OTHER; note = 2'-O-methylguanosine-3'-phosphate
  modified_base 11: mod_base = OTHER; note = 2'-O-methylguanosine-3'-phosphate
  modified_base 12: mod_base = OTHER; note = 2'-O-methylguanosine-3'-phosphate
  modified_base 13: mod_base = OTHER; note = 2'-O-methylcytidine-3'-phosphate
  modified_base 14: mod_base = OTHER; note = 2'-deoxy-2'-fluoroadenosine-3'-phosphate
  modified_base 15: mod_base = OTHER; note = 2'-O-methyluridine-3'-phosphate
  modified_base 16: mod_base = OTHER; note = 2'-deoxy-2'-fluoroadenosine-3'-phosphate
  modified_base 17: mod_base = OTHER; note = 2'-O-methyluridine-3'-phosphate
  modified_base 18: mod_base = OTHER; note = 2'-O-methyluridine-3'-phosphate
  modified_base 19: mod_base = OTHER; note = 2'-O-methyluridine-3'-phosphate
  modified_base 20: mod_base = OTHER; note = 2'-O-methyladenosine-3'-phosphate
  modified_base 21: mod_base = OTHER; note = 2'-O-methyladenosine-3'-phosphate
  modified_base 22: mod_base = OTHER; note = 2'-O-methyluridine-3'-phosphate
  modified_base 23: mod_base = OTHER; note = 2'-O-methylguanosine
tgatttgaagggcatatttaatg

SEQ ID NO: 5176 - RNA, 23 nt, synthetic construct
  source 1..23: mol_type = other RNA
  modified_base 1: mod_base = OTHER; note = 2'-O-methyluridine-3'-phosphate 5'-(E)-Vinylphosphonate
  modified_base 2: mod_base = OTHER; note = 2'-deoxy-2'-fluoroadenosine-3'-phosphate
  modified_base 3: mod_base = OTHER; note = 2'-O-methylguanosine-3'-phosphate
  modified_base 4: mod_base = OTHER; note = 2'-O-methyladenosine-3'-phosphate
  modified_base 5: mod_base = OTHER; note = 2'-O-methyluridine-3'-phosphate
  modified_base 6: mod_base = OTHER; note = 2'-deoxy-2'-fluorouridine-3'-phosphate
  modified_base 7: mod_base = OTHER; note = 2'-O-methyluridine-3'-phosphate
  modified_base 8: mod_base = OTHER; note = 2'-O-methylguanosine-3'-phosphate
  modified_base 9: mod_base = OTHER; note = 2'-O-methyladenosine-3'-phosphate
  modified_base 10: mod_base = OTHER; note = 2'-O-methyladenosine-3'-phosphate
  modified_base 11: mod_base = OTHER; note = 2'-O-methylguanosine-3'-phosphate
  modified_base 12: mod_base = OTHER; note = 2'-O-methylguanosine-3'-phosphate
  modified_base 13: mod_base = OTHER; note = 2'-O-methylguanosine-3'-phosphate
  modified_base 14: mod_base = OTHER; note = 2'-deoxy-2'-fluorocytidine-3'-phosphate
  modified_base 15: mod_base = OTHER; note = 2'-O-methyladenosine-3'-phosphate
  modified_base 16: mod_base = OTHER; note = 2'-deoxy-2'-fluorouridine-3'-phosphate
  modified_base 17: mod_base = OTHER; note = 2'-O-methyladenosine-3'-phosphate
  modified_base 18: mod_base = OTHER; note = 2'-O-methyluridine-3'-phosphate
  modified_base 19: mod_base = OTHER; note = 2'-O-methyluridine-3'-phosphate
  modified_base 20: mod_base = OTHER; note = 2'-O-methyluridine-3'-phosphate
  modified_base 21: mod_base = OTHER; note = 2'-O-methyladenosine-3'-phosphate
  modified_base 22: mod_base = OTHER; note = 2'-O-methyladenosine-3'-phosphate
  modified_base 23: mod_base = OTHER; note = 2'-O-methyluridine
tagatttgaagggcatatttaat

SEQ ID NO: 5177 - RNA, 23 nt, synthetic construct
  source 1..23: mol_type = other RNA
  modified_base 1: mod_base = OTHER; note = 2'-O-methyluridine-3'-phosphate 5'-(E)-Vinylphosphonate
  modified_base 2: mod_base = OTHER; note = 2'-deoxy-2'-fluoroadenosine-3'-phosphate
  modified_base 3: mod_base = OTHER; note = 2'-O-methyladenosine-3'-phosphate
  modified_base 4: mod_base = OTHER; note = 2'-O-methyladenosine-3'-phosphate
  modified_base 5: mod_base = OTHER; note = 2'-O-methyluridine-3'-phosphate
  modified_base 6: mod_base = OTHER; note = 2'-deoxy-2'-fluorouridine-3'-phosphate
  modified_base 7: mod_base = OTHER; note = 2'-O-methyladenosine-3'-phosphate
  modified_base 8: mod_base = OTHER; note = 2'-O-methyluridine-3'-phosphate
  modified_base 9: mod_base = OTHER; note = 2'-O-methyladenosine-3'-phosphate
  modified_base 10: mod_base = OTHER; note = 2'-O-methylguanosine-3'-phosphate
  modified_base 11: mod_base = OTHER; note = 2'-O-methyladenosine-3'-phosphate
  modified_base 12: mod_base = OTHER; note = 2'-O-methyluridine-3'-phosphate
  modified_base 13: mod_base = OTHER; note = 2'-O-methyluridine-3'-phosphate
  modified_base 14: mod_base = OTHER; note = 2'-deoxy-2'-fluorouridine-3'-phosphate
  modified_base 15: mod_base = OTHER; note = 2'-O-methylguanosine-3'-phosphate
  modified_base 16: mod_base = OTHER; note = 2'-deoxy-2'-fluoroadenosine-3'-phosphate
  modified_base 17: mod_base = OTHER; note = 2'-O-methyladenosine-3'-phosphate
  modified_base 18: mod_base = OTHER; note = 2'-O-methylguanosine-3'-phosphate
  modified_base 19: mod_base = OTHER; note = 2'-O-methylguanosine-3'-phosphate
  modified_base 20: mod_base = OTHER; note = 2'-O-methylguanosine-3'-phosphate
  modified_base 21: mod_base = OTHER; note = 2'-O-methylcytidine-3'-phosphate
  modified_base 22: mod_base = OTHER; note = 2'-O-methyladenosine-3'-phosphate
  modified_base 23: mod_base = OTHER; note = 2'-O-methyluridine
taaattatagatttgaagggcat

SEQ ID NO: 5178 - RNA, 23 nt, synthetic construct
  source 1..23: mol_type = other RNA
  modified_base 1: mod_base = OTHER; note = 2'-O-methyluridine-3'-phosphate 5'-(E)-Vinylphosphonate
  modified_base 2: mod_base = OTHER; note = 2'-deoxy-2'-fluoroadenosine-3'-phosphate
  modified_base 3: mod_base = OTHER; note = 2'-O-methyladenosine-3'-phosphate
  modified_base 4: mod_base = OTHER; note = 2'-O-methyladenosine-3'-phosphate
  modified_base 5: mod_base = OTHER; note = 2'-O-methyladenosine-3'-phosphate
  modified_base 6: mod_base = OTHER; note = 2'-deoxy-2'-fluorouridine-3'-phosphate
  modified_base 7: mod_base = OTHER; note = 2'-O-methyluridine-3'-phosphate
  modified_base 8: mod_base = OTHER; note = 2'-O-methyladenosine-3'-phosphate
  modified_base 9: mod_base = OTHER; note = 2'-O-methyluridine-3'-phosphate
  modified_base 10: mod_base = OTHER; note = 2'-O-methyladenosine-3'-phosphate
  modified_base 11: mod_base = OTHER; note = 2'-O-methylguanosine-3'-phosphate
  modified_base 12: mod_base = OTHER; note = 2'-O-methyladenosine-3'-phosphate
  modified_base 13: mod_base = OTHER; note = 2'-O-methyluridine-3'-phosphate
  modified_base 14: mod_base = OTHER; note = 2'-deoxy-2'-fluorouridine-3'-phosphate
  modified_base 15: mod_base = OTHER; note = 2'-O-methyluridine-3'-phosphate
  modified_base 16: mod_base = OTHER; note = 2'-deoxy-2'-fluoroguanosine-3'-phosphate
  modified_base 17: mod_base = OTHER; note = 2'-O-methyladenosine-3'-phosphate
  modified_base 18: mod_base = OTHER; note = 2'-O-methyladenosine-3'-phosphate
  modified_base 19: mod_base = OTHER; note = 2'-O-methylguanosine-3'-phosphate
  modified_base 20: mod_base = OTHER; note = 2'-O-methylguanosine-3'-phosphate
  modified_base 21: mod_base = OTHER; note = 2'-O-methylguanosine-3'-phosphate
  modified_base 22: mod_base = OTHER; note = 2'-O-methylcytidine-3'-phosphate
  modified_base 23: mod_base = OTHER; note = 2'-O-methyladenosine
taaaattatagatttgaagggca

SEQ ID NO: 5179 - RNA, 23 nt, synthetic construct
  source 1..23: mol_type = other RNA
  modified_base 1: mod_base = OTHER; note = 2'-O-methyluridine-3'-phosphate 5'-(E)-Vinylphosphonate
  modified_base 2: mod_base = OTHER; note = 2'-deoxy-2'-fluorocytidine-3'-phosphate
  modified_base 3: mod_base = OTHER; note = 2'-O-methyluridine-3'-phosphate
  modified_base 4: mod_base = OTHER; note = 2'-O-methylcytidine-3'-phosphate
  modified_base 5: mod_base = OTHER; note = 2'-O-methylguanosine-3'-phosphate
  modified_base 6: mod_base = OTHER; note = 2'-deoxy-2'-fluorouridine-3'-phosphate
  modified_base 7: mod_base = OTHER; note = 2'-O-methyluridine-3'-phosphate
  modified_base 8: mod_base = OTHER; note = 2'-O-methyluridine-3'-phosphate
  modified_base 9: mod_base = OTHER; note = 2'-O-methyladenosine-3'-phosphate
  modified_base 10: mod_base = OTHER; note = 2'-O-methylcytidine-3'-phosphate
  modified_base 11: mod_base = OTHER; note = 2'-O-methylcytidine-3'-phosphate
  modified_base 12: mod_base = OTHER; note = 2'-O-methyladenosine-3'-phosphate
  modified_base 13: mod_base = OTHER; note = 2'-O-methyladenosine-3'-phosphate
  modified_base 14: mod_base = OTHER; note = 2'-deoxy-2'-fluoroadenosine-3'-phosphate
  modified_base 15: mod_base = OTHER; note = 2'-O-methylguanosine-3'-phosphate
  modified_base 16: mod_base = OTHER; note = 2'-deoxy-2'-fluorouridine-3'-phosphate
  modified_base 17: mod_base = OTHER; note = 2'-O-methyladenosine-3'-phosphate
  modified_base 18: mod_base = OTHER; note = 2'-O-methyladenosine-3'-phosphate
  modified_base 19: mod_base = OTHER; note = 2'-O-methyladenosine-3'-phosphate
  modified_base 20: mod_base = OTHER; note = 2'-O-methyladenosine-3'-phosphate
  modified_base 21: mod_base = OTHER; note = 2'-O-methyluridine-3'-phosphate
  modified_base 22: mod_base = OTHER; note = 2'-O-methyluridine-3'-phosphate
  modified_base 23: mod_base = OTHER; note = 2'-O-methyladenosine
tctcgtttaccaaagtaaaatta

SEQ ID NO: 5180 - RNA, 23 nt, synthetic construct
  source 1..23: mol_type = other RNA
  modified_base 1: mod_base = OTHER; note = 2'-O-methyluridine-3'-phosphate 5'-(E)-Vinylphosphonate
  modified_base 2: mod_base = OTHER; note = 2'-deoxy-2'-fluorouridine-3'-phosphate
  modified_base 3: mod_base = OTHER; note = 2'-O-methylcytidine-3'-phosphate
  modified_base 4: mod_base = OTHER; note = 2'-O-methyluridine-3'-phosphate
  modified_base 5: mod_base = OTHER; note = 2'-O-methylcytidine-3'-phosphate
  modified_base 6: mod_base = OTHER; note = 2'-deoxy-2'-fluoroguanosine-3'-phosphate
  modified_base 7: mod_base = OTHER; note = 2'-O-methyluridine-3'-phosphate
  modified_base 8: mod_base = OTHER; note = 2'-O-methyluridine-3'-phosphate
  modified_base 9: mod_base = OTHER; note = 2'-O-methyluridine-3'-phosphate
  modified_base 10: mod_base = OTHER; note = 2'-O-methyladenosine-3'-phosphate
  modified_base 11: mod_base = OTHER; note = 2'-O-methylcytidine-3'-phosphate
  modified_base 12: mod_base = OTHER; note = 2'-O-methylcytidine-3'-phosphate
  modified_base 13: mod_base = OTHER; note = 2'-O-methyladenosine-3'-phosphate
  modified_base 14: mod_base = OTHER; note = 2'-deoxy-2'-fluoroadenosine-3'-phosphate
  modified_base 15: mod_base = OTHER; note = 2'-O-methyladenosine-3'-phosphate
  modified_base 16: mod_base = OTHER; note = 2'-deoxy-2'-fluoroguanosine-3'-phosphate
  modified_base 17: mod_base = OTHER; note = 2'-O-methyluridine-3'-phosphate
  modified_base 18: mod_base = OTHER; note = 2'-O-methyladenosine-3'-phosphate
  modified_base 19: mod_base = OTHER; note = 2'-O-methyladenosine-3'-phosphate
  modified_base 20: mod_base = OTHER; note = 2'-O-methyladenosine-3'-phosphate
  modified_base 21: mod_base = OTHER; note = 2'-O-methyladenosine-3'-phosphate
  modified_base 22: mod_base = OTHER; note = 2'-O-methyluridine-3'-phosphate
  modified_base 23: mod_base = OTHER; note = 2'-O-methyluridine
ttctcgtttaccaaagtaaaatt

SEQ ID NO: 5181 - RNA, 23 nt, synthetic construct
  source 1..23: mol_type = other RNA
  modified_base 1: mod_base = OTHER; note = 2'-O-methyluridine-3'-phosphate 5'-(E)-Vinylphosphonate
  modified_base 2: mod_base = OTHER; note = 2'-deoxy-2'-fluoroadenosine-3'-phosphate
  modified_base 3: mod_base = OTHER; note = 2'-O-methyluridine-3'-phosphate
  modified_base 4: mod_base = OTHER; note = 2'-O-methylcytidine-3'-phosphate
  modified_base 5: mod_base = OTHER; note = 2'-O-methyluridine-3'-phosphate
  modified_base 6: mod_base = OTHER; note = 2'-deoxy-2'-fluorocytidine-3'-phosphate
  modified_base 7: mod_base = OTHER; note = 2'-O-methylguanosine-3'-phosphate
  modified_base 8: mod_base = OTHER; note = 2'-O-methyluridine-3'-phosphate
  modified_base 9: mod_base = OTHER; note = 2'-O-methyluridine-3'-phosphate
  modified_base 10: mod_base = OTHER; note = 2'-O-methyluridine-3'-phosphate
  modified_base 11: mod_base = OTHER; note = 2'-O-methyladenosine-3'-phosphate
  modified_base 12: mod_base = OTHER; note = 2'-O-methylcytidine-3'-phosphate
  modified_base 13: mod_base = OTHER; note = 2'-O-methylcytidine-3'-phosphate
  modified_base 14: mod_base = OTHER; note = 2'-deoxy-2'-fluoroadenosine-3'-phosphate
  modified_base 15: mod_base = OTHER; note = 2'-O-methyladenosine-3'-phosphate
  modified_base 16: mod_base = OTHER; note = 2'-deoxy-2'-fluoroadenosine-3'-phosphate
  modified_base 17: mod_base = OTHER; note = 2'-O-methylguanosine-3'-phosphate
  modified_base 18: mod_base = OTHER; note = 2'-O-methyluridine-3'-phosphate
  modified_base 19: mod_base = OTHER; note = 2'-O-methyladenosine-3'-phosphate
  modified_base 20: mod_base = OTHER; note = 2'-O-methyladenosine-3'-phosphate
  modified_base 21: mod_base = OTHER; note = 2'-O-methyladenosine-3'-phosphate
  modified_base 22: mod_base = OTHER; note = 2'-O-methyladenosine-3'-phosphate
  modified_base 23: mod_base = OTHER; note = 2'-O-methyluridine
tatctcgtttaccaaagtaaaat

SEQ ID NO: 5182 - RNA, 23 nt, synthetic construct
  source 1..23: mol_type = other RNA
  modified_base 1: mod_base = OTHER; note = 2'-O-methyluridine-3'-phosphate 5'-(E)-Vinylphosphonate
  modified_base 2: mod_base = OTHER; note = 2'-deoxy-2'-fluoroadenosine-3'-phosphate
  modified_base 3: mod_base = OTHER; note = 2'-O-methyladenosine-3'-phosphate
  modified_base 4: mod_base = OTHER; note = 2'-O-methyluridine-3'-phosphate
  modified_base 5: mod_base = OTHER; note = 2'-O-methylcytidine-3'-phosphate
  modified_base 6: mod_base = OTHER; note = 2'-deoxy-2'-fluorouridine-3'-phosphate
  modified_base 7: mod_base = OTHER; note = 2'-O-methylcytidine-3'-phosphate
  modified_base 8: mod_base = OTHER; note = 2'-O-methylguanosine-3'-phosphate
  modified_base 9: mod_base = OTHER; note = 2'-O-methyluridine-3'-phosphate
  modified_base 10: mod_base = OTHER; note = 2'-O-methyluridine-3'-phosphate
  modified_base 11: mod_base = OTHER; note = 2'-O-methyluridine-3'-phosphate
  modified_base 12: mod_base = OTHER; note = 2'-O-methyladenosine-3'-phosphate
  modified_base 13: mod_base = OTHER; note = 2'-O-methylcytidine-3'-phosphate
  modified_base 14: mod_base = OTHER; note = 2'-deoxy-2'-fluorocytidine-3'-phosphate
  modified_base 15: mod_base = OTHER; note = 2'-O-methyladenosine-3'-phosphate
  modified_base 16: mod_base = OTHER; note = 2'-deoxy-2'-fluoroadenosine-3'-phosphate
  modified_base 17: mod_base = OTHER; note = 2'-O-methyladenosine-3'-phosphate
  modified_base 18: mod_base = OTHER; note = 2'-O-methylguanosine-3'-phosphate
  modified_base 19: mod_base = OTHER; note = 2'-O-methyluridine-3'-phosphate
  modified_base 20: mod_base = OTHER; note = 2'-O-methyladenosine-3'-phosphate
  modified_base 21: mod_base = OTHER; note = 2'-O-methyladenosine-3'-phosphate
  modified_base 22: mod_base = OTHER; note = 2'-O-methyladenosine-3'-phosphate
  modified_base 23: mod_base = OTHER; note = 2'-O-methyladenosine
taatctcgtttaccaaagtaaaa

SEQ ID NO: 5183 - RNA, 23 nt, synthetic construct
  source 1..23: mol_type = other RNA
  modified_base 1: mod_base = OTHER; note = 2'-O-methyluridine-3'-phosphate 5'-(E)-Vinylphosphonate
  modified_base 2: mod_base = OTHER; note = 2'-deoxy-2'-fluoroadenosine-3'-phosphate
  modified_base 3: mod_base = OTHER; note = 2'-O-methyladenosine-3'-phosphate
  modified_base 4: mod_base = OTHER; note = 2'-O-methyladenosine-3'-phosphate
  modified_base 5: mod_base = OTHER; note = 2'-O-methyluridine-3'-phosphate
  modified_base 6: mod_base = OTHER; note = 2'-deoxy-2'-fluorocytidine-3'-phosphate
  modified_base 7: mod_base = OTHER; note = 2'-O-methyluridine-3'-phosphate
  modified_base 8: mod_base = OTHER; note = 2'-O-methylcytidine-3'-phosphate
  modified_base 9: mod_base = OTHER; note = 2'-O-methylguanosine-3'-phosphate
  modified_base 10: mod_base = OTHER; note = 2'-O-methyluridine-3'-phosphate
  modified_base 11: mod_base = OTHER; note = 2'-O-methyluridine-3'-phosphate
  modified_base 12: mod_base = OTHER; note = 2'-O-methyluridine-3'-phosphate
  modified_base 13: mod_base = OTHER; note = 2'-O-methyladenosine-3'-phosphate
  modified_base 14: mod_base = OTHER; note = 2'-deoxy-2'-fluorocytidine-3'-phosphate
  modified_base 15: mod_base = OTHER; note = 2'-O-methylcytidine-3'-phosphate
  modified_base 16: mod_base = OTHER; note = 2'-deoxy-2'-fluoroadenosine-3'-phosphate
  modified_base 17: mod_base = OTHER; note = 2'-O-methyladenosine-3'-phosphate
  modified_base 18: mod_base = OTHER; note = 2'-O-methyladenosine-3'-phosphate
  modified_base 19: mod_base = OTHER; note = 2'-O-methylguanosine-3'-phosphate
  modified_base 20: mod_base = OTHER; note = 2'-O-methyluridine-3'-phosphate
  modified_base 21: mod_base = OTHER; note = 2'-O-methyladenosine-3'-phosphate
  modified_base 22: mod_base = OTHER; note = 2'-O-methyladenosine-3'-phosphate
  modified_base 23: mod_base = OTHER; note = 2'-O-methyladenosine
taaatctcgtttaccaaagtaaa

SEQ ID NO: 5184 - RNA, 23 nt, synthetic construct
  source 1..23: mol_type = other RNA
  modified_base 1: mod_base = OTHER; note = 2'-O-methyluridine-3'-phosphate 5'-(E)-Vinylphosphonate
  modified_base 2: mod_base = OTHER; note = 2'-deoxy-2'-fluorouridine-3'-phosphate
  modified_base 3: mod_base = OTHER; note = 2'-O-methyluridine-3'-phosphate
  modified_base 4: mod_base = OTHER; note = 2'-O-methyladenosine-3'-phosphate
  modified_base 5: mod_base = OTHER; note = 2'-O-methyladenosine-3'-phosphate
  modified_base 6: mod_base = OTHER; note = 2'-deoxy-2'-fluoroadenosine-3'-phosphate
  modified_base 7: mod_base = OTHER; note = 2'-O-methyluridine-3'-phosphate
  modified_base 8: mod_base = OTHER; note = 2'-O-methylcytidine-3'-phosphate
  modified_base 9: mod_base = OTHER; note = 2'-O-methyluridine-3'-phosphate
  modified_base 10: mod_base = OTHER; note = 2'-O-methylcytidine-3'-phosphate
  modified_base 11: mod_base = OTHER; note = 2'-O-methylguanosine-3'-phosphate
  modified_base 12: mod_base = OTHER; note = 2'-O-methyluridine-3'-phosphate
  modified_base 13: mod_base = OTHER; note = 2'-O-methyluridine-3'-phosphate
  modified_base 14: mod_base = OTHER; note = 2'-deoxy-2'-fluorouridine-3'-phosphate
  modified_base 15: mod_base = OTHER; note = 2'-O-methyladenosine-3'-phosphate
  modified_base 16: mod_base = OTHER; note = 2'-deoxy-2'-fluorocytidine-3'-phosphate
  modified_base 17: mod_base = OTHER; note = 2'-O-methylcytidine-3'-phosphate
  modified_base 18: mod_base = OTHER; note = 2'-O-methyladenosine-3'-phosphate
  modified_base 19: mod_base = OTHER; note = 2'-O-methyladenosine-3'-phosphate
  modified_base 20: mod_base = OTHER; note = 2'-O-methyladenosine-3'-phosphate
  modified_base 21: mod_base = OTHER; note = 2'-O-methylguanosine-3'-phosphate
  modified_base 22: mod_base = OTHER; note = 2'-O-methyluridine-3'-phosphate
  modified_base 23: mod_base = OTHER; note = 2'-O-methyladenosine
tttaaatctcgtttaccaaagta

SEQ ID NO: 5185 - RNA, 23 nt, synthetic construct
  source 1..23: mol_type = other RNA
  modified_base 1: mod_base = OTHER; note = 2'-O-methyluridine-3'-phosphate 5'-(E)-Vinylphosphonate
  modified_base 2: mod_base = OTHER; note = 2'-deoxy-2'-fluorouridine-3'-phosphate
  modified_base 3: mod_base = OTHER; note = 2'-O-methylguanosine-3'-phosphate
  modified_base 4: mod_base = OTHER; note = 2'-O-methyluridine-3'-phosphate
  modified_base 5: mod_base = OTHER; note = 2'-O-methyluridine-3'-phosphate
  modified_base 6: mod_base = OTHER; note = 2'-deoxy-2'-fluoroadenosine-3'-phosphate
  modified_base 7: mod_base = OTHER; note = 2'-O-methyladenosine-3'-phosphate
  modified_base 8: mod_base = OTHER; note = 2'-O-methyladenosine-3'-phosphate
  modified_base 9: mod_base = OTHER; note = 2'-O-methyluridine-3'-phosphate
  modified_base 10: mod_base = OTHER; note = 2'-O-methylcytidine-3'-phosphate
  modified_base 11: mod_base = OTHER; note = 2'-O-methyluridine-3'-phosphate
  modified_base 12: mod_base = OTHER; note = 2'-O-methylcytidine-3'-phosphate
  modified_base 13: mod_base = OTHER; note = 2'-O-methylguanosine-3'-phosphate
  modified_base 14: mod_base = OTHER; note = 2'-deoxy-2'-fluorouridine-3'-phosphate
  modified_base 15: mod_base = OTHER; note = 2'-O-methyluridine-3'-phosphate
  modified_base 16: mod_base = OTHER; note = 2'-deoxy-2'-fluorouridine-3'-phosphate
  modified_base 17: mod_base = OTHER; note = 2'-O-methyladenosine-3'-phosphate
  modified_base 18: mod_base = OTHER; note = 2'-O-methylcytidine-3'-phosphate
  modified_base 19: mod_base = OTHER; note = 2'-O-methylcytidine-3'-phosphate
  modified_base 20: mod_base = OTHER; note = 2'-O-methyladenosine-3'-phosphate
  modified_base 21: mod_base = OTHER; note = 2'-O-methyladenosine-3'-phosphate
  modified_base 22: mod_base = OTHER; note = 2'-O-methyladenosine-3'-phosphate
  modified_base 23: mod_base = OTHER; note = 2'-O-methylguanosine
ttgttaaatctcgtttaccaaag

SEQ ID NO: 5186 - RNA, 23 nt, synthetic construct
  source 1..23: mol_type = other RNA
  modified_base 1: mod_base = OTHER; note = 2'-O-methyluridine-3'-phosphate 5'-(E)-Vinylphosphonate
  modified_base 2: mod_base = OTHER; note = 2'-deoxy-2'-fluorocytidine-3'-phosphate
  modified_base 3: mod_base = OTHER; note = 2'-O-methyladenosine-3'-phosphate
  modified_base 4: mod_base = OTHER; note = 2'-O-methyluridine-3'-phosphate
  modified_base 5: mod_base = OTHER; note = 2'-O-methylguanosine-3'-phosphate
  modified_base 6: mod_base = OTHER; note = 2'-deoxy-2'-fluorouridine-3'-phosphate
  modified_base 7: mod_base = OTHER; note = 2'-O-methyluridine-3'-phosphate
  modified_base 8: mod_base = OTHER; note = 2'-O-methyladenosine-3'-phosphate
  modified_base 9: mod_base = OTHER; note = 2'-O-methyladenosine-3'-phosphate
  modified_base 10: mod_base = OTHER; note = 2'-O-methyladenosine-3'-phosphate
  modified_base 11: mod_base = OTHER; note = 2'-O-methyluridine-3'-phosphate
  modified_base 12: mod_base = OTHER; note = 2'-O-methylcytidine-3'-phosphate
  modified_base 13: mod_base = OTHER; note = 2'-O-methyluridine-3'-phosphate
  modified_base 14: mod_base = OTHER; note = 2'-deoxy-2'-fluorocytidine-3'-phosphate
  modified_base 15: mod_base = OTHER; note = 2'-O-methylguanosine-3'-phosphate
  modified_base 16: mod_base = OTHER; note = 2'-deoxy-2'-fluorouridine-3'-phosphate
  modified_base 17: mod_base = OTHER; note = 2'-O-methyluridine-3'-phosphate
  modified_base 18: mod_base = OTHER; note = 2'-O-methyluridine-3'-phosphate
  modified_base 19: mod_base = OTHER; note = 2'-O-methyladenosine-3'-phosphate
  modified_base 20: mod_base = OTHER; note = 2'-O-methylcytidine-3'-phosphate
  modified_base 21: mod_base = OTHER; note = 2'-O-methylcytidine-3'-phosphate
  modified_base 22: mod_base = OTHER; note = 2'-O-methyladenosine-3'-phosphate
  modified_base 23: mod_base = OTHER; note = 2'-O-methyladenosine
tcatgttaaatctcgtttaccaa

SEQ ID NO: 5187 - RNA, 23 nt, synthetic construct
  source 1..23: mol_type = other RNA
  modified_base 1: mod_base = OTHER; note = 2'-O-methyluridine-3'-phosphate 5'-(E)-Vinylphosphonate
  modified_base 2: mod_base = OTHER; note = 2'-deoxy-2'-fluoroadenosine-3'-phosphate
  modified_base 3: mod_base = OTHER; note = 2'-O-methyladenosine-3'-phosphate
  modified_base 4: mod_base = OTHER; note = 2'-O-methylguanosine-3'-phosphate
  modified_base 5: mod_base = OTHER; note = 2'-O-methyladenosine-3'-phosphate
  modified_base 6: mod_base = OTHER; note = 2'-deoxy-2'-fluorocytidine-3'-phosphate
  modified_base 7: mod_base = OTHER; note = 2'-O-methyladenosine-3'-phosphate
  modified_base 8: mod_base = OTHER; note = 2'-O-methyluridine-3'-phosphate
  modified_base 9: mod_base = OTHER; note = 2'-O-methylcytidine-3'-phosphate
  modified_base 10: mod_base = OTHER; note = 2'-O-methyladenosine-3'-phosphate
  modified_base 11: mod_base = OTHER; note = 2'-O-methyluridine-3'-phosphate
  modified_base 12: mod_base = OTHER; note = 2'-O-methylguanosine-3'-phosphate
  modified_base 13: mod_base = OTHER; note = 2'-O-methyluridine-3'-phosphate
  modified_base 14: mod_base = OTHER; note = 2'-deoxy-2'-fluorouridine-3'-phosphate
  modified_base 15: mod_base = OTHER; note = 2'-O-methyladenosine-3'-phosphate
  modified_base 16: mod_base = OTHER; note = 2'-deoxy-2'-fluoroadenosine-3'-phosphate
  modified_base 17: mod_base = OTHER; note = 2'-O-methyladenosine-3'-phosphate
  modified_base 18: mod_base = OTHER; note = 2'-O-methyluridine-3'-phosphate
  modified_base 19: mod_base = OTHER; note = 2'-O-methylcytidine-3'-phosphate
  modified_base 20: mod_base = OTHER; note = 2'-O-methyluridine-3'-phosphate
  modified_base 21: mod_base = OTHER; note = 2'-O-methylcytidine-3'-phosphate
  modified_base 22: mod_base = OTHER; note = 2'-O-methylguanosine-3'-phosphate
  modified_base 23: mod_base = OTHER; note = 2'-O-methyluridine
taagacatcatgttaaatctcgt

SEQ ID NO: 5188 - RNA, 23 nt, synthetic construct
  source 1..23: mol_type = other RNA
  modified_base 1: mod_base = OTHER; note = 2'-O-methyluridine-3'-phosphate 5'-(E)-Vinylphosphonate
  modified_base 2: mod_base = OTHER; note = 2'-deoxy-2'-fluoroguanosine-3'-phosphate
  modified_base 3: mod_base = OTHER; note = 2'-O-methyluridine-3'-phosphate
  modified_base 4: mod_base = OTHER; note = 2'-O-methyluridine-3'-phosphate
  modified_base 5: mod_base = OTHER; note = 2'-O-methyluridine-3'-phosphate
  modified_base 6: mod_base = OTHER; note = 2'-deoxy-2'-fluorouridine-3'-phosphate
  modified_base 7: mod_base = OTHER; note = 2'-O-methyladenosine-3'-phosphate
  modified_base 8: mod_base = OTHER; note = 2'-O-methylguanosine-3'-phosphate
  modified_base 9: mod_base = OTHER; note = 2'-O-methylguanosine-3'-phosphate
  modified_base 10: mod_base = OTHER; note = 2'-O-methyladenosine-3'-phosphate
  modified_base 11: mod_base = OTHER; note = 2'-O-methylguanosine-3'-phosphate
  modified_base 12: mod_base = OTHER; note = 2'-O-methylcytidine-3'-phosphate
  modified_base 13: mod_base = OTHER; note = 2'-O-methyladenosine-3'-phosphate
  modified_base 14: mod_base = OTHER; note = 2'-deoxy-2'-fluorouridine-3'-phosphate
  modified_base 15: mod_base = OTHER; note = 2'-O-methyladenosine-3'-phosphate
  modified_base 16: mod_base = OTHER; note = 2'-deoxy-2'-fluoroadenosine-3'-phosphate
  modified_base 17: mod_base = OTHER; note = 2'-O-methyladenosine-3'-phosphate
  modified_base 18: mod_base = OTHER; note = 2'-O-methyladenosine-3'-phosphate
  modified_base 19: mod_base = OTHER; note = 2'-O-methylguanosine-3'-phosphate
  modified_base 20: mod_base = OTHER; note = 2'-O-methyladenosine-3'-phosphate
  modified_base 21: mod_base = OTHER; note = 2'-O-methylcytidine-3'-phosphate
  modified_base 22: mod_base = OTHER; note = 2'-O-methyladenosine-3'-phosphate
  modified_base 23: mod_base = OTHER; note = 2'-O-methyluridine
tgttttaggagcataaaagacat

SEQ ID NO: 5189 - RNA, 23 nt, synthetic construct
  source 1..23: mol_type = other RNA
  modified_base 1: mod_base = OTHER; note = 2'-O-methyluridine-3'-phosphate 5'-(E)-Vinylphosphonate
  modified_base 2: mod_base = OTHER; note = 2'-deoxy-2'-fluoroguanosine-3'-phosphate
  modified_base 3: mod_base = OTHER; note = 2'-O-methyladenosine-3'-phosphate
  modified_base 4: mod_base = OTHER; note = 2'-O-methyladenosine-3'-phosphate
  modified_base 5: mod_base = OTHER; note = 2'-O-methyluridine-3'-phosphate
  modified_base 6: mod_base = OTHER; note = 2'-deoxy-2'-fluoroguanosine-3'-phosphate
  modified_base 7: mod_base = OTHER; note = 2'-O-methylguanosine-3'-phosphate
  modified_base 8: mod_base = OTHER; note = 2'-O-methyladenosine-3'-phosphate
  modified_base 9: mod_base = OTHER; note = 2'-O-methylguanosine-3'-phosphate
  modified_base 10: mod_base = OTHER; note = 2'-O-methyluridine-3'-phosphate
  modified_base 11: mod_base = OTHER; note = 2'-O-methyluridine-3'-phosphate
  modified_base 12: mod_base = OTHER; note = 2'-O-methyluridine-3'-phosphate
  modified_base 13: mod_base = OTHER; note = 2'-O-methylguanosine-3'-phosphate
  modified_base 14: mod_base = OTHER; note = 2'-deoxy-2'-fluoroadenosine-3'-phosphate
  modified_base 15: mod_base = OTHER; note = 2'-O-methyladenosine-3'-phosphate
  modified_base 16: mod_base = OTHER; note = 2'-deoxy-2'-fluoroadenosine-3'-phosphate
  modified_base 17: mod_base = OTHER; note = 2'-O-methyladenosine-3'-phosphate
  modified_base 18: mod_base = OTHER; note = 2'-O-methyladenosine-3'-phosphate
  modified_base 19: mod_base = OTHER; note = 2'-O-methyladenosine-3'-phosphate
  modified_base 20: mod_base = OTHER; note = 2'-O-methylguanosine-3'-phosphate
  modified_base 21: mod_base = OTHER; note = 2'-O-methyladenosine-3'-phosphate
  modified_base 22: mod_base = OTHER; note = 2'-O-methyluridine-3'-phosphate
  modified_base 23: mod_base = OTHER; note = 2'-O-methylguanosine
tgaatggagtttgaaaaaagatg

SEQ ID NO: 5190 - RNA, 23 nt, synthetic construct
  source 1..23: mol_type = other RNA
  modified_base 1: mod_base = OTHER; note = 2'-O-methyluridine-3'-phosphate 5'-(E)-Vinylphosphonate
  modified_base 2: mod_base = OTHER; note = 2'-deoxy-2'-fluoroguanosine-3'-phosphate
  modified_base 3: mod_base = OTHER; note = 2'-O-methylguanosine-3'-phosphate
  modified_base 4: mod_base = OTHER; note = 2'-O-methyladenosine-3'-phosphate
  modified_base 5: mod_base = OTHER; note = 2'-O-methyladenosine-3'-phosphate
  modified_base 6: mod_base = OTHER; note = 2'-deoxy-2'-fluorouridine-3'-phosphate
  modified_base 7: mod_base = OTHER; note = 2'-O-methylguanosine-3'-phosphate
  modified_base 8: mod_base = OTHER; note = 2'-O-methylguanosine-3'-phosphate
  modified_base 9: mod_base = OTHER; note = 2'-O-methyladenosine-3'-phosphate
  modified_base 10: mod_base = OTHER; note = 2'-O-methylguanosine-3'-phosphate
  modified_base 11: mod_base = OTHER; note = 2'-O-methyluridine-3'-phosphate
  modified_base 12: mod_base = OTHER; note = 2'-O-methyluridine-3'-phosphate
  modified_base 13: mod_base = OTHER; note = 2'-O-methyluridine-3'-phosphate
  modified_base 14: mod_base = OTHER; note = 2'-deoxy-2'-fluoroguanosine-3'-phosphate
  modified_base 15: mod_base = OTHER; note = 2'-O-methyladenosine-3'-phosphate
  modified_base 16: mod_base = OTHER; note = 2'-deoxy-2'-fluoroadenosine-3'-phosphate
  modified_base 17: mod_base = OTHER; note = 2'-O-methyladenosine-3'-phosphate
  modified_base 18: mod_base = OTHER; note = 2'-O-methyladenosine-3'-phosphate
  modified_base 19: mod_base = OTHER; note = 2'-O-methyladenosine-3'-phosphate
  modified_base 20: mod_base = OTHER; note = 2'-O-methyladenosine-3'-phosphate
  modified_base 21: mod_base = OTHER; note = 2'-O-methylguanosine-3'-phosphate
  modified_base 22: mod_base = OTHER; note = 2'-O-methyladenosine-3'-phosphate
  modified_base 23: mod_base = OTHER; note = 2'-O-methyluridine
tggaatggagtttgaaaaaagat

SEQ ID NO: 5191 - RNA, 23 nt, synthetic construct
  source 1..23: mol_type = other RNA
  modified_base 1: mod_base = OTHER; note = 2'-O-methyluridine-3'-phosphate 5'-(E)-Vinylphosphonate
  modified_base 2: mod_base = OTHER; note = 2'-deoxy-2'-fluoroadenosine-3'-phosphate
  modified_base 3: mod_base = OTHER; note = 2'-O-methylguanosine-3'-phosphate
  modified_base 4: mod_base = OTHER; note = 2'-O-methylguanosine-3'-phosphate
  modified_base 5: mod_base = OTHER; note = 2'-O-methyladenosine-3'-phosphate
  modified_base 6: mod_base = OTHER; note = 2'-deoxy-2'-fluoroadenosine-3'-phosphate
  modified_base 7: mod_base = OTHER; note = 2'-O-methyluridine-3'-phosphate
  modified_base 8: mod_base = OTHER; note = 2'-O-methylguanosine-3'-phosphate
  modified_base 9: mod_base = OTHER; note = 2'-O-methylguanosine-3'-phosphate
  modified_base 10: mod_base = OTHER; note = 2'-O-methyladenosine-3'-phosphate
  modified_base 11: mod_base = OTHER; note = 2'-O-methylguanosine-3'-phosphate
  modified_base 12: mod_base = OTHER; note = 2'-O-methyluridine-3'-phosphate
  modified_base 13: mod_base = OTHER; note = 2'-O-methyluridine-3'-phosphate
  modified_base 14: mod_base = OTHER; note = 2'-deoxy-2'-fluorouridine-3'-phosphate
  modified_base 15: mod_base = OTHER; note = 2'-O-methylguanosine-3'-phosphate
  modified_base 16: mod_base = OTHER; note = 2'-deoxy-2'-fluoroadenosine-3'-phosphate
  modified_base 17: mod_base = OTHER; note = 2'-O-methyladenosine-3'-phosphate
  modified_base 18: mod_base = OTHER; note = 2'-O-methyladenosine-3'-phosphate
  modified_base 19: mod_base = OTHER; note = 2'-O-methyladenosine-3'-phosphate
  modified_base 20: mod_base = OTHER; note = 2'-O-methyladenosine-3'-phosphate
  modified_base 21: mod_base = OTHER; note = 2'-O-methyladenosine-3'-phosphate
  modified_base 22: mod_base = OTHER; note = 2'-O-methylguanosine-3'-phosphate
  modified_base 23: mod_base = OTHER; note = 2'-O-methyladenosine
taggaatggagtttgaaaaaaga

SEQ ID NO: 5192 - RNA, 23 nt, synthetic construct
  source 1..23: mol_type = other RNA
  modified_base 1: mod_base = OTHER; note = 2'-O-methyluridine-3'-phosphate 5'-(E)-Vinylphosphonate
  modified_base 2: mod_base = OTHER; note = 2'-deoxy-2'-fluorouridine-3'-phosphate
  modified_base 3: mod_base = OTHER; note = 2'-O-methyladenosine-3'-phosphate
  modified_base 4: mod_base = OTHER; note = 2'-O-methyladenosine-3'-phosphate
  modified_base 5: mod_base = OTHER; note = 2'-O-methylguanosine-3'-phosphate
  modified_base 6: mod_base = OTHER; note = 2'-deoxy-2'-fluoroguanosine-3'-phosphate
  modified_base 7: mod_base = OTHER; note = 2'-O-methyladenosine-3'-phosphate
  modified_base 8: mod_base = OTHER; note = 2'-O-methyladenosine-3'-phosphate
  modified_base 9: mod_base = OTHER; note = 2'-O-methyluridine-3'-phosphate
  modified_base 10: mod_base = OTHER; note = 2'-O-methylguanosine-3'-phosphate
  modified_base 11: mod_base = OTHER; note = 2'-O-methylguanosine-3'-phosphate
  modified_base 12: mod_base = OTHER; note = 2'-O-methyladenosine-3'-phosphate
  modified_base 13: mod_base = OTHER; note = 2'-O-methylguanosine-3'-phosphate
  modified_base 14: mod_base = OTHER; note = 2'-deoxy-2'-fluorouridine-3'-phosphate
  modified_base 15: mod_base = OTHER; note = 2'-O-methyluridine-3'-phosphate
  modified_base 16: mod_base = OTHER; note = 2'-deoxy-2'-fluorouridine-3'-phosphate
  modified_base 17: mod_base = OTHER; note = 2'-O-methylguanosine-3'-phosphate
  modified_base 18: mod_base = OTHER; note = 2'-O-methyladenosine-3'-phosphate
  modified_base 19: mod_base = OTHER; note = 2'-O-methyladenosine-3'-phosphate
  modified_base 20: mod_base = OTHER; note = 2'-O-methyladenosine-3'-phosphate
  modified_base 21: mod_base = OTHER; note = 2'-O-methyladenosine-3'-phosphate
  modified_base 22: mod_base = OTHER; note = 2'-O-methyladenosine-3'-phosphate
  modified_base 23: mod_base = OTHER; note = 2'-O-methyladenosine
ttaaggaatggagtttgaaaaaa

SEQ ID NO: 5193 - RNA, 23 nt, synthetic construct
  source 1..23: mol_type = other RNA
  modified_base 1: mod_base = OTHER; note = 2'-O-methyluridine-3'-phosphate 5'-(E)-Vinylphosphonate
  modified_base 2: mod_base = OTHER; note = 2'-deoxy-2'-fluorocytidine-3'-phosphate
  modified_base 3: mod_base = OTHER; note = 2'-O-methyluridine-3'-phosphate
  modified_base 4: mod_base = OTHER; note = 2'-O-methyladenosine-3'-phosphate
  modified_base 5: mod_base = OTHER; note = 2'-O-methyladenosine-3'-phosphate
  modified_base 6: mod_base = OTHER; note = 2'-deoxy-2'-fluoroguanosine-3'-phosphate
  modified_base 7: mod_base = OTHER; note = 2'-O-methylguanosine-3'-phosphate
  modified_base 8: mod_base = OTHER; note = 2'-O-methyladenosine-3'-phosphate
  modified_base 9: mod_base = OTHER; note = 2'-O-methyladenosine-3'-phosphate
  modified_base 10: mod_base = OTHER; note = 2'-O-methyluridine-3'-phosphate
  modified_base 11: mod_base = OTHER; note = 2'-O-methylguanosine-3'-phosphate
  modified_base 12: mod_base = OTHER; note = 2'-O-methylguanosine-3'-phosphate
  modified_base 13: mod_base = OTHER; note = 2'-O-methyladenosine-3'-phosphate
  modified_base 14: mod_base = OTHER; note = 2'-deoxy-2'-fluoroguanosine-3'-phosphate
  modified_base 15: mod_base = OTHER; note = 2'-O-methyluridine-3'-phosphate
  modified_base 16: mod_base = OTHER; note = 2'-deoxy-2'-fluorouridine-3'-phosphate
  modified_base 17: mod_base = OTHER; note = 2'-O-methyluridine-3'-phosphate
  modified_base 18: mod_base = OTHER; note = 2'-O-methylguanosine-3'-phosphate
  modified_base 19: mod_base = OTHER; note = 2'-O-methyladenosine-3'-phosphate
  modified_base 20: mod_base = OTHER; note = 2'-O-methyladenosine-3'-phosphate
  modified_base 21: mod_base = OTHER; note = 2'-O-methyladenosine-3'-phosphate
  modified_base 22: mod_base = OTHER; note = 2'-O-methyladenosine-3'-phosphate
  modified_base 23: mod_base = OTHER; note = 2'-O-methyladenosine
tctaaggaatggagtttgaaaaa

SEQ ID NO: 5194 - RNA, 23 nt, synthetic construct
  source 1..23: mol_type = other RNA
  modified_base 1: mod_base = OTHER; note = 2'-O-methyluridine-3'-phosphate 5'-(E)-Vinylphosphonate
  modified_base 2: mod_base = OTHER; note = 2'-deoxy-2'-fluorouridine-3'-phosphate
  modified_base 3: mod_base = OTHER; note = 2'-O-methyluridine-3'-phosphate
  modified_base 4: mod_base = OTHER; note = 2'-O-methylcytidine-3'-phosphate
  modified_base 5: mod_base = OTHER; note = 2'-O-methyluridine-3'-phosphate
  modified_base 6: mod_base = OTHER; note = 2'-deoxy-2'-fluoroadenosine-3'-phosphate
  modified_base 7: mod_base = OTHER; note = 2'-O-methyladenosine-3'-phosphate
  modified_base 8: mod_base = OTHER; note = 2'-O-methylguanosine-3'-phosphate
  modified_base 9: mod_base = OTHER; note = 2'-O-methylguanosine-3'-phosphate
  modified_base 10: mod_base = OTHER; note = 2'-O-methyladenosine-3'-phosphate
  modified_base 11: mod_base = OTHER; note = 2'-O-methyladenosine-3'-phosphate
  modified_base 12: mod_base = OTHER; note = 2'-O-methyluridine-3'-phosphate
  modified_base 13: mod_base = OTHER; note = 2'-O-methylguanosine-3'-phosphate
  modified_base 14: mod_base = OTHER; note = 2'-deoxy-2'-fluoroguanosine-3'-phosphate
  modified_base 15: mod_base = OTHER; note = 2'-O-methyladenosine-3'-phosphate
  modified_base 16: mod_base = OTHER; note = 2'-deoxy-2'-fluoroguanosine-3'-phosphate
  modified_base 17: mod_base = OTHER; note = 2'-O-methyluridine-3'-phosphate
  modified_base 18: mod_base = OTHER; note = 2'-O-methyluridine-3'-phosphate
  modified_base 19: mod_base = OTHER; note = 2'-O-methyluridine-3'-phosphate
  modified_base 20: mod_base = OTHER; note = 2'-O-methylguanosine-3'-phosphate
  modified_base 21: mod_base = OTHER; note = 2'-O-methyladenosine-3'-phosphate
  modified_base 22: mod_base = OTHER; note = 2'-O-methyladenosine-3'-phosphate
  modified_base 23: mod_base = OTHER; note = 2'-O-methyladenosine
tttctaaggaatggagtttgaaa

SEQ ID NO: 5195 - RNA, 23 nt, synthetic construct
  source 1..23: mol_type = other RNA
  modified_base 1: mod_base = OTHER; note = 2'-O-methyluridine-3'-phosphate 5'-(E)-Vinylphosphonate
  modified_base 2: mod_base = OTHER; note = 2'-deoxy-2'-fluoroguanosine-3'-phosphate
  modified_base 3: mod_base = OTHER; note = 2'-O-methyluridine-3'-phosphate
  modified_base 4: mod_base = OTHER; note = 2'-O-methyluridine-3'-phosphate
  modified_base 5: mod_base = OTHER; note = 2'-O-methylcytidine-3'-phosphate
  modified_base 6: mod_base = OTHER; note = 2'-deoxy-2'-fluorouridine-3'-phosphate
  modified_base 7: mod_base = OTHER; note = 2'-O-methyladenosine-3'-phosphate
  modified_base 8: mod_base = OTHER; note = 2'-O-methyladenosine-3'-phosphate
  modified_base 9: mod_base = OTHER; note = 2'-O-methylguanosine-3'-phosphate
  modified_base 10: mod_base = OTHER; note = 2'-O-methylguanosine-3'-phosphate
  modified_base 11: mod_base = OTHER; note = 2'-O-methyladenosine-3'-phosphate
  modified_base 12: mod_base = OTHER; note = 2'-O-methyladenosine-3'-phosphate
  modified_base 13: mod_base = OTHER; note = 2'-O-methyluridine-3'-phosphate
  modified_base 14: mod_base = OTHER; note = 2'-deoxy-2'-fluoroguanosine-3'-phosphate
  modified_base 15: mod_base = OTHER; note = 2'-O-methylguanosine-3'-phosphate
  modified_base 16: mod_base = OTHER; note = 2'-deoxy-2'-fluoroadenosine-3'-phosphate
  modified_base 17: mod_base = OTHER; note = 2'-O-methylguanosine-3'-phosphate
  modified_base 18: mod_base = OTHER; note = 2'-O-methyluridine-3'-phosphate
  modified_base 19: mod_base = OTHER; note = 2'-O-methyluridine-3'-phosphate
  modified_base 20: mod_base = OTHER; note = 2'-O-methyluridine-3'-phosphate
  modified_base 21: mod_base = OTHER; note = 2'-O-methylguanosine-3'-phosphate
  modified_base 22: mod_base = OTHER; note = 2'-O-methyladenosine-3'-phosphate
  modified_base 23: mod_base = OTHER; note = 2'-O-methyladenosine
tgttctaaggaatggagtttgaa

SEQ ID NO: 5196 - RNA, 23 nt, synthetic construct
  source 1..23: mol_type = other RNA
  modified_base 1: mod_base = OTHER; note = 2'-O-methyluridine-3'-phosphate 5'-(E)-Vinylphosphonate
  modified_base 2: mod_base = OTHER; note = 2'-deoxy-2'-fluorouridine-3'-phosphate
  modified_base 3: mod_base = OTHER; note = 2'-O-methylguanosine-3'-phosphate
  modified_base 4: mod_base = OTHER; note = 2'-O-methyluridine-3'-phosphate
  modified_base 5: mod_base = OTHER; note = 2'-O-methyluridine-3'-phosphate
  modified_base 6: mod_base = OTHER; note = 2'-deoxy-2'-fluorocytidine-3'-phosphate
  modified_base 7: mod_base = OTHER; note = 2'-O-methyluridine-3'-phosphate
  modified_base 8: mod_base = OTHER; note = 2'-O-methyladenosine-3'-phosphate
  modified_base 9: mod_base = OTHER; note = 2'-O-methyladenosine-3'-phosphate
  modified_base 10: mod_base = OTHER; note = 2'-O-methylguanosine-3'-phosphate
  modified_base 11: mod_base = OTHER; note = 2'-O-methylguanosine-3'-phosphate
  modified_base 12: mod_base = OTHER; note = 2'-O-methyladenosine-3'-phosphate
  modified_base 13: mod_base = OTHER; note = 2'-O-methyladenosine-3'-phosphate
  modified_base 14: mod_base = OTHER; note = 2'-deoxy-2'-fluorouridine-3'-phosphate
  modified_base 15: mod_base = OTHER; note = 2'-O-methylguanosine-3'-phosphate
  modified_base 16: mod_base = OTHER; note = 2'-deoxy-2'-fluoroguanosine-3'-phosphate
  modified_base 17: mod_base = OTHER; note = 2'-O-methyladenosine-3'-phosphate
  modified_base 18: mod_base = OTHER; note = 2'-O-methylguanosine-3'-phosphate
  modified_base 19: mod_base = OTHER; note = 2'-O-methyluridine-3'-phosphate
  modified_base 20: mod_base = OTHER; note = 2'-O-methyluridine-3'-phosphate
  modified_base 21: mod_base = OTHER; note = 2'-O-methyluridine-3'-phosphate
  modified_base 22: mod_base = OTHER; note = 2'-O-methylguanosine-3'-phosphate
  modified_base 23: mod_base = OTHER; note = 2'-O-methyladenosine
ttgttctaaggaatggagtttga

SEQ ID NO: 5197 - RNA, 23 nt, synthetic construct
  source 1..23: mol_type = other RNA
  modified_base 1: mod_base = OTHER; note = 2'-O-methyluridine-3'-phosphate 5'-(E)-Vinylphosphonate
  modified_base 2: mod_base = OTHER; note = 2'-deoxy-2'-fluoroadenosine-3'-phosphate
  modified_base 3: mod_base = OTHER; note = 2'-O-methyluridine-3'-phosphate
  modified_base 4: mod_base = OTHER; note = 2'-O-methylguanosine-3'-phosphate
  modified_base 5: mod_base = OTHER; note = 2'-O-methyluridine-3'-phosphate
  modified_base 6: mod_base = OTHER; note = 2'-deoxy-2'-fluorouridine-3'-phosphate
  modified_base 7: mod_base = OTHER; note = 2'-O-methylcytidine-3'-phosphate
  modified_base 8: mod_base = OTHER; note = 2'-O-methyluridine-3'-phosphate
  modified_base 9: mod_base = OTHER; note = 2'-O-methyladenosine-3'-phosphate
  modified_base 10: mod_base = OTHER; note = 2'-O-methyladenosine-3'-phosphate
  modified_base 11: mod_base = OTHER; note = 2'-O-methylguanosine-3'-phosphate
  modified_base 12: mod_base = OTHER; note = 2'-O-methylguanosine-3'-phosphate
  modified_base 13: mod_base = OTHER; note = 2'-O-methyladenosine-3'-phosphate
  modified_base 14: mod_base = OTHER; note = 2'-deoxy-2'-fluoroadenosine-3'-phosphate
  modified_base 15: mod_base = OTHER; note = 2'-O-methyluridine-3'-phosphate
  modified_base 16: mod_base = OTHER; note = 2'-deoxy-2'-fluoroguanosine-3'-phosphate
  modified_base 17: mod_base = OTHER; note = 2'-O-methylguanosine-3'-phosphate
  modified_base 18: mod_base = OTHER; note = 2'-O-methyladenosine-3'-phosphate
  modified_base 19: mod_base = OTHER; note = 2'-O-methylguanosine-3'-phosphate
  modified_base 20: mod_base = OTHER; note = 2'-O-methyluridine-3'-phosphate
  modified_base 21: mod_base = OTHER; note = 2'-O-methyluridine-3'-phosphate
  modified_base 22: mod_base = OTHER; note = 2'-O-methyluridine-3'-phosphate
  modified_base 23: mod_base = OTHER; note = 2'-O-methylguanosine
tatgttctaaggaatggagtttg

SEQ ID NO: 5198 - RNA, 23 nt, synthetic construct
  source 1..23: mol_type = other RNA
  modified_base 1: mod_base = OTHER; note = 2'-O-methyluridine-3'-phosphate 5'-(E)-Vinylphosphonate
  modified_base 2: mod_base = OTHER; note = 2'-deoxy-2'-fluoroadenosine-3'-phosphate
  modified_base 3: mod_base = OTHER; note = 2'-O-methyladenosine-3'-phosphate
  modified_base 4: mod_base = OTHER; note = 2'-O-methyluridine-3'-phosphate
  modified_base 5: mod_base = OTHER; note = 2'-O-methylguanosine-3'-phosphate
  modified_base 6: mod_base = OTHER; note = 2'-deoxy-2'-fluorouridine-3'-phosphate
  modified_base 7: mod_base = OTHER; note = 2'-O-methyluridine-3'-phosphate
  modified_base 8: mod_base = OTHER; note = 2'-O-methylcytidine-3'-phosphate
  modified_base 9: mod_base = OTHER; note = 2'-O-methyluridine-3'-phosphate
  modified_base 10: mod_base = OTHER; note = 2'-O-methyladenosine-3'-phosphate
  modified_base 11: mod_base = OTHER; note = 2'-O-methyladenosine-3'-phosphate
  modified_base 12: mod_base = OTHER; note = 2'-O-methylguanosine-3'-phosphate
  modified_base 13: mod_base = OTHER; note = 2'-O-methylguanosine-3'-phosphate
  modified_base 14: mod_base = OTHER; note = 2'-deoxy-2'-fluoroadenosine-3'-phosphate
  modified_base 15: mod_base = OTHER; note = 2'-O-methyladenosine-3'-phosphate
  modified_base 16: mod_base = OTHER; note = 2'-deoxy-2'-fluorouridine-3'-phosphate
  modified_base 17: mod_base = OTHER; note = 2'-O-methylguanosine-3'-phosphate
  modified_base 18: mod_base = OTHER; note = 2'-O-methylguanosine-3'-phosphate
  modified_base 19: mod_base = OTHER; note = 2'-O-methyladenosine-3'-phosphate
  modified_base 20: mod_base = OTHER; note = 2'-O-methylguanosine-3'-phosphate
  modified_base 21: mod_base = OTHER; note = 2'-O-methyluridine-3'-phosphate
  modified_base 22: mod_base = OTHER; note = 2'-O-methyluridine-3'-phosphate
  modified_base 23: mod_base = OTHER; note = 2'-O-methyluridine
taatgttctaaggaatggagttt

SEQ ID NO: 5199 - RNA, 23 nt, synthetic construct
  source 1..23: mol_type = other RNA
  modified_base 1: mod_base = OTHER; note = 2'-O-methyluridine-3'-phosphate 5'-(E)-Vinylphosphonate
  modified_base 2: mod_base = OTHER; note = 2'-deoxy-2'-fluoroguanosine-3'-phosphate
  modified_base 3: mod_base = OTHER; note = 2'-O-methyladenosine-3'-phosphate
  modified_base 4: mod_base = OTHER; note = 2'-O-methyladenosine-3'-phosphate
  modified_base 5: mod_base = OTHER; note = 2'-O-methyluridine-3'-phosphate
  modified_base 6: mod_base = OTHER; note = 2'-deoxy-2'-fluoroguanosine-3'-phosphate
  modified_base 7: mod_base = OTHER; note = 2'-O-methyluridine-3'-phosphate
  modified_base 8: mod_base = OTHER; note = 2'-O-methyluridine-3'-phosphate
  modified_base 9: mod_base = OTHER; note = 2'-O-methylcytidine-3'-phosphate
  modified_base 10: mod_base = OTHER; note = 2'-O-methyluridine-3'-phosphate
  modified_base 11: mod_base = OTHER; note = 2'-O-methyladenosine-3'-phosphate
  modified_base 12: mod_base = OTHER; note = 2'-O-methyladenosine-3'-phosphate
  modified_base 13: mod_base = OTHER; note = 2'-O-methylguanosine-3'-phosphate
  modified_base 14: mod_base = OTHER; note = 2'-deoxy-2'-fluoroguanosine-3'-phosphate
  modified_base 15: mod_base = OTHER; note = 2'-O-methyladenosine-3'-phosphate
  modified_base 16: mod_base = OTHER; note = 2'-deoxy-2'-fluoroadenosine-3'-phosphate
  modified_base 17: mod_base = OTHER; note = 2'-O-methyluridine-3'-phosphate
  modified_base 18: mod_base = OTHER; note = 2'-O-methylguanosine-3'-phosphate
  modified_base 19: mod_base = OTHER; note = 2'-O-methylguanosine-3'-phosphate
  modified_base 20: mod_base = OTHER; note = 2'-O-methyladenosine-3'-phosphate
  modified_base 21: mod_base = OTHER; note = 2'-O-methylguanosine-3'-phosphate
  modified_base 22: mod_base = OTHER; note = 2'-O-methyluridine-3'-phosphate
  modified_base 23: mod_base = OTHER; note = 2'-O-methyluridine
tgaatgttctaaggaatggagtt

SEQ ID NO: 5200 - RNA, 23 nt, synthetic construct
  source 1..23: mol_type = other RNA
  modified_base 1: mod_base = OTHER; note = 2'-O-methyluridine-3'-phosphate 5'-(E)-Vinylphosphonate
  modified_base 2: mod_base = OTHER; note = 2'-deoxy-2'-fluoroadenosine-3'-phosphate
  modified_base 3: mod_base = OTHER; note = 2'-O-methylguanosine-3'-phosphate
  modified_base 4: mod_base = OTHER; note = 2'-O-methyladenosine-3'-phosphate
  modified_base 5: mod_base = OTHER; note = 2'-O-methyladenosine-3'-phosphate
  modified_base 6: mod_base = OTHER; note = 2'-deoxy-2'-fluorouridine-3'-phosphate
  modified_base 7: mod_base = OTHER; note = 2'-O-methylguanosine-3'-phosphate
  modified_base 8: mod_base = OTHER; note = 2'-O-methyluridine-3'-phosphate
  modified_base 9: mod_base = OTHER; note = 2'-O-methyluridine-3'-phosphate
  modified_base 10: mod_base = OTHER; note = 2'-O-methylcytidine-3'-phosphate
  modified_base 11: mod_base = OTHER; note = 2'-O-methyluridine-3'-phosphate
  modified_base 12: mod_base = OTHER; note = 2'-O-methyladenosine-3'-phosphate
  modified_base 13: mod_base = OTHER; note = 2'-O-methyladenosine-3'-phosphate
  modified_base 14: mod_base = OTHER; note = 2'-deoxy-2'-fluoroguanosine-3'-phosphate
  modified_base 15: mod_base = OTHER; note = 2'-O-methylguanosine-3'-phosphate
  modified_base 16: mod_base = OTHER; note = 2'-deoxy-2'-fluoroadenosine-3'-phosphate
  modified_base 17: mod_base = OTHER; note = 2'-O-methyladenosine-3'-phosphate
  modified_base 18: mod_base = OTHER; note = 2'-O-methyluridine-3'-phosphate
  modified_base 19: mod_base = OTHER; note = 2'-O-methylguanosine-3'-phosphate
  modified_base 20: mod_base = OTHER; note = 2'-O-methylguanosine-3'-phosphate
  modified_base 21: mod_base = OTHER; note = 2'-O-methyladenosine-3'-phosphate
  modified_base 22: mod_base = OTHER; note = 2'-O-methylguanosine-3'-phosphate
  modified_base 23: mod_base = OTHER; note = 2'-O-methyluridine
tagaatgttctaaggaatggagt

SEQ ID NO: 5201 - RNA, 23 nt, synthetic construct
  source 1..23: mol_type = other RNA
  modified_base 1: mod_base = OTHER; note = 2'-O-methyluridine-3'-phosphate 5'-(E)-Vinylphosphonate
  modified_base 2: mod_base = OTHER; note = 2'-deoxy-2'-fluoroadenosine-3'-phosphate
  modified_base 3: mod_base = OTHER; note = 2'-O-methyladenosine-3'-phosphate
  modified_base 4: mod_base = OTHER; note = 2'-O-methylguanosine-3'-phosphate
  modified_base 5: mod_base = OTHER; note = 2'-O-methyladenosine-3'-phosphate
  modified_base 6: mod_base = OTHER; note = 2'-deoxy-2'-fluoroadenosine-3'-phosphate
  modified_base 7: mod_base = OTHER; note = 2'-O-methyluridine-3'-phosphate
  modified_base 8: mod_base = OTHER; note = 2'-O-methylguanosine-3'-phosphate
  modified_base 9: mod_base = OTHER; note = 2'-O-methyluridine-3'-phosphate
  modified_base 10: mod_base = OTHER; note = 2'-O-methyluridine-3'-phosphate
  modified_base 11: mod_base = OTHER; note = 2'-O-methylcytidine-3'-phosphate
  modified_base 12: mod_base = OTHER; note = 2'-O-methyluridine-3'-phosphate
  modified_base 13: mod_base = OTHER; note = 2'-O-methyladenosine-3'-phosphate
  modified_base 14: mod_base = OTHER; note = 2'-deoxy-2'-fluoroadenosine-3'-phosphate
  modified_base 15: mod_base = OTHER; note = 2'-O-methylguanosine-3'-phosphate
  modified_base 16: mod_base = OTHER; note = 2'-deoxy-2'-fluoroguanosine-3'-phosphate
  modified_base 17: mod_base = OTHER; note = 2'-O-methyladenosine-3'-phosphate
  modified_base 18: mod_base = OTHER; note = 2'-O-methyladenosine-3'-phosphate
  modified_base 19: mod_base = OTHER; note = 2'-O-methyluridine-3'-phosphate
  modified_base 20: mod_base = OTHER; note = 2'-O-methylguanosine-3'-phosphate
  modified_base 21: mod_base = OTHER; note = 2'-O-methylguanosine-3'-phosphate
  modified_base 22: mod_base = OTHER; note = 2'-O-methyladenosine-3'-phosphate
  modified_base 23: mod_base = OTHER; note = 2'-O-methylguanosine
taagaatgttctaaggaatggag

SEQ ID NO: 5202 - RNA, 23 nt, synthetic construct
  source 1..23: mol_type = other RNA
  modified_base 1: mod_base = OTHER; note = 2'-O-methyluridine-3'-phosphate 5'-(E)-Vinylphosphonate
  modified_base 2: mod_base = OTHER; note = 2'-deoxy-2'-fluoroguanosine-3'-phosphate
  modified_base 3: mod_base = OTHER; note = 2'-O-methyladenosine-3'-phosphate
  modified_base 4: mod_base = OTHER; note = 2'-O-methyladenosine-3'-phosphate
  modified_base 5: mod_base = OTHER; note = 2'-O-methylguanosine-3'-phosphate
  modified_base 6: mod_base = OTHER; note = 2'-deoxy-2'-fluoroadenosine-3'-phosphate
  modified_base 7: mod_base = OTHER; note = 2'-O-methyladenosine-3'-phosphate
  modified_base 8: mod_base = OTHER; note = 2'-O-methyluridine-3'-phosphate
  modified_base 9: mod_base = OTHER; note = 2'-O-methylguanosine-3'-phosphate
  modified_base 10: mod_base = OTHER; note = 2'-O-methyluridine-3'-phosphate
  modified_base 11: mod_base = OTHER; note = 2'-O-methyluridine-3'-phosphate
  modified_base 12: mod_base = OTHER; note = 2'-O-methylcytidine-3'-phosphate
  modified_base 13: mod_base = OTHER; note = 2'-O-methyluridine-3'-phosphate
  modified_base 14: mod_base = OTHER; note = 2'-deoxy-2'-fluoroadenosine-3'-phosphate
  modified_base 15: mod_base = OTHER; note = 2'-O-methyladenosine-3'-phosphate
  modified_base 16: mod_base = OTHER; note = 2'-deoxy-2'-fluoroguanosine-3'-phosphate
  modified_base 17: mod_base = OTHER; note = 2'-O-methylguanosine-3'-phosphate
  modified_base 18: mod_base = OTHER; note = 2'-O-methyladenosine-3'-phosphate
  modified_base 19: mod_base = OTHER; note = 2'-O-methyladenosine-3'-phosphate
  modified_base 20: mod_base = OTHER; note = 2'-O-methyluridine-3'-phosphate
  modified_base 21: mod_base = OTHER; note = 2'-O-methylguanosine-3'-phosphate
  modified_base 22: mod_base = OTHER; note = 2'-O-methylguanosine-3'-phosphate
  modified_base 23: mod_base = OTHER; note = 2'-O-methyladenosine
tgaagaatgttctaaggaatgga

SEQ ID NO: 5203 - RNA, 23 nt, synthetic construct
  source 1..23: mol_type = other RNA
  modified_base 1: mod_base = OTHER; note = 2'-O-methyluridine-3'-phosphate 5'-(E)-Vinylphosphonate
  modified_base 2: mod_base = OTHER; note = 2'-deoxy-2'-fluoroadenosine-3'-phosphate
  modified_base 3: mod_base = OTHER; note = 2'-O-methylguanosine-3'-phosphate
  modified_base 4: mod_base = OTHER; note = 2'-O-methyladenosine-3'-phosphate
  modified_base 5: mod_base = OTHER; note = 2'-O-methyladenosine-3'-phosphate
  modified_base 6: mod_base = OTHER; note = 2'-deoxy-2'-fluoroguanosine-3'-phosphate
  modified_base 7: mod_base = OTHER; note = 2'-O-methyladenosine-3'-phosphate
  modified_base 8: mod_base = OTHER; note = 2'-O-methyladenosine-3'-phosphate
  modified_base 9: mod_base = OTHER; note = 2'-O-methyluridine-3'-phosphate
  modified_base 10: mod_base = OTHER; note = 2'-O-methylguanosine-3'-phosphate
  modified_base 11: mod_base = OTHER; note = 2'-O-methyluridine-3'-phosphate
  modified_base 12: mod_base = OTHER; note = 2'-O-methyluridine-3'-phosphate
  modified_base 13: mod_base = OTHER; note = 2'-O-methylcytidine-3'-phosphate
  modified_base 14: mod_base = OTHER; note = 2'-deoxy-2'-fluorouridine-3'-phosphate
  modified_base 15: mod_base = OTHER; note = 2'-O-methyladenosine-3'-phosphate
  modified_base 16: mod_base = OTHER; note = 2'-deoxy-2'-fluoroadenosine-3'-phosphate
  modified_base 17: mod_base = OTHER; note = 2'-O-methylguanosine-3'-phosphate
  modified_base 18: mod_base = OTHER; note = 2'-O-methylguanosine-3'-phosphate
  modified_base 19: mod_base = OTHER; note = 2'-O-methyladenosine-3'-phosphate
  modified_base 20: mod_base = OTHER; note = 2'-O-methyladenosine-3'-phosphate
  modified_base 21: mod_base = OTHER; note = 2'-O-methyluridine-3'-phosphate
  modified_base 22: mod_base = OTHER; note = 2'-O-methylguanosine-3'-phosphate
  modified_base 23: mod_base = OTHER; note = 2'-O-methylguanosine
tagaagaatgttctaaggaatgg

SEQ ID NO: 5204 - RNA, 23 nt, synthetic construct
  source 1..23: mol_type = other RNA
  modified_base 1: mod_base = OTHER; note = 2'-O-methyluridine-3'-phosphate 5'-(E)-Vinylphosphonate
  modified_base 2: mod_base = OTHER; note = 2'-deoxy-2'-fluorouridine-3'-phosphate
  modified_base 3: mod_base = OTHER; note = 2'-O-methyladenosine-3'-phosphate
  modified_base 4: mod_base = OTHER; note = 2'-O-methylguanosine-3'-phosphate
  modified_base 5: mod_base = OTHER; note = 2'-O-methyladenosine-3'-phosphate
  modified_base 6: mod_base = OTHER; note = 2'-deoxy-2'-fluoroadenosine-3'-phosphate
  modified_base 7: mod_base = OTHER; note = 2'-O-methylguanosine-3'-phosphate
  modified_base 8: mod_base = OTHER; note = 2'-O-methyladenosine-3'-phosphate
  modified_base 9: mod_base = OTHER; note = 2'-O-methyladenosine-3'-phosphate
  modified_base 10: mod_base = OTHER; note = 2'-O-methyluridine-3'-phosphate
  modified_base 11: mod_base = OTHER; note = 2'-O-methylguanosine-3'-phosphate
  modified_base 12: mod_base = OTHER; note = 2'-O-methyluridine-3'-phosphate
  modified_base 13: mod_base = OTHER; note = 2'-O-methyluridine-3'-phosphate
  modified_base 14: mod_base = OTHER; note = 2'-deoxy-2'-fluorocytidine-3'-phosphate
  modified_base 15: mod_base = OTHER; note = 2'-O-methyluridine-3'-phosphate
  modified_base 16: mod_base = OTHER; note = 2'-deoxy-2'-fluoroadenosine-3'-phosphate
  modified_base 17: mod_base = OTHER; note = 2'-O-methyladenosine-3'-phosphate
  modified_base 18: mod_base = OTHER; note = 2'-O-methylguanosine-3'-phosphate
  modified_base 19: mod_base = OTHER; note = 2'-O-methylguanosine-3'-phosphate
  modified_base 20: mod_base = OTHER; note = 2'-O-methyladenosine-3'-phosphate
  modified_base 21: mod_base = OTHER; note = 2'-O-methyladenosine-3'-phosphate
  modified_base 22: mod_base = OTHER; note = 2'-O-methyluridine-3'-phosphate
  modified_base 23: mod_base = OTHER; note = 2'-O-methylguanosine
ttagaagaatgttctaaggaatg

SEQ ID NO: 5205 - RNA, 23 nt, synthetic construct
  source 1..23: mol_type = other RNA
  modified_base 1: mod_base = OTHER; note = 2'-O-methyluridine-3'-phosphate 5'-(E)-Vinylphosphonate
  modified_base 2: mod_base = OTHER; note = 2'-deoxy-2'-fluoroguanosine-3'-phosphate
  modified_base 3: mod_base = OTHER; note = 2'-O-methyluridine-3'-phosphate
  modified_base 4: mod_base = OTHER; note = 2'-O-methyladenosine-3'-phosphate
  modified_base 5: mod_base = OTHER; note = 2'-O-methylguanosine-3'-phosphate
  modified_base 6: mod_base = OTHER; note = 2'-deoxy-2'-fluoroadenosine-3'-phosphate
  modified_base 7: mod_base = OTHER; note = 2'-O-methyladenosine-3'-phosphate
  modified_base 8: mod_base = OTHER; note = 2'-O-methylguanosine-3'-phosphate
  modified_base 9: mod_base = OTHER; note = 2'-O-methyladenosine-3'-phosphate
  modified_base 10: mod_base = OTHER; note = 2'-O-methyladenosine-3'-phosphate
  modified_base 11: mod_base = OTHER; note = 2'-O-methyluridine-3'-phosphate
  modified_base 12: mod_base = OTHER; note = 2'-O-methylguanosine-3'-phosphate
  modified_base 13: mod_base = OTHER; note = 2'-O-methyluridine-3'-phosphate
  modified_base 14: mod_base = OTHER; note = 2'-deoxy-2'-fluorouridine-3'-phosphate
  modified_base 15: mod_base = OTHER; note = 2'-O-methylcytidine-3'-phosphate
  modified_base 16: mod_base = OTHER; note = 2'-deoxy-2'-fluorouridine-3'-phosphate
  modified_base 17: mod_base = OTHER; note = 2'-O-methyladenosine-3'-phosphate
  modified_base 18: mod_base = OTHER; note = 2'-O-methyladenosine-3'-phosphate
  modified_base 19: mod_base = OTHER; note = 2'-O-methylguanosine-3'-phosphate
  modified_base 20: mod_base = OTHER; note = 2'-O-methylguanosine-3'-phosphate
  modified_base 21: mod_base = OTHER; note = 2'-O-methyladenosine-3'-phosphate
  modified_base 22: mod_base = OTHER; note = 2'-O-methyladenosine-3'-phosphate
  modified_base 23: mod_base = OTHER; note = 2'-O-methyluridine
tgtagaagaatgttctaaggaat

SEQ ID NO: 5206 - RNA, 23 nt, synthetic construct
  source 1..23: mol_type = other RNA
  modified_base 1: mod_base = OTHER; note = 2'-O-methyluridine-3'-phosphate 5'-(E)-Vinylphosphonate
  modified_base 2: mod_base = OTHER; note = 2'-deoxy-2'-fluoroadenosine-3'-phosphate
  modified_base 3: mod_base = OTHER; note = 2'-O-methylguanosine-3'-phosphate
  modified_base 4: mod_base = OTHER; note = 2'-O-methyluridine-3'-phosphate
  modified_base 5: mod_base = OTHER; note = 2'-O-methyladenosine-3'-phosphate
  modified_base 6: mod_base = OTHER; note = 2'-deoxy-2'-fluoroguanosine-3'-phosphate
  modified_base 7: mod_base = OTHER; note = 2'-O-methyladenosine-3'-phosphate
  modified_base 8: mod_base = OTHER; note = 2'-O-methyladenosine-3'-phosphate
  modified_base 9: mod_base = OTHER; note = 2'-O-methylguanosine-3'-phosphate
  modified_base 10: mod_base = OTHER; note = 2'-O-methyladenosine-3'-phosphate
  modified_base 11: mod_base = OTHER; note = 2'-O-methyladenosine-3'-phosphate
  modified_base 12: mod_base = OTHER; note = 2'-O-methyluridine-3'-phosphate
  modified_base 13: mod_base = OTHER; note = 2'-O-methylguanosine-3'-phosphate
  modified_base 14: mod_base = OTHER; note = 2'-deoxy-2'-fluorouridine-3'-phosphate
  modified_base 15: mod_base = OTHER; note = 2'-O-methyluridine-3'-phosphate
  modified_base 16: mod_base = OTHER; note = 2'-deoxy-2'-fluorocytidine-3'-phosphate
  modified_base 17: mod_base = OTHER; note = 2'-O-methyluridine-3'-phosphate
  modified_base 18: mod_base = OTHER; note = 2'-O-methyladenosine-3'-phosphate
  modified_base 19: mod_base = OTHER; note = 2'-O-methyladenosine-3'-phosphate
  modified_base 20: mod_base = OTHER; note = 2'-O-methylguanosine-3'-phosphate
  modified_base 21: mod_base = OTHER; note = 2'-O-methylguanosine-3'-phosphate
  modified_base 22: mod_base = OTHER; note = 2'-O-methyladenosine-3'-phosphate
  modified_base 23: mod_base = OTHER; note = 2'-O-methyladenosine
tagtagaagaatgttctaaggaa

SEQ ID NO: 5207 - RNA, 23 nt, synthetic construct
  source 1..23: mol_type = other RNA
  modified_base 1: mod_base = OTHER; note = 2'-O-methyluridine-3'-phosphate 5'-(E)-Vinylphosphonate
  modified_base 2: mod_base = OTHER; note = 2'-deoxy-2'-fluorocytidine-3'-phosphate
  modified_base 3: mod_base = OTHER; note = 2'-O-methyladenosine-3'-phosphate
  modified_base 4: mod_base = OTHER; note = 2'-O-methylguanosine-3'-phosphate
  modified_base 5: mod_base = OTHER; note = 2'-O-methyluridine-3'-phosphate
  modified_base 6: mod_base = OTHER; note = 2'-deoxy-2'-fluoroadenosine-3'-phosphate
  modified_base 7: mod_base = OTHER; note = 2'-O-methylguanosine-3'-phosphate
  modified_base 8: mod_base = OTHER; note = 2'-O-methyladenosine-3'-phosphate
  modified_base 9: mod_base = OTHER; note = 2'-O-methyladenosine-3'-phosphate
  modified_base 10: mod_base = OTHER; note = 2'-O-methylguanosine-3'-phosphate
  modified_base 11: mod_base = OTHER; note = 2'-O-methyladenosine-3'-phosphate
  modified_base 12: mod_base = OTHER; note = 2'-O-methyladenosine-3'-phosphate
  modified_base 13: mod_base = OTHER; note = 2'-O-methyluridine-3'-phosphate
  modified_base 14: mod_base = OTHER; note = 2'-deoxy-2'-fluoroguanosine-3'-phosphate
  modified_base 15: mod_base = OTHER; note = 2'-O-methyluridine-3'-phosphate
  modified_base 16: mod_base = OTHER; note = 2'-deoxy-2'-fluorouridine-3'-phosphate
  modified_base 17: mod_base = OTHER; note = 2'-O-methylcytidine-3'-phosphate
  modified_base 18: mod_base = OTHER; note = 2'-O-methyluridine-3'-phosphate
  modified_base 19: mod_base = OTHER; note = 2'-O-methyladenosine-3'-phosphate
  modified_base 20: mod_base = OTHER; note = 2'-O-methyladenosine-3'-phosphate
  modified_base 21: mod_base = OTHER; note = 2'-O-methylguanosine-3'-phosphate
  modified_base 22: mod_base = OTHER; note = 2'-O-methylguanosine-3'-phosphate
  modified_base 23: mod_base = OTHER; note = 2'-O-methyladenosine
tcagtagaagaatgttctaagga

SEQ ID NO: 5208 - RNA, 23 nt, synthetic construct
  source 1..23: mol_type = other RNA
  modified_base 1: mod_base = OTHER; note = 2'-O-methyluridine-3'-phosphate 5'-(E)-Vinylphosphonate
  modified_base 2: mod_base = OTHER; note = 2'-deoxy-2'-fluorouridine-3'-phosphate
  modified_base 3: mod_base = OTHER; note = 2'-O-methylcytidine-3'-phosphate
  modified_base 4: mod_base = OTHER; note = 2'-O-methyladenosine-3'-phosphate
  modified_base 5: mod_base = OTHER; note = 2'-O-methylguanosine-3'-phosphate
  modified_base 6: mod_base = OTHER; note = 2'-deoxy-2'-fluorouridine-3'-phosphate
  modified_base 7: mod_base = OTHER; note = 2'-O-methyladenosine-3'-phosphate
  modified_base 8: mod_base = OTHER; note = 2'-O-methylguanosine-3'-phosphate
  modified_base 9: mod_base = OTHER; note = 2'-O-methyladenosine-3'-phosphate
  modified_base 10: mod_base = OTHER; note = 2'-O-methyladenosine-3'-phosphate
  modified_base 11: mod_base = OTHER; note = 2'-O-methylguanosine-3'-phosphate
  modified_base 12: mod_base = OTHER; note = 2'-O-methyladenosine-3'-phosphate
  modified_base 13: mod_base = OTHER; note = 2'-O-methyladenosine-3'-phosphate
  modified_base 14: mod_base = OTHER; note = 2'-deoxy-2'-fluorouridine-3'-phosphate
  modified_base 15: mod_base = OTHER; note = 2'-O-methylguanosine-3'-phosphate
  modified_base 16: mod_base = OTHER; note = 2'-deoxy-2'-fluorouridine-3'-phosphate
  modified_base 17: mod_base = OTHER; note = 2'-O-methyluridine-3'-phosphate
  modified_base 18: mod_base = OTHER; note = 2'-O-methylcytidine-3'-phosphate
  modified_base 19: mod_base = OTHER; note = 2'-O-methyluridine-3'-phosphate
  modified_base 20: mod_base = OTHER; note = 2'-O-methyladenosine-3'-phosphate
  modified_base 21: mod_base = OTHER; note = 2'-O-methyladenosine-3'-phosphate
  modified_base 22: mod_base = OTHER; note = 2'-O-methylguanosine-3'-phosphate
  modified_base 23: mod_base = OTHER; note = 2'-O-methylguanosine
ttcagtagaagaatgttctaagg

SEQ ID NO: 5209 - RNA, 23 nt, synthetic construct
  source 1..23: mol_type = other RNA
  modified_base 1: mod_base = OTHER; note = 2'-O-methyluridine-3'-phosphate 5'-(E)-Vinylphosphonate
  modified_base 2: mod_base = OTHER; note = 2'-deoxy-2'-fluorocytidine-3'-phosphate
  modified_base 3: mod_base = OTHER; note = 2'-O-methyluridine-3'-phosphate
  modified_base 4: mod_base = OTHER; note = 2'-O-methylcytidine-3'-phosphate
  modified_base 5: mod_base = OTHER; note = 2'-O-methyladenosine-3'-phosphate
  modified_base 6: mod_base = OTHER; note = 2'-deoxy-2'-fluoroguanosine-3'-phosphate
  modified_base 7: mod_base = OTHER; note = 2'-O-methyluridine-3'-phosphate
  modified_base 8: mod_base = OTHER; note = 2'-O-methyladenosine-3'-phosphate
  modified_base 9: mod_base = OTHER; note = 2'-O-methylguanosine-3'-phosphate
  modified_base 10: mod_base = OTHER; note = 2'-O-methyladenosine-3'-phosphate
  modified_base 11: mod_base = OTHER; note = 2'-O-methyladenosine-3'-phosphate
  modified_base 12: mod_base = OTHER; note = 2'-O-methylguanosine-3'-phosphate
  modified_base 13: mod_base = OTHER; note = 2'-O-methyladenosine-3'-phosphate
  modified_base 14: mod_base = OTHER; note = 2'-deoxy-2'-fluoroadenosine-3'-phosphate
  modified_base 15: mod_base = OTHER; note = 2'-O-methyluridine-3'-phosphate
  modified_base 16: mod_base = OTHER; note = 2'-deoxy-2'-fluoroguanosine-3'-phosphate
  modified_base 17: mod_base = OTHER; note = 2'-O-methyluridine-3'-phosphate
  modified_base 18: mod_base = OTHER; note = 2'-O-methyluridine-3'-phosphate
  modified_base 19: mod_base = OTHER; note = 2'-O-methylcytidine-3'-phosphate
  modified_base 20: mod_base = OTHER; note = 2'-O-methyluridine-3'-phosphate
  modified_base 21: mod_base = OTHER; note = 2'-O-methyladenosine-3'-phosphate
  modified_base 22: mod_base = OTHER; note = 2'-O-methyladenosine-3'-phosphate
  modified_base 23: mod_base = OTHER; note = 2'-O-methylguanosine
tctcagtagaagaatgttctaag

SEQ ID NO: 5210 - RNA, 23 nt, synthetic construct
  source 1..23: mol_type = other RNA
  modified_base 1: mod_base = OTHER; note = 2'-O-methyluridine-3'-phosphate 5'-(E)-Vinylphosphonate
  modified_base 2: mod_base = OTHER; note = 2'-deoxy-2'-fluorouridine-3'-phosphate
  modified_base 3: mod_base = OTHER; note = 2'-O-methylcytidine-3'-phosphate
  modified_base 4: mod_base = OTHER; note = 2'-O-methyluridine-3'-phosphate
  modified_base 5: mod_base = OTHER; note = 2'-O-methylcytidine-3'-phosphate
  modified_base 6: mod_base = OTHER; note = 2'-deoxy-2'-fluoroadenosine-3'-phosphate
  modified_base 7: mod_base = OTHER; note = 2'-O-methylguanosine-3'-phosphate
  modified_base 8: mod_base = OTHER; note = 2'-O-methyluridine-3'-phosphate
  modified_base 9: mod_base = OTHER; note = 2'-O-methyladenosine-3'-phosphate
  modified_base 10: mod_base = OTHER; note = 2'-O-methylguanosine-3'-phosphate
  modified_base 11: mod_base = OTHER; note = 2'-O-methyladenosine-3'-phosphate
  modified_base 12: mod_base = OTHER; note = 2'-O-methyladenosine-3'-phosphate
  modified_base 13: mod_base = OTHER; note = 2'-O-methylguanosine-3'-phosphate
  modified_base 14: mod_base = OTHER; note = 2'-deoxy-2'-fluoroadenosine-3'-phosphate
  modified_base 15: mod_base = OTHER; note = 2'-O-methyladenosine-3'-phosphate
  modified_base 16: mod_base = OTHER; note = 2'-deoxy-2'-fluorouridine-3'-phosphate
  modified_base 17: mod_base = OTHER; note = 2'-O-methylguanosine-3'-phosphate
  modified_base 18: mod_base = OTHER; note = 2'-O-methyluridine-3'-phosphate
  modified_base 19: mod_base = OTHER; note = 2'-O-methyluridine-3'-phosphate
  modified_base 20: mod_base = OTHER; note = 2'-O-methylcytidine-3'-phosphate
  modified_base 21: mod_base = OTHER; note = 2'-O-methyluridine-3'-phosphate
  modified_base 22: mod_base = OTHER; note = 2'-O-methyladenosine-3'-phosphate
  modified_base 23: mod_base = OTHER; note = 2'-O-methyladenosine
ttctcagtagaagaatgttctaa

SEQ ID NO: 5211 - RNA, 23 nt, synthetic construct
  source 1..23: mol_type = other RNA
  modified_base 1: mod_base = OTHER; note = 2'-O-methyluridine-3'-phosphate 5'-(E)-Vinylphosphonate
  modified_base 2: mod_base = OTHER; note = 2'-deoxy-2'-fluoroadenosine-3'-phosphate
  modified_base 3: mod_base = OTHER; note = 2'-O-methyluridine-3'-phosphate
  modified_base 4: mod_base = OTHER; note = 2'-O-methylcytidine-3'-phosphate
  modified_base 5: mod_base = OTHER; note = 2'-O-methyluridine-3'-phosphate
  modified_base 6: mod_base = OTHER; note = 2'-deoxy-2'-fluorocytidine-3'-phosphate
  modified_base 7: mod_base = OTHER; note = 2'-O-methyladenosine-3'-phosphate
  modified_base 8: mod_base = OTHER; note = 2'-O-methylguanosine-3'-phosphate
  modified_base 9: mod_base = OTHER; note = 2'-O-methyluridine-3'-phosphate
  modified_base 10: mod_base = OTHER; note = 2'-O-methyladenosine-3'-phosphate
  modified_base 11: mod_base = OTHER; note = 2'-O-methylguanosine-3'-phosphate
  modified_base 12: mod_base = OTHER; note = 2'-O-methyladenosine-3'-phosphate
  modified_base 13: mod_base = OTHER; note = 2'-O-methyladenosine-3'-phosphate
  modified_base 14: mod_base = OTHER; note = 2'-deoxy-2'-fluoroguanosine-3'-phosphate
  modified_base 15: mod_base = OTHER; note = 2'-O-methyladenosine-3'-phosphate
  modified_base 16: mod_base = OTHER; note = 2'-deoxy-2'-fluoroadenosine-3'-phosphate
  modified_base 17: mod_base = OTHER; note = 2'-O-methyluridine-3'-phosphate
  modified_base 18: mod_base = OTHER; note = 2'-O-methylguanosine-3'-phosphate
  modified_base 19: mod_base = OTHER; note = 2'-O-methyluridine-3'-phosphate
  modified_base 20: mod_base = OTHER; note = 2'-O-methyluridine-3'-phosphate
  modified_base 21: mod_base = OTHER; note = 2'-O-methylcytidine-3'-phosphate
  modified_base 22: mod_base = OTHER; note = 2'-O-methyluridine-3'-phosphate
  modified_base 23: mod_base = OTHER; note = 2'-O-methyladenosine
tatctcagtagaagaatgttcta

SEQ ID NO: 5212 - RNA, 23 nt, synthetic construct
  source 1..23: mol_type = other RNA
  modified_base 1: mod_base = OTHER; note = 2'-O-methyluridine-3'-phosphate 5'-(E)-Vinylphosphonate
  modified_base 2: mod_base = OTHER; note = 2'-deoxy-2'-fluoroadenosine-3'-phosphate
  modified_base 3: mod_base = OTHER; note = 2'-O-methyluridine-3'-phosphate
  modified_base 4: mod_base = OTHER; note = 2'-O-methylcytidine-3'-phosphate
  modified_base 5: mod_base = OTHER; note = 2'-O-methyladenosine-3'-phosphate
  modified_base 6: mod_base = OTHER; note = 2'-deoxy-2'-fluorouridine-3'-phosphate
  modified_base 7: mod_base = OTHER; note = 2'-O-methylcytidine-3'-phosphate
  modified_base 8: mod_base = OTHER; note = 2'-O-methyluridine-3'-phosphate
  modified_base 9: mod_base = OTHER; note = 2'-O-methylcytidine-3'-phosphate
  modified_base 10: mod_base = OTHER; note = 2'-O-methyladenosine-3'-phosphate
  modified_base 11: mod_base = OTHER; note = 2'-O-methylguanosine-3'-phosphate
  modified_base 12: mod_base = OTHER; note = 2'-O-methyluridine-3'-phosphate
  modified_base 13: mod_base = OTHER; note = 2'-O-methyladenosine-3'-phosphate
  modified_base 14: mod_base = OTHER; note = 2'-deoxy-2'-fluoroguanosine-3'-phosphate
  modified_base 15: mod_base = OTHER; note = 2'-O-methyladenosine-3'-phosphate
  modified_base 16: mod_base = OTHER; note = 2'-deoxy-2'-fluoroadenosine-3'-phosphate
  modified_base 17: mod_base = OTHER; note = 2'-O-methylguanosine-3'-phosphate
  modified_base 18: mod_base = OTHER; note = 2'-O-methyladenosine-3'-phosphate
  modified_base 19: mod_base = OTHER; note = 2'-O-methyladenosine-3'-phosphate
  modified_base 20: mod_base = OTHER; note = 2'-O-methyluridine-3'-phosphate
  modified_base 21: mod_base = OTHER; note = 2'-O-methylguanosine-3'-phosphate
  modified_base 22: mod_base = OTHER; note = 2'-O-methyluridine-3'-phosphate
  modified_base 23: mod_base = OTHER; note = 2'-O-methyluridine
tatcatctcagtagaagaatgtt

SEQ ID NO: 5213 - RNA, 23 nt, synthetic construct
  source 1..23: mol_type = other RNA
  modified_base 1: mod_base = OTHER; note = 2'-O-methyluridine-3'-phosphate 5'-(E)-Vinylphosphonate
  modified_base 2: mod_base = OTHER; note = 2'-deoxy-2'-fluoroguanosine-3'-phosphate
  modified_base 3: mod_base = OTHER; note = 2'-O-methyladenosine-3'-phosphate
  modified_base 4: mod_base = OTHER; note = 2'-O-methyluridine-3'-phosphate
  modified_base 5: mod_base = OTHER; note = 2'-O-methylcytidine-3'-phosphate
  modified_base 6: mod_base = OTHER; note = 2'-deoxy-2'-fluoroadenosine-3'-phosphate
  modified_base 7: mod_base = OTHER; note = 2'-O-methyluridine-3'-phosphate
  modified_base 8: mod_base = OTHER; note = 2'-O-methylcytidine-3'-phosphate
  modified_base 9: mod_base = OTHER; note = 2'-O-methyluridine-3'-phosphate
  modified_base 10: mod_base = OTHER; note = 2'-O-methylcytidine-3'-phosphate
  modified_base 11: mod_base = OTHER; note = 2'-O-methyladenosine-3'-phosphate
  modified_base 12: mod_base = OTHER; note = 2'-O-methylguanosine-3'-phosphate
  modified_base 13: mod_base = OTHER; note = 2'-O-methyluridine-3'-phosphate
  modified_base 14: mod_base = OTHER; note = 2'-deoxy-2'-fluoroadenosine-3'-phosphate
  modified_base 15: mod_base = OTHER; note = 2'-O-methylguanosine-3'-phosphate
  modified_base 16: mod_base = OTHER; note = 2'-deoxy-2'-fluoroadenosine-3'-phosphate
  modified_base 17: mod_base = OTHER; note = 2'-O-methyladenosine-3'-phosphate
  modified_base 18: mod_base = OTHER; note = 2'-O-methylguanosine-3'-phosphate
  modified_base 19: mod_base = OTHER; note = 2'-O-methyladenosine-3'-phosphate
  modified_base 20: mod_base = OTHER; note = 2'-O-methyladenosine-3'-phosphate
  modified_base 21: mod_base = OTHER; note = 2'-O-methyluridine-3'-phosphate
  modified_base 22: mod_base = OTHER; note = 2'-O-methylguanosine-3'-phosphate
  modified_base 23: mod_base = OTHER; note = 2'-O-methyluridine
tgatcatctcagtagaagaatgt

SEQ ID NO: 5214 - RNA, 23 nt, synthetic construct
  source 1..23: mol_type = other RNA
  modified_base 1: mod_base = OTHER; note = 2'-O-methyluridine-3'-phosphate 5'-(E)-Vinylphosphonate
  modified_base 2: mod_base = OTHER; note = 2'-deoxy-2'-fluoroguanosine-3'-phosphate
  modified_base 3: mod_base = OTHER; note = 2'-O-methylguanosine-3'-phosphate
  modified_base 4: mod_base = OTHER; note = 2'-O-methyladenosine-3'-phosphate
  modified_base 5: mod_base = OTHER; note = 2'-O-methyluridine-3'-phosphate
  modified_base 6: mod_base = OTHER; note = 2'-deoxy-2'-fluorocytidine-3'-phosphate
  modified_base 7: mod_base = OTHER; note = 2'-O-methyladenosine-3'-phosphate
  modified_base 8: mod_base = OTHER; note = 2'-O-methyluridine-3'-phosphate
  modified_base 9: mod_base = OTHER; note = 2'-O-methylcytidine-3'-phosphate
  modified_base 10: mod_base = OTHER; note = 2'-O-methyluridine-3'-phosphate
  modified_base 11: mod_base = OTHER; note = 2'-O-methylcytidine-3'-phosphate
  modified_base 12: mod_base = OTHER; note = 2'-O-methyladenosine-3'-phosphate
  modified_base 13: mod_base = OTHER; note = 2'-O-methylguanosine-3'-phosphate
  modified_base 14: mod_base = OTHER; note = 2'-deoxy-2'-fluorouridine-3'-phosphate
  modified_base 15: mod_base = OTHER; note = 2'-O-methyladenosine-3'-phosphate
  modified_base 16: mod_base = OTHER; note = 2'-deoxy-2'-fluoroguanosine-3'-phosphate
  modified_base 17: mod_base = OTHER; note = 2'-O-methyladenosine-3'-phosphate
  modified_base 18: mod_base = OTHER; note = 2'-O-methyladenosine-3'-phosphate
  modified_base 19: mod_base = OTHER; note = 2'-O-methylguanosine-3'-phosphate
  modified_base 20: mod_base = OTHER; note = 2'-O-methyladenosine-3'-phosphate
  modified_base 21: mod_base = OTHER; note = 2'-O-methyladenosine-3'-phosphate
  modified_base 22: mod_base = OTHER; note = 2'-O-methyluridine-3'-phosphate
  modified_base 23: mod_base = OTHER; note = 2'-O-methylguanosine
tggatcatctcagtagaagaatg

SEQ ID NO: 5215 - RNA, 23 nt, synthetic construct
  source 1..23: mol_type = other RNA
  modified_base 1: mod_base = OTHER; note = 2'-O-methyluridine-3'-phosphate 5'-(E)-Vinylphosphonate
  modified_base 2: mod_base = OTHER; note = 2'-deoxy-2'-fluorouridine-3'-phosphate
  modified_base 3: mod_base = OTHER; note = 2'-O-methylguanosine-3'-phosphate
  modified_base 4: mod_base = OTHER; note = 2'-O-methylguanosine-3'-phosphate
  modified_base 5: mod_base = OTHER; note = 2'-O-methyladenosine-3'-phosphate
  modified_base 6: mod_base = OTHER; note = 2'-deoxy-2'-fluorouridine-3'-phosphate
  modified_base 7: mod_base = OTHER; note = 2'-O-methylcytidine-3'-phosphate
  modified_base 8: mod_base = OTHER; note = 2'-O-methyladenosine-3'-phosphate
  modified_base 9: mod_base = OTHER; note = 2'-O-methyluridine-3'-phosphate
  modified_base 10: mod_base = OTHER; note = 2'-O-methylcytidine-3'-phosphate
  modified_base 11: mod_base = OTHER; note = 2'-O-methyluridine-3'-phosphate
  modified_base 12: mod_base = OTHER; note = 2'-O-methylcytidine-3'-phosphate
  modified_base 13: mod_base = OTHER; note = 2'-O-methyladenosine-3'-phosphate
  modified_base 14: mod_base = OTHER; note = 2'-deoxy-2'-fluoroguanosine-3'-phosphate
  modified_base 15: mod_base = OTHER; note = 2'-O-methyluridine-3'-phosphate
  modified_base 16: mod_base = OTHER; note = 2'-deoxy-2'-fluoroadenosine-3'-phosphate
  modified_base 17: mod_base = OTHER; note = 2'-O-methylguanosine-3'-phosphate
  modified_base 18: mod_base = OTHER; note = 2'-O-methyladenosine-3'-phosphate
  modified_base 19: mod_base = OTHER; note = 2'-O-methyladenosine-3'-phosphate
  modified_base 20: mod_base = OTHER; note = 2'-O-methylguanosine-3'-phosphate
  modified_base 21: mod_base = OTHER; note = 2'-O-methyladenosine-3'-phosphate
  modified_base 22: mod_base = OTHER; note = 2'-O-methyladenosine-3'-phosphate
  modified_base 23: mod_base = OTHER; note = 2'-O-methyluridine
ttggatcatctcagtagaagaat

SEQ ID NO: 5216 - RNA, 23 nt, synthetic construct
  source 1..23: mol_type = other RNA
  modified_base 1: mod_base = OTHER; note = 2'-O-methyluridine-3'-phosphate 5'-(E)-Vinylphosphonate
  modified_base 2: mod_base = OTHER; note = 2'-deoxy-2'-fluorouridine-3'-phosphate
  modified_base 3: mod_base = OTHER; note = 2'-O-methyluridine-3'-phosphate
  modified_base 4: mod_base = OTHER; note = 2'-O-methylguanosine-3'-phosphate
  modified_base 5: mod_base = OTHER; note = 2'-O-methylguanosine-3'-phosphate
  modified_base 6: mod_base = OTHER; note = 2'-deoxy-2'-fluoroadenosine-3'-phosphate
  modified_base 7: mod_base = OTHER; note = 2'-O-methyluridine-3'-phosphate
  modified_base 8: mod_base = OTHER; note = 2'-O-methylcytidine-3'-phosphate
  modified_base 9: mod_base = OTHER; note = 2'-O-methyladenosine-3'-phosphate
  modified_base 10: mod_base = OTHER; note = 2'-O-methyluridine-3'-phosphate
  modified_base 11: mod_base = OTHER; note = 2'-O-methylcytidine-3'-phosphate
  modified_base 12: mod_base = OTHER; note = 2'-O-methyluridine-3'-phosphate
  modified_base 13: mod_base = OTHER; note = 2'-O-methylcytidine-3'-phosphate
  modified_base 14: mod_base = OTHER; note = 2'-deoxy-2'-fluoroadenosine-3'-phosphate
  modified_base 15: mod_base = OTHER; note = 2'-O-methylguanosine-3'-phosphate
  modified_base 16: mod_base = OTHER; note = 2'-deoxy-2'-fluorouridine-3'-phosphate
  modified_base 17: mod_base = OTHER; note = 2'-O-methyladenosine-3'-phosphate
  modified_base 18: mod_base = OTHER; note = 2'-O-methylguanosine-3'-phosphate
  modified_base 19: mod_base = OTHER; note = 2'-O-methyladenosine-3'-phosphate
  modified_base 20: mod_base = OTHER; note = 2'-O-methyladenosine-3'-phosphate
  modified_base 21: mod_base = OTHER; note = 2'-O-methylguanosine-3'-phosphate
  modified_base 22: mod_base = OTHER; note = 2'-O-methyladenosine-3'-phosphate
  modified_base 23: mod_base = OTHER; note = 2'-O-methyladenosine
tttggatcatctcagtagaagaa

SEQ ID NO: 5217 - RNA, 23 nt, synthetic construct
  source 1..23: mol_type = other RNA
  modified_base 1: mod_base = OTHER; note = 2'-O-methyluridine-3'-phosphate 5'-(E)-Vinylphosphonate
  modified_base 2: mod_base = OTHER; note = 2'-deoxy-2'-fluorocytidine-3'-phosphate
  modified_base 3: mod_base = OTHER; note = 2'-O-methyluridine-3'-phosphate
  modified_base 4: mod_base = OTHER; note = 2'-O-methyluridine-3'-phosphate
  modified_base 5: mod_base = OTHER; note = 2'-O-methylguanosine-3'-phosphate
  modified_base 6: mod_base = OTHER; note = 2'-deoxy-2'-fluoroguanosine-3'-phosphate
  modified_base 7: mod_base = OTHER; note = 2'-O-methyladenosine-3'-phosphate
  modified_base 8: mod_base = OTHER; note = 2'-O-methyluridine-3'-phosphate
  modified_base 9: mod_base = OTHER; note = 2'-O-methylcytidine-3'-phosphate
  modified_base 10: mod_base = OTHER; note = 2'-O-methyladenosine-3'-phosphate
  modified_base 11: mod_base = OTHER; note = 2'-O-methyluridine-3'-phosphate
  modified_base 12: mod_base = OTHER; note = 2'-O-methylcytidine-3'-phosphate
  modified_base 13: mod_base = OTHER; note = 2'-O-methyluridine-3'-phosphate
  modified_base 14: mod_base = OTHER; note = 2'-deoxy-2'-fluorocytidine-3'-phosphate
  modified_base 15: mod_base = OTHER; note = 2'-O-methyladenosine-3'-phosphate
  modified_base 16: mod_base = OTHER; note = 2'-deoxy-2'-fluoroguanosine-3'-phosphate
  modified_base 17: mod_base = OTHER; note = 2'-O-methyluridine-3'-phosphate
  modified_base 18: mod_base = OTHER; note = 2'-O-methyladenosine-3'-phosphate
  modified_base 19: mod_base = OTHER; note = 2'-O-methylguanosine-3'-phosphate
  modified_base 20: mod_base = OTHER; note = 2'-O-methyladenosine-3'-phosphate
  modified_base 21: mod_base = OTHER; note = 2'-O-methyladenosine-3'-phosphate
  modified_base 22: mod_base = OTHER; note = 2'-O-methylguanosine-3'-phosphate
  modified_base 23: mod_base = OTHER; note = 2'-O-methyladenosine
tcttggatcatctcagtagaaga

SEQ ID NO: 5218 - RNA, 23 nt, synthetic construct
  source 1..23: mol_type = other RNA
  modified_base 1: mod_base = OTHER; note = 2'-O-methyluridine-3'-phosphate 5'-(E)-Vinylphosphonate
  modified_base 2: mod_base = OTHER; note = 2'-deoxy-2'-fluorouridine-3'-phosphate
  modified_base 3: mod_base = OTHER; note = 2'-O-methylcytidine-3'-phosphate
  modified_base 4: mod_base = OTHER; note = 2'-O-methyluridine-3'-phosphate
  modified_base 5: mod_base = OTHER; note = 2'-O-methyluridine-3'-phosphate
  modified_base 6: mod_base = OTHER; note = 2'-deoxy-2'-fluoroguanosine-3'-phosphate
  modified_base 7: mod_base = OTHER; note = 2'-O-methylguanosine-3'-phosphate
  modified_base 8: mod_base = OTHER; note = 2'-O-methyladenosine-3'-phosphate
  modified_base 9: mod_base = OTHER; note = 2'-O-methyluridine-3'-phosphate
  modified_base 10: mod_base = OTHER; note = 2'-O-methylcytidine-3'-phosphate
  modified_base 11: mod_base = OTHER; note = 2'-O-methyladenosine-3'-phosphate
  modified_base 12: mod_base = OTHER; note = 2'-O-methyluridine-3'-phosphate
  modified_base 13: mod_base = OTHER; note = 2'-O-methylcytidine-3'-phosphate
  modified_base 14: mod_base = OTHER; note = 2'-deoxy-2'-fluorouridine-3'-phosphate
  modified_base 15: mod_base = OTHER; note = 2'-O-methylcytidine-3'-phosphate
  modified_base 16: mod_base = OTHER; note = 2'-deoxy-2'-fluoroadenosine-3'-phosphate
  modified_base 17: mod_base = OTHER; note = 2'-O-methylguanosine-3'-phosphate
  modified_base 18: mod_base = OTHER; note = 2'-O-methyluridine-3'-phosphate
  modified_base 19: mod_base = OTHER; note = 2'-O-methyladenosine-3'-phosphate
  modified_base 20: mod_base = OTHER; note = 2'-O-methylguanosine-3'-phosphate
  modified_base 21: mod_base = OTHER; note = 2'-O-methyladenosine-3'-phosphate
  modified_base 22: mod_base = OTHER; note = 2'-O-methyladenosine-3'-phosphate
  modified_base 23: mod_base = OTHER; note = 2'-O-methylguanosine
ttcttggatcatctcagtagaag

SEQ ID NO: 5219 - RNA, 23 nt, synthetic construct
  source 1..23: mol_type = other RNA
  modified_base 1: mod_base = OTHER; note = 2'-O-methyluridine-3'-phosphate 5'-(E)-Vinylphosphonate
  modified_base 2: mod_base = OTHER; note = 2'-deoxy-2'-fluoroguanosine-3'-phosphate
  modified_base 3: mod_base = OTHER; note = 2'-O-methyluridine-3'-phosphate
  modified_base 4: mod_base = OTHER; note = 2'-O-methylcytidine-3'-phosphate
  modified_base 5: mod_base = OTHER; note = 2'-O-methyluridine-3'-phosphate
  modified_base 6: mod_base = OTHER; note = 2'-deoxy-2'-fluorouridine-3'-phosphate
  modified_base 7: mod_base = OTHER; note = 2'-O-methylguanosine-3'-phosphate
  modified_base 8: mod_base = OTHER; note = 2'-O-methylguanosine-3'-phosphate
  modified_base 9: mod_base = OTHER; note = 2'-O-methyladenosine-3'-phosphate
  modified_base 10: mod_base = OTHER; note = 2'-O-methyluridine-3'-phosphate
  modified_base 11: mod_base = OTHER; note = 2'-O-methylcytidine-3'-phosphate
  modified_base 12: mod_base = OTHER; note = 2'-O-methyladenosine-3'-phosphate
  modified_base 13: mod_base = OTHER; note = 2'-O-methyluridine-3'-phosphate
  modified_base 14: mod_base = OTHER; note = 2'-deoxy-2'-fluorocytidine-3'-phosphate
  modified_base 15: mod_base = OTHER; note = 2'-O-methyluridine-3'-phosphate
  modified_base 16: mod_base = OTHER; note = 2'-deoxy-2'-fluorocytidine-3'-phosphate
  modified_base 17: mod_base = OTHER; note = 2'-O-methyladenosine-3'-phosphate
  modified_base 18: mod_base = OTHER; note = 2'-O-methylguanosine-3'-phosphate
  modified_base 19: mod_base = OTHER; note = 2'-O-methyluridine-3'-phosphate
  modified_base 20: mod_base = OTHER; note = 2'-O-methyladenosine-3'-phosphate
  modified_base 21: mod_base = OTHER; note = 2'-O-methylguanosine-3'-phosphate
  modified_base 22: mod_base = OTHER; note = 2'-O-methyladenosine-3'-phosphate
  modified_base 23: mod_base = OTHER; note = 2'-O-methyladenosine
tgtcttggatcatctcagtagaa

SEQ ID NO: 5220 - RNA, 23 nt, synthetic construct
  source 1..23: mol_type = other RNA
  modified_base 1: mod_base = OTHER; note = 2'-O-methyluridine-3'-phosphate 5'-(E)-Vinylphosphonate
  modified_base 2: mod_base = OTHER; note = 2'-deoxy-2'-fluoroguanosine-3'-phosphate
  modified_base 3: mod_base = OTHER; note = 2'-O-methylguanosine-3'-phosphate
  modified_base 4: mod_base = OTHER; note = 2'-O-methyluridine-3'-phosphate
  modified_base 5: mod_base = OTHER; note = 2'-O-methylcytidine-3'-phosphate
  modified_base 6: mod_base = OTHER; note = 2'-deoxy-2'-fluorouridine-3'-phosphate
  modified_base 7: mod_base = OTHER; note = 2'-O-methyluridine-3'-phosphate
  modified_base 8: mod_base = OTHER; note = 2'-O-methylguanosine-3'-phosphate
  modified_base 9: mod_base = OTHER; note = 2'-O-methylguanosine-3'-phosphate
  modified_base 10: mod_base = OTHER; note = 2'-O-methyladenosine-3'-phosphate
  modified_base 11: mod_base = OTHER; note = 2'-O-methyluridine-3'-phosphate
  modified_base 12: mod_base = OTHER; note = 2'-O-methylcytidine-3'-phosphate
  modified_base 13: mod_base = OTHER; note = 2'-O-methyladenosine-3'-phosphate
  modified_base 14: mod_base = OTHER; note = 2'-deoxy-2'-fluorouridine-3'-phosphate
  modified_base 15: mod_base = OTHER; note = 2'-O-methylcytidine-3'-phosphate
  modified_base 16: mod_base = OTHER; note = 2'-deoxy-2'-fluorouridine-3'-phosphate
  modified_base 17: mod_base = OTHER; note = 2'-O-methylcytidine-3'-phosphate
  modified_base 18: mod_base = OTHER; note = 2'-O-methyladenosine-3'-phosphate
  modified_base 19: mod_base = OTHER; note = 2'-O-methylguanosine-3'-phosphate
  modified_base 20: mod_base = OTHER; note = 2'-O-methyluridine-3'-phosphate
  modified_base 21: mod_base = OTHER; note = 2'-O-methyladenosine-3'-phosphate
  modified_base 22: mod_base = OTHER; note = 2'-O-methylguanosine-3'-phosphate
  modified_base 23: mod_base = OTHER; note = 2'-O-methyladenosine
tggtcttggatcatctcagtaga

SEQ ID NO: 5221 - RNA, 23 nt, synthetic construct
  source 1..23: mol_type = other RNA
  modified_base 1: mod_base = OTHER; note = 2'-O-methyluridine-3'-phosphate 5'-(E)-Vinylphosphonate
  modified_base 2: mod_base = OTHER; note = 2'-deoxy-2'-fluorouridine-3'-phosphate
  modified_base 3: mod_base = OTHER; note = 2'-O-methylguanosine-3'-phosphate
  modified_base 4: mod_base = OTHER; note = 2'-O-methylguanosine-3'-phosphate
  modified_base 5: mod_base = OTHER; note = 2'-O-methyluridine-3'-phosphate
  modified_base 6: mod_base = OTHER; note = 2'-deoxy-2'-fluorocytidine-3'-phosphate
  modified_base 7: mod_base = OTHER; note = 2'-O-methyluridine-3'-phosphate
  modified_base 8: mod_base = OTHER; note = 2'-O-methyluridine-3'-phosphate
  modified_base 9: mod_base = OTHER; note = 2'-O-methylguanosine-3'-phosphate
  modified_base 10: mod_base = OTHER; note = 2'-O-methylguanosine-3'-phosphate
  modified_base 11: mod_base = OTHER; note = 2'-O-methyladenosine-3'-phosphate
  modified_base 12: mod_base = OTHER; note = 2'-O-methyluridine-3'-phosphate
  modified_base 13: mod_base = OTHER; note = 2'-O-methylcytidine-3'-phosphate
  modified_base 14: mod_base = OTHER; note = 2'-deoxy-2'-fluoroadenosine-3'-phosphate
  modified_base 15: mod_base = OTHER; note = 2'-O-methyluridine-3'-phosphate
  modified_base 16: mod_base = OTHER; note = 2'-deoxy-2'-fluorocytidine-3'-phosphate
  modified_base 17: mod_base = OTHER; note = 2'-O-methyluridine-3'-phosphate
  modified_base 18: mod_base = OTHER; note = 2'-O-methylcytidine-3'-phosphate
  modified_base 19: mod_base = OTHER; note = 2'-O-methyladenosine-3'-phosphate
  modified_base 20: mod_base = OTHER; note = 2'-O-methylguanosine-3'-phosphate
  modified_base 21: mod_base = OTHER; note = 2'-O-methyluridine-3'-phosphate
  modified_base 22: mod_base = OTHER; note = 2'-O-methyladenosine-3'-phosphate
  modified_base 23: mod_base = OTHER; note = 2'-O-methylguanosine
ttggtcttggatcatctcagtag

SEQ ID NO: 5222 - RNA, 23 nt, synthetic construct
  source 1..23: mol_type = other RNA
  modified_base 1: mod_base = OTHER; note = 2'-O-methyluridine-3'-phosphate 5'-(E)-Vinylphosphonate
  modified_base 2: mod_base = OTHER; note = 2'-deoxy-2'-fluorouridine-3'-phosphate
  modified_base 3: mod_base = OTHER; note = 2'-O-methyluridine-3'-phosphate
  modified_base 4: mod_base = OTHER; note = 2'-O-methylguanosine-3'-phosphate
  modified_base 5: mod_base = OTHER; note = 2'-O-methylguanosine-3'-phosphate
  modified_base 6: mod_base = OTHER; note = 2'-deoxy-2'-fluorouridine-3'-phosphate
  modified_base 7: mod_base = OTHER; note = 2'-O-methylcytidine-3'-phosphate
  modified_base 8: mod_base = OTHER; note = 2'-O-methyluridine-3'-phosphate
  modified_base 9: mod_base = OTHER; note = 2'-O-methyluridine-3'-phosphate
  modified_base 10: mod_base = OTHER; note = 2'-O-methylguanosine-3'-phosphate
  modified_base 11: mod_base = OTHER; note = 2'-O-methylguanosine-3'-phosphate
  modified_base 12: mod_base = OTHER; note = 2'-O-methyladenosine-3'-phosphate
  modified_base 13: mod_base = OTHER; note = 2'-O-methyluridine-3'-phosphate
  modified_base 14: mod_base = OTHER; note = 2'-deoxy-2'-fluorocytidine-3'-phosphate
  modified_base 15: mod_base = OTHER; note = 2'-O-methyladenosine-3'-phosphate
  modified_base 16: mod_base = OTHER; note = 2'-deoxy-2'-fluorouridine-3'-phosphate
  modified_base 17: mod_base = OTHER; note = 2'-O-methylcytidine-3'-phosphate
  modified_base 18: mod_base = OTHER; note = 2'-O-methyluridine-3'-phosphate
  modified_base 19: mod_base = OTHER; note = 2'-O-methylcytidine-3'-phosphate
  modified_base 20: mod_base = OTHER; note = 2'-O-methyladenosine-3'-phosphate
  modified_base 21: mod_base = OTHER; note = 2'-O-methylguanosine-3'-phosphate
  modified_base 22: mod_base = OTHER; note = 2'-O-methyluridine-3'-phosphate
  modified_base 23: mod_base = OTHER; note = 2'-O-methyladenosine
tttggtcttggatcatctcagta

SEQ ID NO: 5223 - RNA, 23 nt, synthetic construct
  source 1..23: mol_type = other RNA
  modified_base 1: mod_base = OTHER; note = 2'-O-methyluridine-3'-phosphate 5'-(E)-Vinylphosphonate
  modified_base 2: mod_base = OTHER; note = 2'-deoxy-2'-fluoroadenosine-3'-phosphate
  modified_base 3: mod_base = OTHER; note = 2'-O-methyladenosine-3'-phosphate
  modified_base 4: mod_base = OTHER; note = 2'-O-methylguanosine-3'-phosphate
  modified_base 5: mod_base = OTHER; note = 2'-O-methyladenosine-3'-phosphate
  modified_base 6: mod_base = OTHER; note = 2'-deoxy-2'-fluoroadenosine-3'-phosphate
  modified_base 7: mod_base = OTHER; note = 2'-O-methylcytidine-3'-phosphate
  modified_base 8: mod_base = OTHER; note = 2'-O-methyladenosine-3'-phosphate
  modified_base 9: mod_base = OTHER; note = 2'-O-methylcytidine-3'-phosphate
  modified_base 10: mod_base = OTHER; note = 2'-O-methyluridine-3'-phosphate
  modified_base 11: mod_base = OTHER; note = 2'-O-methyluridine-3'-phosphate
  modified_base 12: mod_base = OTHER; note = 2'-O-methyluridine-3'-phosphate
  modified_base 13: mod_base = OTHER; note = 2'-O-methyluridine-3'-phosphate
  modified_base 14: mod_base = OTHER; note = 2'-deoxy-2'-fluoroguanosine-3'-phosphate
  modified_base 15: mod_base = OTHER; note = 2'-O-methylguanosine-3'-phosphate
  modified_base 16: mod_base = OTHER; note = 2'-deoxy-2'-fluorouridine-3'-phosphate
  modified_base 17: mod_base = OTHER; note = 2'-O-methylcytidine-3'-phosphate
  modified_base 18: mod_base = OTHER; note = 2'-O-methyluridine-3'-phosphate
  modified_base 19: mod_base = OTHER; note = 2'-O-methyluridine-3'-phosphate
  modified_base 20: mod_base = OTHER; note = 2'-O-methylguanosine-3'-phosphate
  modified_base 21: mod_base = OTHER; note = 2'-O-methylguanosine-3'-phosphate
  modified_base 22: mod_base = OTHER; note = 2'-O-methyladenosine-3'-phosphate
  modified_base 23: mod_base = OTHER; note = 2'-O-methyluridine
taagaacacttttggtcttggat

SEQ ID NO: 5224 - RNA, 23 nt, synthetic construct
  source 1..23: mol_type = other RNA
  modified_base 1: mod_base = OTHER; note = 2'-O-methyluridine-3'-phosphate 5'-(E)-Vinylphosphonate
  modified_base 2: mod_base = OTHER; note = 2'-deoxy-2'-fluoroadenosine-3'-phosphate
  modified_base 3: mod_base = OTHER; note = 2'-O-methyladenosine-3'-phosphate
  modified_base 4: mod_base = OTHER; note = 2'-O-methyladenosine-3'-phosphate
  modified_base 5: mod_base = OTHER; note = 2'-O-methylguanosine-3'-phosphate
  modified_base 6: mod_base = OTHER; note = 2'-deoxy-2'-fluoroadenosine-3'-phosphate
  modified_base 7: mod_base = OTHER; note = 2'-O-methyladenosine-3'-phosphate
  modified_base 8: mod_base = OTHER; note = 2'-O-methylcytidine-3'-phosphate
  modified_base 9: mod_base = OTHER; note = 2'-O-methyladenosine-3'-phosphate
  modified_base 10: mod_base = OTHER; note = 2'-O-methylcytidine-3'-phosphate
  modified_base 11: mod_base = OTHER; note = 2'-O-methyluridine-3'-phosphate
  modified_base 12: mod_base = OTHER; note = 2'-O-methyluridine-3'-phosphate
  modified_base 13: mod_base = OTHER; note = 2'-O-methyluridine-3'-phosphate
  modified_base 14: mod_base = OTHER; note = 2'-deoxy-2'-fluorouridine-3'-phosphate
  modified_base 15: mod_base = OTHER; note = 2'-O-methylguanosine-3'-phosphate
  modified_base 16: mod_base = OTHER; note = 2'-deoxy-2'-fluoroguanosine-3'-phosphate
  modified_base 17: mod_base = OTHER; note = 2'-O-methyluridine-3'-phosphate
  modified_base 18: mod_base = OTHER; note = 2'-O-methylcytidine-3'-phosphate
  modified_base 19: mod_base = OTHER; note = 2'-O-methyluridine-3'-phosphate
  modified_base 20: mod_base = OTHER; note = 2'-O-methyluridine-3'-phosphate
  modified_base 21: mod_base = OTHER; note = 2'-O-methylguanosine-3'-phosphate
  modified_base 22: mod_base = OTHER; note = 2'-O-methylguanosine-3'-phosphate
  modified_base 23: mod_base = OTHER; note = 2'-O-methyladenosine
taaagaacacttttggtcttgga

SEQ ID NO: 5225 - RNA, 23 nt, synthetic construct
  source 1..23: mol_type = other RNA
  modified_base 1: mod_base = OTHER; note = 2'-O-methyluridine-3'-phosphate 5'-(E)-Vinylphosphonate
  modified_base 2: mod_base = OTHER; note = 2'-deoxy-2'-fluorocytidine-3'-phosphate
  modified_base 3: mod_base = OTHER; note = 2'-O-methyladenosine-3'-phosphate
  modified_base 4: mod_base = OTHER; note = 2'-O-methyladenosine-3'-phosphate
  modified_base 5: mod_base = OTHER; note = 2'-O-methyladenosine-3'-phosphate
  modified_base 6: mod_base = OTHER; note = 2'-deoxy-2'-fluoroguanosine-3'-phosphate
  modified_base 7: mod_base = OTHER; note = 2'-O-methyladenosine-3'-phosphate
  modified_base 8: mod_base = OTHER; note = 2'-O-methyladenosine-3'-phosphate
  modified_base 9: mod_base = OTHER; note = 2'-O-methylcytidine-3'-phosphate
  modified_base 10: mod_base = OTHER; note = 2'-O-methyladenosine-3'-phosphate
  modified_base 11: mod_base = OTHER; note = 2'-O-methylcytidine-3'-phosphate
  modified_base 12: mod_base = OTHER; note = 2'-O-methyluridine-3'-phosphate
  modified_base 13: mod_base = OTHER; note = 2'-O-methyluridine-3'-phosphate
  modified_base 14: mod_base = OTHER; note = 2'-deoxy-2'-fluorouridine-3'-phosphate
  modified_base 15: mod_base = OTHER; note = 2'-O-methyluridine-3'-phosphate
  modified_base 16: mod_base = OTHER; note = 2'-deoxy-2'-fluoroguanosine-3'-phosphate
  modified_base 17: mod_base = OTHER; note = 2'-O-methylguanosine-3'-phosphate
  modified_base 18: mod_base = OTHER; note = 2'-O-methyluridine-3'-phosphate
  modified_base 19: mod_base = OTHER; note = 2'-O-methylcytidine-3'-phosphate
  modified_base 20: mod_base = OTHER; note = 2'-O-methyluridine-3'-phosphate
  modified_base 21: mod_base = OTHER; note = 2'-O-methyluridine-3'-phosphate
  modified_base 22: mod_base = OTHER; note = 2'-O-methylguanosine-3'-phosphate
  modified_base 23: mod_base = OTHER; note = 2'-O-methylguanosine
tcaaagaacacttttggtcttgg

SEQ ID NO: 5226 - RNA, 23 nt, synthetic construct
  source 1..23: mol_type = other RNA
  modified_base 1: mod_base = OTHER; note = 2'-O-methyluridine-3'-phosphate 5'-(E)-Vinylphosphonate
  modified_base 2: mod_base = OTHER; note = 2'-deoxy-2'-fluorocytidine-3'-phosphate
  modified_base 3: mod_base = OTHER; note = 2'-O-methylcytidine-3'-phosphate
  modified_base 4: mod_base = OTHER; note = 2'-O-methyladenosine-3'-phosphate
  modified_base 5: mod_base = OTHER; note = 2'-O-methyladenosine-3'-phosphate
  modified_base 6: mod_base = OTHER; note = 2'-deoxy-2'-fluoroadenosine-3'-phosphate
  modified_base 7: mod_base = OTHER; note = 2'-O-methylguanosine-3'-phosphate
  modified_base 8: mod_base = OTHER; note = 2'-O-methyladenosine-3'-phosphate
  modified_base 9: mod_base = OTHER; note = 2'-O-methyladenosine-3'-phosphate
  modified_base 10: mod_base = OTHER; note = 2'-O-methylcytidine-3'-phosphate
  modified_base 11: mod_base = OTHER; note = 2'-O-methyladenosine-3'-phosphate
  modified_base 12: mod_base = OTHER; note = 2'-O-methylcytidine-3'-phosphate
  modified_base 13: mod_base = OTHER; note = 2'-O-methyluridine-3'-phosphate
  modified_base 14: mod_base = OTHER; note = 2'-deoxy-2'-fluorouridine-3'-phosphate
  modified_base 15: mod_base = OTHER; note = 2'-O-methyluridine-3'-phosphate
  modified_base 16: mod_base = OTHER; note = 2'-deoxy-2'-fluorouridine-3'-phosphate
  modified_base 17: mod_base = OTHER; note = 2'-O-methylguanosine-3'-phosphate
  modified_base 18: mod_base = OTHER; note = 2'-O-methylguanosine-3'-phosphate
  modified_base 19: mod_base = OTHER; note = 2'-O-methyluridine-3'-phosphate
  modified_base 20: mod_base = OTHER; note = 2'-O-methylcytidine-3'-phosphate
  modified_base 21: mod_base = OTHER; note = 2'-O-methyluridine-3'-phosphate
  modified_base 22: mod_base = OTHER; note = 2'-O-methyluridine-3'-phosphate
  modified_base 23: mod_base = OTHER; note = 2'-O-methylguanosine
tccaaagaacacttttggtcttg

SEQ ID NO: 5227 - RNA, 23 nt, synthetic construct
  source 1..23: mol_type = other RNA
  modified_base 1: mod_base = OTHER; note = 2'-O-methyluridine-3'-phosphate 5'-(E)-Vinylphosphonate
  modified_base 2: mod_base = OTHER; note = 2'-deoxy-2'-fluoroadenosine-3'-phosphate
  modified_base 3: mod_base = OTHER; note = 2'-O-methylcytidine-3'-phosphate
  modified_base 4: mod_base = OTHER; note = 2'-O-methylcytidine-3'-phosphate
  modified_base 5: mod_base = OTHER; note = 2'-O-methyladenosine-3'-phosphate
  modified_base 6: mod_base = OTHER; note = 2'-deoxy-2'-fluoroadenosine-3'-phosphate
  modified_base 7: mod_base = OTHER; note = 2'-O-methyladenosine-3'-phosphate
  modified_base 8: mod_base = OTHER; note = 2'-O-methylguanosine-3'-phosphate
  modified_base 9: mod_base = OTHER; note = 2'-O-methyladenosine-3'-phosphate
  modified_base 10: mod_base = OTHER; note = 2'-O-methyladenosine-3'-phosphate
  modified_base 11: mod_base = OTHER; note = 2'-O-methylcytidine-3'-phosphate
  modified_base 12: mod_base = OTHER; note = 2'-O-methyladenosine-3'-phosphate
  modified_base 13: mod_base = OTHER; note = 2'-O-methylcytidine-3'-phosphate
  modified_base 14: mod_base = OTHER; note = 2'-deoxy-2'-fluorouridine-3'-phosphate
  modified_base 15: mod_base = OTHER; note = 2'-O-methyluridine-3'-phosphate
  modified_base 16: mod_base = OTHER; note = 2'-deoxy-2'-fluorouridine-3'-phosphate
  modified_base 17: mod_base = OTHER; note = 2'-O-methyluridine-3'-phosphate
  modified_base 18: mod_base = OTHER; note = 2'-O-methylguanosine-3'-phosphate
  modified_base 19: mod_base = OTHER; note = 2'-O-methylguanosine-3'-phosphate
  modified_base 20: mod_base = OTHER; note = 2'-O-methyluridine-3'-phosphate
  modified_base 21: mod_base = OTHER; note = 2'-O-methylcytidine-3'-phosphate
  modified_base 22: mod_base = OTHER; note = 2'-O-methyluridine-3'-phosphate
  modified_base 23: mod_base = OTHER; note = 2'-O-methyluridine
taccaaagaacacttttggtctt

SEQ ID NO: 5228 - RNA, 23 nt, synthetic construct
  source 1..23: mol_type = other RNA
  modified_base 1: mod_base = OTHER; note = 2'-O-methyluridine-3'-phosphate 5'-(E)-Vinylphosphonate
  modified_base 2: mod_base = OTHER; note = 2'-deoxy-2'-fluorouridine-3'-phosphate
  modified_base 3: mod_base = OTHER; note = 2'-O-methyladenosine-3'-phosphate
  modified_base 4: mod_base = OTHER; note = 2'-O-methylcytidine-3'-phosphate
  modified_base 5: mod_base = OTHER; note = 2'-O-methylcytidine-3'-phosphate
  modified_base 6: mod_base = OTHER; note = 2'-deoxy-2'-fluoroadenosine-3'-phosphate
  modified_base 7: mod_base = OTHER; note = 2'-O-methyladenosine-3'-phosphate
  modified_base 8: mod_base = OTHER; note = 2'-O-methyladenosine-3'-phosphate
  modified_base 9: mod_base = OTHER; note = 2'-O-methylguanosine-3'-phosphate
  modified_base 10: mod_base = OTHER; note = 2'-O-methyladenosine-3'-phosphate
  modified_base 11: mod_base = OTHER; note = 2'-O-methyladenosine-3'-phosphate
  modified_base 12: mod_base = OTHER; note = 2'-O-methylcytidine-3'-phosphate
  modified_base 13: mod_base = OTHER; note = 2'-O-methyladenosine-3'-phosphate
  modified_base 14: mod_base = OTHER; note = 2'-deoxy-2'-fluorocytidine-3'-phosphate
  modified_base 15: mod_base = OTHER; note = 2'-O-methyluridine-3'-phosphate
  modified_base 16: mod_base = OTHER; note = 2'-deoxy-2'-fluorouridine-3'-phosphate
  modified_base 17: mod_base = OTHER; note = 2'-O-methyluridine-3'-phosphate
  modified_base 18: mod_base = OTHER; note = 2'-O-methyluridine-3'-phosphate
  modified_base 19: mod_base = OTHER; note = 2'-O-methylguanosine-3'-phosphate
  modified_base 20: mod_base = OTHER; note = 2'-O-methylguanosine-3'-phosphate
  modified_base 21: mod_base = OTHER; note = 2'-O-methyluridine-3'-phosphate
  modified_base 22: mod_base = OTHER; note = 2'-O-methylcytidine-3'-phosphate
  modified_base 23: mod_base = OTHER; note = 2'-O-methyluridine
ttaccaaagaacacttttggtct

SEQ ID NO: 5229 - RNA, 23 nt, synthetic construct
  source 1..23: mol_type = other RNA
  modified_base 1: mod_base = OTHER; note = 2'-O-methyluridine-3'-phosphate 5'-(E)-Vinylphosphonate
  modified_base 2: mod_base = OTHER; note = 2'-deoxy-2'-fluoroguanosine-3'-phosphate
  modified_base 3: mod_base = OTHER; note = 2'-O-methyluridine-3'-phosphate
  modified_base 4: mod_base = OTHER; note = 2'-O-methyladenosine-3'-phosphate
  modified_base 5: mod_base = OTHER; note = 2'-O-methylcytidine-3'-phosphate
  modified_base 6: mod_base = OTHER; note = 2'-deoxy-2'-fluorocytidine-3'-phosphate
  modified_base 7: mod_base = OTHER; note = 2'-O-methyladenosine-3'-phosphate
  modified_base 8: mod_base = OTHER; note = 2'-O-methyladenosine-3'-phosphate
  modified_base 9: mod_base = OTHER; note = 2'-O-methyladenosine-3'-phosphate
  modified_base 10: mod_base = OTHER; note = 2'-O-methylguanosine-3'-phosphate
  modified_base 11: mod_base = OTHER; note = 2'-O-methyladenosine-3'-phosphate
  modified_base 12: mod_base = OTHER; note = 2'-O-methyladenosine-3'-phosphate
  modified_base 13: mod_base = OTHER; note = 2'-O-methylcytidine-3'-phosphate
  modified_base 14: mod_base = OTHER; note = 2'-deoxy-2'-fluoroadenosine-3'-phosphate
  modified_base 15: mod_base = OTHER; note = 2'-O-methylcytidine-3'-phosphate
  modified_base 16: mod_base = OTHER; note = 2'-deoxy-2'-fluorouridine-3'-phosphate
  modified_base 17: mod_base = OTHER; note = 2'-O-methyluridine-3'-phosphate
  modified_base 18: mod_base = OTHER; note = 2'-O-methyluridine-3'-phosphate
  modified_base 19: mod_base = OTHER; note = 2'-O-methyluridine-3'-phosphate
  modified_base 20: mod_base = OTHER; note = 2'-O-methylguanosine-3'-phosphate
  modified_base 21: mod_base = OTHER; note = 2'-O-methylguanosine-3'-phosphate
  modified_base 22: mod_base = OTHER; note = 2'-O-methyluridine-3'-phosphate
  modified_base 23: mod_base = OTHER; note = 2'-O-methylcytidine
tgtaccaaagaacacttttggtc

SEQ ID NO: 5230 - RNA, 23 nt, synthetic construct
  source 1..23: mol_type = other RNA
  modified_base 1: mod_base = OTHER; note = 2'-O-methyluridine-3'-phosphate 5'-(E)-Vinylphosphonate
  modified_base 2: mod_base = OTHER; note = 2'-deoxy-2'-fluoroadenosine-3'-phosphate
  modified_base 3: mod_base = OTHER; note = 2'-O-methylguanosine-3'-phosphate
  modified_base 4: mod_base = OTHER; note = 2'-O-methyluridine-3'-phosphate
  modified_base 5: mod_base = OTHER; note = 2'-O-methyladenosine-3'-phosphate
  modified_base 6: mod_base = OTHER; note = 2'-deoxy-2'-fluorocytidine-3'-phosphate
  modified_base 7: mod_base = OTHER; note = 2'-O-methylcytidine-3'-phosphate
  modified_base 8: mod_base = OTHER; note = 2'-O-methyladenosine-3'-phosphate
  modified_base 9: mod_base = OTHER; note = 2'-O-methyladenosine-3'-phosphate
  modified_base 10: mod_base = OTHER; note = 2'-O-methyladenosine-3'-phosphate
  modified_base 11: mod_base = OTHER; note = 2'-O-methylguanosine-3'-phosphate
  modified_base 12: mod_base = OTHER; note = 2'-O-methyladenosine-3'-phosphate
  modified_base 13: mod_base = OTHER; note = 2'-O-methyladenosine-3'-phosphate
  modified_base 14: mod_base = OTHER; note = 2'-deoxy-2'-fluorocytidine-3'-phosphate
  modified_base 15: mod_base = OTHER; note = 2'-O-methyladenosine-3'-phosphate
  modified_base 16: mod_base = OTHER; note = 2'-deoxy-2'-fluorocytidine-3'-phosphate
  modified_base 17: mod_base = OTHER; note = 2'-O-methyluridine-3'-phosphate
  modified_base 18: mod_base = OTHER; note = 2'-O-methyluridine-3'-phosphate
  modified_base 19: mod_base = OTHER; note = 2'-O-methyluridine-3'-phosphate
  modified_base 20: mod_base = OTHER; note = 2'-O-methyluridine-3'-phosphate
  modified_base 21: mod_base = OTHER; note = 2'-O-methylguanosine-3'-phosphate
  modified_base 22: mod_base = OTHER; note = 2'-O-methylguanosine-3'-phosphate
  modified_base 23: mod_base = OTHER; note = 2'-O-methyluridine
tagtaccaaagaacacttttggt

SEQ ID NO: 5231 - RNA, 23 nt, synthetic construct
  source 1..23: mol_type = other RNA
  modified_base 1: mod_base = OTHER; note = 2'-O-methyluridine-3'-phosphate 5'-(E)-Vinylphosphonate
  modified_base 2: mod_base = OTHER; note = 2'-deoxy-2'-fluoroadenosine-3'-phosphate
  modified_base 3: mod_base = OTHER; note = 2'-O-methyladenosine-3'-phosphate
  modified_base 4: mod_base = OTHER; note = 2'-O-methylguanosine-3'-phosphate
  modified_base 5: mod_base = OTHER; note = 2'-O-methyluridine-3'-phosphate
  modified_base 6: mod_base = OTHER; note = 2'-deoxy-2'-fluoroadenosine-3'-phosphate
  modified_base 7: mod_base = OTHER; note = 2'-O-methylcytidine-3'-phosphate
  modified_base 8: mod_base = OTHER; note = 2'-O-methylcytidine-3'-phosphate
  modified_base 9: mod_base = OTHER; note = 2'-O-methyladenosine-3'-phosphate
  modified_base 10: mod_base = OTHER; note = 2'-O-methyladenosine-3'-phosphate
  modified_base 11: mod_base = OTHER; note = 2'-O-methyladenosine-3'-phosphate
  modified_base 12: mod_base = OTHER; note = 2'-O-methylguanosine-3'-phosphate
  modified_base 13: mod_base = OTHER; note = 2'-O-methyladenosine-3'-phosphate
  modified_base 14: mod_base = OTHER; note = 2'-deoxy-2'-fluoroadenosine-3'-phosphate
  modified_base 15: mod_base = OTHER; note = 2'-O-methylcytidine-3'-phosphate
  modified_base 16: mod_base = OTHER; note = 2'-deoxy-2'-fluoroadenosine-3'-phosphate
  modified_base 17: mod_base = OTHER; note = 2'-O-methylcytidine-3'-phosphate
  modified_base 18: mod_base = OTHER; note = 2'-O-methyluridine-3'-phosphate
  modified_base 19: mod_base = OTHER; note = 2'-O-methyluridine-3'-phosphate
  modified_base 20: mod_base = OTHER; note = 2'-O-methyluridine-3'-phosphate
  modified_base 21: mod_base = OTHER; note = 2'-O-methyluridine-3'-phosphate
  modified_base 22: mod_base = OTHER; note = 2'-O-methylguanosine-3'-phosphate
  modified_base 23: mod_base = OTHER; note = 2'-O-methylguanosine
taagtaccaaagaacacttttgg

SEQ ID NO: 5232 - RNA, 23 nt, synthetic construct
  source 1..23: mol_type = other RNA
  modified_base 1: mod_base = OTHER; note = 2'-O-methyluridine-3'-phosphate 5'-(E)-Vinylphosphonate
  modified_base 2: mod_base = OTHER; note = 2'-deoxy-2'-fluorocytidine-3'-phosphate
  modified_base 3: mod_base = OTHER; note = 2'-O-methyladenosine-3'-phosphate
  modified_base 4: mod_base = OTHER; note = 2'-O-methyladenosine-3'-phosphate
  modified_base 5: mod_base = OTHER; note = 2'-O-methylguanosine-3'-phosphate
  modified_base 6: mod_base = OTHER; note = 2'-deoxy-2'-fluorouridine-3'-phosphate
  modified_base 7: mod_base = OTHER; note = 2'-O-methyladenosine-3'-phosphate
  modified_base 8: mod_base = OTHER; note = 2'-O-methylcytidine-3'-phosphate
  modified_base 9: mod_base = OTHER; note = 2'-O-methylcytidine-3'-phosphate
  modified_base 10: mod_base = OTHER; note = 2'-O-methyladenosine-3'-phosphate
  modified_base 11: mod_base = OTHER; note = 2'-O-methyladenosine-3'-phosphate
  modified_base 12: mod_base = OTHER; note = 2'-O-methyladenosine-3'-phosphate
  modified_base 13: mod_base = OTHER; note = 2'-O-methylguanosine-3'-phosphate
  modified_base 14: mod_base = OTHER; note = 2'-deoxy-2'-fluoroadenosine-3'-phosphate
  modified_base 15: mod_base = OTHER; note = 2'-O-methyladenosine-3'-phosphate
  modified_base 16: mod_base = OTHER; note = 2'-deoxy-2'-fluorocytidine-3'-phosphate
  modified_base 17: mod_base = OTHER; note = 2'-O-methyladenosine-3'-phosphate
  modified_base 18: mod_base = OTHER; note = 2'-O-methylcytidine-3'-phosphate
  modified_base 19: mod_base = OTHER; note = 2'-O-methyluridine-3'-phosphate
  modified_base 20: mod_base = OTHER; note = 2'-O-methyluridine-3'-phosphate
  modified_base 21: mod_base = OTHER; note = 2'-O-methyluridine-3'-phosphate
  modified_base 22: mod_base = OTHER; note = 2'-O-methyluridine-3'-phosphate
  modified_base 23: mod_base = OTHER; note = 2'-O-methylguanosine
tcaagtaccaaagaacacttttg

SEQ ID NO: 5233 - RNA, 23 nt, synthetic construct
  source 1..23: mol_type = other RNA
  modified_base 1: mod_base = OTHER; note = 2'-O-methyluridine-3'-phosphate 5'-(E)-Vinylphosphonate
  modified_base 2: mod_base = OTHER; note = 2'-deoxy-2'-fluoroguanosine-3'-phosphate
  modified_base 3: mod_base = OTHER; note = 2'-O-methylcytidine-3'-phosphate
  modified_base 4: mod_base = OTHER; note = 2'-O-methyladenosine-3'-phosphate
  modified_base 5: mod_base = OTHER; note = 2'-O-methyladenosine-3'-phosphate
  modified_base 6: mod_base = OTHER; note = 2'-deoxy-2'-fluoroguanosine-3'-phosphate
  modified_base 7: mod_base = OTHER; note = 2'-O-methyluridine-3'-phosphate
  modified_base 8: mod_base = OTHER; note = 2'-O-methyladenosine-3'-phosphate
  modified_base 9: mod_base = OTHER; note = 2'-O-methylcytidine-3'-phosphate
  modified_base 10: mod_base = OTHER; note = 2'-O-methylcytidine-3'-phosphate
  modified_base 11: mod_base = OTHER; note = 2'-O-methyladenosine-3'-phosphate
  modified_base 12: mod_base = OTHER; note = 2'-O-methyladenosine-3'-phosphate
  modified_base 13: mod_base = OTHER; note = 2'-O-methyladenosine-3'-phosphate
  modified_base 14: mod_base = OTHER; note = 2'-deoxy-2'-fluoroguanosine-3'-phosphate
  modified_base 15: mod_base = OTHER; note = 2'-O-methyladenosine-3'-phosphate
  modified_base 16: mod_base = OTHER; note = 2'-deoxy-2'-fluoroadenosine-3'-phosphate
  modified_base 17: mod_base = OTHER; note = 2'-O-methylcytidine-3'-phosphate
  modified_base 18: mod_base = OTHER; note = 2'-O-methyladenosine-3'-phosphate
  modified_base 19: mod_base = OTHER; note = 2'-O-methylcytidine-3'-phosphate
  modified_base 20: mod_base = OTHER; note = 2'-O-methyluridine-3'-phosphate
  modified_base 21: mod_base = OTHER; note = 2'-O-methyluridine-3'-phosphate
  modified_base 22: mod_base = OTHER; note = 2'-O-methyluridine-3'-phosphate
  modified_base 23: mod_base = OTHER; note = 2'-O-methyluridine
tgcaagtaccaaagaacactttt

SEQ ID NO: 5234 - RNA, 23 nt, synthetic construct
  source 1..23: mol_type = other RNA
  modified_base 1: mod_base = OTHER; note = 2'-O-methyluridine-3'-phosphate 5'-(E)-Vinylphosphonate
  modified_base 2: mod_base = OTHER; note = 2'-deoxy-2'-fluorouridine-3'-phosphate
  modified_base 3: mod_base = OTHER; note = 2'-O-methyluridine-3'-phosphate
  modified_base 4: mod_base = OTHER; note = 2'-O-methyladenosine-3'-phosphate
  modified_base 5: mod_base = OTHER; note = 2'-O-methyluridine-3'-phosphate
  modified_base 6: mod_base = OTHER; note = 2'-deoxy-2'-fluoroadenosine-3'-phosphate
  modified_base 7: mod_base = OTHER; note = 2'-O-methyladenosine-3'-phosphate
  modified_base 8: mod_base = OTHER; note = 2'-O-methylguanosine-3'-phosphate
  modified_base 9: mod_base = OTHER; note = 2'-O-methylcytidine-3'-phosphate
  modified_base 10: mod_base = OTHER; note = 2'-O-methyladenosine-3'-phosphate
  modified_base 11: mod_base = OTHER; note = 2'-O-methyladenosine-3'-phosphate
  modified_base 12: mod_base = OTHER; note = 2'-O-methylguanosine-3'-phosphate
  modified_base 13: mod_base = OTHER; note = 2'-O-methyluridine-3'-phosphate
  modified_base 14: mod_base = OTHER; note = 2'-deoxy-2'-fluoroadenosine-3'-phosphate
  modified_base 15: mod_base = OTHER; note = 2'-O-methylcytidine-3'-phosphate
  modified_base 16: mod_base = OTHER; note = 2'-deoxy-2'-fluorocytidine-3'-phosphate
  modified_base 17: mod_base = OTHER; note = 2'-O-methyladenosine-3'-phosphate
  modified_base 18: mod_base = OTHER; note = 2'-O-methyladenosine-3'-phosphate
  modified_base 19: mod_base = OTHER; note = 2'-O-methyladenosine-3'-phosphate
  modified_base 20: mod_base = OTHER; note = 2'-O-methylguanosine-3'-phosphate
  modified_base 21: mod_base = OTHER; note = 2'-O-methyladenosine-3'-phosphate
  modified_base 22: mod_base = OTHER; note = 2'-O-methyladenosine-3'-phosphate
  modified_base 23: mod_base = OTHER; note = 2'-O-methylcytidine
tttataagcaagtaccaaagaac

SEQ ID NO: 5235 - RNA, 23 nt, synthetic construct
  source 1..23: mol_type = other RNA
  modified_base 1: mod_base = OTHER; note = 2'-O-methyluridine-3'-phosphate 5'-(E)-Vinylphosphonate
  modified_base 2: mod_base = OTHER; note = 2'-deoxy-2'-fluorouridine-3'-phosphate
  modified_base 3: mod_base = OTHER; note = 2'-O-methyluridine-3'-phosphate
  modified_base 4: mod_base = OTHER; note = 2'-O-methyluridine-3'-phosphate
  modified_base 5: mod_base = OTHER; note = 2'-O-methyladenosine-3'-phosphate
  modified_base 6: mod_base = OTHER; note = 2'-deoxy-2'-fluorouridine-3'-phosphate
  modified_base 7: mod_base = OTHER; note = 2'-O-methyladenosine-3'-phosphate
  modified_base 8: mod_base = OTHER; note = 2'-O-methyladenosine-3'-phosphate
  modified_base 9: mod_base = OTHER; note = 2'-O-methylguanosine-3'-phosphate
  modified_base 10: mod_base = OTHER; note = 2'-O-methylcytidine-3'-phosphate
  modified_base 11: mod_base = OTHER; note = 2'-O-methyladenosine-3'-phosphate
  modified_base 12: mod_base = OTHER; note = 2'-O-methyladenosine-3'-phosphate
  modified_base 13: mod_base = OTHER; note = 2'-O-methylguanosine-3'-phosphate
  modified_base 14: mod_base = OTHER; note = 2'-deoxy-2'-fluorouridine-3'-phosphate
  modified_base 15: mod_base = OTHER; note = 2'-O-methyladenosine-3'-phosphate
  modified_base 16: mod_base = OTHER; note = 2'-deoxy-2'-fluorocytidine-3'-phosphate
  modified_base 17: mod_base = OTHER; note = 2'-O-methylcytidine-3'-phosphate
  modified_base 18: mod_base = OTHER; note = 2'-O-methyladenosine-3'-phosphate
  modified_base 19: mod_base = OTHER; note = 2'-O-methyladenosine-3'-phosphate
  modified_base 20: mod_base = OTHER; note = 2'-O-methyladenosine-3'-phosphate
  modified_base 21: mod_base = OTHER; note = 2'-O-methylguanosine-3'-phosphate
  modified_base 22: mod_base = OTHER; note = 2'-O-methyladenosine-3'-phosphate
  modified_base 23: mod_base = OTHER; note = 2'-O-methyladenosine
ttttataagcaagtaccaaagaa

SEQ ID NO: 5236 - RNA, 23 nt, synthetic construct
  source 1..23: mol_type = other RNA
  modified_base 1: mod_base = OTHER; note = 2'-O-methyluridine-3'-phosphate 5'-(E)-Vinylphosphonate
  modified_base 2: mod_base = OTHER; note = 2'-deoxy-2'-fluoroadenosine-3'-phosphate
  modified_base 3: mod_base = OTHER; note = 2'-O-methylcytidine-3'-phosphate
  modified_base 4: mod_base = OTHER; note = 2'-O-methyluridine-3'-phosphate
  modified_base 5: mod_base = OTHER; note = 2'-O-methyluridine-3'-phosphate
  modified_base 6: mod_base = OTHER; note = 2'-deoxy-2'-fluorouridine-3'-phosphate
  modified_base 7: mod_base = OTHER; note = 2'-O-methyladenosine-3'-phosphate
  modified_base 8: mod_base = OTHER; note = 2'-O-methyluridine-3'-phosphate
  modified_base 9: mod_base = OTHER; note = 2'-O-methyladenosine-3'-phosphate
  modified_base 10: mod_base = OTHER; note = 2'-O-methyladenosine-3'-phosphate
  modified_base 11: mod_base = OTHER; note = 2'-O-methylguanosine-3'-phosphate
  modified_base 12: mod_base = OTHER; note = 2'-O-methylcytidine-3'-phosphate
  modified_base 13: mod_base = OTHER; note = 2'-O-methyladenosine-3'-phosphate
  modified_base 14: mod_base = OTHER; note = 2'-deoxy-2'-fluoroadenosine-3'-phosphate
  modified_base 15: mod_base = OTHER; note = 2'-O-methylguanosine-3'-phosphate
  modified_base 16: mod_base = OTHER; note = 2'-deoxy-2'-fluorouridine-3'-phosphate
  modified_base 17: mod_base = OTHER; note = 2'-O-methyladenosine-3'-phosphate
  modified_base 18: mod_base = OTHER; note = 2'-O-methylcytidine-3'-phosphate
  modified_base 19: mod_base = OTHER; note = 2'-O-methylcytidine-3'-phosphate
  modified_base 20: mod_base = OTHER; note = 2'-O-methyladenosine-3'-phosphate
  modified_base 21: mod_base = OTHER; note = 2'-O-methyladenosine-3'-phosphate
  modified_base 22: mod_base = OTHER; note = 2'-O-methyladenosine-3'-phosphate
  modified_base 23: mod_base = OTHER; note = 2'-O-methylguanosine
tactttataagcaagtaccaaag

SEQ ID NO: 5237 - RNA, 23 nt, synthetic construct
  source 1..23: mol_type = other RNA
  modified_base 1: mod_base = OTHER; note = 2'-O-methyluridine-3'-phosphate 5'-(E)-Vinylphosphonate
  modified_base 2: mod_base = OTHER; note = 2'-deoxy-2'-fluorocytidine-3'-phosphate
  modified_base 3: mod_base = OTHER; note = 2'-O-methyladenosine-3'-phosphate
  modified_base 4: mod_base = OTHER; note = 2'-O-methylcytidine-3'-phosphate
  modified_base 5: mod_base = OTHER; note = 2'-O-methyluridine-3'-phosphate
  modified_base 6: mod_base = OTHER; note = 2'-deoxy-2'-fluorouridine-3'-phosphate
  modified_base 7: mod_base = OTHER; note = 2'-O-methyluridine-3'-phosphate
  modified_base 8: mod_base = OTHER; note = 2'-O-methyladenosine-3'-phosphate
  modified_base 9: mod_base = OTHER; note = 2'-O-methyluridine-3'-phosphate
  modified_base 10: mod_base = OTHER; note = 2'-O-methyladenosine-3'-phosphate
  modified_base 11: mod_base = OTHER; note = 2'-O-methyladenosine-3'-phosphate
  modified_base 12: mod_base = OTHER; note = 2'-O-methylguanosine-3'-phosphate
  modified_base 13: mod_base = OTHER; note = 2'-O-methylcytidine-3'-phosphate
  modified_base 14: mod_base = OTHER; note = 2'-deoxy-2'-fluoroadenosine-3'-phosphate
  modified_base 15: mod_base = OTHER; note = 2'-O-methyladenosine-3'-phosphate
  modified_base 16: mod_base = OTHER; note = 2'-deoxy-2'-fluoroguanosine-3'-phosphate
  modified_base 17: mod_base = OTHER; note = 2'-O-methyluridine-3'-phosphate
  modified_base 18: mod_base = OTHER; note = 2'-O-methyladenosine-3'-phosphate
  modified_base 19: mod_base = OTHER; note = 2'-O-methylcytidine-3'-phosphate
  modified_base 20: mod_base = OTHER; note = 2'-O-methylcytidine-3'-phosphate
  modified_base 21: mod_base = OTHER; note = 2'-O-methyladenosine-3'-phosphate
  modified_base 22: mod_base = OTHER; note = 2'-O-methyladenosine-3'-phosphate
  modified_base 23: mod_base = OTHER; note = 2'-O-methyladenosine
tcactttataagcaagtaccaaa

SEQ ID NO: 5238 - RNA, 23 nt, synthetic construct
  source 1..23: mol_type = other RNA
  modified_base 1: mod_base = OTHER; note = 2'-O-methyluridine-3'-phosphate 5'-(E)-Vinylphosphonate
  modified_base 2: mod_base = OTHER; note = 2'-deoxy-2'-fluorouridine-3'-phosphate
  modified_base 3: mod_base = OTHER; note = 2'-O-methyladenosine-3'-phosphate
  modified_base 4: mod_base = OTHER; note = 2'-O-methyluridine-3'-phosphate
  modified_base 5: mod_base = OTHER; note = 2'-O-methylcytidine-3'-phosphate
  modified_base 6: mod_base = OTHER; note = 2'-deoxy-2'-fluoroadenosine-3'-phosphate
  modified_base 7: mod_base = OTHER; note = 2'-O-methylcytidine-3'-phosphate
  modified_base 8: mod_base = OTHER; note = 2'-O-methyluridine-3'-phosphate
  modified_base 9: mod_base = OTHER; note = 2'-O-methyluridine-3'-phosphate
  modified_base 10: mod_base = OTHER; note = 2'-O-methyluridine-3'-phosphate
  modified_base 11: mod_base = OTHER; note = 2'-O-methyladenosine-3'-phosphate
  modified_base 12: mod_base = OTHER; note = 2'-O-methyluridine-3'-phosphate
  modified_base 13: mod_base = OTHER; note = 2'-O-methyladenosine-3'-phosphate
  modified_base 14: mod_base = OTHER; note = 2'-deoxy-2'-fluoroadenosine-3'-phosphate
  modified_base 15: mod_base = OTHER; note = 2'-O-methylguanosine-3'-phosphate
  modified_base 16: mod_base = OTHER; note = 2'-deoxy-2'-fluorocytidine-3'-phosphate
  modified_base 17: mod_base = OTHER; note = 2'-O-methyladenosine-3'-phosphate
  modified_base 18: mod_base = OTHER; note = 2'-O-methyladenosine-3'-phosphate
  modified_base 19: mod_base = OTHER; note = 2'-O-methylguanosine-3'-phosphate
  modified_base 20: mod_base = OTHER; note = 2'-O-methyluridine-3'-phosphate
  modified_base 21: mod_base = OTHER; note = 2'-O-methyladenosine-3'-phosphate
  modified_base 22: mod_base = OTHER; note = 2'-O-methylcytidine-3'-phosphate
  modified_base 23: mod_base = OTHER; note = 2'-O-methylcytidine
ttatcactttataagcaagtacc

SEQ ID NO: 5239 - RNA, 23 nt, synthetic construct
  source 1..23: mol_type = other RNA
  modified_base 1: mod_base = OTHER; note = 2'-O-methyluridine-3'-phosphate 5'-(E)-Vinylphosphonate
  modified_base 2: mod_base = OTHER; note = 2'-deoxy-2'-fluorouridine-3'-phosphate
  modified_base 3: mod_base = OTHER; note = 2'-O-methyladenosine-3'-phosphate
  modified_base 4: mod_base = OTHER; note = 2'-O-methylcytidine-3'-phosphate
  modified_base 5: mod_base = OTHER; note = 2'-O-methyluridine-3'-phosphate
  modified_base 6: mod_base = OTHER; note = 2'-deoxy-2'-fluoroadenosine-3'-phosphate
  modified_base 7: mod_base = OTHER; note = 2'-O-methyluridine-3'-phosphate
  modified_base 8: mod_base = OTHER; note = 2'-O-methylcytidine-3'-phosphate
  modified_base 9: mod_base = OTHER; note = 2'-O-methyladenosine-3'-phosphate
  modified_base 10: mod_base = OTHER; note = 2'-O-methylcytidine-3'-phosphate
  modified_base 11: mod_base = OTHER; note = 2'-O-methyluridine-3'-phosphate
  modified_base 12: mod_base = OTHER; note = 2'-O-methyluridine-3'-phosphate
  modified_base 13: mod_base = OTHER; note = 2'-O-methyluridine-3'-phosphate
  modified_base 14: mod_base = OTHER; note = 2'-deoxy-2'-fluoroadenosine-3'-phosphate
  modified_base 15: mod_base = OTHER; note = 2'-O-methyluridine-3'-phosphate
  modified_base 16: mod_base = OTHER; note = 2'-deoxy-2'-fluoroadenosine-3'-phosphate
  modified_base 17: mod_base = OTHER; note = 2'-O-methyladenosine-3'-phosphate
  modified_base 18: mod_base = OTHER; note = 2'-O-methylguanosine-3'-phosphate
  modified_base 19: mod_base = OTHER; note = 2'-O-methylcytidine-3'-phosphate
  modified_base 20: mod_base = OTHER; note = 2'-O-methyladenosine-3'-phosphate
  modified_base 21: mod_base = OTHER; note = 2'-O-methyladenosine-3'-phosphate
  modified_base 22: mod_base = OTHER; note = 2'-O-methylguanosine-3'-phosphate
  modified_base 23: mod_base = OTHER; note = 2'-O-methyluridine
ttactatcactttataagcaagt

SEQ ID NO: 5240 - RNA, 23 nt, synthetic construct
  source 1..23: mol_type = other RNA
  modified_base 1: mod_base = OTHER; note = 2'-O-methyluridine-3'-phosphate 5'-(E)-Vinylphosphonate
  modified_base 2: mod_base = OTHER; note = 2'-deoxy-2'-fluoroadenosine-3'-phosphate
  modified_base 3: mod_base = OTHER; note = 2'-O-methyluridine-3'-phosphate
  modified_base 4: mod_base = OTHER; note = 2'-O-methylguanosine-3'-phosphate
  modified_base 5: mod_base = OTHER; note = 2'-O-methyluridine-3'-phosphate
  modified_base 6: mod_base = OTHER; note = 2'-deoxy-2'-fluoroadenosine-3'-phosphate
  modified_base 7: mod_base = OTHER; note = 2'-O-methylcytidine-3'-phosphate
  modified_base 8: mod_base = OTHER; note = 2'-O-methyluridine-3'-phosphate
  modified_base 9: mod_base = OTHER; note = 2'-O-methyladenosine-3'-phosphate
  modified_base 10: mod_base = OTHER; note = 2'-O-methyluridine-3'-phosphate
  modified_base 11: mod_base = OTHER; note = 2'-O-methylcytidine-3'-phosphate
  modified_base 12: mod_base = OTHER; note = 2'-O-methyladenosine-3'-phosphate
  modified_base 13: mod_base = OTHER; note = 2'-O-methylcytidine-3'-phosphate
  modified_base 14: mod_base = OTHER; note = 2'-deoxy-2'-fluorouridine-3'-phosphate
  modified_base 15: mod_base = OTHER; note = 2'-O-methyluridine-3'-phosphate
  modified_base 16: mod_base = OTHER; note = 2'-deoxy-2'-fluorouridine-3'-phosphate
  modified_base 17: mod_base = OTHER; note = 2'-O-methyladenosine-3'-phosphate
  modified_base 18: mod_base = OTHER; note = 2'-O-methyluridine-3'-phosphate
  modified_base 19: mod_base = OTHER; note = 2'-O-methyladenosine-3'-phosphate
  modified_base 20: mod_base = OTHER; note = 2'-O-methyladenosine-3'-phosphate
  modified_base 21: mod_base = OTHER; note = 2'-O-methylguanosine-3'-phosphate
  modified_base 22: mod_base = OTHER; note = 2'-O-methylcytidine-3'-phosphate
  modified_base 23: mod_base = OTHER; note = 2'-O-methyladenosine
tatgtactatcactttataagca

SEQ ID NO: 5241 - RNA, 23 nt, synthetic construct
  source 1..23: mol_type = other RNA
  modified_base 1: mod_base = OTHER; note = 2'-O-methyluridine-3'-phosphate 5'-(E)-Vinylphosphonate
  modified_base 2: mod_base = OTHER; note = 2'-deoxy-2'-fluorocytidine-3'-phosphate
  modified_base 3: mod_base = OTHER; note = 2'-O-methyladenosine-3'-phosphate
  modified_base 4: mod_base = OTHER; note = 2'-O-methyluridine-3'-phosphate
  modified_base 5: mod_base = OTHER; note = 2'-O-methylguanosine-3'-phosphate
  modified_base 6: mod_base = OTHER; note = 2'-deoxy-2'-fluorouridine-3'-phosphate
  modified_base 7: mod_base = OTHER; note = 2'-O-methyladenosine-3'-phosphate
  modified_base 8: mod_base = OTHER; note = 2'-O-methylcytidine-3'-phosphate
  modified_base 9: mod_base = OTHER; note = 2'-O-methyluridine-3'-phosphate
  modified_base 10: mod_base = OTHER; note = 2'-O-methyladenosine-3'-phosphate
  modified_base 11: mod_base = OTHER; note = 2'-O-methyluridine-3'-phosphate
  modified_base 12: mod_base = OTHER; note = 2'-O-methylcytidine-3'-phosphate
  modified_base 13: mod_base = OTHER; note = 2'-O-methyladenosine-3'-phosphate
  modified_base 14: mod_base = OTHER; note = 2'-deoxy-2'-fluorocytidine-3'-phosphate
  modified_base 15: mod_base = OTHER; note = 2'-O-methyluridine-3'-phosphate
  modified_base 16: mod_base = OTHER; note = 2'-deoxy-2'-fluorouridine-3'-phosphate
  modified_base 17: mod_base = OTHER; note = 2'-O-methyluridine-3'-phosphate
  modified_base 18: mod_base = OTHER; note = 2'-O-methyladenosine-3'-phosphate
  modified_base 19: mod_base = OTHER; note = 2'-O-methyluridine-3'-phosphate
  modified_base 20: mod_base = OTHER; note = 2'-O-methyladenosine-3'-phosphate
  modified_base 21: mod_base = OTHER; note = 2'-O-methyladenosine-3'-phosphate
  modified_base 22: mod_base = OTHER; note = 2'-O-methylguanosine-3'-phosphate
  modified_base 23: mod_base = OTHER; note = 2'-O-methylcytidine
tcatgtactatcactttataagc

SEQ ID NO: 5242 - RNA, 23 nt, synthetic construct
  source 1..23: mol_type = other RNA
  modified_base 1: mod_base = OTHER; note = 2'-O-methyluridine-3'-phosphate 5'-(E)-Vinylphosphonate
  modified_base 2: mod_base = OTHER; note = 2'-deoxy-2'-fluoroadenosine-3'-phosphate
  modified_base 3: mod_base = OTHER; note = 2'-O-methylcytidine-3'-phosphate
  modified_base 4: mod_base = OTHER; note = 2'-O-methyladenosine-3'-phosphate
  modified_base 5: mod_base = OTHER; note = 2'-O-methyluridine-3'-phosphate
  modified_base 6: mod_base = OTHER; note = 2'-deoxy-2'-fluoroguanosine-3'-phosphate
  modified_base 7: mod_base = OTHER; note = 2'-O-methyluridine-3'-phosphate
  modified_base 8: mod_base = OTHER; note = 2'-O-methyladenosine-3'-phosphate
  modified_base 9: mod_base = OTHER; note = 2'-O-methylcytidine-3'-phosphate
  modified_base 10: mod_base = OTHER; note = 2'-O-methyluridine-3'-phosphate
  modified_base 11: mod_base = OTHER; note = 2'-O-methyladenosine-3'-phosphate
  modified_base 12: mod_base = OTHER; note = 2'-O-methyluridine-3'-phosphate
  modified_base 13: mod_base = OTHER; note = 2'-O-methylcytidine-3'-phosphate
  modified_base 14: mod_base = OTHER; note = 2'-deoxy-2'-fluoroadenosine-3'-phosphate
  modified_base 15: mod_base = OTHER; note = 2'-O-methylcytidine-3'-phosphate
  modified_base 16: mod_base = OTHER; note = 2'-deoxy-2'-fluorouridine-3'-phosphate
  modified_base 17: mod_base = OTHER; note = 2'-O-methyluridine-3'-phosphate
  modified_base 18: mod_base = OTHER; note = 2'-O-methyluridine-3'-phosphate
  modified_base 19: mod_base = OTHER; note = 2'-O-methyladenosine-3'-phosphate
  modified_base 20: mod_base = OTHER; note = 2'-O-methyluridine-3'-phosphate
  modified_base 21: mod_base = OTHER; note = 2'-O-methyladenosine-3'-phosphate
  modified_base 22: mod_base = OTHER; note = 2'-O-methyladenosine-3'-phosphate
  modified_base 23: mod_base = OTHER; note = 2'-O-methylguanosine
tacatgtactatcactttataag

SEQ ID NO: 5243 - RNA, 23 nt, synthetic construct
  source 1..23: mol_type = other RNA
  modified_base 1: mod_base = OTHER; note = 2'-O-methyluridine-3'-phosphate 5'-(E)-Vinylphosphonate
  modified_base 2: mod_base = OTHER; note = 2'-deoxy-2'-fluorocytidine-3'-phosphate
  modified_base 3: mod_base = OTHER; note = 2'-O-methyluridine-3'-phosphate
  modified_base 4: mod_base = OTHER; note = 2'-O-methyladenosine-3'-phosphate
  modified_base 5: mod_base = OTHER; note = 2'-O-methyladenosine-3'-phosphate
  modified_base 6: mod_base = OTHER; note = 2'-deoxy-2'-fluorocytidine-3'-phosphate
  modified_base 7: mod_base = OTHER; note = 2'-O-methyladenosine-3'-phosphate
  modified_base 8: mod_base = OTHER; note = 2'-O-methyluridine-3'-phosphate
  modified_base 9: mod_base = OTHER; note = 2'-O-methylguanosine-3'-phosphate
  modified_base 10: mod_base = OTHER; note = 2'-O-methyluridine-3'-phosphate
  modified_base 11: mod_base = OTHER; note = 2'-O-methyladenosine-3'-phosphate
  modified_base 12: mod_base = OTHER; note = 2'-O-methylcytidine-3'-phosphate
  modified_base 13: mod_base = OTHER; note = 2'-O-methyluridine-3'-phosphate
  modified_base 14: mod_base = OTHER; note = 2'-deoxy-2'-fluoroadenosine-3'-phosphate
  modified_base 15: mod_base = OTHER; note = 2'-O-methyluridine-3'-phosphate
  modified_base 16: mod_base = OTHER; note = 2'-deoxy-2'-fluorocytidine-3'-phosphate
  modified_base 17: mod_base = OTHER; note = 2'-O-methyladenosine-3'-phosphate
  modified_base 18: mod_base = OTHER; note = 2'-O-methylcytidine-3'-phosphate
  modified_base 19: mod_base = OTHER; note = 2'-O-methyluridine-3'-phosphate
  modified_base 20: mod_base = OTHER; note = 2'-O-methyluridine-3'-phosphate
  modified_base 21: mod_base = OTHER; note = 2'-O-methyluridine-3'-phosphate
  modified_base 22: mod_base = OTHER; note = 2'-O-methyladenosine-3'-phosphate
  modified_base 23: mod_base = OTHER; note = 2'-O-methyluridine
tctaacatgtactatcactttat

SEQ ID NO: 5244 - RNA, 23 nt, synthetic construct
  source 1..23: mol_type = other RNA
  modified_base 1: mod_base = OTHER; note = 2'-O-methyluridine-3'-phosphate 5'-(E)-Vinylphosphonate
  modified_base 2: mod_base = OTHER; note = 2'-deoxy-2'-fluoroguanosine-3'-phosphate
  modified_base 3: mod_base = OTHER; note = 2'-O-methylcytidine-3'-phosphate
  modified_base 4: mod_base = OTHER; note = 2'-O-methyluridine-3'-phosphate
  modified_base 5: mod_base = OTHER; note = 2'-O-methyladenosine-3'-phosphate
  modified_base 6: mod_base = OTHER; note = 2'-deoxy-2'-fluoroadenosine-3'-phosphate
  modified_base 7: mod_base = OTHER; note = 2'-O-methylcytidine-3'-phosphate
  modified_base 8: mod_base = OTHER; note = 2'-O-methyladenosine-3'-phosphate
  modified_base 9: mod_base = OTHER; note = 2'-O-methyluridine-3'-phosphate
  modified_base 10: mod_base = OTHER; note = 2'-O-methylguanosine-3'-phosphate
  modified_base 11: mod_base = OTHER; note = 2'-O-methyluridine-3'-phosphate
  modified_base 12: mod_base = OTHER; note = 2'-O-methyladenosine-3'-phosphate
  modified_base 13: mod_base = OTHER; note = 2'-O-methylcytidine-3'-phosphate
  modified_base 14: mod_base = OTHER; note = 2'-deoxy-2'-fluorouridine-3'-phosphate
  modified_base 15: mod_base = OTHER; note = 2'-O-methyladenosine-3'-phosphate
  modified_base 16: mod_base = OTHER; note = 2'-deoxy-2'-fluorouridine-3'-phosphate
  modified_base 17: mod_base = OTHER; note = 2'-O-methylcytidine-3'-phosphate
  modified_base 18: mod_base = OTHER; note = 2'-O-methyladenosine-3'-phosphate
  modified_base 19: mod_base = OTHER; note = 2'-O-methylcytidine-3'-phosphate
  modified_base 20: mod_base = OTHER; note = 2'-O-methyluridine-3'-phosphate
  modified_base 21: mod_base = OTHER; note = 2'-O-methyluridine-3'-phosphate
  modified_base 22: mod_base = OTHER; note = 2'-O-methyluridine-3'-phosphate
  modified_base 23: mod_base = OTHER; note = 2'-O-methyladenosine
tgctaacatgtactatcacttta

SEQ ID NO: 5245 - RNA, 23 nt, synthetic construct
  source 1..23: mol_type = other RNA
  modified_base 1: mod_base = OTHER; note = 2'-O-methyluridine-3'-phosphate 5'-(E)-Vinylphosphonate
  modified_base 2: mod_base = OTHER; note = 2'-deoxy-2'-fluorouridine-3'-phosphate
  modified_base 3: mod_base = OTHER; note = 2'-O-methylguanosine-3'-phosphate
  modified_base 4: mod_base = OTHER; note = 2'-O-methylcytidine-3'-phosphate
  modified_base 5: mod_base = OTHER; note = 2'-O-methyluridine-3'-phosphate
  modified_base 6: mod_base = OTHER; note = 2'-deoxy-2'-fluoroadenosine-3'-phosphate
  modified_base 7: mod_base = OTHER; note = 2'-O-methyladenosine-3'-phosphate
  modified_base 8: mod_base = OTHER; note = 2'-O-methylcytidine-3'-phosphate
  modified_base 9: mod_base = OTHER; note = 2'-O-methyladenosine-3'-phosphate
  modified_base 10: mod_base = OTHER; note = 2'-O-methyluridine-3'-phosphate
  modified_base 11: mod_base = OTHER; note = 2'-O-methylguanosine-3'-phosphate
  modified_base 12: mod_base = OTHER; note = 2'-O-methyluridine-3'-phosphate
  modified_base 13: mod_base = OTHER; note = 2'-O-methyladenosine-3'-phosphate
  modified_base 14: mod_base = OTHER; note = 2'-deoxy-2'-fluorocytidine-3'-phosphate
  modified_base 15: mod_base = OTHER; note = 2'-O-methyluridine-3'-phosphate
  modified_base 16: mod_base = OTHER; note = 2'-deoxy-2'-fluoroadenosine-3'-phosphate
  modified_base 17: mod_base = OTHER; note = 2'-O-methyluridine-3'-phosphate
  modified_base 18: mod_base = OTHER; note = 2'-O-methylcytidine-3'-phosphate
  modified_base 19: mod_base = OTHER; note = 2'-O-methyladenosine-3'-phosphate
  modified_base 20: mod_base = OTHER; note = 2'-O-methylcytidine-3'-phosphate
  modified_base 21: mod_base = OTHER; note = 2'-O-methyluridine-3'-phosphate
  modified_base 22: mod_base = OTHER; note = 2'-O-methyluridine-3'-phosphate
  modified_base 23: mod_base = OTHER; note = 2'-O-methyluridine
ttgctaacatgtactatcacttt

SEQ ID NO: 5246 - RNA, 23 nt, synthetic construct
  source 1..23: mol_type = other RNA
  modified_base 1: mod_base = OTHER; note = 2'-O-methyluridine-3'-phosphate 5'-(E)-Vinylphosphonate
  modified_base 2: mod_base = OTHER; note = 2'-deoxy-2'-fluoroadenosine-3'-phosphate
  modified_base 3: mod_base = OTHER; note = 2'-O-methyluridine-3'-phosphate
  modified_base 4: mod_base = OTHER; note = 2'-O-methylguanosine-3'-phosphate
  modified_base 5: mod_base = OTHER; note = 2'-O-methylcytidine-3'-phosphate
  modified_base 6: mod_base = OTHER; note = 2'-deoxy-2'-fluorouridine-3'-phosphate
  modified_base 7: mod_base = OTHER; note = 2'-O-methyladenosine-3'-phosphate
  modified_base 8: mod_base = OTHER; note = 2'-O-methyladenosine-3'-phosphate
  modified_base 9: mod_base = OTHER; note = 2'-O-methylcytidine-3'-phosphate
  modified_base 10: mod_base = OTHER; note = 2'-O-methyladenosine-3'-phosphate
  modified_base 11: mod_base = OTHER; note = 2'-O-methyluridine-3'-phosphate
  modified_base 12: mod_base = OTHER; note = 2'-O-methylguanosine-3'-phosphate
  modified_base 13: mod_base = OTHER; note = 2'-O-methyluridine-3'-phosphate
  modified_base 14: mod_base = OTHER; note = 2'-deoxy-2'-fluoroadenosine-3'-phosphate
  modified_base 15: mod_base = OTHER; note = 2'-O-methylcytidine-3'-phosphate
  modified_base 16: mod_base = OTHER; note = 2'-deoxy-2'-fluorouridine-3'-phosphate
  modified_base 17: mod_base = OTHER; note = 2'-O-methyladenosine-3'-phosphate
  modified_base 18: mod_base = OTHER; note = 2'-O-methyluridine-3'-phosphate
  modified_base 19: mod_base = OTHER; note = 2'-O-methylcytidine-3'-phosphate
  modified_base 20: mod_base = OTHER; note = 2'-O-methyladenosine-3'-phosphate
  modified_base 21: mod_base = OTHER; note = 2'-O-methylcytidine-3'-phosphate
  modified_base 22: mod_base = OTHER; note = 2'-O-methyluridine-3'-phosphate
  modified_base 23: mod_base = OTHER; note = 2'-O-methyluridine
tatgctaacatgtactatcactt

SEQ ID NO: 5247 - RNA, 23 nt, synthetic construct
  source 1..23: mol_type = other RNA
  modified_base 1: mod_base = OTHER; note = 2'-O-methyluridine-3'-phosphate 5'-(E)-Vinylphosphonate
  modified_base 2: mod_base = OTHER; note = 2'-deoxy-2'-fluorouridine-3'-phosphate
  modified_base 3: mod_base = OTHER; note = 2'-O-methyladenosine-3'-phosphate
  modified_base 4: mod_base = OTHER; note = 2'-O-methyluridine-3'-phosphate
  modified_base 5: mod_base = OTHER; note = 2'-O-methylguanosine-3'-phosphate
  modified_base 6: mod_base = OTHER; note = 2'-deoxy-2'-fluorocytidine-3'-phosphate
  modified_base 7: mod_base = OTHER; note = 2'-O-methyluridine-3'-phosphate
  modified_base 8: mod_base = OTHER; note = 2'-O-methyladenosine-3'-phosphate
  modified_base 9: mod_base = OTHER; note = 2'-O-methyladenosine-3'-phosphate
  modified_base 10: mod_base = OTHER; note = 2'-O-methylcytidine-3'-phosphate
  modified_base 11: mod_base = OTHER; note = 2'-O-methyladenosine-3'-phosphate
  modified_base 12: mod_base = OTHER; note = 2'-O-methyluridine-3'-phosphate
  modified_base 13: mod_base = OTHER; note = 2'-O-methylguanosine-3'-phosphate
  modified_base 14: mod_base = OTHER; note = 2'-deoxy-2'-fluorouridine-3'-phosphate
  modified_base 15: mod_base = OTHER; note = 2'-O-methyladenosine-3'-phosphate
  modified_base 16: mod_base = OTHER; note = 2'-deoxy-2'-fluorocytidine-3'-phosphate
  modified_base 17: mod_base = OTHER; note = 2'-O-methyluridine-3'-phosphate
  modified_base 18: mod_base = OTHER; note = 2'-O-methyladenosine-3'-phosphate
  modified_base 19: mod_base = OTHER; note = 2'-O-methyluridine-3'-phosphate
  modified_base 20: mod_base = OTHER; note = 2'-O-methylcytidine-3'-phosphate
  modified_base 21: mod_base = OTHER; note = 2'-O-methyladenosine-3'-phosphate
  modified_base 22: mod_base = OTHER; note = 2'-O-methylcytidine-3'-phosphate
  modified_base 23: mod_base = OTHER; note = 2'-O-methyluridine
ttatgctaacatgtactatcact

SEQ ID NO: 5248 - RNA, 23 nt, synthetic construct
  source 1..23: mol_type = other RNA
  modified_base 1: mod_base = OTHER; note = 2'-O-methyluridine-3'-phosphate 5'-(E)-Vinylphosphonate
  modified_base 2: mod_base = OTHER; note = 2'-deoxy-2'-fluoroadenosine-3'-phosphate
  modified_base 3: mod_base = OTHER; note = 2'-O-methyluridine-3'-phosphate
  modified_base 4: mod_base = OTHER; note = 2'-O-methyladenosine-3'-phosphate
  modified_base 5: mod_base = OTHER; note = 2'-O-methyluridine-3'-phosphate
  modified_base 6: mod_base = OTHER; note = 2'-deoxy-2'-fluoroguanosine-3'-phosphate
  modified_base 7: mod_base = OTHER; note = 2'-O-methylcytidine-3'-phosphate
  modified_base 8: mod_base = OTHER; note = 2'-O-methyluridine-3'-phosphate
  modified_base 9: mod_base = OTHER; note = 2'-O-methyladenosine-3'-phosphate
  modified_base 10: mod_base = OTHER; note = 2'-O-methyladenosine-3'-phosphate
  modified_base 11: mod_base = OTHER; note = 2'-O-methylcytidine-3'-phosphate
  modified_base 12: mod_base = OTHER; note = 2'-O-methyladenosine-3'-phosphate
  modified_base 13: mod_base = OTHER; note = 2'-O-methyluridine-3'-phosphate
  modified_base 14: mod_base = OTHER; note = 2'-deoxy-2'-fluoroguanosine-3'-phosphate
  modified_base 15: mod_base = OTHER; note = 2'-O-methyluridine-3'-phosphate
  modified_base 16: mod_base = OTHER; note = 2'-deoxy-2'-fluoroadenosine-3'-phosphate
  modified_base 17: mod_base = OTHER; note = 2'-O-methylcytidine-3'-phosphate
  modified_base 18: mod_base = OTHER; note = 2'-O-methyluridine-3'-phosphate
  modified_base 19: mod_base = OTHER; note = 2'-O-methyladenosine-3'-phosphate
  modified_base 20: mod_base = OTHER; note = 2'-O-methyluridine-3'-phosphate
  modified_base 21: mod_base = OTHER; note = 2'-O-methylcytidine-3'-phosphate
  modified_base 22: mod_base = OTHER; note = 2'-O-methyladenosine-3'-phosphate
  modified_base 23: mod_base = OTHER; note = 2'-O-methylcytidine
tatatgctaacatgtactatcac

SEQ ID NO: 5249 - RNA, 23 nt, synthetic construct
  source 1..23: mol_type = other RNA
  modified_base 1: mod_base = OTHER; note = 2'-O-methyluridine-3'-phosphate 5'-(E)-Vinylphosphonate
  modified_base 2: mod_base = OTHER; note = 2'-deoxy-2'-fluorouridine-3'-phosphate
  modified_base 3: mod_base = OTHER; note = 2'-O-methyladenosine-3'-phosphate
  modified_base 4: mod_base = OTHER; note = 2'-O-methyluridine-3'-phosphate
  modified_base 5: mod_base = OTHER; note = 2'-O-methyladenosine-3'-phosphate
  modified_base 6: mod_base = OTHER; note = 2'-deoxy-2'-fluorouridine-3'-phosphate
  modified_base 7: mod_base = OTHER; note = 2'-O-methylguanosine-3'-phosphate
  modified_base 8: mod_base = OTHER; note = 2'-O-methylcytidine-3'-phosphate
  modified_base 9: mod_base = OTHER; note = 2'-O-methyluridine-3'-phosphate
  modified_base 10: mod_base = OTHER; note = 2'-O-methyladenosine-3'-phosphate
  modified_base 11: mod_base = OTHER; note = 2'-O-methyladenosine-3'-phosphate
  modified_base 12: mod_base = OTHER; note = 2'-O-methylcytidine-3'-phosphate
  modified_base 13: mod_base = OTHER; note = 2'-O-methyladenosine-3'-phosphate
  modified_base 14: mod_base = OTHER; note = 2'-deoxy-2'-fluorouridine-3'-phosphate
  modified_base 15: mod_base = OTHER; note = 2'-O-methylguanosine-3'-phosphate
  modified_base 16: mod_base = OTHER; note = 2'-deoxy-2'-fluorouridine-3'-phosphate
  modified_base 17: mod_base = OTHER; note = 2'-O-methyladenosine-3'-phosphate
  modified_base 18: mod_base = OTHER; note = 2'-O-methylcytidine-3'-phosphate
  modified_base 19: mod_base = OTHER; note = 2'-O-methyluridine-3'-phosphate
  modified_base 20: mod_base = OTHER; note = 2'-O-methyladenosine-3'-phosphate
  modified_base 21: mod_base = OTHER; note = 2'-O-methyluridine-3'-phosphate
  modified_base 22: mod_base = OTHER; note = 2'-O-methylcytidine-3'-phosphate
  modified_base 23: mod_base = OTHER; note = 2'-O-methyladenosine
ttatatgctaacatgtactatca

SEQ ID NO: 5250 - RNA, 23 nt, synthetic construct
  source 1..23: mol_type = other RNA
  modified_base 1: mod_base = OTHER; note = 2'-O-methyluridine-3'-phosphate 5'-(E)-Vinylphosphonate
  modified_base 2: mod_base = OTHER; note = 2'-deoxy-2'-fluorouridine-3'-phosphate
  modified_base 3: mod_base = OTHER; note = 2'-O-methyluridine-3'-phosphate
  modified_base 4: mod_base = OTHER; note = 2'-O-methyladenosine-3'-phosphate
  modified_base 5: mod_base = OTHER; note = 2'-O-methyluridine-3'-phosphate
  modified_base 6: mod_base = OTHER; note = 2'-deoxy-2'-fluoroadenosine-3'-phosphate
  modified_base 7: mod_base = OTHER; note = 2'-O-methyluridine-3'-phosphate
  modified_base 8: mod_base = OTHER; note = 2'-O-methylguanosine-3'-phosphate
  modified_base 9: mod_base = OTHER; note = 2'-O-methylcytidine-3'-phosphate
  modified_base 10: mod_base = OTHER; note = 2'-O-methyluridine-3'-phosphate
  modified_base 11: mod_base = OTHER; note = 2'-O-methyladenosine-3'-phosphate
  modified_base 12: mod_base = OTHER; note = 2'-O-methyladenosine-3'-phosphate
  modified_base 13: mod_base = OTHER; note = 2'-O-methylcytidine-3'-phosphate
  modified_base 14: mod_base = OTHER; note = 2'-deoxy-2'-fluoroadenosine-3'-phosphate
  modified_base 15: mod_base = OTHER; note = 2'-O-methyluridine-3'-phosphate
  modified_base 16: mod_base = OTHER; note = 2'-deoxy-2'-fluoroguanosine-3'-phosphate
  modified_base 17: mod_base = OTHER; note = 2'-O-methyluridine-3'-phosphate
  modified_base 18: mod_base = OTHER; note = 2'-O-methyladenosine-3'-phosphate
  modified_base 19: mod_base = OTHER; note = 2'-O-methylcytidine-3'-phosphate
  modified_base 20: mod_base = OTHER; note = 2'-O-methyluridine-3'-phosphate
  modified_base 21: mod_base = OTHER; note = 2'-O-methyladenosine-3'-phosphate
  modified_base 22: mod_base = OTHER; note = 2'-O-methyluridine-3'-phosphate
  modified_base 23: mod_base = OTHER; note = 2'-O-methylcytidine
tttatatgctaacatgtactatc

SEQ ID NO: 5251 - RNA, 23 nt, synthetic construct
  source 1..23: mol_type = other RNA
  modified_base 1: mod_base = OTHER; note = 2'-O-methyluridine-3'-phosphate 5'-(E)-Vinylphosphonate
  modified_base 2: mod_base = OTHER; note = 2'-deoxy-2'-fluorocytidine-3'-phosphate
  modified_base 3: mod_base = OTHER; note = 2'-O-methyladenosine-3'-phosphate
  modified_base 4: mod_base = OTHER; note = 2'-O-methyluridine-3'-phosphate
  modified_base 5: mod_base = OTHER; note = 2'-O-methyluridine-3'-phosphate
  modified_base 6: mod_base = OTHER; note = 2'-deoxy-2'-fluoroadenosine-3'-phosphate
  modified_base 7: mod_base = OTHER; note = 2'-O-methyluridine-3'-phosphate
  modified_base 8: mod_base = OTHER; note = 2'-O-methyladenosine-3'-phosphate
  modified_base 9: mod_base = OTHER; note = 2'-O-methyluridine-3'-phosphate
  modified_base 10: mod_base = OTHER; note = 2'-O-methylguanosine-3'-phosphate
  modified_base 11: mod_base = OTHER; note = 2'-O-methylcytidine-3'-phosphate
  modified_base 12: mod_base = OTHER; note = 2'-O-methyluridine-3'-phosphate
  modified_base 13: mod_base = OTHER; note = 2'-O-methyladenosine-3'-phosphate
  modified_base 14: mod_base = OTHER; note = 2'-deoxy-2'-fluoroadenosine-3'-phosphate
  modified_base 15: mod_base = OTHER; note = 2'-O-methylcytidine-3'-phosphate
  modified_base 16: mod_base = OTHER; note = 2'-deoxy-2'-fluoroadenosine-3'-phosphate
  modified_base 17: mod_base = OTHER; note = 2'-O-methyluridine-3'-phosphate
  modified_base 18: mod_base = OTHER; note = 2'-O-methylguanosine-3'-phosphate
  modified_base 19: mod_base = OTHER; note = 2'-O-methyluridine-3'-phosphate
  modified_base 20: mod_base = OTHER; note = 2'-O-methyladenosine-3'-phosphate
  modified_base 21: mod_base = OTHER; note = 2'-O-methylcytidine-3'-phosphate
  modified_base 22: mod_base = OTHER; note = 2'-O-methyluridine-3'-phosphate
  modified_base 23: mod_base = OTHER; note = 2'-O-methyladenosine
tcattatatgctaacatgtacta

SEQ ID NO: 5252 - RNA, 23 nt, synthetic construct
  source 1..23: mol_type = other RNA
  modified_base 1: mod_base = OTHER; note = 2'-O-methyluridine-3'-phosphate 5'-(E)-Vinylphosphonate
  modified_base 2: mod_base = OTHER; note = 2'-deoxy-2'-fluoroadenosine-3'-phosphate
  modified_base 3: mod_base = OTHER; note = 2'-O-methylcytidine-3'-phosphate
  modified_base 4: mod_base = OTHER; note = 2'-O-methyladenosine-3'-phosphate
  modified_base 5: mod_base = OTHER; note = 2'-O-methyluridine-3'-phosphate
  modified_base 6: mod_base = OTHER; note = 2'-deoxy-2'-fluorouridine-3'-phosphate
  modified_base 7: mod_base = OTHER; note = 2'-O-methyladenosine-3'-phosphate
  modified_base 8: mod_base = OTHER; note = 2'-O-methyluridine-3'-phosphate
  modified_base 9: mod_base = OTHER; note = 2'-O-methyladenosine-3'-phosphate
  modified_base 10: mod_base = OTHER; note = 2'-O-methyluridine-3'-phosphate
  modified_base 11: mod_base = OTHER; note = 2'-O-methylguanosine-3'-phosphate
  modified_base 12: mod_base = OTHER; note = 2'-O-methylcytidine-3'-phosphate
  modified_base 13: mod_base = OTHER; note = 2'-O-methyluridine-3'-phosphate
  modified_base 14: mod_base = OTHER; note = 2'-deoxy-2'-fluoroadenosine-3'-phosphate
  modified_base 15: mod_base = OTHER; note = 2'-O-methyladenosine-3'-phosphate
  modified_base 16: mod_base = OTHER; note = 2'-deoxy-2'-fluorocytidine-3'-phosphate
  modified_base 17: mod_base = OTHER; note = 2'-O-methyladenosine-3'-phosphate
  modified_base 18: mod_base = OTHER; note = 2'-O-methyluridine-3'-phosphate
  modified_base 19: mod_base = OTHER; note = 2'-O-methylguanosine-3'-phosphate
  modified_base 20: mod_base = OTHER; note = 2'-O-methyluridine-3'-phosphate
  modified_base 21: mod_base = OTHER; note = 2'-O-methyladenosine-3'-phosphate
  modified_base 22: mod_base = OTHER; note = 2'-O-methylcytidine-3'-phosphate
  modified_base 23: mod_base = OTHER; note = 2'-O-methyluridine
tacattatatgctaacatgtact

SEQ ID NO: 5253 - RNA, 23 nt, synthetic construct
  source 1..23: mol_type = other RNA
  modified_base 1: mod_base = OTHER; note = 2'-O-methyluridine-3'-phosphate 5'-(E)-Vinylphosphonate
  modified_base 2: mod_base = OTHER; note = 2'-deoxy-2'-fluorouridine-3'-phosphate
  modified_base 3: mod_base = OTHER; note = 2'-O-methyladenosine-3'-phosphate
  modified_base 4: mod_base = OTHER; note = 2'-O-methylcytidine-3'-phosphate
  modified_base 5: mod_base = OTHER; note = 2'-O-methyladenosine-3'-phosphate
  modified_base 6: mod_base = OTHER; note = 2'-deoxy-2'-fluorouridine-3'-phosphate
  modified_base 7: mod_base = OTHER; note = 2'-O-methyluridine-3'-phosphate
  modified_base 8: mod_base = OTHER; note = 2'-O-methyladenosine-3'-phosphate
  modified_base 9: mod_base = OTHER; note = 2'-O-methyluridine-3'-phosphate
  modified_base 10: mod_base = OTHER; note = 2'-O-methyladenosine-3'-phosphate
  modified_base 11: mod_base = OTHER; note = 2'-O-methyluridine-3'-phosphate
  modified_base 12: mod_base = OTHER; note = 2'-O-methylguanosine-3'-phosphate
  modified_base 13: mod_base = OTHER; note = 2'-O-methylcytidine-3'-phosphate
  modified_base 14: mod_base = OTHER; note = 2'-deoxy-2'-fluorouridine-3'-phosphate
  modified_base 15: mod_base = OTHER; note = 2'-O-methyladenosine-3'-phosphate
  modified_base 16: mod_base = OTHER; note = 2'-deoxy-2'-fluoroadenosine-3'-phosphate
  modified_base 17: mod_base = OTHER; note = 2'-O-methylcytidine-3'-phosphate
  modified_base 18: mod_base = OTHER; note = 2'-O-methyladenosine-3'-phosphate
  modified_base 19: mod_base = OTHER; note = 2'-O-methyluridine-3'-phosphate
  modified_base 20: mod_base = OTHER; note = 2'-O-methylguanosine-3'-phosphate
  modified_base 21: mod_base = OTHER; note = 2'-O-methyluridine-3'-phosphate
  modified_base 22: mod_base = OTHER; note = 2'-O-methyladenosine-3'-phosphate
  modified_base 23: mod_base = OTHER; note = 2'-O-methylcytidine
ttacattatatgctaacatgtac

SEQ ID NO: 5254 - RNA, 23 nt, synthetic construct
  source 1..23: mol_type = other RNA
  modified_base 1: mod_base = OTHER; note = 2'-O-methyluridine-3'-phosphate 5'-(E)-Vinylphosphonate
  modified_base 2: mod_base = OTHER; note = 2'-deoxy-2'-fluorocytidine-3'-phosphate
  modified_base 3: mod_base = OTHER; note = 2'-O-methyluridine-3'-phosphate
  modified_base 4: mod_base = OTHER; note = 2'-O-methylcytidine-3'-phosphate
  modified_base 5: mod_base = OTHER; note = 2'-O-methyluridine-3'-phosphate
  modified_base 6: mod_base = OTHER; note = 2'-deoxy-2'-fluorouridine-3'-phosphate
  modified_base 7: mod_base = OTHER; note = 2'-O-methylcytidine-3'-phosphate
  modified_base 8: mod_base = OTHER; note = 2'-O-methyladenosine-3'-phosphate
  modified_base 9: mod_base = OTHER; note = 2'-O-methyladenosine-3'-phosphate
  modified_base 10: mod_base = OTHER; note = 2'-O-methyladenosine-3'-phosphate
  modified_base 11: mod_base = OTHER; note = 2'-O-methyladenosine-3'-phosphate
  modified_base 12: mod_base = OTHER; note = 2'-O-methyluridine-3'-phosphate
  modified_base 13: mod_base = OTHER; note = 2'-O-methyladenosine-3'-phosphate
  modified_base 14: mod_base = OTHER; note = 2'-deoxy-2'-fluorocytidine-3'-phosphate
  modified_base 15: mod_base = OTHER; note = 2'-O-methyladenosine-3'-phosphate
  modified_base 16: mod_base = OTHER; note = 2'-deoxy-2'-fluorouridine-3'-phosphate
  modified_base 17: mod_base = OTHER; note = 2'-O-methyluridine-3'-phosphate
  modified_base 18: mod_base = OTHER; note = 2'-O-methyladenosine-3'-phosphate
  modified_base 19: mod_base = OTHER; note = 2'-O-methyluridine-3'-phosphate
  modified_base 20: mod_base = OTHER; note = 2'-O-methyladenosine-3'-phosphate
  modified_base 21: mod_base = OTHER; note = 2'-O-methyluridine-3'-phosphate
  modified_base 22: mod_base = OTHER; note = 2'-O-methylguanosine-3'-phosphate
  modified_base 23: mod_base = OTHER; note = 2'-O-methylcytidine
tctcttcaaaatacattatatgc

SEQ ID NO: 5255 - RNA, 23 nt, synthetic construct
  source 1..23: mol_type = other RNA
  modified_base 1: mod_base = OTHER; note = 2'-O-methyluridine-3'-phosphate 5'-(E)-Vinylphosphonate
  modified_base 2: mod_base = OTHER; note = 2'-deoxy-2'-fluorouridine-3'-phosphate
  modified_base 3: mod_base = OTHER; note = 2'-O-methyluridine-3'-phosphate
  modified_base 4: mod_base = OTHER; note = 2'-O-methyluridine-3'-phosphate
  modified_base 5: mod_base = OTHER; note = 2'-O-methyladenosine-3'-phosphate
  modified_base 6: mod_base = OTHER; note = 2'-deoxy-2'-fluorocytidine-3'-phosphate
  modified_base 7: mod_base = OTHER; note = 2'-O-methyluridine-3'-phosphate
  modified_base 8: mod_base = OTHER; note = 2'-O-methyluridine-3'-phosphate
  modified_base 9: mod_base = OTHER; note = 2'-O-methylcytidine-3'-phosphate
  modified_base 10: mod_base = OTHER; note = 2'-O-methyladenosine-3'-phosphate
  modified_base 11: mod_base = OTHER; note = 2'-O-methylcytidine-3'-phosphate
  modified_base 12: mod_base = OTHER; note = 2'-O-methyluridine-3'-phosphate
  modified_base 13: mod_base = OTHER; note = 2'-O-methylcytidine-3'-phosphate
  modified_base 14: mod_base = OTHER; note = 2'-deoxy-2'-fluorouridine-3'-phosphate
  modified_base 15: mod_base = OTHER; note = 2'-O-methyluridine-3'-phosphate
  modified_base 16: mod_base = OTHER; note = 2'-deoxy-2'-fluorocytidine-3'-phosphate
  modified_base 17: mod_base = OTHER; note = 2'-O-methyladenosine-3'-phosphate
  modified_base 18: mod_base = OTHER; note = 2'-O-methyladenosine-3'-phosphate
  modified_base 19: mod_base = OTHER; note = 2'-O-methyladenosine-3'-phosphate
  modified_base 20: mod_base = OTHER; note = 2'-O-methyladenosine-3'-phosphate
  modified_base 21: mod_base = OTHER; note = 2'-O-methyluridine-3'-phosphate
  modified_base 22: mod_base = OTHER; note = 2'-O-methyladenosine-3'-phosphate
  modified_base 23: mod_base = OTHER; note = 2'-O-methylcytidine
ttttacttcactcttcaaaatac

SEQ ID NO: 5256 - RNA, 23 nt, synthetic construct
  source 1..23: mol_type = other RNA
  modified_base 1: mod_base = OTHER; note = 2'-O-methyluridine-3'-phosphate 5'-(E)-Vinylphosphonate
  modified_base 2: mod_base = OTHER; note = 2'-deoxy-2'-fluorocytidine-3'-phosphate
  modified_base 3: mod_base = OTHER; note = 2'-O-methyladenosine-3'-phosphate
  modified_base 4: mod_base = OTHER; note = 2'-O-methyluridine-3'-phosphate
  modified_base 5: mod_base = OTHER; note = 2'-O-methyluridine-3'-phosphate
  modified_base 6: mod_base = OTHER; note = 2'-deoxy-2'-fluorouridine-3'-phosphate
  modified_base 7: mod_base = OTHER; note = 2'-O-methyladenosine-3'-phosphate
  modified_base 8: mod_base = OTHER; note = 2'-O-methylcytidine-3'-phosphate
  modified_base 9: mod_base = OTHER; note = 2'-O-methyluridine-3'-phosphate
  modified_base 10: mod_base = OTHER; note = 2'-O-methyluridine-3'-phosphate
  modified_base 11: mod_base = OTHER; note = 2'-O-methylcytidine-3'-phosphate
  modified_base 12: mod_base = OTHER; note = 2'-O-methyladenosine-3'-phosphate
  modified_base 13: mod_base = OTHER; note = 2'-O-methylcytidine-3'-phosphate
  modified_base 14: mod_base = OTHER; note = 2'-deoxy-2'-fluorouridine-3'-phosphate
  modified_base 15: mod_base = OTHER; note = 2'-O-methylcytidine-3'-phosphate
  modified_base 16: mod_base = OTHER; note = 2'-deoxy-2'-fluorouridine-3'-phosphate
  modified_base 17: mod_base = OTHER; note = 2'-O-methyluridine-3'-phosphate
  modified_base 18: mod_base = OTHER; note = 2'-O-methylcytidine-3'-phosphate
  modified_base 19: mod_base = OTHER; note = 2'-O-methyladenosine-3'-phosphate
  modified_base 20: mod_base = OTHER; note = 2'-O-methyladenosine-3'-phosphate
  modified_base 21: mod_base = OTHER; note = 2'-O-methyladenosine-3'-phosphate
  modified_base 22: mod_base = OTHER; note = 2'-O-methyladenosine-3'-phosphate
  modified_base 23: mod_base = OTHER; note = 2'-O-methyluridine
tcatttacttcactcttcaaaat

SEQ ID NO: 5257 - RNA, 23 nt, synthetic construct
  source 1..23: mol_type = other RNA
  modified_base 1: mod_base = OTHER; note = 2'-O-methyluridine-3'-phosphate 5'-(E)-Vinylphosphonate
  modified_base 2: mod_base = OTHER; note = 2'-deoxy-2'-fluoroguanosine-3'-phosphate
  modified_base 3: mod_base = OTHER; note = 2'-O-methylcytidine-3'-phosphate
  modified_base 4: mod_base = OTHER; note = 2'-O-methyladenosine-3'-phosphate
  modified_base 5: mod_base = OTHER; note = 2'-O-methyluridine-3'-phosphate
  modified_base 6: mod_base = OTHER; note = 2'-deoxy-2'-fluorouridine-3'-phosphate
  modified_base 7: mod_base = OTHER; note = 2'-O-methyluridine-3'-phosphate
  modified_base 8: mod_base = OTHER; note = 2'-O-methyladenosine-3'-phosphate
  modified_base 9: mod_base = OTHER; note = 2'-O-methylcytidine-3'-phosphate
  modified_base 10: mod_base = OTHER; note = 2'-O-methyluridine-3'-phosphate
  modified_base 11: mod_base = OTHER; note = 2'-O-methyluridine-3'-phosphate
  modified_base 12: mod_base = OTHER; note = 2'-O-methylcytidine-3'-phosphate
  modified_base 13: mod_base = OTHER; note = 2'-O-methyladenosine-3'-phosphate
  modified_base 14: mod_base = OTHER; note = 2'-deoxy-2'-fluorocytidine-3'-phosphate
  modified_base 15: mod_base = OTHER; note = 2'-O-methyluridine-3'-phosphate
  modified_base 16: mod_base = OTHER; note = 2'-deoxy-2'-fluorocytidine-3'-phosphate
  modified_base 17: mod_base = OTHER; note = 2'-O-methyluridine-3'-phosphate
  modified_base 18: mod_base = OTHER; note = 2'-O-methyluridine-3'-phosphate
  modified_base 19: mod_base = OTHER; note = 2'-O-methylcytidine-3'-phosphate
  modified_base 20: mod_base = OTHER; note = 2'-O-methyladenosine-3'-phosphate
  modified_base 21: mod_base = OTHER; note = 2'-O-methyladenosine-3'-phosphate
  modified_base 22: mod_base = OTHER; note = 2'-O-methyladenosine-3'-phosphate
  modified_base 23: mod_base = OTHER; note = 2'-O-methyladenosine
tgcatttacttcactcttcaaaa

SEQ ID NO: 5258 - RNA, 23 nt, synthetic construct
  source 1..23: mol_type = other RNA
  modified_base 1: mod_base = OTHER; note = 2'-O-methyluridine-3'-phosphate 5'-(E)-Vinylphosphonate
  modified_base 2: mod_base = OTHER; note = 2'-deoxy-2'-fluoroadenosine-3'-phosphate
  modified_base 3: mod_base = OTHER; note = 2'-O-methylguanosine-3'-phosphate
  modified_base 4: mod_base = OTHER; note = 2'-O-methylcytidine-3'-phosphate
  modified_base 5: mod_base = OTHER; note = 2'-O-methyladenosine-3'-phosphate
  modified_base 6: mod_base = OTHER; note = 2'-deoxy-2'-fluorouridine-3'-phosphate
  modified_base 7: mod_base = OTHER; note = 2'-O-methyluridine-3'-phosphate
  modified_base 8: mod_base = OTHER; note = 2'-O-methyluridine-3'-phosphate
  modified_base 9: mod_base = OTHER; note = 2'-O-methyladenosine-3'-phosphate
  modified_base 10: mod_base = OTHER; note = 2'-O-methylcytidine-3'-phosphate
  modified_base 11: mod_base = OTHER; note = 2'-O-methyluridine-3'-phosphate
  modified_base 12: mod_base = OTHER; note = 2'-O-methyluridine-3'-phosphate
  modified_base 13: mod_base = OTHER; note = 2'-O-methylcytidine-3'-phosphate
  modified_base 14: mod_base = OTHER; note = 2'-deoxy-2'-fluoroadenosine-3'-phosphate
  modified_base 15: mod_base = OTHER; note = 2'-O-methylcytidine-3'-phosphate
  modified_base 16: mod_base = OTHER; note = 2'-deoxy-2'-fluorouridine-3'-phosphate
  modified_base 17: mod_base = OTHER; note = 2'-O-methylcytidine-3'-phosphate
  modified_base 18: mod_base = OTHER; note = 2'-O-methyluridine-3'-phosphate
  modified_base 19: mod_base = OTHER; note = 2'-O-methyluridine-3'-phosphate
  modified_base 20: mod_base = OTHER; note = 2'-O-methylcytidine-3'-phosphate
  modified_base 21: mod_base = OTHER; note = 2'-O-methyladenosine-3'-phosphate
  modified_base 22: mod_base = OTHER; note = 2'-O-methyladenosine-3'-phosphate
  modified_base 23: mod_base = OTHER; note = 2'-O-methyladenosine
tagcatttacttcactcttcaaa

SEQ ID NO: 5259 - RNA, 23 nt, synthetic construct
  source 1..23: mol_type = other RNA
  modified_base 1: mod_base = OTHER; note = 2'-O-methyluridine-3'-phosphate 5'-(E)-Vinylphosphonate
  modified_base 2: mod_base = OTHER; note = 2'-deoxy-2'-fluorouridine-3'-phosphate
  modified_base 3: mod_base = OTHER; note = 2'-O-methyladenosine-3'-phosphate
  modified_base 4: mod_base = OTHER; note = 2'-O-methylguanosine-3'-phosphate
  modified_base 5: mod_base = OTHER; note = 2'-O-methylcytidine-3'-phosphate
  modified_base 6: mod_base = OTHER; note = 2'-deoxy-2'-fluoroadenosine-3'-phosphate
  modified_base 7: mod_base = OTHER; note = 2'-O-methyluridine-3'-phosphate
  modified_base 8: mod_base = OTHER; note = 2'-O-methyluridine-3'-phosphate
  modified_base 9: mod_base = OTHER; note = 2'-O-methyluridine-3'-phosphate
  modified_base 10: mod_base = OTHER; note = 2'-O-methyladenosine-3'-phosphate
  modified_base 11: mod_base = OTHER; note = 2'-O-methylcytidine-3'-phosphate
  modified_base 12: mod_base = OTHER; note = 2'-O-methyluridine-3'-phosphate
  modified_base 13: mod_base = OTHER; note = 2'-O-methyluridine-3'-phosphate
  modified_base 14: mod_base = OTHER; note = 2'-deoxy-2'-fluorocytidine-3'-phosphate
  modified_base 15: mod_base = OTHER; note = 2'-O-methyladenosine-3'-phosphate
  modified_base 16: mod_base = OTHER; note = 2'-deoxy-2'-fluorocytidine-3'-phosphate
  modified_base 17: mod_base = OTHER; note = 2'-O-methyluridine-3'-phosphate
  modified_base 18: mod_base = OTHER; note = 2'-O-methylcytidine-3'-phosphate
  modified_base 19: mod_base = OTHER; note = 2'-O-methyluridine-3'-phosphate
  modified_base 20: mod_base = OTHER; note = 2'-O-methyluridine-3'-phosphate
  modified_base 21: mod_base = OTHER; note = 2'-O-methylcytidine-3'-phosphate
  modified_base 22: mod_base = OTHER; note = 2'-O-methyladenosine-3'-phosphate
  modified_base 23: mod_base = OTHER; note = 2'-O-methyladenosine
ttagcatttacttcactcttcaa

SEQ ID NO: 5260 - RNA, 23 nt, synthetic construct
  source 1..23: mol_type = other RNA
  modified_base 1: mod_base = OTHER; note = 2'-O-methyluridine-3'-phosphate 5'-(E)-Vinylphosphonate
  modified_base 2: mod_base = OTHER; note = 2'-deoxy-2'-fluoroadenosine-3'-phosphate
  modified_base 3: mod_base = OTHER; note = 2'-O-methyluridine-3'-phosphate
  modified_base 4: mod_base = OTHER; note = 2'-O-methyladenosine-3'-phosphate
  modified_base 5: mod_base = OTHER; note = 2'-O-methylguanosine-3'-phosphate
  modified_base 6: mod_base = OTHER; note = 2'-deoxy-2'-fluorocytidine-3'-phosphate
  modified_base 7: mod_base = OTHER; note = 2'-O-methyladenosine-3'-phosphate
  modified_base 8: mod_base = OTHER; note = 2'-O-methyluridine-3'-phosphate
  modified_base 9: mod_base = OTHER; note = 2'-O-methyluridine-3'-phosphate
  modified_base 10: mod_base = OTHER; note = 2'-O-methyluridine-3'-phosphate
  modified_base 11: mod_base = OTHER; note = 2'-O-methyladenosine-3'-phosphate
  modified_base 12: mod_base = OTHER; note = 2'-O-methylcytidine-3'-phosphate
  modified_base 13: mod_base = OTHER; note = 2'-O-methyluridine-3'-phosphate
  modified_base 14: mod_base = OTHER; note = 2'-deoxy-2'-fluorouridine-3'-phosphate
  modified_base 15: mod_base = OTHER; note = 2'-O-methylcytidine-3'-phosphate
  modified_base 16: mod_base = OTHER; note = 2'-deoxy-2'-fluoroadenosine-3'-phosphate
  modified_base 17: mod_base = OTHER; note = 2'-O-methylcytidine-3'-phosphate
  modified_base 18: mod_base = OTHER; note = 2'-O-methyluridine-3'-phosphate
  modified_base 19: mod_base = OTHER; note = 2'-O-methylcytidine-3'-phosphate
  modified_base 20: mod_base = OTHER; note = 2'-O-methyluridine-3'-phosphate
  modified_base 21: mod_base = OTHER; note = 2'-O-methyluridine-3'-phosphate
  modified_base 22: mod_base = OTHER; note = 2'-O-methylcytidine-3'-phosphate
  modified_base 23: mod_base = OTHER; note = 2'-O-methyladenosine
tatagcatttacttcactcttca

SEQ ID NO: 5261 - RNA, 23 nt, synthetic construct
  source 1..23: mol_type = other RNA
  modified_base 1: mod_base = OTHER; note = 2'-O-methyluridine-3'-phosphate 5'-(E)-Vinylphosphonate
  modified_base 2: mod_base = OTHER; note = 2'-deoxy-2'-fluoroadenosine-3'-phosphate
  modified_base 3: mod_base = OTHER; note = 2'-O-methyladenosine-3'-phosphate
  modified_base 4: mod_base = OTHER; note = 2'-O-methyluridine-3'-phosphate
  modified_base 5: mod_base = OTHER; note = 2'-O-methyladenosine-3'-phosphate
  modified_base 6: mod_base = OTHER; note = 2'-deoxy-2'-fluoroguanosine-3'-phosphate
  modified_base 7: mod_base = OTHER; note = 2'-O-methylcytidine-3'-phosphate
  modified_base 8: mod_base = OTHER; note = 2'-O-methyladenosine-3'-phosphate
  modified_base 9: mod_base = OTHER; note = 2'-O-methyluridine-3'-phosphate
  modified_base 10: mod_base = OTHER; note = 2'-O-methyluridine-3'-phosphate
  modified_base 11: mod_base = OTHER; note = 2'-O-methyluridine-3'-phosphate
  modified_base 12: mod_base = OTHER; note = 2'-O-methyladenosine-3'-phosphate
  modified_base 13: mod_base = OTHER; note = 2'-O-methylcytidine-3'-phosphate
  modified_base 14: mod_base = OTHER; note = 2'-deoxy-2'-fluorouridine-3'-phosphate
  modified_base 15: mod_base = OTHER; note = 2'-O-methyluridine-3'-phosphate
  modified_base 16: mod_base = OTHER; note = 2'-deoxy-2'-fluorocytidine-3'-phosphate
  modified_base 17: mod_base = OTHER; note = 2'-O-methyladenosine-3'-phosphate
  modified_base 18: mod_base = OTHER; note = 2'-O-methylcytidine-3'-phosphate
  modified_base 19: mod_base = OTHER; note = 2'-O-methyluridine-3'-phosphate
  modified_base 20: mod_base = OTHER; note = 2'-O-methylcytidine-3'-phosphate
  modified_base 21: mod_base = OTHER; note = 2'-O-methyluridine-3'-phosphate
  modified_base 22: mod_base = OTHER; note = 2'-O-methyluridine-3'-phosphate
  modified_base 23: mod_base = OTHER; note = 2'-O-methylcytidine
taatagcatttacttcactcttc

SEQ ID NO: 5262 - RNA, 23 nt, synthetic construct
  source 1..23: mol_type = other RNA
  modified_base 1: mod_base = OTHER; note = 2'-O-methyluridine-3'-phosphate 5'-(E)-Vinylphosphonate
  modified_base 2: mod_base = OTHER; note = 2'-deoxy-2'-fluorocytidine-3'-phosphate
  modified_base 3: mod_base = OTHER; note = 2'-O-methyladenosine-3'-phosphate
  modified_base 4: mod_base = OTHER; note = 2'-O-methyladenosine-3'-phosphate
  modified_base 5: mod_base = OTHER; note = 2'-O-methyluridine-3'-phosphate
  modified_base 6: mod_base = OTHER; note = 2'-deoxy-2'-fluoroadenosine-3'-phosphate
  modified_base 7: mod_base = OTHER; note = 2'-O-methylguanosine-3'-phosphate
  modified_base 8: mod_base = OTHER; note = 2'-O-methylcytidine-3'-phosphate
  modified_base 9: mod_base = OTHER; note = 2'-O-methyladenosine-3'-phosphate
  modified_base 10: mod_base = OTHER; note = 2'-O-methyluridine-3'-phosphate
  modified_base 11: mod_base = OTHER; note = 2'-O-methyluridine-3'-phosphate
  modified_base 12: mod_base = OTHER; note = 2'-O-methyluridine-3'-phosphate
  modified_base 13: mod_base = OTHER; note = 2'-O-methyladenosine-3'-phosphate
  modified_base 14: mod_base = OTHER; note = 2'-deoxy-2'-fluorocytidine-3'-phosphate
  modified_base 15: mod_base = OTHER; note = 2'-O-methyluridine-3'-phosphate
  modified_base 16: mod_base = OTHER; note = 2'-deoxy-2'-fluorouridine-3'-phosphate
  modified_base 17: mod_base = OTHER; note = 2'-O-methylcytidine-3'-phosphate
  modified_base 18: mod_base = OTHER; note = 2'-O-methyladenosine-3'-phosphate
  modified_base 19: mod_base = OTHER; note = 2'-O-methylcytidine-3'-phosphate
  modified_base 20: mod_base = OTHER; note = 2'-O-methyluridine-3'-phosphate
  modified_base 21: mod_base = OTHER; note = 2'-O-methylcytidine-3'-phosphate
  modified_base 22: mod_base = OTHER; note = 2'-O-methyluridine-3'-phosphate
  modified_base 23: mod_base = OTHER; note = 2'-O-methyluridine
tcaatagcatttacttcactctt

SEQ ID NO: 5263 - RNA, 23 nt, synthetic construct
  source 1..23: mol_type = other RNA
  modified_base 1: mod_base = OTHER; note = 2'-O-methyluridine-3'-phosphate 5'-(E)-Vinylphosphonate
  modified_base 2: mod_base = OTHER; note = 2'-deoxy-2'-fluorouridine-3'-phosphate
  modified_base 3: mod_base = OTHER; note = 2'-O-methylcytidine-3'-phosphate
  modified_base 4: mod_base = OTHER; note = 2'-O-methyladenosine-3'-phosphate
  modified_base 5: mod_base = OTHER; note = 2'-O-methyladenosine-3'-phosphate
  modified_base 6: mod_base = OTHER; note = 2'-deoxy-2'-fluorouridine-3'-phosphate
  modified_base 7: mod_base = OTHER; note = 2'-O-methyladenosine-3'-phosphate
  modified_base 8: mod_base = OTHER; note = 2'-O-methylguanosine-3'-phosphate
  modified_base 9: mod_base = OTHER; note = 2'-O-methylcytidine-3'-phosphate
  modified_base 10: mod_base = OTHER; note = 2'-O-methyladenosine-3'-phosphate
  modified_base 11: mod_base = OTHER; note = 2'-O-methyluridine-3'-phosphate
  modified_base 12: mod_base = OTHER; note = 2'-O-methyluridine-3'-phosphate
  modified_base 13: mod_base = OTHER; note = 2'-O-methyluridine-3'-phosphate
  modified_base 14: mod_base = OTHER; note = 2'-deoxy-2'-fluoroadenosine-3'-phosphate
  modified_base 15: mod_base = OTHER; note = 2'-O-methylcytidine-3'-phosphate
  modified_base 16: mod_base = OTHER; note = 2'-deoxy-2'-fluorouridine-3'-phosphate
  modified_base 17: mod_base = OTHER; note = 2'-O-methyluridine-3'-phosphate
  modified_base 18: mod_base = OTHER; note = 2'-O-methylcytidine-3'-phosphate
  modified_base 19: mod_base = OTHER; note = 2'-O-methyladenosine-3'-phosphate
  modified_base 20: mod_base = OTHER; note = 2'-O-methylcytidine-3'-phosphate
  modified_base 21: mod_base = OTHER; note = 2'-O-methyluridine-3'-phosphate
  modified_base 22: mod_base = OTHER; note = 2'-O-methylcytidine-3'-phosphate
  modified_base 23: mod_base = OTHER; note = 2'-O-methyluridine
ttcaatagcatttacttcactct

SEQ ID NO: 5264 - RNA, 23 nt, synthetic construct
  source 1..23: mol_type = other RNA
  modified_base 1: mod_base = OTHER; note = 2'-O-methyluridine-3'-phosphate 5'-(E)-Vinylphosphonate
  modified_base 2: mod_base = OTHER; note = 2'-deoxy-2'-fluoroadenosine-3'-phosphate
  modified_base 3: mod_base = OTHER; note = 2'-O-methyluridine-3'-phosphate
  modified_base 4: mod_base = OTHER; note = 2'-O-methylcytidine-3'-phosphate
  modified_base 5: mod_base = OTHER; note = 2'-O-methyladenosine-3'-phosphate
  modified_base 6: mod_base = OTHER; note = 2'-deoxy-2'-fluoroadenosine-3'-phosphate
  modified_base 7: mod_base = OTHER; note = 2'-O-methyluridine-3'-phosphate
  modified_base 8: mod_base = OTHER; note = 2'-O-methyladenosine-3'-phosphate
  modified_base 9: mod_base = OTHER; note = 2'-O-methylguanosine-3'-phosphate
  modified_base 10: mod_base = OTHER; note = 2'-O-methylcytidine-3'-phosphate
  modified_base 11: mod_base = OTHER; note = 2'-O-methyladenosine-3'-phosphate
  modified_base 12: mod_base = OTHER; note = 2'-O-methyluridine-3'-phosphate
  modified_base 13: mod_base = OTHER; note = 2'-O-methyluridine-3'-phosphate
  modified_base 14: mod_base = OTHER; note = 2'-deoxy-2'-fluorouridine-3'-phosphate
  modified_base 15: mod_base = OTHER; note = 2'-O-methyladenosine-3'-phosphate
  modified_base 16: mod_base = OTHER; note = 2'-deoxy-2'-fluorocytidine-3'-phosphate
  modified_base 17: mod_base = OTHER; note = 2'-O-methyluridine-3'-phosphate
  modified_base 18: mod_base = OTHER; note = 2'-O-methyluridine-3'-phosphate
  modified_base 19: mod_base = OTHER; note = 2'-O-methylcytidine-3'-phosphate
  modified_base 20: mod_base = OTHER; note = 2'-O-methyladenosine-3'-phosphate
  modified_base 21: mod_base = OTHER; note = 2'-O-methylcytidine-3'-phosphate
  modified_base 22: mod_base = OTHER; note = 2'-O-methyluridine-3'-phosphate
  modified_base 23: mod_base = OTHER; note = 2'-O-methylcytidine
tatcaatagcatttacttcactc

SEQ ID NO: 5265 - RNA, 23 nt, synthetic construct
  source 1..23: mol_type = other RNA
  modified_base 1: mod_base = OTHER; note = 2'-O-methyluridine-3'-phosphate 5'-(E)-Vinylphosphonate
  modified_base 2: mod_base = OTHER; note = 2'-deoxy-2'-fluorouridine-3'-phosphate
  modified_base 3: mod_base = OTHER; note = 2'-O-methyladenosine-3'-phosphate
  modified_base 4: mod_base = OTHER; note = 2'-O-methyluridine-3'-phosphate
  modified_base 5: mod_base = OTHER; note = 2'-O-methylcytidine-3'-phosphate
  modified_base 6: mod_base = OTHER; note = 2'-deoxy-2'-fluoroadenosine-3'-phosphate
  modified_base 7: mod_base = OTHER; note = 2'-O-methyladenosine-3'-phosphate
  modified_base 8: mod_base = OTHER; note = 2'-O-methyluridine-3'-phosphate
  modified_base 9: mod_base = OTHER; note = 2'-O-methyladenosine-3'-phosphate
  modified_base 10: mod_base = OTHER; note = 2'-O-methylguanosine-3'-phosphate
  modified_base 11: mod_base = OTHER; note = 2'-O-methylcytidine-3'-phosphate
  modified_base 12: mod_base = OTHER; note = 2'-O-methyladenosine-3'-phosphate
  modified_base 13: mod_base = OTHER; note = 2'-O-methyluridine-3'-phosphate
  modified_base 14: mod_base = OTHER; note = 2'-deoxy-2'-fluorouridine-3'-phosphate
  modified_base 15: mod_base = OTHER; note = 2'-O-methyluridine-3'-phosphate
  modified_base 16: mod_base = OTHER; note = 2'-deoxy-2'-fluoroadenosine-3'-phosphate
  modified_base 17: mod_base = OTHER; note = 2'-O-methylcytidine-3'-phosphate
  modified_base 18: mod_base = OTHER; note = 2'-O-methyluridine-3'-phosphate
  modified_base 19: mod_base = OTHER; note = 2'-O-methyluridine-3'-phosphate
  modified_base 20: mod_base = OTHER; note = 2'-O-methylcytidine-3'-phosphate
  modified_base 21: mod_base = OTHER; note = 2'-O-methyladenosine-3'-phosphate
  modified_base 22: mod_base = OTHER; note = 2'-O-methylcytidine-3'-phosphate
  modified_base 23: mod_base = OTHER; note = 2'-O-methyluridine
ttatcaatagcatttacttcact

SEQ ID NO: 5266 - RNA, 23 nt, synthetic construct
  source 1..23: mol_type = other RNA
  modified_base 1: mod_base = OTHER; note = 2'-O-methyluridine-3'-phosphate 5'-(E)-Vinylphosphonate
  modified_base 2: mod_base = OTHER; note = 2'-deoxy-2'-fluorouridine-3'-phosphate
  modified_base 3: mod_base = OTHER; note = 2'-O-methyluridine-3'-phosphate
  modified_base 4: mod_base = OTHER; note = 2'-O-methyladenosine-3'-phosphate
  modified_base 5: mod_base = OTHER; note = 2'-O-methyluridine-3'-phosphate
  modified_base 6: mod_base = OTHER; note = 2'-deoxy-2'-fluorocytidine-3'-phosphate
  modified_base 7: mod_base = OTHER; note = 2'-O-methyladenosine-3'-phosphate
  modified_base 8: mod_base = OTHER; note = 2'-O-methyladenosine-3'-phosphate
  modified_base 9: mod_base = OTHER; note = 2'-O-methyluridine-3'-phosphate
  modified_base 10: mod_base = OTHER; note = 2'-O-methyladenosine-3'-phosphate
  modified_base 11: mod_base = OTHER; note = 2'-O-methylguanosine-3'-phosphate
  modified_base 12: mod_base = OTHER; note = 2'-O-methylcytidine-3'-phosphate
  modified_base 13: mod_base = OTHER; note = 2'-O-methyladenosine-3'-phosphate
  modified_base 14: mod_base = OTHER; note = 2'-deoxy-2'-fluorouridine-3'-phosphate
  modified_base 15: mod_base = OTHER; note = 2'-O-methyluridine-3'-phosphate
  modified_base 16: mod_base = OTHER; note = 2'-deoxy-2'-fluorouridine-3'-phosphate
  modified_base 17: mod_base = OTHER; note = 2'-O-methyladenosine-3'-phosphate
  modified_base 18: mod_base = OTHER; note = 2'-O-methylcytidine-3'-phosphate
  modified_base 19: mod_base = OTHER; note = 2'-O-methyluridine-3'-phosphate
  modified_base 20: mod_base = OTHER; note = 2'-O-methyluridine-3'-phosphate
  modified_base 21: mod_base = OTHER; note = 2'-O-methylcytidine-3'-phosphate
  modified_base 22: mod_base = OTHER; note = 2'-O-methyladenosine-3'-phosphate
  modified_base 23: mod_base = OTHER; note = 2'-O-methylcytidine
tttatcaatagcatttacttcac

SEQ ID NO: 5267 - RNA, 23 nt, synthetic construct
  source 1..23: mol_type = other RNA
  modified_base 1: mod_base = OTHER; note = 2'-O-methyluridine-3'-phosphate 5'-(E)-Vinylphosphonate
  modified_base 2: mod_base = OTHER; note = 2'-deoxy-2'-fluoroguanosine-3'-phosphate
  modified_base 3: mod_base = OTHER; note = 2'-O-methylcytidine-3'-phosphate
  modified_base 4: mod_base = OTHER; note = 2'-O-methyladenosine-3'-phosphate
  modified_base 5: mod_base = OTHER; note = 2'-O-methyluridine-3'-phosphate
  modified_base 6: mod_base = OTHER; note = 2'-deoxy-2'-fluorouridine-3'-phosphate
  modified_base 7: mod_base = OTHER; note = 2'-O-methyluridine-3'-phosphate
  modified_base 8: mod_base = OTHER; note = 2'-O-methylcytidine-3'-phosphate
  modified_base 9: mod_base = OTHER; note = 2'-O-methyluridine-3'-phosphate
  modified_base 10: mod_base = OTHER; note = 2'-O-methyluridine-3'-phosphate
  modified_base 11: mod_base = OTHER; note = 2'-O-methyluridine-3'-phosphate
  modified_base 12: mod_base = OTHER; note = 2'-O-methyladenosine-3'-phosphate
  modified_base 13: mod_base = OTHER; note = 2'-O-methylcytidine-3'-phosphate
  modified_base 14: mod_base = OTHER; note = 2'-deoxy-2'-fluorouridine-3'-phosphate
  modified_base 15: mod_base = OTHER; note = 2'-O-methylguanosine-3'-phosphate
  modified_base 16: mod_base = OTHER; note = 2'-deoxy-2'-fluorouridine-3'-phosphate
  modified_base 17: mod_base = OTHER; note = 2'-O-methyluridine-3'-phosphate
  modified_base 18: mod_base = OTHER; note = 2'-O-methyladenosine-3'-phosphate
  modified_base 19: mod_base = OTHER; note = 2'-O-methyluridine-3'-phosphate
  modified_base 20: mod_base = OTHER; note = 2'-O-methyluridine-3'-phosphate
  modified_base 21: mod_base = OTHER; note = 2'-O-methyladenosine-3'-phosphate
  modified_base 22: mod_base = OTHER; note = 2'-O-methylguanosine-3'-phosphate
  modified_base 23: mod_base = OTHER; note = 2'-O-methyluridine
tgcatttctttactgttattagt

SEQ ID NO: 5268 - RNA, 23 nt, synthetic construct
  source 1..23: mol_type = other RNA
  modified_base 1: mod_base = OTHER; note = 2'-O-methyluridine-3'-phosphate 5'-(E)-Vinylphosphonate
  modified_base 2: mod_base = OTHER; note = 2'-deoxy-2'-fluoroadenosine-3'-phosphate
  modified_base 3: mod_base = OTHER; note = 2'-O-methylguanosine-3'-phosphate
  modified_base 4: mod_base = OTHER; note = 2'-O-methylcytidine-3'-phosphate
  modified_base 5: mod_base = OTHER; note = 2'-O-methyladenosine-3'-phosphate
  modified_base 6: mod_base = OTHER; note = 2'-deoxy-2'-fluorouridine-3'-phosphate
  modified_base 7: mod_base = OTHER; note = 2'-O-methyluridine-3'-phosphate
  modified_base 8: mod_base = OTHER; note = 2'-O-methyluridine-3'-phosphate
  modified_base 9: mod_base = OTHER; note = 2'-O-methylcytidine-3'-phosphate
  modified_base 10: mod_base = OTHER; note = 2'-O-methyluridine-3'-phosphate
  modified_base 11: mod_base = OTHER; note = 2'-O-methyluridine-3'-phosphate
  modified_base 12: mod_base = OTHER; note = 2'-O-methyluridine-3'-phosphate
  modified_base 13: mod_base = OTHER; note = 2'-O-methyladenosine-3'-phosphate
  modified_base 14: mod_base = OTHER; note = 2'-deoxy-2'-fluorocytidine-3'-phosphate
  modified_base 15: mod_base = OTHER; note = 2'-O-methyluridine-3'-phosphate
  modified_base 16: mod_base = OTHER; note = 2'-deoxy-2'-fluoroguanosine-3'-phosphate
  modified_base 17: mod_base = OTHER; note = 2'-O-methyluridine-3'-phosphate
  modified_base 18: mod_base = OTHER; note = 2'-O-methyluridine-3'-phosphate
  modified_base 19: mod_base = OTHER; note = 2'-O-methyladenosine-3'-phosphate
  modified_base 20: mod_base = OTHER; note = 2'-O-methyluridine-3'-phosphate
  modified_base 21: mod_base = OTHER; note = 2'-O-methyluridine-3'-phosphate
  modified_base 22: mod_base = OTHER; note = 2'-O-methyladenosine-3'-phosphate
  modified_base 23: mod_base = OTHER; note = 2'-O-methylguanosine
tagcatttctttactgttattag

SEQ ID NO: 5269 - RNA, 23 nt, synthetic construct
  source 1..23: mol_type = other RNA
  modified_base 1: mod_base = OTHER; note = 2'-O-methyluridine-3'-phosphate 5'-(E)-Vinylphosphonate
  modified_base 2: mod_base = OTHER; note = 2'-deoxy-2'-fluoroguanosine-3'-phosphate
  modified_base 3: mod_base = OTHER; note = 2'-O-methyluridine-3'-phosphate
  modified_base 4: mod_base = OTHER; note = 2'-O-methyladenosine-3'-phosphate
  modified_base 5: mod_base = OTHER; note = 2'-O-methylguanosine-3'-phosphate
  modified_base 6: mod_base = OTHER; note = 2'-deoxy-2'-fluorocytidine-3'-phosphate
  modified_base 7: mod_base = OTHER; note = 2'-O-methyladenosine-3'-phosphate
  modified_base 8: mod_base = OTHER; note = 2'-O-methyluridine-3'-phosphate
  modified_base 9: mod_base = OTHER; note = 2'-O-methyluridine-3'-phosphate
  modified_base 10: mod_base = OTHER; note = 2'-O-methyluridine-3'-phosphate
  modified_base 11: mod_base = OTHER; note = 2'-O-methylcytidine-3'-phosphate
  modified_base 12: mod_base = OTHER; note = 2'-O-methyluridine-3'-phosphate
  modified_base 13: mod_base = OTHER; note = 2'-O-methyluridine-3'-phosphate
  modified_base 14: mod_base = OTHER; note = 2'-deoxy-2'-fluorouridine-3'-phosphate
  modified_base 15: mod_base = OTHER; note = 2'-O-methyladenosine-3'-phosphate
  modified_base 16: mod_base = OTHER; note = 2'-deoxy-2'-fluorocytidine-3'-phosphate
  modified_base 17: mod_base = OTHER; note = 2'-O-methyluridine-3'-phosphate
  modified_base 18: mod_base = OTHER; note = 2'-O-methylguanosine-3'-phosphate
  modified_base 19: mod_base = OTHER; note = 2'-O-methyluridine-3'-phosphate
  modified_base 20: mod_base = OTHER; note = 2'-O-methyluridine-3'-phosphate
  modified_base 21: mod_base = OTHER; note = 2'-O-methyladenosine-3'-phosphate
  modified_base 22: mod_base = OTHER; note = 2'-O-methyluridine-3'-phosphate
  modified_base 23: mod_base = OTHER; note = 2'-O-methyluridine
tgtagcatttctttactgttatt

SEQ ID NO: 5270 - RNA, 23 nt, synthetic construct
  source 1..23: mol_type = other RNA
  modified_base 1: mod_base = OTHER; note = 2'-O-methyluridine-3'-phosphate 5'-(E)-Vinylphosphonate
  modified_base 2: mod_base = OTHER; note = 2'-deoxy-2'-fluoroadenosine-3'-phosphate
  modified_base 3: mod_base = OTHER; note = 2'-O-methylguanosine-3'-phosphate
  modified_base 4: mod_base = OTHER; note = 2'-O-methyluridine-3'-phosphate
  modified_base 5: mod_base = OTHER; note = 2'-O-methyladenosine-3'-phosphate
  modified_base 6: mod_base = OTHER; note = 2'-deoxy-2'-fluoroguanosine-3'-phosphate
  modified_base 7: mod_base = OTHER; note = 2'-O-methylcytidine-3'-phosphate
  modified_base 8: mod_base = OTHER; note = 2'-O-methyladenosine-3'-phosphate
  modified_base 9: mod_base = OTHER; note = 2'-O-methyluridine-3'-phosphate
  modified_base 10: mod_base = OTHER; note = 2'-O-methyluridine-3'-phosphate
  modified_base 11: mod_base = OTHER; note = 2'-O-methyluridine-3'-phosphate
  modified_base 12: mod_base = OTHER; note = 2'-O-methylcytidine-3'-phosphate
  modified_base 13: mod_base = OTHER; note = 2'-O-methyluridine-3'-phosphate
  modified_base 14: mod_base = OTHER; note = 2'-deoxy-2'-fluorouridine-3'-phosphate
  modified_base 15: mod_base = OTHER; note = 2'-O-methyluridine-3'-phosphate
  modified_base 16: mod_base = OTHER; note = 2'-deoxy-2'-fluoroadenosine-3'-phosphate
  modified_base 17: mod_base = OTHER; note = 2'-O-methylcytidine-3'-phosphate
  modified_base 18: mod_base = OTHER; note = 2'-O-methyluridine-3'-phosphate
  modified_base 19: mod_base = OTHER; note = 2'-O-methylguanosine-3'-phosphate
  modified_base 20: mod_base = OTHER; note = 2'-O-methyluridine-3'-phosphate
  modified_base 21: mod_base = OTHER; note = 2'-O-methyluridine-3'-phosphate
  modified_base 22: mod_base = OTHER; note = 2'-O-methyladenosine-3'-phosphate
  modified_base 23: mod_base = OTHER; note = 2'-O-methyluridine
tagtagcatttctttactgttat

SEQ ID NO: 5271 - RNA, 23 nt, synthetic construct
  source 1..23: mol_type = other RNA
  modified_base 1: mod_base = OTHER; note = 2'-O-methyluridine-3'-phosphate 5'-(E)-Vinylphosphonate
  modified_base 2: mod_base = OTHER; note = 2'-deoxy-2'-fluoroadenosine-3'-phosphate
  modified_base 3: mod_base = OTHER; note = 2'-O-methyladenosine-3'-phosphate
  modified_base 4: mod_base = OTHER; note = 2'-O-methylguanosine-3'-phosphate
  modified_base 5: mod_base = OTHER; note = 2'-O-methyluridine-3'-phosphate
  modified_base 6: mod_base = OTHER; note = 2'-deoxy-2'-fluoroadenosine-3'-phosphate
  modified_base 7: mod_base = OTHER; note = 2'-O-methylguanosine-3'-phosphate
  modified_base 8: mod_base = OTHER; note = 2'-O-methylcytidine-3'-phosphate
  modified_base 9: mod_base = OTHER; note = 2'-O-methyladenosine-3'-phosphate
  modified_base 10: mod_base = OTHER; note = 2'-O-methyluridine-3'-phosphate
  modified_base 11: mod_base = OTHER; note = 2'-O-methyluridine-3'-phosphate
  modified_base 12: mod_base = OTHER; note = 2'-O-methyluridine-3'-phosphate
  modified_base 13: mod_base = OTHER; note = 2'-O-methylcytidine-3'-phosphate
  modified_base 14: mod_base = OTHER; note = 2'-deoxy-2'-fluorouridine-3'-phosphate
  modified_base 15: mod_base = OTHER; note = 2'-O-methyluridine-3'-phosphate
  modified_base 16: mod_base = OTHER; note = 2'-deoxy-2'-fluorouridine-3'-phosphate
  modified_base 17: mod_base = OTHER; note = 2'-O-methyladenosine-3'-phosphate
  modified_base 18: mod_base = OTHER; note = 2'-O-methylcytidine-3'-phosphate
  modified_base 19: mod_base = OTHER; note = 2'-O-methyluridine-3'-phosphate
  modified_base 20: mod_base = OTHER; note = 2'-O-methylguanosine-3'-phosphate
  modified_base 21: mod_base = OTHER; note = 2'-O-methyluridine-3'-phosphate
  modified_base 22: mod_base = OTHER; note = 2'-O-methyluridine-3'-phosphate
  modified_base 23: mod_base = OTHER; note = 2'-O-methyladenosine
taagtagcatttctttactgtta

SEQ ID NO: 5272 - RNA, 23 nt, synthetic construct
  source 1..23: mol_type = other RNA
  modified_base 1: mod_base = OTHER; note = 2'-O-methyluridine-3'-phosphate 5'-(E)-Vinylphosphonate
  modified_base 2: mod_base = OTHER; note = 2'-deoxy-2'-fluorocytidine-3'-phosphate
  modified_base 3: mod_base = OTHER; note = 2'-O-methyladenosine-3'-phosphate
  modified_base 4: mod_base = OTHER; note = 2'-O-methyladenosine-3'-phosphate
  modified_base 5: mod_base = OTHER; note = 2'-O-methylguanosine-3'-phosphate
  modified_base 6: mod_base = OTHER; note = 2'-deoxy-2'-fluorouridine-3'-phosphate
  modified_base 7: mod_base = OTHER; note = 2'-O-methyladenosine-3'-phosphate
  modified_base 8: mod_base = OTHER; note = 2'-O-methylguanosine-3'-phosphate
  modified_base 9: mod_base = OTHER; note = 2'-O-methylcytidine-3'-phosphate
  modified_base 10: mod_base = OTHER; note = 2'-O-methyladenosine-3'-phosphate
  modified_base 11: mod_base = OTHER; note = 2'-O-methyluridine-3'-phosphate
  modified_base 12: mod_base = OTHER; note = 2'-O-methyluridine-3'-phosphate
  modified_base 13: mod_base = OTHER; note = 2'-O-methyluridine-3'-phosphate
  modified_base 14: mod_base = OTHER; note = 2'-deoxy-2'-fluorocytidine-3'-phosphate
  modified_base 15: mod_base = OTHER; note = 2'-O-methyluridine-3'-phosphate
  modified_base 16: mod_base = OTHER; note = 2'-deoxy-2'-fluorouridine-3'-phosphate
  modified_base 17: mod_base = OTHER; note = 2'-O-methyluridine-3'-phosphate
  modified_base 18: mod_base = OTHER; note = 2'-O-methyladenosine-3'-phosphate
  modified_base 19: mod_base = OTHER; note = 2'-O-methylcytidine-3'-phosphate
  modified_base 20: mod_base = OTHER; note = 2'-O-methyluridine-3'-phosphate
  modified_base 21: mod_base = OTHER; note = 2'-O-methylguanosine-3'-phosphate
  modified_base 22: mod_base = OTHER; note = 2'-O-methyluridine-3'-phosphate
  modified_base 23: mod_base = OTHER; note = 2'-O-methyluridine
tcaagtagcatttctttactgtt

SEQ ID NO: 5273 - RNA, 23 nt, synthetic construct
  source 1..23: mol_type = other RNA
  modified_base 1: mod_base = OTHER; note = 2'-O-methyluridine-3'-phosphate 5'-(E)-Vinylphosphonate
  modified_base 2: mod_base = OTHER; note = 2'-deoxy-2'-fluorouridine-3'-phosphate
  modified_base 3: mod_base = OTHER; note = 2'-O-methylcytidine-3'-phosphate
  modified_base 4: mod_base = OTHER; note = 2'-O-methyladenosine-3'-phosphate
  modified_base 5: mod_base = OTHER; note = 2'-O-methyladenosine-3'-phosphate
  modified_base 6: mod_base = OTHER; note = 2'-deoxy-2'-fluoroguanosine-3'-phosphate
  modified_base 7: mod_base = OTHER; note = 2'-O-methyluridine-3'-phosphate
  modified_base 8: mod_base = OTHER; note = 2'-O-methyladenosine-3'-phosphate
  modified_base 9: mod_base = OTHER; note = 2'-O-methylguanosine-3'-phosphate
  modified_base 10: mod_base = OTHER; note = 2'-O-methylcytidine-3'-phosphate
  modified_base 11: mod_base = OTHER; note = 2'-O-methyladenosine-3'-phosphate
  modified_base 12: mod_base = OTHER; note = 2'-O-methyluridine-3'-phosphate
  modified_base 13: mod_base = OTHER; note = 2'-O-methyluridine-3'-phosphate
  modified_base 14: mod_base = OTHER; note = 2'-deoxy-2'-fluorouridine-3'-phosphate
  modified_base 15: mod_base = OTHER; note = 2'-O-methylcytidine-3'-phosphate
  modified_base 16: mod_base = OTHER; note = 2'-deoxy-2'-fluorouridine-3'-phosphate
  modified_base 17: mod_base = OTHER; note = 2'-O-methyluridine-3'-phosphate
  modified_base 18: mod_base = OTHER; note = 2'-O-methyluridine-3'-phosphate
  modified_base 19: mod_base = OTHER; note = 2'-O-methyladenosine-3'-phosphate
  modified_base 20: mod_base = OTHER; note = 2'-O-methylcytidine-3'-phosphate
  modified_base 21: mod_base = OTHER; note = 2'-O-methyluridine-3'-phosphate
  modified_base 22: mod_base = OTHER; note = 2'-O-methylguanosine-3'-phosphate
  modified_base 23: mod_base = OTHER; note = 2'-O-methyluridine
ttcaagtagcatttctttactgt

SEQ ID NO: 5274 - RNA, 23 nt, synthetic construct
  source 1..23: mol_type = other RNA
  modified_base 1: mod_base = OTHER; note = 2'-O-methyluridine-3'-phosphate 5'-(E)-Vinylphosphonate
  modified_base 2: mod_base = OTHER; note = 2'-deoxy-2'-fluoroadenosine-3'-phosphate
  modified_base 3: mod_base = OTHER; note = 2'-O-methyluridine-3'-phosphate
  modified_base 4: mod_base = OTHER; note = 2'-O-methylcytidine-3'-phosphate
  modified_base 5: mod_base = OTHER; note = 2'-O-methyladenosine-3'-phosphate
  modified_base 6: mod_base = OTHER; note = 2'-deoxy-2'-fluoroadenosine-3'-phosphate
  modified_base 7: mod_base = OTHER; note = 2'-O-methylguanosine-3'-phosphate
  modified_base 8: mod_base = OTHER; note = 2'-O-methyluridine-3'-phosphate
  modified_base 9: mod_base = OTHER; note = 2'-O-methyladenosine-3'-phosphate
  modified_base 10: mod_base = OTHER; note = 2'-O-methylguanosine-3'-phosphate
  modified_base 11: mod_base = OTHER; note = 2'-O-methylcytidine-3'-phosphate
  modified_base 12: mod_base = OTHER; note = 2'-O-methyladenosine-3'-phosphate
  modified_base 13: mod_base = OTHER; note = 2'-O-methyluridine-3'-phosphate
  modified_base 14: mod_base = OTHER; note = 2'-deoxy-2'-fluorouridine-3'-phosphate
  modified_base 15: mod_base = OTHER; note = 2'-O-methyluridine-3'-phosphate
  modified_base 16: mod_base = OTHER; note = 2'-deoxy-2'-fluorocytidine-3'-phosphate
  modified_base 17: mod_base = OTHER; note = 2'-O-methyluridine-3'-phosphate
  modified_base 18: mod_base = OTHER; note = 2'-O-methyluridine-3'-phosphate
  modified_base 19: mod_base = OTHER; note = 2'-O-methyluridine-3'-phosphate
  modified_base 20: mod_base = OTHER; note = 2'-O-methyladenosine-3'-phosphate
  modified_base 21: mod_base = OTHER; note = 2'-O-methylcytidine-3'-phosphate
  modified_base 22: mod_base = OTHER; note = 2'-O-methyluridine-3'-phosphate
  modified_base 23: mod_base = OTHER; note = 2'-O-methylguanosine
tatcaagtagcatttctttactg

SEQ ID NO: 5275 - RNA, 23 nt, synthetic construct
  source 1..23: mol_type = other RNA
  modified_base 1: mod_base = OTHER; note = 2'-O-methyluridine-3'-phosphate 5'-(E)-Vinylphosphonate
  modified_base 2: mod_base = OTHER; note = 2'-deoxy-2'-fluoroadenosine-3'-phosphate
  modified_base 3: mod_base = OTHER; note = 2'-O-methyladenosine-3'-phosphate
  modified_base 4: mod_base = OTHER; note = 2'-O-methyluridine-3'-phosphate
  modified_base 5: mod_base = OTHER; note = 2'-O-methylcytidine-3'-phosphate
  modified_base 6: mod_base = OTHER; note = 2'-deoxy-2'-fluoroadenosine-3'-phosphate
  modified_base 7: mod_base = OTHER; note = 2'-O-methyladenosine-3'-phosphate
  modified_base 8: mod_base = OTHER; note = 2'-O-methylguanosine-3'-phosphate
  modified_base 9: mod_base = OTHER; note = 2'-O-methyluridine-3'-phosphate
  modified_base 10: mod_base = OTHER; note = 2'-O-methyladenosine-3'-phosphate
  modified_base 11: mod_base = OTHER; note = 2'-O-methylguanosine-3'-phosphate
  modified_base 12: mod_base = OTHER; note = 2'-O-methylcytidine-3'-phosphate
  modified_base 13: mod_base = OTHER; note = 2'-O-methyladenosine-3'-phosphate
  modified_base 14: mod_base = OTHER; note = 2'-deoxy-2'-fluorouridine-3'-phosphate
  modified_base 15: mod_base = OTHER; note = 2'-O-methyluridine-3'-phosphate
  modified_base 16: mod_base = OTHER; note = 2'-deoxy-2'-fluorouridine-3'-phosphate
  modified_base 17: mod_base = OTHER; note = 2'-O-methylcytidine-3'-phosphate
  modified_base 18: mod_base = OTHER; note = 2'-O-methyluridine-3'-phosphate
  modified_base 19: mod_base = OTHER; note = 2'-O-methyluridine-3'-phosphate
  modified_base 20: mod_base = OTHER; note = 2'-O-methyluridine-3'-phosphate
  modified_base 21: mod_base = OTHER; note = 2'-O-methyladenosine-3'-phosphate
  modified_base 22: mod_base = OTHER; note = 2'-O-methylcytidine-3'-phosphate
  modified_base 23: mod_base = OTHER; note = 2'-O-methyluridine
taatcaagtagcatttctttact

SEQ ID NO: 5276 - RNA, 23 nt, synthetic construct
  source 1..23: mol_type = other RNA
  modified_base 1: mod_base = OTHER; note = 2'-O-methyluridine-3'-phosphate 5'-(E)-Vinylphosphonate
  modified_base 2: mod_base = OTHER; note = 2'-deoxy-2'-fluoroadenosine-3'-phosphate
  modified_base 3: mod_base = OTHER; note = 2'-O-methyladenosine-3'-phosphate
  modified_base 4: mod_base = OTHER; note = 2'-O-methyladenosine-3'-phosphate
  modified_base 5: mod_base = OTHER; note = 2'-O-methyluridine-3'-phosphate
  modified_base 6: mod_base = OTHER; note = 2'-deoxy-2'-fluorocytidine-3'-phosphate
  modified_base 7: mod_base = OTHER; note = 2'-O-methyladenosine-3'-phosphate
  modified_base 8: mod_base = OTHER; note = 2'-O-methyladenosine-3'-phosphate
  modified_base 9: mod_base = OTHER; note = 2'-O-methylguanosine-3'-phosphate
  modified_base 10: mod_base = OTHER; note = 2'-O-methyluridine-3'-phosphate
  modified_base 11: mod_base = OTHER; note = 2'-O-methyladenosine-3'-phosphate
  modified_base 12: mod_base = OTHER; note = 2'-O-methylguanosine-3'-phosphate
  modified_base 13: mod_base = OTHER; note = 2'-O-methylcytidine-3'-phosphate
  modified_base 14: mod_base = OTHER; note = 2'-deoxy-2'-fluoroadenosine-3'-phosphate
  modified_base 15: mod_base = OTHER; note = 2'-O-methyluridine-3'-phosphate
  modified_base 16: mod_base = OTHER; note = 2'-deoxy-2'-fluorouridine-3'-phosphate
  modified_base 17: mod_base = OTHER; note = 2'-O-methyluridine-3'-phosphate
  modified_base 18: mod_base = OTHER; note = 2'-O-methylcytidine-3'-phosphate
  modified_base 19: mod_base = OTHER; note = 2'-O-methyluridine-3'-phosphate
  modified_base 20: mod_base = OTHER; note = 2'-O-methyluridine-3'-phosphate
  modified_base 21: mod_base = OTHER; note = 2'-O-methyluridine-3'-phosphate
  modified_base 22: mod_base = OTHER; note = 2'-O-methyladenosine-3'-phosphate
  modified_base 23: mod_base = OTHER; note = 2'-O-methylcytidine
taaatcaagtagcatttctttac

SEQ ID NO: 5277 - RNA, 23 nt, synthetic construct
  source 1..23: mol_type = other RNA
  modified_base 1: mod_base = OTHER; note = 2'-O-methyluridine-3'-phosphate 5'-(E)-Vinylphosphonate
  modified_base 2: mod_base = OTHER; note = 2'-deoxy-2'-fluoroguanosine-3'-phosphate
  modified_base 3: mod_base = OTHER; note = 2'-O-methyluridine-3'-phosphate
  modified_base 4: mod_base = OTHER; note = 2'-O-methyladenosine-3'-phosphate
  modified_base 5: mod_base = OTHER; note = 2'-O-methyladenosine-3'-phosphate
  modified_base 6: mod_base = OTHER; note = 2'-deoxy-2'-fluorouridine-3'-phosphate
  modified_base 7: mod_base = OTHER; note = 2'-O-methylcytidine-3'-phosphate
  modified_base 8: mod_base = OTHER; note = 2'-O-methyluridine-3'-phosphate
  modified_base 9: mod_base = OTHER; note = 2'-O-methylguanosine-3'-phosphate
  modified_base 10: mod_base = OTHER; note = 2'-O-methyladenosine-3'-phosphate
  modified_base 11: mod_base = OTHER; note = 2'-O-methylguanosine-3'-phosphate
  modified_base 12: mod_base = OTHER; note = 2'-O-methylcytidine-3'-phosphate
  modified_base 13: mod_base = OTHER; note = 2'-O-methyladenosine-3'-phosphate
  modified_base 14: mod_base = OTHER; note = 2'-deoxy-2'-fluoroadenosine-3'-phosphate
  modified_base 15: mod_base = OTHER; note = 2'-O-methyluridine-3'-phosphate
  modified_base 16: mod_base = OTHER; note = 2'-deoxy-2'-fluorocytidine-3'-phosphate
  modified_base 17: mod_base = OTHER; note = 2'-O-methylcytidine-3'-phosphate
  modified_base 18: mod_base = OTHER; note = 2'-O-methyladenosine-3'-phosphate
  modified_base 19: mod_base = OTHER; note = 2'-O-methylguanosine-3'-phosphate
  modified_base 20: mod_base = OTHER; note = 2'-O-methyluridine-3'-phosphate
  modified_base 21: mod_base = OTHER; note = 2'-O-methyluridine-3'-phosphate
  modified_base 22: mod_base = OTHER; note = 2'-O-methyluridine-3'-phosphate
  modified_base 23: mod_base = OTHER; note = 2'-O-methyladenosine
tgtaatctgagcaatccagttta

SEQ ID NO: 5278 - RNA, 23 nt, synthetic construct
  source 1..23: mol_type = other RNA
  modified_base 1: mod_base = OTHER; note = 2'-O-methyluridine-3'-phosphate 5'-(E)-Vinylphosphonate
  modified_base 2: mod_base = OTHER; note = 2'-deoxy-2'-fluoroguanosine-3'-phosphate
  modified_base 3: mod_base = OTHER; note = 2'-O-methyladenosine-3'-phosphate
  modified_base 4: mod_base = OTHER; note = 2'-O-methyluridine-3'-phosphate
  modified_base 5: mod_base = OTHER; note = 2'-O-methylcytidine-3'-phosphate
  modified_base 6: mod_base = OTHER; note = 2'-deoxy-2'-fluoroadenosine-3'-phosphate
  modified_base 7: mod_base = OTHER; note = 2'-O-methylguanosine-3'-phosphate
  modified_base 8: mod_base = OTHER; note = 2'-O-methylguanosine-3'-phosphate
  modified_base 9: mod_base = OTHER; note = 2'-O-methyluridine-3'-phosphate
  modified_base 10: mod_base = OTHER; note = 2'-O-methyladenosine-3'-phosphate
  modified_base 11: mod_base = OTHER; note = 2'-O-methyladenosine-3'-phosphate
  modified_base 12: mod_base = OTHER; note = 2'-O-methyluridine-3'-phosphate
  modified_base 13: mod_base = OTHER; note = 2'-O-methylcytidine-3'-phosphate
  modified_base 14: mod_base = OTHER; note = 2'-deoxy-2'-fluorouridine-3'-phosphate
  modified_base 15: mod_base = OTHER; note = 2'-O-methylguanosine-3'-phosphate
  modified_base 16: mod_base = OTHER; note = 2'-deoxy-2'-fluoroadenosine-3'-phosphate
  modified_base 17: mod_base = OTHER; note = 2'-O-methylguanosine-3'-phosphate
  modified_base 18: mod_base = OTHER; note = 2'-O-methylcytidine-3'-phosphate
  modified_base 19: mod_base = OTHER; note = 2'-O-methyladenosine-3'-phosphate
  modified_base 20: mod_base = OTHER; note = 2'-O-methyladenosine-3'-phosphate
  modified_base 21: mod_base = OTHER; note = 2'-O-methyluridine-3'-phosphate
  modified_base 22: mod_base = OTHER; note = 2'-O-methylcytidine-3'-phosphate
  modified_base 23: mod_base = OTHER; note = 2'-O-methylcytidine
tgatcaggtaatctgagcaatcc

SEQ ID NO: 5279 - RNA, 23 nt, synthetic construct
  source 1..23: mol_type = other RNA
  modified_base 1: mod_base = OTHER; note = 2'-O-methyluridine-3'-phosphate 5'-(E)-Vinylphosphonate
  modified_base 2: mod_base = OTHER; note = 2'-deoxy-2'-fluorocytidine-3'-phosphate
  modified_base 3: mod_base = OTHER; note = 2'-O-methyladenosine-3'-phosphate
  modified_base 4: mod_base = OTHER; note = 2'-O-methylcytidine-3'-phosphate
  modified_base 5: mod_base = OTHER; note = 2'-O-methylcytidine-3'-phosphate
  modified_base 6: mod_base = OTHER; note = 2'-deoxy-2'-fluoroadenosine-3'-phosphate
  modified_base 7: mod_base = OTHER; note = 2'-O-methylcytidine-3'-phosphate
  modified_base 8: mod_base = OTHER; note = 2'-O-methylguanosine-3'-phosphate
  modified_base 9: mod_base = OTHER; note = 2'-O-methyladenosine-3'-phosphate
  modified_base 10: mod_base = OTHER; note = 2'-O-methyluridine-3'-phosphate
  modified_base 11: mod_base = OTHER; note = 2'-O-methylcytidine-3'-phosphate
  modified_base 12: mod_base = OTHER; note = 2'-O-methyladenosine-3'-phosphate
  modified_base 13: mod_base = OTHER; note = 2'-O-methylguanosine-3'-phosphate
  modified_base 14: mod_base = OTHER; note = 2'-deoxy-2'-fluoroguanosine-3'-phosphate
  modified_base 15: mod_base = OTHER; note = 2'-O-methyluridine-3'-phosphate
  modified_base 16: mod_base = OTHER; note = 2'-deoxy-2'-fluoroadenosine-3'-phosphate
  modified_base 17: mod_base = OTHER; note = 2'-O-methyladenosine-3'-phosphate
  modified_base 18: mod_base = OTHER; note = 2'-O-methyluridine-3'-phosphate
  modified_base 19: mod_base = OTHER; note = 2'-O-methylcytidine-3'-phosphate
  modified_base 20: mod_base = OTHER; note = 2'-O-methyluridine-3'-phosphate
  modified_base 21: mod_base = OTHER; note = 2'-O-methylguanosine-3'-phosphate
  modified_base 22: mod_base = OTHER; note = 2'-O-methyladenosine-3'-phosphate
  modified_base 23: mod_base = OTHER; note = 2'-O-methylguanosine
tcaccacgatcaggtaatctgag

SEQ ID NO: 5280 - RNA, 23 nt, synthetic construct
  source 1..23: mol_type = other RNA
  modified_base 1: mod_base = OTHER; note = 2'-O-methyluridine-3'-phosphate 5'-(E)-Vinylphosphonate
  modified_base 2: mod_base = OTHER; note = 2'-deoxy-2'-fluorocytidine-3'-phosphate
  modified_base 3: mod_base = OTHER; note = 2'-O-methylcytidine-3'-phosphate
  modified_base 4: mod_base = OTHER; note = 2'-O-methyladenosine-3'-phosphate
  modified_base 5: mod_base = OTHER; note = 2'-O-methylcytidine-3'-phosphate
  modified_base 6: mod_base = OTHER; note = 2'-deoxy-2'-fluorocytidine-3'-phosphate
  modified_base 7: mod_base = OTHER; note = 2'-O-methyladenosine-3'-phosphate
  modified_base 8: mod_base = OTHER; note = 2'-O-methylcytidine-3'-phosphate
  modified_base 9: mod_base = OTHER; note = 2'-O-methylguanosine-3'-phosphate
  modified_base 10: mod_base = OTHER; note = 2'-O-methyladenosine-3'-phosphate
  modified_base 11: mod_base = OTHER; note = 2'-O-methyluridine-3'-phosphate
  modified_base 12: mod_base = OTHER; note = 2'-O-methylcytidine-3'-phosphate
  modified_base 13: mod_base = OTHER; note = 2'-O-methyladenosine-3'-phosphate
  modified_base 14: mod_base = OTHER; note = 2'-deoxy-2'-fluoroguanosine-3'-phosphate
  modified_base 15: mod_base = OTHER; note = 2'-O-methylguanosine-3'-phosphate
  modified_base 16: mod_base = OTHER; note = 2'-deoxy-2'-fluorouridine-3'-phosphate
  modified_base 17: mod_base = OTHER; note = 2'-O-methyladenosine-3'-phosphate
  modified_base 18: mod_base = OTHER; note = 2'-O-methyladenosine-3'-phosphate
  modified_base 19: mod_base = OTHER; note = 2'-O-methyluridine-3'-phosphate
  modified_base 20: mod_base = OTHER; note = 2'-O-methylcytidine-3'-phosphate
  modified_base 21: mod_base = OTHER; note = 2'-O-methyluridine-3'-phosphate
  modified_base 22: mod_base = OTHER; note = 2'-O-methylguanosine-3'-phosphate
  modified_base 23: mod_base = OTHER; note = 2'-O-methyladenosine
tccaccacgatcaggtaatctga

SEQ ID NO: 5281 - RNA, 23 nt, synthetic construct
  source 1..23: mol_type = other RNA
  modified_base 1: mod_base = OTHER; note = 2'-O-methyluridine-3'-phosphate 5'-(E)-Vinylphosphonate
  modified_base 2: mod_base = OTHER; note = 2'-deoxy-2'-fluorouridine-3'-phosphate
  modified_base 3: mod_base = OTHER; note = 2'-O-methylcytidine-3'-phosphate
  modified_base 4: mod_base = OTHER; note = 2'-O-methylcytidine-3'-phosphate
  modified_base 5: mod_base = OTHER; note = 2'-O-methyladenosine-3'-phosphate
  modified_base 6: mod_base = OTHER; note = 2'-deoxy-2'-fluorocytidine-3'-phosphate
  modified_base 7: mod_base = OTHER; note = 2'-O-methylcytidine-3'-phosphate
  modified_base 8: mod_base = OTHER; note = 2'-O-methyladenosine-3'-phosphate
  modified_base 9: mod_base = OTHER; note = 2'-O-methylcytidine-3'-phosphate
  modified_base 10: mod_base = OTHER; note = 2'-O-methylguanosine-3'-phosphate
  modified_base 11: mod_base = OTHER; note = 2'-O-methyladenosine-3'-phosphate
  modified_base 12: mod_base = OTHER; note = 2'-O-methyluridine-3'-phosphate
  modified_base 13: mod_base = OTHER; note = 2'-O-methylcytidine-3'-phosphate
  modified_base 14: mod_base = OTHER; note = 2'-deoxy-2'-fluoroadenosine-3'-phosphate
  modified_base 15: mod_base = OTHER; note = 2'-O-methylguanosine-3'-phosphate
  modified_base 16: mod_base = OTHER; note = 2'-deoxy-2'-fluoroguanosine-3'-phosphate
  modified_base 17: mod_base = OTHER; note = 2'-O-methyluridine-3'-phosphate
  modified_base 18: mod_base = OTHER; note = 2'-O-methyladenosine-3'-phosphate
  modified_base 19: mod_base = OTHER; note = 2'-O-methyladenosine-3'-phosphate
  modified_base 20: mod_base = OTHER; note = 2'-O-methyluridine-3'-phosphate
  modified_base 21: mod_base = OTHER; note = 2'-O-methylcytidine-3'-phosphate
  modified_base 22: mod_base = OTHER; note = 2'-O-methyluridine-3'-phosphate
  modified_base 23: mod_base = OTHER; note = 2'-O-methylguanosine
ttccaccacgatcaggtaatctg

SEQ ID NO: 5282 - RNA, 23 nt, synthetic construct
  source 1..23: mol_type = other RNA
  modified_base 1: mod_base = OTHER; note = 2'-O-methyluridine-3'-phosphate 5'-(E)-Vinylphosphonate
  modified_base 2: mod_base = OTHER; note = 2'-deoxy-2'-fluorouridine-3'-phosphate
  modified_base 3: mod_base = OTHER; note = 2'-O-methyluridine-3'-phosphate
  modified_base 4: mod_base = OTHER; note = 2'-O-methylcytidine-3'-phosphate
  modified_base 5: mod_base = OTHER; note = 2'-O-methylcytidine-3'-phosphate
  modified_base 6: mod_base = OTHER; note = 2'-deoxy-2'-fluoroadenosine-3'-phosphate
  modified_base 7: mod_base = OTHER; note = 2'-O-methylcytidine-3'-phosphate
  modified_base 8: mod_base = OTHER; note = 2'-O-methylcytidine-3'-phosphate
  modified_base 9: mod_base = OTHER; note = 2'-O-methyladenosine-3'-phosphate
  modified_base 10: mod_base = OTHER; note = 2'-O-methylcytidine-3'-phosphate
  modified_base 11: mod_base = OTHER; note = 2'-O-methylguanosine-3'-phosphate
  modified_base 12: mod_base = OTHER; note = 2'-O-methyladenosine-3'-phosphate
  modified_base 13: mod_base = OTHER; note = 2'-O-methyluridine-3'-phosphate
  modified_base 14: mod_base = OTHER; note = 2'-deoxy-2'-fluorocytidine-3'-phosphate
  modified_base 15: mod_base = OTHER; note = 2'-O-methyladenosine-3'-phosphate
  modified_base 16: mod_base = OTHER; note = 2'-deoxy-2'-fluoroguanosine-3'-phosphate
  modified_base 17: mod_base = OTHER; note = 2'-O-methylguanosine-3'-phosphate
  modified_base 18: mod_base = OTHER; note = 2'-O-methyluridine-3'-phosphate
  modified_base 19: mod_base = OTHER; note = 2'-O-methyladenosine-3'-phosphate
  modified_base 20: mod_base = OTHER; note = 2'-O-methyladenosine-3'-phosphate
  modified_base 21: mod_base = OTHER; note = 2'-O-methyluridine-3'-phosphate
  modified_base 22: mod_base = OTHER; note = 2'-O-methylcytidine-3'-phosphate
  modified_base 23: mod_base = OTHER; note = 2'-O-methyluridine
tttccaccacgatcaggtaatct

SEQ ID NO: 5283 - RNA, 23 nt, synthetic construct
  source 1..23: mol_type = other RNA
  modified_base 1: mod_base = OTHER; note = 2'-O-methyluridine-3'-phosphate 5'-(E)-Vinylphosphonate
  modified_base 2: mod_base = OTHER; note = 2'-deoxy-2'-fluoroguanosine-3'-phosphate
  modified_base 3: mod_base = OTHER; note = 2'-O-methyluridine-3'-phosphate
  modified_base 4: mod_base = OTHER; note = 2'-O-methyluridine-3'-phosphate
  modified_base 5: mod_base = OTHER; note = 2'-O-methylcytidine-3'-phosphate
  modified_base 6: mod_base = OTHER; note = 2'-deoxy-2'-fluorocytidine-3'-phosphate
  modified_base 7: mod_base = OTHER; note = 2'-O-methyladenosine-3'-phosphate
  modified_base 8: mod_base = OTHER; note = 2'-O-methylcytidine-3'-phosphate
  modified_base 9: mod_base = OTHER; note = 2'-O-methylcytidine-3'-phosphate
  modified_base 10: mod_base = OTHER; note = 2'-O-methyladenosine-3'-phosphate
  modified_base 11: mod_base = OTHER; note = 2'-O-methylcytidine-3'-phosphate
  modified_base 12: mod_base = OTHER; note = 2'-O-methylguanosine-3'-phosphate
  modified_base 13: mod_base = OTHER; note = 2'-O-methyladenosine-3'-phosphate
  modified_base 14: mod_base = OTHER; note = 2'-deoxy-2'-fluorouridine-3'-phosphate
  modified_base 15: mod_base = OTHER; note = 2'-O-methylcytidine-3'-phosphate
  modified_base 16: mod_base = OTHER; note = 2'-deoxy-2'-fluoroadenosine-3'-phosphate
  modified_base 17: mod_base = OTHER; note = 2'-O-methylguanosine-3'-phosphate
  modified_base 18: mod_base = OTHER; note = 2'-O-methylguanosine-3'-phosphate
  modified_base 19: mod_base = OTHER; note = 2'-O-methyluridine-3'-phosphate
  modified_base 20: mod_base = OTHER; note = 2'-O-methyladenosine-3'-phosphate
  modified_base 21: mod_base = OTHER; note = 2'-O-methyladenosine-3'-phosphate
  modified_base 22: mod_base = OTHER; note = 2'-O-methyluridine-3'-phosphate
  modified_base 23: mod_base = OTHER; note = 2'-O-methylcytidine
tgttccaccacgatcaggtaatc

SEQ ID NO: 5284 - RNA, 23 nt, synthetic construct
  source 1..23: mol_type = other RNA
  modified_base 1: mod_base = OTHER; note = 2'-O-methyluridine-3'-phosphate 5'-(E)-Vinylphosphonate
  modified_base 2: mod_base = OTHER; note = 2'-deoxy-2'-fluoroguanosine-3'-phosphate
  modified_base 3: mod_base = OTHER; note = 2'-O-methylguanosine-3'-phosphate
  modified_base 4: mod_base = OTHER; note = 2'-O-methyluridine-3'-phosphate
  modified_base 5: mod_base = OTHER; note = 2'-O-methyluridine-3'-phosphate
  modified_base 6: mod_base = OTHER; note = 2'-deoxy-2'-fluorocytidine-3'-phosphate
  modified_base 7: mod_base = OTHER; note = 2'-O-methylcytidine-3'-phosphate
  modified_base 8: mod_base = OTHER; note = 2'-O-methyladenosine-3'-phosphate
  modified_base 9: mod_base = OTHER; note = 2'-O-methylcytidine-3'-phosphate
  modified_base 10: mod_base = OTHER; note = 2'-O-methylcytidine-3'-phosphate
  modified_base 11: mod_base = OTHER; note = 2'-O-methyladenosine-3'-phosphate
  modified_base 12: mod_base = OTHER; note = 2'-O-methylcytidine-3'-phosphate
  modified_base 13: mod_base = OTHER; note = 2'-O-methylguanosine-3'-phosphate
  modified_base 14: mod_base = OTHER; note = 2'-deoxy-2'-fluoroadenosine-3'-phosphate
  modified_base 15: mod_base = OTHER; note = 2'-O-methyluridine-3'-phosphate
  modified_base 16: mod_base = OTHER; note = 2'-deoxy-2'-fluorocytidine-3'-phosphate
  modified_base 17: mod_base = OTHER; note = 2'-O-methyladenosine-3'-phosphate
  modified_base 18: mod_base = OTHER; note = 2'-O-methylguanosine-3'-phosphate
  modified_base 19: mod_base = OTHER; note = 2'-O-methylguanosine-3'-phosphate
  modified_base 20: mod_base = OTHER; note = 2'-O-methyluridine-3'-phosphate
  modified_base 21: mod_base = OTHER; note = 2'-O-methyladenosine-3'-phosphate
  modified_base 22: mod_base = OTHER; note = 2'-O-methyladenosine-3'-phosphate
  modified_base 23: mod_base = OTHER; note = 2'-O-methyluridine
tggttccaccacgatcaggtaat

SEQ ID NO: 5285 - RNA, 23 nt, synthetic construct
  source 1..23: mol_type = other RNA
  modified_base 1: mod_base = OTHER; note = 2'-O-methyluridine-3'-phosphate 5'-(E)-Vinylphosphonate
  modified_base 2: mod_base = OTHER; note = 2'-deoxy-2'-fluoroguanosine-3'-phosphate
  modified_base 3: mod_base = OTHER; note = 2'-O-methylguanosine-3'-phosphate
  modified_base 4: mod_base = OTHER; note = 2'-O-methylguanosine-3'-phosphate
  modified_base 5: mod_base = OTHER; note = 2'-O-methyluridine-3'-phosphate
  modified_base 6: mod_base = OTHER; note = 2'-deoxy-2'-fluorouridine-3'-phosphate
  modified_base 7: mod_base = OTHER; note = 2'-O-methylcytidine-3'-phosphate
  modified_base 8: mod_base = OTHER; note = 2'-O-methylcytidine-3'-phosphate
  modified_base 9: mod_base = OTHER; note = 2'-O-methyladenosine-3'-phosphate
  modified_base 10: mod_base = OTHER; note = 2'-O-methylcytidine-3'-phosphate
  modified_base 11: mod_base = OTHER; note = 2'-O-methylcytidine-3'-phosphate
  modified_base 12: mod_base = OTHER; note = 2'-O-methyladenosine-3'-phosphate
  modified_base 13: mod_base = OTHER; note = 2'-O-methylcytidine-3'-phosphate
  modified_base 14: mod_base = OTHER; note = 2'-deoxy-2'-fluoroguanosine-3'-phosphate
  modified_base 15: mod_base = OTHER; note = 2'-O-methyladenosine-3'-phosphate
  modified_base 16: mod_base = OTHER; note = 2'-deoxy-2'-fluorouridine-3'-phosphate
  modified_base 17: mod_base = OTHER; note = 2'-O-methylcytidine-3'-phosphate
  modified_base 18: mod_base = OTHER; note = 2'-O-methyladenosine-3'-phosphate
  modified_base 19: mod_base = OTHER; note = 2'-O-methylguanosine-3'-phosphate
  modified_base 20: mod_base = OTHER; note = 2'-O-methylguanosine-3'-phosphate
  modified_base 21: mod_base = OTHER; note = 2'-O-methyluridine-3'-phosphate
  modified_base 22: mod_base = OTHER; note = 2'-O-methyladenosine-3'-phosphate
  modified_base 23: mod_base = OTHER; note = 2'-O-methyladenosine
tgggttccaccacgatcaggtaa

SEQ ID NO: 5286 - RNA, 23 nt, synthetic construct
  source 1..23: mol_type = other RNA
  modified_base 1: mod_base = OTHER; note = 2'-O-methyluridine-3'-phosphate 5'-(E)-Vinylphosphonate
  modified_base 2: mod_base = OTHER; note = 2'-deoxy-2'-fluoroadenosine-3'-phosphate
  modified_base 3: mod_base = OTHER; note = 2'-O-methylguanosine-3'-phosphate
  modified_base 4: mod_base = OTHER; note = 2'-O-methylguanosine-3'-phosphate
  modified_base 5: mod_base = OTHER; note = 2'-O-methylguanosine-3'-phosphate
  modified_base 6: mod_base = OTHER; note = 2'-deoxy-2'-fluorouridine-3'-phosphate
  modified_base 7: mod_base = OTHER; note = 2'-O-methyluridine-3'-phosphate
  modified_base 8: mod_base = OTHER; note = 2'-O-methylcytidine-3'-phosphate
  modified_base 9: mod_base = OTHER; note = 2'-O-methylcytidine-3'-phosphate
  modified_base 10: mod_base = OTHER; note = 2'-O-methyladenosine-3'-phosphate
  modified_base 11: mod_base = OTHER; note = 2'-O-methylcytidine-3'-phosphate
  modified_base 12: mod_base = OTHER; note = 2'-O-methylcytidine-3'-phosphate
  modified_base 13: mod_base = OTHER; note = 2'-O-methyladenosine-3'-phosphate
  modified_base 14: mod_base = OTHER; note = 2'-deoxy-2'-fluorocytidine-3'-phosphate
  modified_base 15: mod_base = OTHER; note = 2'-O-methylguanosine-3'-phosphate
  modified_base 16: mod_base = OTHER; note = 2'-deoxy-2'-fluoroadenosine-3'-phosphate
  modified_base 17: mod_base = OTHER; note = 2'-O-methyluridine-3'-phosphate
  modified_base 18: mod_base = OTHER; note = 2'-O-methylcytidine-3'-phosphate
  modified_base 19: mod_base = OTHER; note = 2'-O-methyladenosine-3'-phosphate
  modified_base 20: mod_base = OTHER; note = 2'-O-methylguanosine-3'-phosphate
  modified_base 21: mod_base = OTHER; note = 2'-O-methylguanosine-3'-phosphate
  modified_base 22: mod_base = OTHER; note = 2'-O-methyluridine-3'-phosphate
  modified_base 23: mod_base = OTHER; note = 2'-O-methyladenosine
tagggttccaccacgatcaggta

SEQ ID NO: 5287 - RNA, 23 nt, synthetic construct
  source 1..23: mol_type = other RNA
  modified_base 1: mod_base = OTHER; note = 2'-O-methyluridine-3'-phosphate 5'-(E)-Vinylphosphonate
  modified_base 2: mod_base = OTHER; note = 2'-deoxy-2'-fluoroguanosine-3'-phosphate
  modified_base 3: mod_base = OTHER; note = 2'-O-methyladenosine-3'-phosphate
  modified_base 4: mod_base = OTHER; note = 2'-O-methyladenosine-3'-phosphate
  modified_base 5: mod_base = OTHER; note = 2'-O-methylcytidine-3'-phosphate
  modified_base 6: mod_base = OTHER; note = 2'-deoxy-2'-fluoroadenosine-3'-phosphate
  modified_base 7: mod_base = OTHER; note = 2'-O-methylguanosine-3'-phosphate
  modified_base 8: mod_base = OTHER; note = 2'-O-methyluridine-3'-phosphate
  modified_base 9: mod_base = OTHER; note = 2'-O-methyluridine-3'-phosphate
  modified_base 10: mod_base = OTHER; note = 2'-O-methyladenosine-3'-phosphate
  modified_base 11: mod_base = OTHER; note = 2'-O-methyladenosine-3'-phosphate
  modified_base 12: mod_base = OTHER; note = 2'-O-methyladenosine-3'-phosphate
  modified_base 13: mod_base = OTHER; note = 2'-O-methyluridine-3'-phosphate
  modified_base 14: mod_base = OTHER; note = 2'-deoxy-2'-fluoroadenosine-3'-phosphate
  modified_base 15: mod_base = OTHER; note = 2'-O-methyluridine-3'-phosphate
  modified_base 16: mod_base = OTHER; note = 2'-deoxy-2'-fluoroguanosine-3'-phosphate
  modified_base 17: mod_base = OTHER; note = 2'-O-methylguanosine-3'-phosphate
  modified_base 18: mod_base = OTHER; note = 2'-O-methylguanosine-3'-phosphate
  modified_base 19: mod_base = OTHER; note = 2'-O-methyladenosine-3'-phosphate
  modified_base 20: mod_base = OTHER; note = 2'-O-methyluridine-3'-phosphate
  modified_base 21: mod_base = OTHER; note = 2'-O-methyladenosine-3'-phosphate
  modified_base 22: mod_base = OTHER; note = 2'-O-methylguanosine-3'-phosphate
  modified_base 23: mod_base = OTHER; note = 2'-O-methyluridine
tgaacagttaaatatgggatagt

SEQ ID NO: 5288 - RNA, 23 nt, synthetic construct
  source 1..23: mol_type = other RNA
  modified_base 1: mod_base = OTHER; note = 2'-O-methyluridine-3'-phosphate 5'-(E)-Vinylphosphonate
  modified_base 2: mod_base = OTHER; note = 2'-deoxy-2'-fluoroadenosine-3'-phosphate
  modified_base 3: mod_base = OTHER; note = 2'-O-methylguanosine-3'-phosphate
  modified_base 4: mod_base = OTHER; note = 2'-O-methyladenosine-3'-phosphate
  modified_base 5: mod_base = OTHER; note = 2'-O-methyladenosine-3'-phosphate
  modified_base 6: mod_base = OTHER; note = 2'-deoxy-2'-fluorocytidine-3'-phosphate
  modified_base 7: mod_base = OTHER; note = 2'-O-methyladenosine-3'-phosphate
  modified_base 8: mod_base = OTHER; note = 2'-O-methylguanosine-3'-phosphate
  modified_base 9: mod_base = OTHER; note = 2'-O-methyluridine-3'-phosphate
  modified_base 10: mod_base = OTHER; note = 2'-O-methyluridine-3'-phosphate
  modified_base 11: mod_base = OTHER; note = 2'-O-methyladenosine-3'-phosphate
  modified_base 12: mod_base = OTHER; note = 2'-O-methyladenosine-3'-phosphate
  modified_base 13: mod_base = OTHER; note = 2'-O-methyladenosine-3'-phosphate
  modified_base 14: mod_base = OTHER; note = 2'-deoxy-2'-fluorouridine-3'-phosphate
  modified_base 15: mod_base = OTHER; note = 2'-O-methyladenosine-3'-phosphate
  modified_base 16: mod_base = OTHER; note = 2'-deoxy-2'-fluorouridine-3'-phosphate
  modified_base 17: mod_base = OTHER; note = 2'-O-methylguanosine-3'-phosphate
  modified_base 18: mod_base = OTHER; note = 2'-O-methylguanosine-3'-phosphate
  modified_base 19: mod_base = OTHER; note = 2'-O-methylguanosine-3'-phosphate
  modified_base 20: mod_base = OTHER; note = 2'-O-methyladenosine-3'-phosphate
  modified_base 21: mod_base = OTHER; note = 2'-O-methyluridine-3'-phosphate
  modified_base 22: mod_base = OTHER; note = 2'-O-methyladenosine-3'-phosphate
  modified_base 23: mod_base = OTHER; note = 2'-O-methylguanosine
tagaacagttaaatatgggatag

SEQ ID NO: 5289 - RNA, 23 nt, synthetic construct
  source 1..23: mol_type = other RNA
  modified_base 1: mod_base = OTHER; note = 2'-O-methyluridine-3'-phosphate 5'-(E)-Vinylphosphonate
  modified_base 2: mod_base = OTHER; note = 2'-deoxy-2'-fluorouridine-3'-phosphate
  modified_base 3: mod_base = OTHER; note = 2'-O-methyladenosine-3'-phosphate
  modified_base 4: mod_base = OTHER; note = 2'-O-methylguanosine-3'-phosphate
  modified_base 5: mod_base = OTHER; note = 2'-O-methyladenosine-3'-phosphate
  modified_base 6: mod_base = OTHER; note = 2'-deoxy-2'-fluoroadenosine-3'-phosphate
  modified_base 7: mod_base = OTHER; note = 2'-O-methylcytidine-3'-phosphate
  modified_base 8: mod_base = OTHER; note = 2'-O-methyladenosine-3'-phosphate
  modified_base 9: mod_base = OTHER; note = 2'-O-methylguanosine-3'-phosphate
  modified_base 10: mod_base = OTHER; note = 2'-O-methyluridine-3'-phosphate
  modified_base 11: mod_base = OTHER; note = 2'-O-methyluridine-3'-phosphate
  modified_base 12: mod_base = OTHER; note = 2'-O-methyladenosine-3'-phosphate
  modified_base 13: mod_base = OTHER; note = 2'-O-methyladenosine-3'-phosphate
  modified_base 14: mod_base = OTHER; note = 2'-deoxy-2'-fluoroadenosine-3'-phosphate
  modified_base 15: mod_base = OTHER; note = 2'-O-methyluridine-3'-phosphate
  modified_base 16: mod_base = OTHER; note = 2'-deoxy-2'-fluoroadenosine-3'-phosphate
  modified_base 17: mod_base = OTHER; note = 2'-O-methyluridine-3'-phosphate
  modified_base 18: mod_base = OTHER; note = 2'-O-methylguanosine-3'-phosphate
  modified_base 19: mod_base = OTHER; note = 2'-O-methylguanosine-3'-phosphate
  modified_base 20: mod_base = OTHER; note = 2'-O-methylguanosine-3'-phosphate
  modified_base 21: mod_base = OTHER; note = 2'-O-methyladenosine-3'-phosphate
  modified_base 22: mod_base = OTHER; note = 2'-O-methyluridine-3'-phosphate
  modified_base 23: mod_base = OTHER; note = 2'-O-methyladenosine
ttagaacagttaaatatgggata

SEQ ID NO: 5290 - RNA, 23 nt, synthetic construct
  source 1..23: mol_type = other RNA
  modified_base 1: mod_base = OTHER; note = 2'-O-methyluridine-3'-phosphate 5'-(E)-Vinylphosphonate
  modified_base 2: mod_base = OTHER; note = 2'-deoxy-2'-fluoroadenosine-3'-phosphate
  modified_base 3: mod_base = OTHER; note = 2'-O-methyluridine-3'-phosphate
  modified_base 4: mod_base = OTHER; note = 2'-O-methyladenosine-3'-phosphate
  modified_base 5: mod_base = OTHER; note = 2'-O-methylguanosine-3'-phosphate
  modified_base 6: mod_base = OTHER; note = 2'-deoxy-2'-fluoroadenosine-3'-phosphate
  modified_base 7: mod_base = OTHER; note = 2'-O-methyladenosine-3'-phosphate
  modified_base 8: mod_base = OTHER; note = 2'-O-methylcytidine-3'-phosphate
  modified_base 9: mod_base = OTHER; note = 2'-O-methyladenosine-3'-phosphate
  modified_base 10: mod_base = OTHER; note = 2'-O-methylguanosine-3'-phosphate
  modified_base 11: mod_base = OTHER; note = 2'-O-methyluridine-3'-phosphate
  modified_base 12: mod_base = OTHER; note = 2'-O-methyluridine-3'-phosphate
  modified_base 13: mod_base = OTHER; note = 2'-O-methyladenosine-3'-phosphate
  modified_base 14: mod_base = OTHER; note = 2'-deoxy-2'-fluoroadenosine-3'-phosphate
  modified_base 15: mod_base = OTHER; note = 2'-O-methyladenosine-3'-phosphate
  modified_base 16: mod_base = OTHER; note = 2'-deoxy-2'-fluorouridine-3'-phosphate
  modified_base 17: mod_base = OTHER; note = 2'-O-methyladenosine-3'-phosphate
  modified_base 18: mod_base = OTHER; note = 2'-O-methyluridine-3'-phosphate
  modified_base 19: mod_base = OTHER; note = 2'-O-methylguanosine-3'-phosphate
  modified_base 20: mod_base = OTHER; note = 2'-O-methylguanosine-3'-phosphate
  modified_base 21: mod_base = OTHER; note = 2'-O-methylguanosine-3'-phosphate
  modified_base 22: mod_base = OTHER; note = 2'-O-methyladenosine-3'-phosphate
  modified_base 23: mod_base = OTHER; note = 2'-O-methyluridine
tatagaacagttaaatatgggat

SEQ ID NO: 5291 - RNA, 23 nt, synthetic construct
  source 1..23: mol_type = other RNA
  modified_base 1: mod_base = OTHER; note = 2'-O-methyluridine-3'-phosphate 5'-(E)-Vinylphosphonate
  modified_base 2: mod_base = OTHER; note = 2'-deoxy-2'-fluorouridine-3'-phosphate
  modified_base 3: mod_base = OTHER; note = 2'-O-methyladenosine-3'-phosphate
  modified_base 4: mod_base = OTHER; note = 2'-O-methyluridine-3'-phosphate
  modified_base 5: mod_base = OTHER; note = 2'-O-methyladenosine-3'-phosphate
  modified_base 6: mod_base = OTHER; note = 2'-deoxy-2'-fluoroguanosine-3'-phosphate
  modified_base 7: mod_base = OTHER; note = 2'-O-methyladenosine-3'-phosphate
  modified_base 8: mod_base = OTHER; note = 2'-O-methyladenosine-3'-phosphate
  modified_base 9: mod_base = OTHER; note = 2'-O-methylcytidine-3'-phosphate
  modified_base 10: mod_base = OTHER; note = 2'-O-methyladenosine-3'-phosphate
  modified_base 11: mod_base = OTHER; note = 2'-O-methylguanosine-3'-phosphate
  modified_base 12: mod_base = OTHER; note = 2'-O-methyluridine-3'-phosphate
  modified_base 13: mod_base = OTHER; note = 2'-O-methyluridine-3'-phosphate
  modified_base 14: mod_base = OTHER; note = 2'-deoxy-2'-fluoroadenosine-3'-phosphate
  modified_base 15: mod_base = OTHER; note = 2'-O-methyladenosine-3'-phosphate
  modified_base 16: mod_base = OTHER; note = 2'-deoxy-2'-fluoroadenosine-3'-phosphate
  modified_base 17: mod_base = OTHER; note = 2'-O-methyluridine-3'-phosphate
  modified_base 18: mod_base = OTHER; note = 2'-O-methyladenosine-3'-phosphate
  modified_base 19: mod_base = OTHER; note = 2'-O-methyluridine-3'-phosphate
  modified_base 20: mod_base = OTHER; note = 2'-O-methylguanosine-3'-phosphate
  modified_base 21: mod_base = OTHER; note = 2'-O-methylguanosine-3'-phosphate
  modified_base 22: mod_base = OTHER; note = 2'-O-methylguanosine-3'-phosphate
  modified_base 23: mod_base = OTHER; note = 2'-O-methyladenosine
ttatagaacagttaaatatggga

SEQ ID NO: 5292 - RNA, 23 nt, synthetic construct
  source 1..23: mol_type = other RNA
  modified_base 1: mod_base = OTHER; note = 2'-O-methyluridine-3'-phosphate 5'-(E)-Vinylphosphonate
  modified_base 2: mod_base = OTHER; note = 2'-deoxy-2'-fluorouridine-3'-phosphate
  modified_base 3: mod_base = OTHER; note = 2'-O-methyluridine-3'-phosphate
  modified_base 4: mod_base = OTHER; note = 2'-O-methyladenosine-3'-phosphate
  modified_base 5: mod_base = OTHER; note = 2'-O-methyluridine-3'-phosphate
  modified_base 6: mod_base = OTHER; note = 2'-deoxy-2'-fluoroadenosine-3'-phosphate
  modified_base 7: mod_base = OTHER; note = 2'-O-methylguanosine-3'-phosphate
  modified_base 8: mod_base = OTHER; note = 2'-O-methyladenosine-3'-phosphate
  modified_base 9: mod_base = OTHER; note = 2'-O-methyladenosine-3'-phosphate
  modified_base 10: mod_base = OTHER; note = 2'-O-methylcytidine-3'-phosphate
  modified_base 11: mod_base = OTHER; note = 2'-O-methyladenosine-3'-phosphate
  modified_base 12: mod_base = OTHER; note = 2'-O-methylguanosine-3'-phosphate
  modified_base 13: mod_base = OTHER; note = 2'-O-methyluridine-3'-phosphate
  modified_base 14: mod_base = OTHER; note = 2'-deoxy-2'-fluorouridine-3'-phosphate
  modified_base 15: mod_base = OTHER; note = 2'-O-methyladenosine-3'-phosphate
  modified_base 16: mod_base = OTHER; note = 2'-deoxy-2'-fluoroadenosine-3'-phosphate
  modified_base 17: mod_base = OTHER; note = 2'-O-methyladenosine-3'-phosphate
  modified_base 18: mod_base = OTHER; note = 2'-O-methyluridine-3'-phosphate
  modified_base 19: mod_base = OTHER; note = 2'-O-methyladenosine-3'-phosphate
  modified_base 20: mod_base = OTHER; note = 2'-O-methyluridine-3'-phosphate
  modified_base 21: mod_base = OTHER; note = 2'-O-methylguanosine-3'-phosphate
  modified_base 22: mod_base = OTHER; note = 2'-O-methylguanosine-3'-phosphate
  modified_base 23: mod_base = OTHER; note = 2'-O-methylguanosine
tttatagaacagttaaatatggg

SEQ ID NO: 5293 - RNA, 23 nt, synthetic construct
  source 1..23: mol_type = other RNA
  modified_base 1: mod_base = OTHER; note = 2'-O-methyluridine-3'-phosphate 5'-(E)-Vinylphosphonate
  modified_base 2: mod_base = OTHER; note = 2'-deoxy-2'-fluorocytidine-3'-phosphate
  modified_base 3: mod_base = OTHER; note = 2'-O-methyluridine-3'-phosphate
  modified_base 4: mod_base = OTHER; note = 2'-O-methyluridine-3'-phosphate
  modified_base 5: mod_base = OTHER; note = 2'-O-methyluridine-3'-phosphate
  modified_base 6: mod_base = OTHER; note = 2'-deoxy-2'-fluoroguanosine-3'-phosphate
  modified_base 7: mod_base = OTHER; note = 2'-O-methylcytidine-3'-phosphate
  modified_base 8: mod_base = OTHER; note = 2'-O-methyluridine-3'-phosphate
  modified_base 9: mod_base = OTHER; note = 2'-O-methyluridine-3'-phosphate
  modified_base 10: mod_base = OTHER; note = 2'-O-methyluridine-3'-phosphate
  modified_base 11: mod_base = OTHER; note = 2'-O-methyladenosine-3'-phosphate
  modified_base 12: mod_base = OTHER; note = 2'-O-methyluridine-3'-phosphate
  modified_base 13: mod_base = OTHER; note = 2'-O-methyladenosine-3'-phosphate
  modified_base 14: mod_base = OTHER; note = 2'-deoxy-2'-fluoroguanosine-3'-phosphate
  modified_base 15: mod_base = OTHER; note = 2'-O-methyladenosine-3'-phosphate
  modified_base 16: mod_base = OTHER; note = 2'-deoxy-2'-fluoroadenosine-3'-phosphate
  modified_base 17: mod_base = OTHER; note = 2'-O-methylcytidine-3'-phosphate
  modified_base 18: mod_base = OTHER; note = 2'-O-methyladenosine-3'-phosphate
  modified_base 19: mod_base = OTHER; note = 2'-O-methylguanosine-3'-phosphate
  modified_base 20: mod_base = OTHER; note = 2'-O-methyluridine-3'-phosphate
  modified_base 21: mod_base = OTHER; note = 2'-O-methyluridine-3'-phosphate
  modified_base 22: mod_base = OTHER; note = 2'-O-methyladenosine-3'-phosphate
  modified_base 23: mod_base = OTHER; note = 2'-O-methyladenosine
tctttgctttatagaacagttaa

SEQ ID NO: 5294 - RNA, 23 nt, synthetic construct
  source 1..23: mol_type = other RNA
  modified_base 1: mod_base = OTHER; note = 2'-O-methyluridine-3'-phosphate 5'-(E)-Vinylphosphonate
  modified_base 2: mod_base = OTHER; note = 2'-deoxy-2'-fluoroguanosine-3'-phosphate
  modified_base 3: mod_base = OTHER; note = 2'-O-methylcytidine-3'-phosphate
  modified_base 4: mod_base = OTHER; note = 2'-O-methyluridine-3'-phosphate
  modified_base 5: mod_base = OTHER; note = 2'-O-methyluridine-3'-phosphate
  modified_base 6: mod_base = OTHER; note = 2'-deoxy-2'-fluorouridine-3'-phosphate
  modified_base 7: mod_base = OTHER; note = 2'-O-methylguanosine-3'-phosphate
  modified_base 8: mod_base = OTHER; note = 2'-O-methylcytidine-3'-phosphate
  modified_base 9: mod_base = OTHER; note = 2'-O-methyluridine-3'-phosphate
  modified_base 10: mod_base = OTHER; note = 2'-O-methyluridine-3'-phosphate
  modified_base 11: mod_base = OTHER; note = 2'-O-methyluridine-3'-phosphate
  modified_base 12: mod_base = OTHER; note = 2'-O-methyladenosine-3'-phosphate
  modified_base 13: mod_base = OTHER; note = 2'-O-methyluridine-3'-phosphate
  modified_base 14: mod_base = OTHER; note = 2'-deoxy-2'-fluoroadenosine-3'-phosphate
  modified_base 15: mod_base = OTHER; note = 2'-O-methylguanosine-3'-phosphate
  modified_base 16: mod_base = OTHER; note = 2'-deoxy-2'-fluoroadenosine-3'-phosphate
  modified_base 17: mod_base = OTHER; note = 2'-O-methyladenosine-3'-phosphate
  modified_base 18: mod_base = OTHER; note = 2'-O-methylcytidine-3'-phosphate
  modified_base 19: mod_base = OTHER; note = 2'-O-methyladenosine-3'-phosphate
  modified_base 20: mod_base = OTHER; note = 2'-O-methylguanosine-3'-phosphate
  modified_base 21: mod_base = OTHER; note = 2'-O-methyluridine-3'-phosphate
  modified_base 22: mod_base = OTHER; note = 2'-O-methyluridine-3'-phosphate
  modified_base 23: mod_base = OTHER; note = 2'-O-methyladenosine
tgctttgctttatagaacagtta

SEQ ID NO: 5295 - RNA, 23 nt, synthetic construct
  source 1..23: mol_type = other RNA
  modified_base 1: mod_base = OTHER; note = 2'-O-methyluridine-3'-phosphate 5'-(E)-Vinylphosphonate
  modified_base 2: mod_base = OTHER; note = 2'-deoxy-2'-fluorouridine-3'-phosphate
  modified_base 3: mod_base = OTHER; note = 2'-O-methylguanosine-3'-phosphate
  modified_base 4: mod_base = OTHER; note = 2'-O-methylcytidine-3'-phosphate
  modified_base 5: mod_base = OTHER; note = 2'-O-methyluridine-3'-phosphate
  modified_base 6: mod_base = OTHER; note = 2'-deoxy-2'-fluorouridine-3'-phosphate
  modified_base 7: mod_base = OTHER; note = 2'-O-methyluridine-3'-phosphate
  modified_base 8: mod_base = OTHER; note = 2'-O-methylguanosine-3'-phosphate
  modified_base 9: mod_base = OTHER; note = 2'-O-methylcytidine-3'-phosphate
  modified_base 10: mod_base = OTHER; note = 2'-O-methyluridine-3'-phosphate
  modified_base 11: mod_base = OTHER; note = 2'-O-methyluridine-3'-phosphate
  modified_base 12: mod_base = OTHER; note = 2'-O-methyluridine-3'-phosphate
  modified_base 13: mod_base = OTHER; note = 2'-O-methyladenosine-3'-phosphate
  modified_base 14: mod_base = OTHER; note = 2'-deoxy-2'-fluorouridine-3'-phosphate
  modified_base 15: mod_base = OTHER; note = 2'-O-methyladenosine-3'-phosphate
  modified_base 16: mod_base = OTHER; note = 2'-deoxy-2'-fluoroguanosine-3'-phosphate
  modified_base 17: mod_base = OTHER; note = 2'-O-methyladenosine-3'-phosphate
  modified_base 18: mod_base = OTHER; note = 2'-O-methyladenosine-3'-phosphate
  modified_base 19: mod_base = OTHER; note = 2'-O-methylcytidine-3'-phosphate
  modified_base 20: mod_base = OTHER; note = 2'-O-methyladenosine-3'-phosphate
  modified_base 21: mod_base = OTHER; note = 2'-O-methylguanosine-3'-phosphate
  modified_base 22: mod_base = OTHER; note = 2'-O-methyluridine-3'-phosphate
  modified_base 23: mod_base = OTHER; note = 2'-O-methyluridine
ttgctttgctttatagaacagtt

SEQ ID NO: 5296 - RNA, 23 nt, synthetic construct
  source 1..23: mol_type = other RNA
  modified_base 1: mod_base = OTHER; note = 2'-O-methyluridine-3'-phosphate 5'-(E)-Vinylphosphonate
  modified_base 2: mod_base = OTHER; note = 2'-deoxy-2'-fluoroguanosine-3'-phosphate
  modified_base 3: mod_base = OTHER; note = 2'-O-methyluridine-3'-phosphate
  modified_base 4: mod_base = OTHER; note = 2'-O-methylguanosine-3'-phosphate
  modified_base 5: mod_base = OTHER; note = 2'-O-methylcytidine-3'-phosphate
  modified_base 6: mod_base = OTHER; note = 2'-deoxy-2'-fluorouridine-3'-phosphate
  modified_base 7: mod_base = OTHER; note = 2'-O-methyluridine-3'-phosphate
  modified_base 8: mod_base = OTHER; note = 2'-O-methyluridine-3'-phosphate
  modified_base 9: mod_base = OTHER; note = 2'-O-methylguanosine-3'-phosphate
  modified_base 10: mod_base = OTHER; note = 2'-O-methylcytidine-3'-phosphate
  modified_base 11: mod_base = OTHER; note = 2'-O-methyluridine-3'-phosphate
  modified_base 12: mod_base = OTHER; note = 2'-O-methyluridine-3'-phosphate
  modified_base 13: mod_base = OTHER; note = 2'-O-methyluridine-3'-phosphate
  modified_base 14: mod_base = OTHER; note = 2'-deoxy-2'-fluoroadenosine-3'-phosphate
  modified_base 15: mod_base = OTHER; note = 2'-O-methyluridine-3'-phosphate
  modified_base 16: mod_base = OTHER; note = 2'-deoxy-2'-fluoroadenosine-3'-phosphate
  modified_base 17: mod_base = OTHER; note = 2'-O-methylguanosine-3'-phosphate
  modified_base 18: mod_base = OTHER; note = 2'-O-methyladenosine-3'-phosphate
  modified_base 19: mod_base = OTHER; note = 2'-O-methyladenosine-3'-phosphate
  modified_base 20: mod_base = OTHER; note = 2'-O-methylcytidine-3'-phosphate
  modified_base 21: mod_base = OTHER; note = 2'-O-methyladenosine-3'-phosphate
  modified_base 22: mod_base = OTHER; note = 2'-O-methylguanosine-3'-phosphate
  modified_base 23: mod_base = OTHER; note = 2'-O-methyluridine
tgtgctttgctttatagaacagt

SEQ ID NO: 5297 - RNA, 23 nt, synthetic construct
  source 1..23: mol_type = other RNA
  modified_base 1: mod_base = OTHER; note = 2'-O-methyluridine-3'-phosphate 5'-(E)-Vinylphosphonate
  modified_base 2: mod_base = OTHER; note = 2'-deoxy-2'-fluorouridine-3'-phosphate
  modified_base 3: mod_base = OTHER; note = 2'-O-methylguanosine-3'-phosphate
  modified_base 4: mod_base = OTHER; note = 2'-O-methyluridine-3'-phosphate
  modified_base 5: mod_base = OTHER; note = 2'-O-methylguanosine-3'-phosphate
  modified_base 6: mod_base = OTHER; note = 2'-deoxy-2'-fluorocytidine-3'-phosphate
  modified_base 7: mod_base = OTHER; note = 2'-O-methyluridine-3'-phosphate
  modified_base 8: mod_base = OTHER; note = 2'-O-methyluridine-3'-phosphate
  modified_base 9: mod_base = OTHER; note = 2'-O-methyluridine-3'-phosphate
  modified_base 10: mod_base = OTHER; note = 2'-O-methylguanosine-3'-phosphate
  modified_base 11: mod_base = OTHER; note = 2'-O-methylcytidine-3'-phosphate
  modified_base 12: mod_base = OTHER; note = 2'-O-methyluridine-3'-phosphate
  modified_base 13: mod_base = OTHER; note = 2'-O-methyluridine-3'-phosphate
  modified_base 14: mod_base = OTHER; note = 2'-deoxy-2'-fluorouridine-3'-phosphate
  modified_base 15: mod_base = OTHER; note = 2'-O-methyladenosine-3'-phosphate
  modified_base 16: mod_base = OTHER; note = 2'-deoxy-2'-fluorouridine-3'-phosphate
  modified_base 17: mod_base = OTHER; note = 2'-O-methyladenosine-3'-phosphate
  modified_base 18: mod_base = OTHER; note = 2'-O-methylguanosine-3'-phosphate
  modified_base 19: mod_base = OTHER; note = 2'-O-methyladenosine-3'-phosphate
  modified_base 20: mod_base = OTHER; note = 2'-O-methyladenosine-3'-phosphate
  modified_base 21: mod_base = OTHER; note = 2'-O-methylcytidine-3'-phosphate
  modified_base 22: mod_base = OTHER; note = 2'-O-methyladenosine-3'-phosphate
  modified_base 23: mod_base = OTHER; note = 2'-O-methylguanosine
ttgtgctttgctttatagaacag

SEQ ID NO: 5298 - RNA, 23 nt, synthetic construct
  source 1..23: mol_type = other RNA
  modified_base 1: mod_base = OTHER; note = 2'-O-methyluridine-3'-phosphate 5'-(E)-Vinylphosphonate
  modified_base 2: mod_base = OTHER; note = 2'-deoxy-2'-fluorocytidine-3'-phosphate
  modified_base 3: mod_base = OTHER; note = 2'-O-methyluridine-3'-phosphate
  modified_base 4: mod_base = OTHER; note = 2'-O-methylguanosine-3'-phosphate
  modified_base 5: mod_base = OTHER; note = 2'-O-methyluridine-3'-phosphate
  modified_base 6: mod_base = OTHER; note = 2'-deoxy-2'-fluoroguanosine-3'-phosphate
  modified_base 7: mod_base = OTHER; note = 2'-O-methylcytidine-3'-phosphate
  modified_base 8: mod_base = OTHER; note = 2'-O-methyluridine-3'-phosphate
  modified_base 9: mod_base = OTHER; note = 2'-O-methyluridine-3'-phosphate
  modified_base 10: mod_base = OTHER; note = 2'-O-methyluridine-3'-phosphate
  modified_base 11: mod_base = OTHER; note = 2'-O-methylguanosine-3'-phosphate
  modified_base 12: mod_base = OTHER; note = 2'-O-methylcytidine-3'-phosphate
  modified_base 13: mod_base = OTHER; note = 2'-O-methyluridine-3'-phosphate
  modified_base 14: mod_base = OTHER; note = 2'-deoxy-2'-fluorouridine-3'-phosphate
  modified_base 15: mod_base = OTHER; note = 2'-O-methyluridine-3'-phosphate
  modified_base 16: mod_base = OTHER; note = 2'-deoxy-2'-fluoroadenosine-3'-phosphate
  modified_base 17: mod_base = OTHER; note = 2'-O-methyluridine-3'-phosphate
  modified_base 18: mod_base = OTHER; note = 2'-O-methyladenosine-3'-phosphate
  modified_base 19: mod_base = OTHER; note = 2'-O-methylguanosine-3'-phosphate
  modified_base 20: mod_base = OTHER; note = 2'-O-methyladenosine-3'-phosphate
  modified_base 21: mod_base = OTHER; note = 2'-O-methyladenosine-3'-phosphate
  modified_base 22: mod_base = OTHER; note = 2'-O-methylcytidine-3'-phosphate
  modified_base 23: mod_base = OTHER; note = 2'-O-methyladenosine
tctgtgctttgctttatagaaca

SEQ ID NO: 5299 - RNA, 23 nt, synthetic construct
  source 1..23: mol_type = other RNA
  modified_base 1: mod_base = OTHER; note = 2'-O-methyluridine-3'-phosphate 5'-(E)-Vinylphosphonate
  modified_base 2: mod_base = OTHER; note = 2'-deoxy-2'-fluoroguanosine-3'-phosphate
  modified_base 3: mod_base = OTHER; note = 2'-O-methylcytidine-3'-phosphate
  modified_base 4: mod_base = OTHER; note = 2'-O-methyluridine-3'-phosphate
  modified_base 5: mod_base = OTHER; note = 2'-O-methylguanosine-3'-phosphate
  modified_base 6: mod_base = OTHER; note = 2'-deoxy-2'-fluorouridine-3'-phosphate
  modified_base 7: mod_base = OTHER; note = 2'-O-methylguanosine-3'-phosphate
  modified_base 8: mod_base = OTHER; note = 2'-O-methylcytidine-3'-phosphate
  modified_base 9: mod_base = OTHER; note = 2'-O-methyluridine-3'-phosphate
  modified_base 10: mod_base = OTHER; note = 2'-O-methyluridine-3'-phosphate
  modified_base 11: mod_base = OTHER; note = 2'-O-methyluridine-3'-phosphate
  modified_base 12: mod_base = OTHER; note = 2'-O-methylguanosine-3'-phosphate
  modified_base 13: mod_base = OTHER; note = 2'-O-methylcytidine-3'-phosphate
  modified_base 14: mod_base = OTHER; note = 2'-deoxy-2'-fluorouridine-3'-phosphate
  modified_base 15: mod_base = OTHER; note = 2'-O-methyluridine-3'-phosphate
  modified_base 16: mod_base = OTHER; note = 2'-deoxy-2'-fluorouridine-3'-phosphate
  modified_base 17: mod_base = OTHER; note = 2'-O-methyladenosine-3'-phosphate
  modified_base 18: mod_base = OTHER; note = 2'-O-methyluridine-3'-phosphate
  modified_base 19: mod_base = OTHER; note = 2'-O-methyladenosine-3'-phosphate
  modified_base 20: mod_base = OTHER; note = 2'-O-methylguanosine-3'-phosphate
  modified_base 21: mod_base = OTHER; note = 2'-O-methyladenosine-3'-phosphate
  modified_base 22: mod_base = OTHER; note = 2'-O-methyladenosine-3'-phosphate
  modified_base 23: mod_base = OTHER; note = 2'-O-methylcytidine
tgctgtgctttgctttatagaac

SEQ ID NO: 5300 - RNA, 23 nt, synthetic construct
  source 1..23: mol_type = other RNA
  modified_base 1: mod_base = OTHER; note = 2'-O-methyluridine-3'-phosphate 5'-(E)-Vinylphosphonate
  modified_base 2: mod_base = OTHER; note = 2'-deoxy-2'-fluoroadenosine-3'-phosphate
  modified_base 3: mod_base = OTHER; note = 2'-O-methylguanosine-3'-phosphate
  modified_base 4: mod_base = OTHER; note = 2'-O-methylcytidine-3'-phosphate
  modified_base 5: mod_base = OTHER; note = 2'-O-methyluridine-3'-phosphate
  modified_base 6: mod_base = OTHER; note = 2'-deoxy-2'-fluoroguanosine-3'-phosphate
  modified_base 7: mod_base = OTHER; note = 2'-O-methyluridine-3'-phosphate
  modified_base 8: mod_base = OTHER; note = 2'-O-methylguanosine-3'-phosphate
  modified_base 9: mod_base = OTHER; note = 2'-O-methylcytidine-3'-phosphate
  modified_base 10: mod_base = OTHER; note = 2'-O-methyluridine-3'-phosphate
  modified_base 11: mod_base = OTHER; note = 2'-O-methyluridine-3'-phosphate
  modified_base 12: mod_base = OTHER; note = 2'-O-methyluridine-3'-phosphate
  modified_base 13: mod_base = OTHER; note = 2'-O-methylguanosine-3'-phosphate
  modified_base 14: mod_base = OTHER; note = 2'-deoxy-2'-fluorocytidine-3'-phosphate
  modified_base 15: mod_base = OTHER; note = 2'-O-methyluridine-3'-phosphate
  modified_base 16: mod_base = OTHER; note = 2'-deoxy-2'-fluorouridine-3'-phosphate
  modified_base 17: mod_base = OTHER; note = 2'-O-methyluridine-3'-phosphate
  modified_base 18: mod_base = OTHER; note = 2'-O-methyladenosine-3'-phosphate
  modified_base 19: mod_base = OTHER; note = 2'-O-methyluridine-3'-phosphate
  modified_base 20: mod_base = OTHER; note = 2'-O-methyladenosine-3'-phosphate
  modified_base 21: mod_base = OTHER; note = 2'-O-methylguanosine-3'-phosphate
  modified_base 22: mod_base = OTHER; note = 2'-O-methyladenosine-3'-phosphate
  modified_base 23: mod_base = OTHER; note = 2'-O-methyladenosine
tagctgtgctttgctttatagaa

SEQ ID NO: 5301 - RNA, 23 nt, synthetic construct
  source 1..23: mol_type = other RNA
  modified_base 1: mod_base = OTHER; note = 2'-O-methyluridine-3'-phosphate 5'-(E)-Vinylphosphonate
  modified_base 2: mod_base = OTHER; note = 2'-deoxy-2'-fluoroadenosine-3'-phosphate
  modified_base 3: mod_base = OTHER; note = 2'-O-methyladenosine-3'-phosphate
  modified_base 4: mod_base = OTHER; note = 2'-O-methylguanosine-3'-phosphate
  modified_base 5: mod_base = OTHER; note = 2'-O-methylcytidine-3'-phosphate
  modified_base 6: mod_base = OTHER; note = 2'-deoxy-2'-fluorouridine-3'-phosphate
  modified_base 7: mod_base = OTHER; note = 2'-O-methylguanosine-3'-phosphate
  modified_base 8: mod_base = OTHER; note = 2'-O-methyluridine-3'-phosphate
  modified_base 9: mod_base = OTHER; note = 2'-O-methylguanosine-3'-phosphate
  modified_base 10: mod_base = OTHER; note = 2'-O-methylcytidine-3'-phosphate
  modified_base 11: mod_base = OTHER; note = 2'-O-methyluridine-3'-phosphate
  modified_base 12: mod_base = OTHER; note = 2'-O-methyluridine-3'-phosphate
  modified_base 13: mod_base = OTHER; note = 2'-O-methyluridine-3'-phosphate
  modified_base 14: mod_base = OTHER; note = 2'-deoxy-2'-fluoroguanosine-3'-phosphate
  modified_base 15: mod_base = OTHER; note = 2'-O-methylcytidine-3'-phosphate
  modified_base 16: mod_base = OTHER; note = 2'-deoxy-2'-fluorouridine-3'-phosphate
  modified_base 17: mod_base = OTHER; note = 2'-O-methyluridine-3'-phosphate
  modified_base 18: mod_base = OTHER; note = 2'-O-methyluridine-3'-phosphate
  modified_base 19: mod_base = OTHER; note = 2'-O-methyladenosine-3'-phosphate
  modified_base 20: mod_base = OTHER; note = 2'-O-methyluridine-3'-phosphate
  modified_base 21: mod_base = OTHER; note = 2'-O-methyladenosine-3'-phosphate
  modified_base 22: mod_base = OTHER; note = 2'-O-methylguanosine-3'-phosphate
  modified_base 23: mod_base = OTHER; note = 2'-O-methyladenosine
taagctgtgctttgctttataga

SEQ ID NO: 5302 - RNA, 23 nt, synthetic construct
  source 1..23: mol_type = other RNA
  modified_base 1: mod_base = OTHER; note = 2'-O-methyluridine-3'-phosphate 5'-(E)-Vinylphosphonate
  modified_base 2: mod_base = OTHER; note = 2'-deoxy-2'-fluoroguanosine-3'-phosphate
  modified_base 3: mod_base = OTHER; note = 2'-O-methyladenosine-3'-phosphate
  modified_base 4: mod_base = OTHER; note = 2'-O-methyladenosine-3'-phosphate
  modified_base 5: mod_base = OTHER; note = 2'-O-methylcytidine-3'-phosphate
  modified_base 6: mod_base = OTHER; note = 2'-deoxy-2'-fluoroguanosine-3'-phosphate
  modified_base 7: mod_base = OTHER; note = 2'-O-methylcytidine-3'-phosphate
  modified_base 8: mod_base = OTHER; note = 2'-O-methyluridine-3'-phosphate
  modified_base 9: mod_base = OTHER; note = 2'-O-methyladenosine-3'-phosphate
  modified_base 10: mod_base = OTHER; note = 2'-O-methyluridine-3'-phosphate
  modified_base 11: mod_base = OTHER; note = 2'-O-methyluridine-3'-phosphate
  modified_base 12: mod_base = OTHER; note = 2'-O-methyladenosine-3'-phosphate
  modified_base 13: mod_base = OTHER; note = 2'-O-methylcytidine-3'-phosphate
  modified_base 14: mod_base = OTHER; note = 2'-deoxy-2'-fluorocytidine-3'-phosphate
  modified_base 15: mod_base = OTHER; note = 2'-O-methylcytidine-3'-phosphate
  modified_base 16: mod_base = OTHER; note = 2'-deoxy-2'-fluoroadenosine-3'-phosphate
  modified_base 17: mod_base = OTHER; note = 2'-O-methyladenosine-3'-phosphate
  modified_base 18: mod_base = OTHER; note = 2'-O-methylguanosine-3'-phosphate
  modified_base 19: mod_base = OTHER; note = 2'-O-methylcytidine-3'-phosphate
  modified_base 20: mod_base = OTHER; note = 2'-O-methyluridine-3'-phosphate
  modified_base 21: mod_base = OTHER; note = 2'-O-methylguanosine-3'-phosphate
  modified_base 22: mod_base = OTHER; note = 2'-O-methyluridine-3'-phosphate
  modified_base 23: mod_base = OTHER; note = 2'-O-methylguanosine
tgaacgctattacccaagctgtg

SEQ ID NO: 5303 - RNA, 23 nt, synthetic construct
  source 1..23: mol_type = other RNA
  modified_base 1: mod_base = OTHER; note = 2'-O-methyluridine-3'-phosphate 5'-(E)-Vinylphosphonate
  modified_base 2: mod_base = OTHER; note = 2'-deoxy-2'-fluoroadenosine-3'-phosphate
  modified_base 3: mod_base = OTHER; note = 2'-O-methylguanosine-3'-phosphate
  modified_base 4: mod_base = OTHER; note = 2'-O-methyladenosine-3'-phosphate
  modified_base 5: mod_base = OTHER; note = 2'-O-methyladenosine-3'-phosphate
  modified_base 6: mod_base = OTHER; note = 2'-deoxy-2'-fluorocytidine-3'-phosphate
  modified_base 7: mod_base = OTHER; note = 2'-O-methylguanosine-3'-phosphate
  modified_base 8: mod_base = OTHER; note = 2'-O-methylcytidine-3'-phosphate
  modified_base 9: mod_base = OTHER; note = 2'-O-methyluridine-3'-phosphate
  modified_base 10: mod_base = OTHER; note = 2'-O-methyladenosine-3'-phosphate
  modified_base 11: mod_base = OTHER; note = 2'-O-methyluridine-3'-phosphate
  modified_base 12: mod_base = OTHER; note = 2'-O-methyluridine-3'-phosphate
  modified_base 13: mod_base = OTHER; note = 2'-O-methyladenosine-3'-phosphate
  modified_base 14: mod_base = OTHER; note = 2'-deoxy-2'-fluorocytidine-3'-phosphate
  modified_base 15: mod_base = OTHER; note = 2'-O-methylcytidine-3'-phosphate
  modified_base 16: mod_base = OTHER; note = 2'-deoxy-2'-fluorocytidine-3'-phosphate
  modified_base 17: mod_base = OTHER; note = 2'-O-methyladenosine-3'-phosphate
  modified_base 18: mod_base = OTHER; note = 2'-O-methyladenosine-3'-phosphate
  modified_base 19: mod_base = OTHER; note = 2'-O-methylguanosine-3'-phosphate
  modified_base 20: mod_base = OTHER; note = 2'-O-methylcytidine-3'-phosphate
  modified_base 21: mod_base = OTHER; note = 2'-O-methyluridine-3'-phosphate
  modified_base 22: mod_base = OTHER; note = 2'-O-methylguanosine-3'-phosphate
  modified_base 23: mod_base = OTHER; note = 2'-O-methyluridine
tagaacgctattacccaagctgt

SEQ ID NO: 5304 - RNA, 23 nt, synthetic construct
  source 1..23: mol_type = other RNA
  modified_base 1: mod_base = OTHER; note = 2'-O-methyluridine-3'-phosphate 5'-(E)-Vinylphosphonate
  modified_base 2: mod_base = OTHER; note = 2'-deoxy-2'-fluorocytidine-3'-phosphate
  modified_base 3: mod_base = OTHER; note = 2'-O-methyladenosine-3'-phosphate
  modified_base 4: mod_base = OTHER; note = 2'-O-methylguanosine-3'-phosphate
  modified_base 5: mod_base = OTHER; note = 2'-O-methyladenosine-3'-phosphate
  modified_base 6: mod_base = OTHER; note = 2'-deoxy-2'-fluoroadenosine-3'-phosphate
  modified_base 7: mod_base = OTHER; note = 2'-O-methylcytidine-3'-phosphate
  modified_base 8: mod_base = OTHER; note = 2'-O-methylguanosine-3'-phosphate
  modified_base 9: mod_base = OTHER; note = 2'-O-methylcytidine-3'-phosphate
  modified_base 10: mod_base = OTHER; note = 2'-O-methyluridine-3'-phosphate
  modified_base 11: mod_base = OTHER; note = 2'-O-methyladenosine-3'-phosphate
  modified_base 12: mod_base = OTHER; note = 2'-O-methyluridine-3'-phosphate
  modified_base 13: mod_base = OTHER; note = 2'-O-methyluridine-3'-phosphate
  modified_base 14: mod_base = OTHER; note = 2'-deoxy-2'-fluoroadenosine-3'-phosphate
  modified_base 15: mod_base = OTHER; note = 2'-O-methylcytidine-3'-phosphate
  modified_base 16: mod_base = OTHER; note = 2'-deoxy-2'-fluorocytidine-3'-phosphate
  modified_base 17: mod_base = OTHER; note = 2'-O-methylcytidine-3'-phosphate
  modified_base 18: mod_base = OTHER; note = 2'-O-methyladenosine-3'-phosphate
  modified_base 19: mod_base = OTHER; note = 2'-O-methyladenosine-3'-phosphate
  modified_base 20: mod_base = OTHER; note = 2'-O-methylguanosine-3'-phosphate
  modified_base 21: mod_base = OTHER; note = 2'-O-methylcytidine-3'-phosphate
  modified_base 22: mod_base = OTHER; note = 2'-O-methyluridine-3'-phosphate
  modified_base 23: mod_base = OTHER; note = 2'-O-methylguanosine
tcagaacgctattacccaagctg

SEQ ID NO: 5305 - RNA, 23 nt, synthetic construct
  source 1..23: mol_type = other RNA
  modified_base 1: mod_base = OTHER; note = 2'-O-methyluridine-3'-phosphate 5'-(E)-Vinylphosphonate
  modified_base 2: mod_base = OTHER; note = 2'-deoxy-2'-fluorouridine-3'-phosphate
  modified_base 3: mod_base = OTHER; note = 2'-O-methylcytidine-3'-phosphate
  modified_base 4: mod_base = OTHER; note = 2'-O-methyladenosine-3'-phosphate
  modified_base 5: mod_base = OTHER; note = 2'-O-methylguanosine-3'-phosphate
  modified_base 6: mod_base = OTHER; note = 2'-deoxy-2'-fluoroadenosine-3'-phosphate
  modified_base 7: mod_base = OTHER; note = 2'-O-methyladenosine-3'-phosphate
  modified_base 8: mod_base = OTHER; note = 2'-O-methylcytidine-3'-phosphate
  modified_base 9: mod_base = OTHER; note = 2'-O-methylguanosine-3'-phosphate
  modified_base 10: mod_base = OTHER; note = 2'-O-methylcytidine-3'-phosphate
  modified_base 11: mod_base = OTHER; note = 2'-O-methyluridine-3'-phosphate
  modified_base 12: mod_base = OTHER; note = 2'-O-methyladenosine-3'-phosphate
  modified_base 13: mod_base = OTHER; note = 2'-O-methyluridine-3'-phosphate
  modified_base 14: mod_base = OTHER; note = 2'-deoxy-2'-fluorouridine-3'-phosphate
  modified_base 15: mod_base = OTHER; note = 2'-O-methyladenosine-3'-phosphate
  modified_base 16: mod_base = OTHER; note = 2'-deoxy-2'-fluorocytidine-3'-phosphate
  modified_base 17: mod_base = OTHER; note = 2'-O-methylcytidine-3'-phosphate
  modified_base 18: mod_base = OTHER; note = 2'-O-methylcytidine-3'-phosphate
  modified_base 19: mod_base = OTHER; note = 2'-O-methyladenosine-3'-phosphate
  modified_base 20: mod_base = OTHER; note = 2'-O-methyladenosine-3'-phosphate
  modified_base 21: mod_base = OTHER; note = 2'-O-methylguanosine-3'-phosphate
  modified_base 22: mod_base = OTHER; note = 2'-O-methylcytidine-3'-phosphate
  modified_base 23: mod_base = OTHER; note = 2'-O-methyluridine
ttcagaacgctattacccaagct

SEQ ID NO: 5306 - RNA, 23 nt, synthetic construct
  source 1..23: mol_type = other RNA
  modified_base 1: mod_base = OTHER; note = 2'-O-methyluridine-3'-phosphate 5'-(E)-Vinylphosphonate
  modified_base 2: mod_base = OTHER; note = 2'-deoxy-2'-fluorouridine-3'-phosphate
  modified_base 3: mod_base = OTHER; note = 2'-O-methyluridine-3'-phosphate
  modified_base 4: mod_base = OTHER; note = 2'-O-methylcytidine-3'-phosphate
  modified_base 5: mod_base = OTHER; note = 2'-O-methyladenosine-3'-phosphate
  modified_base 6: mod_base = OTHER; note = 2'-deoxy-2'-fluoroguanosine-3'-phosphate
  modified_base 7: mod_base = OTHER; note = 2'-O-methyladenosine-3'-phosphate
  modified_base 8: mod_base = OTHER; note = 2'-O-methyladenosine-3'-phosphate
  modified_base 9: mod_base = OTHER; note = 2'-O-methylcytidine-3'-phosphate
  modified_base 10: mod_base = OTHER; note = 2'-O-methylguanosine-3'-phosphate
  modified_base 11: mod_base = OTHER; note = 2'-O-methylcytidine-3'-phosphate
  modified_base 12: mod_base = OTHER; note = 2'-O-methyluridine-3'-phosphate
  modified_base 13: mod_base = OTHER; note = 2'-O-methyladenosine-3'-phosphate
  modified_base 14: mod_base = OTHER; note = 2'-deoxy-2'-fluorouridine-3'-phosphate
  modified_base 15: mod_base = OTHER; note = 2'-O-methyluridine-3'-phosphate
  modified_base 16: mod_base = OTHER; note = 2'-deoxy-2'-fluoroadenosine-3'-phosphate
  modified_base 17: mod_base = OTHER; note = 2'-O-methylcytidine-3'-phosphate
  modified_base 18: mod_base = OTHER; note = 2'-O-methylcytidine-3'-phosphate
  modified_base 19: mod_base = OTHER; note = 2'-O-methylcytidine-3'-phosphate
  modified_base 20: mod_base = OTHER; note = 2'-O-methyladenosine-3'-phosphate
  modified_base 21: mod_base = OTHER; note = 2'-O-methyladenosine-3'-phosphate
  modified_base 22: mod_base = OTHER; note = 2'-O-methylguanosine-3'-phosphate
  modified_base 23: mod_base = OTHER; note = 2'-O-methylcytidine
tttcagaacgctattacccaagc

SEQ ID NO: 5307 - RNA, 23 nt, synthetic construct
  source 1..23: mol_type = other RNA
  modified_base 1: mod_base = OTHER; note = 2'-O-methyluridine-3'-phosphate 5'-(E)-Vinylphosphonate
  modified_base 2: mod_base = OTHER; note = 2'-deoxy-2'-fluorocytidine-3'-phosphate
  modified_base 3: mod_base = OTHER; note = 2'-O-methyluridine-3'-phosphate
  modified_base 4: mod_base = OTHER; note = 2'-O-methyluridine-3'-phosphate
  modified_base 5: mod_base = OTHER; note = 2'-O-methylcytidine-3'-phosphate
  modified_base 6: mod_base = OTHER; note = 2'-deoxy-2'-fluoroadenosine-3'-phosphate
  modified_base 7: mod_base = OTHER; note = 2'-O-methylguanosine-3'-phosphate
  modified_base 8: mod_base = OTHER; note = 2'-O-methyladenosine-3'-phosphate
  modified_base 9: mod_base = OTHER; note = 2'-O-methyladenosine-3'-phosphate
  modified_base 10: mod_base = OTHER; note = 2'-O-methylcytidine-3'-phosphate
  modified_base 11: mod_base = OTHER; note = 2'-O-methylguanosine-3'-phosphate
  modified_base 12: mod_base = OTHER; note = 2'-O-methylcytidine-3'-phosphate
  modified_base 13: mod_base = OTHER; note = 2'-O-methyluridine-3'-phosphate
  modified_base 14: mod_base = OTHER; note = 2'-deoxy-2'-fluoroadenosine-3'-phosphate
  modified_base 15: mod_base = OTHER; note = 2'-O-methyluridine-3'-phosphate
  modified_base 16: mod_base = OTHER; note = 2'-deoxy-2'-fluorouridine-3'-phosphate
  modified_base 17: mod_base = OTHER; note = 2'-O-methyladenosine-3'-phosphate
  modified_base 18: mod_base = OTHER; note = 2'-O-methylcytidine-3'-phosphate
  modified_base 19: mod_base = OTHER; note = 2'-O-methylcytidine-3'-phosphate
  modified_base 20: mod_base = OTHER; note = 2'-O-methylcytidine-3'-phosphate
  modified_base 21: mod_base = OTHER; note = 2'-O-methyladenosine-3'-phosphate
  modified_base 22: mod_base = OTHER; note = 2'-O-methyladenosine-3'-phosphate
  modified_base 23: mod_base = OTHER; note = 2'-O-methylguanosine
tcttcagaacgctattacccaag

SEQ ID NO: 5308 - RNA, 23 nt, synthetic construct
  source 1..23: mol_type = other RNA
  modified_base 1: mod_base = OTHER; note = 2'-O-methyluridine-3'-phosphate 5'-(E)-Vinylphosphonate
  modified_base 2: mod_base = OTHER; note = 2'-deoxy-2'-fluorocytidine-3'-phosphate
  modified_base 3: mod_base = OTHER; note = 2'-O-methylcytidine-3'-phosphate
  modified_base 4: mod_base = OTHER; note = 2'-O-methyluridine-3'-phosphate
  modified_base 5: mod_base = OTHER; note = 2'-O-methyluridine-3'-phosphate
  modified_base 6: mod_base = OTHER; note = 2'-deoxy-2'-fluorocytidine-3'-phosphate
  modified_base 7: mod_base = OTHER; note = 2'-O-methyladenosine-3'-phosphate
  modified_base 8: mod_base = OTHER; note = 2'-O-methylguanosine-3'-phosphate
  modified_base 9: mod_base = OTHER; note = 2'-O-methyladenosine-3'-phosphate
  modified_base 10: mod_base = OTHER; note = 2'-O-methyladenosine-3'-phosphate
  modified_base 11: mod_base = OTHER; note = 2'-O-methylcytidine-3'-phosphate
  modified_base 12: mod_base = OTHER; note = 2'-O-methylguanosine-3'-phosphate
  modified_base 13: mod_base = OTHER; note = 2'-O-methylcytidine-3'-phosphate
  modified_base 14: mod_base = OTHER; note = 2'-deoxy-2'-fluorouridine-3'-phosphate
  modified_base 15: mod_base = OTHER; note = 2'-O-methyladenosine-3'-phosphate
  modified_base 16: mod_base = OTHER; note = 2'-deoxy-2'-fluorouridine-3'-phosphate
  modified_base 17: mod_base = OTHER; note = 2'-O-methyluridine-3'-phosphate
  modified_base 18: mod_base = OTHER; note = 2'-O-methyladenosine-3'-phosphate
  modified_base 19: mod_base = OTHER; note = 2'-O-methylcytidine-3'-phosphate
  modified_base 20: mod_base = OTHER; note = 2'-O-methylcytidine-3'-phosphate
  modified_base 21: mod_base = OTHER; note = 2'-O-methylcytidine-3'-phosphate
  modified_base 22: mod_base = OTHER; note = 2'-O-methyladenosine-3'-phosphate
  modified_base 23: mod_base = OTHER; note = 2'-O-methyladenosine
tccttcagaacgctattacccaa

SEQ ID NO: 5309 - RNA, 23 nt, synthetic construct
  source 1..23: mol_type = other RNA
  modified_base 1: mod_base = OTHER; note = 2'-O-methyluridine-3'-phosphate 5'-(E)-Vinylphosphonate
  modified_base 2: mod_base = OTHER; note = 2'-deoxy-2'-fluorouridine-3'-phosphate
  modified_base 3: mod_base = OTHER; note = 2'-O-methylcytidine-3'-phosphate
  modified_base 4: mod_base = OTHER; note = 2'-O-methylcytidine-3'-phosphate
  modified_base 5: mod_base = OTHER; note = 2'-O-methyluridine-3'-phosphate
  modified_base 6: mod_base = OTHER; note = 2'-deoxy-2'-fluorouridine-3'-phosphate
  modified_base 7: mod_base = OTHER; note = 2'-O-methylcytidine-3'-phosphate
  modified_base 8: mod_base = OTHER; note = 2'-O-methyladenosine-3'-phosphate
  modified_base 9: mod_base = OTHER; note = 2'-O-methylguanosine-3'-phosphate
  modified_base 10: mod_base = OTHER; note = 2'-O-methyladenosine-3'-phosphate
  modified_base 11: mod_base = OTHER; note = 2'-O-methyladenosine-3'-phosphate
  modified_base 12: mod_base = OTHER; note = 2'-O-methylcytidine-3'-phosphate
  modified_base 13: mod_base = OTHER; note = 2'-O-methylguanosine-3'-phosphate
  modified_base 14: mod_base = OTHER; note = 2'-deoxy-2'-fluorocytidine-3'-phosphate
  modified_base 15: mod_base = OTHER; note = 2'-O-methyluridine-3'-phosphate
  modified_base 16: mod_base = OTHER; note = 2'-deoxy-2'-fluoroadenosine-3'-phosphate
  modified_base 17: mod_base = OTHER; note = 2'-O-methyluridine-3'-phosphate
  modified_base 18: mod_base = OTHER; note = 2'-O-methyluridine-3'-phosphate
  modified_base 19: mod_base = OTHER; note = 2'-O-methyladenosine-3'-phosphate
  modified_base 20: mod_base = OTHER; note = 2'-O-methylcytidine-3'-phosphate
  modified_base 21: mod_base = OTHER; note = 2'-O-methylcytidine-3'-phosphate
  modified_base 22: mod_base = OTHER; note = 2'-O-methylcytidine-3'-phosphate
  modified_base 23: mod_base = OTHER; note = 2'-O-methyladenosine
ttccttcagaacgctattaccca

SEQ ID NO: 5310 - RNA, 23 nt, synthetic construct
  source 1..23: mol_type = other RNA
  modified_base 1: mod_base = OTHER; note = 2'-O-methyluridine-3'-phosphate 5'-(E)-Vinylphosphonate
  modified_base 2: mod_base = OTHER; note = 2'-deoxy-2'-fluoroadenosine-3'-phosphate
  modified_base 3: mod_base = OTHER; note = 2'-O-methyluridine-3'-phosphate
  modified_base 4: mod_base = OTHER; note = 2'-O-methylcytidine-3'-phosphate
  modified_base 5: mod_base = OTHER; note = 2'-O-methylcytidine-3'-phosphate
  modified_base 6: mod_base = OTHER; note = 2'-deoxy-2'-fluorouridine-3'-phosphate
  modified_base 7: mod_base = OTHER; note = 2'-O-methyluridine-3'-phosphate
  modified_base 8: mod_base = OTHER; note = 2'-O-methylcytidine-3'-phosphate
  modified_base 9: mod_base = OTHER; note = 2'-O-methyladenosine-3'-phosphate
  modified_base 10: mod_base = OTHER; note = 2'-O-methylguanosine-3'-phosphate
  modified_base 11: mod_base = OTHER; note = 2'-O-methyladenosine-3'-phosphate
  modified_base 12: mod_base = OTHER; note = 2'-O-methyladenosine-3'-phosphate
  modified_base 13: mod_base = OTHER; note = 2'-O-methylcytidine-3'-phosphate
  modified_base 14: mod_base = OTHER; note = 2'-deoxy-2'-fluoroguanosine-3'-phosphate
  modified_base 15: mod_base = OTHER; note = 2'-O-methylcytidine-3'-phosphate
  modified_base 16: mod_base = OTHER; note = 2'-deoxy-2'-fluorouridine-3'-phosphate
  modified_base 17: mod_base = OTHER; note = 2'-O-methyladenosine-3'-phosphate
  modified_base 18: mod_base = OTHER; note = 2'-O-methyluridine-3'-phosphate
  modified_base 19: mod_base = OTHER; note = 2'-O-methyluridine-3'-phosphate
  modified_base 20: mod_base = OTHER; note = 2'-O-methyladenosine-3'-phosphate
  modified_base 21: mod_base = OTHER; note = 2'-O-methylcytidine-3'-phosphate
  modified_base 22: mod_base = OTHER; note = 2'-O-methylcytidine-3'-phosphate
  modified_base 23: mod_base = OTHER; note = 2'-O-methylcytidine
tatccttcagaacgctattaccc

SEQ ID NO: 5311 - RNA, 23 nt, synthetic construct
  source 1..23: mol_type = other RNA
  modified_base 1: mod_base = OTHER; note = 2'-O-methyluridine-3'-phosphate 5'-(E)-Vinylphosphonate
  modified_base 2: mod_base = OTHER; note = 2'-deoxy-2'-fluorouridine-3'-phosphate
  modified_base 3: mod_base = OTHER; note = 2'-O-methyladenosine-3'-phosphate
  modified_base 4: mod_base = OTHER; note = 2'-O-methyluridine-3'-phosphate
  modified_base 5: mod_base = OTHER; note = 2'-O-methylcytidine-3'-phosphate
  modified_base 6: mod_base = OTHER; note = 2'-deoxy-2'-fluorocytidine-3'-phosphate
  modified_base 7: mod_base = OTHER; note = 2'-O-methyluridine-3'-phosphate
  modified_base 8: mod_base = OTHER; note = 2'-O-methyluridine-3'-phosphate
  modified_base 9: mod_base = OTHER; note = 2'-O-methylcytidine-3'-phosphate
  modified_base 10: mod_base = OTHER; note = 2'-O-methyladenosine-3'-phosphate
  modified_base 11: mod_base = OTHER; note = 2'-O-methylguanosine-3'-phosphate
  modified_base 12: mod_base = OTHER; note = 2'-O-methyladenosine-3'-phosphate
  modified_base 13: mod_base = OTHER; note = 2'-O-methyladenosine-3'-phosphate
  modified_base 14: mod_base = OTHER; note = 2'-deoxy-2'-fluorocytidine-3'-phosphate
  modified_base 15: mod_base = OTHER; note = 2'-O-methylguanosine-3'-phosphate
  modified_base 16: mod_base = OTHER; note = 2'-deoxy-2'-fluorocytidine-3'-phosphate
  modified_base 17: mod_base = OTHER; note = 2'-O-methyluridine-3'-phosphate
  modified_base 18: mod_base = OTHER; note = 2'-O-methyladenosine-3'-phosphate
  modified_base 19: mod_base = OTHER; note = 2'-O-methyluridine-3'-phosphate
  modified_base 20: mod_base = OTHER; note = 2'-O-methyluridine-3'-phosphate
  modified_base 21: mod_base = OTHER; note = 2'-O-methyladenosine-3'-phosphate
  modified_base 22: mod_base = OTHER; note = 2'-O-methylcytidine-3'-phosphate
  modified_base 23: mod_base = OTHER; note = 2'-O-methylcytidine
ttatccttcagaacgctattacc

SEQ ID NO: 5312 - RNA, 23 nt, synthetic construct
  source 1..23: mol_type = other RNA
  modified_base 1: mod_base = OTHER; note = 2'-O-methyluridine-3'-phosphate 5'-(E)-Vinylphosphonate
  modified_base 2: mod_base = OTHER; note = 2'-deoxy-2'-fluoroadenosine-3'-phosphate
  modified_base 3: mod_base = OTHER; note = 2'-O-methyluridine-3'-phosphate
  modified_base 4: mod_base = OTHER; note = 2'-O-methyladenosine-3'-phosphate
  modified_base 5: mod_base = OTHER; note = 2'-O-methyluridine-3'-phosphate
  modified_base 6: mod_base = OTHER; note = 2'-deoxy-2'-fluorocytidine-3'-phosphate
  modified_base 7: mod_base = OTHER; note = 2'-O-methylcytidine-3'-phosphate
  modified_base 8: mod_base = OTHER; note = 2'-O-methyluridine-3'-phosphate
  modified_base 9: mod_base = OTHER; note = 2'-O-methyluridine-3'-phosphate
  modified_base 10: mod_base = OTHER; note = 2'-O-methylcytidine-3'-phosphate
  modified_base 11: mod_base = OTHER; note = 2'-O-methyladenosine-3'-phosphate
  modified_base 12: mod_base = OTHER; note = 2'-O-methylguanosine-3'-phosphate
  modified_base 13: mod_base = OTHER; note = 2'-O-methyladenosine-3'-phosphate
  modified_base 14: mod_base = OTHER; note = 2'-deoxy-2'-fluoroadenosine-3'-phosphate
  modified_base 15: mod_base = OTHER; note = 2'-O-methylcytidine-3'-phosphate
  modified_base 16: mod_base = OTHER; note = 2'-deoxy-2'-fluoroguanosine-3'-phosphate
  modified_base 17: mod_base = OTHER; note = 2'-O-methylcytidine-3'-phosphate
  modified_base 18: mod_base = OTHER; note = 2'-O-methyluridine-3'-phosphate
  modified_base 19: mod_base = OTHER; note = 2'-O-methyladenosine-3'-phosphate
  modified_base 20: mod_base = OTHER; note = 2'-O-methyluridine-3'-phosphate
  modified_base 21: mod_base = OTHER; note = 2'-O-methyluridine-3'-phosphate
  modified_base 22: mod_base = OTHER; note = 2'-O-methyladenosine-3'-phosphate
  modified_base 23: mod_base = OTHER; note = 2'-O-methylcytidine
tatatccttcagaacgctattac

SEQ ID NO: 5313 - RNA, 23 nt, synthetic construct
  source 1..23: mol_type = other RNA
  modified_base 1: mod_base = OTHER; note = 2'-O-methyluridine-3'-phosphate 5'-(E)-Vinylphosphonate
  modified_base 2: mod_base = OTHER; note = 2'-deoxy-2'-fluorouridine-3'-phosphate
  modified_base 3: mod_base = OTHER; note = 2'-O-methyladenosine-3'-phosphate
  modified_base 4: mod_base = OTHER; note = 2'-O-methyluridine-3'-phosphate
  modified_base 5: mod_base = OTHER; note = 2'-O-methyladenosine-3'-phosphate
  modified_base 6: mod_base = OTHER; note = 2'-deoxy-2'-fluorouridine-3'-phosphate
  modified_base 7: mod_base = OTHER; note = 2'-O-methylcytidine-3'-phosphate
  modified_base 8: mod_base = OTHER; note = 2'-O-methylcytidine-3'-phosphate
  modified_base 9: mod_base = OTHER; note = 2'-O-methyluridine-3'-phosphate
  modified_base 10: mod_base = OTHER; note = 2'-O-methyluridine-3'-phosphate
  modified_base 11: mod_base = OTHER; note = 2'-O-methylcytidine-3'-phosphate
  modified_base 12: mod_base = OTHER; note = 2'-O-methyladenosine-3'-phosphate
  modified_base 13: mod_base = OTHER; note = 2'-O-methylguanosine-3'-phosphate
  modified_base 14: mod_base = OTHER; note = 2'-deoxy-2'-fluoroadenosine-3'-phosphate
  modified_base 15: mod_base = OTHER; note = 2'-O-methyladenosine-3'-phosphate
  modified_base 16: mod_base = OTHER; note = 2'-deoxy-2'-fluorocytidine-3'-phosphate
  modified_base 17: mod_base = OTHER; note = 2'-O-methylguanosine-3'-phosphate
  modified_base 18: mod_base = OTHER; note = 2'-O-methylcytidine-3'-phosphate
  modified_base 19: mod_base = OTHER; note = 2'-O-methyluridine-3'-phosphate
  modified_base 20: mod_base = OTHER; note = 2'-O-methyladenosine-3'-phosphate
  modified_base 21: mod_base = OTHER; note = 2'-O-methyluridine-3'-phosphate
  modified_base 22: mod_base = OTHER; note = 2'-O-methyluridine-3'-phosphate
  modified_base 23: mod_base = OTHER; note = 2'-O-methyladenosine
ttatatccttcagaacgctatta

SEQ ID NO: 5314 - RNA, 23 nt, synthetic construct
  source 1..23: mol_type = other RNA
  modified_base 1: mod_base = OTHER; note = 2'-O-methyluridine-3'-phosphate 5'-(E)-Vinylphosphonate
  modified_base 2: mod_base = OTHER; note = 2'-deoxy-2'-fluoroguanosine-3'-phosphate
  modified_base 3: mod_base = OTHER; note = 2'-O-methyluridine-3'-phosphate
  modified_base 4: mod_base = OTHER; note = 2'-O-methyladenosine-3'-phosphate
  modified_base 5: mod_base = OTHER; note = 2'-O-methyluridine-3'-phosphate
  modified_base 6: mod_base = OTHER; note = 2'-deoxy-2'-fluoroadenosine-3'-phosphate
  modified_base 7: mod_base = OTHER; note = 2'-O-methyluridine-3'-phosphate
  modified_base 8: mod_base = OTHER; note = 2'-O-methylcytidine-3'-phosphate
  modified_base 9: mod_base = OTHER; note = 2'-O-methylcytidine-3'-phosphate
  modified_base 10: mod_base = OTHER; note = 2'-O-methyluridine-3'-phosphate
  modified_base 11: mod_base = OTHER; note = 2'-O-methyluridine-3'-phosphate
  modified_base 12: mod_base = OTHER; note = 2'-O-methylcytidine-3'-phosphate
  modified_base 13: mod_base = OTHER; note = 2'-O-methyladenosine-3'-phosphate
  modified_base 14: mod_base = OTHER; note = 2'-deoxy-2'-fluoroguanosine-3'-phosphate
  modified_base 15: mod_base = OTHER; note = 2'-O-methyladenosine-3'-phosphate
  modified_base 16: mod_base = OTHER; note = 2'-deoxy-2'-fluoroadenosine-3'-phosphate
  modified_base 17: mod_base = OTHER; note = 2'-O-methylcytidine-3'-phosphate
  modified_base 18: mod_base = OTHER; note = 2'-O-methylguanosine-3'-phosphate
  modified_base 19: mod_base = OTHER; note = 2'-O-methylcytidine-3'-phosphate
  modified_base 20: mod_base = OTHER; note = 2'-O-methyluridine-3'-phosphate
  modified_base 21: mod_base = OTHER; note = 2'-O-methyladenosine-3'-phosphate
  modified_base 22: mod_base = OTHER; note = 2'-O-methyluridine-3'-phosphate
  modified_base 23: mod_base = OTHER; note = 2'-O-methyluridine
tgtatatccttcagaacgctatt

SEQ ID NO: 5315 - RNA, 23 nt, synthetic construct
  source 1..23: mol_type = other RNA
  modified_base 1: mod_base = OTHER; note = 2'-O-methyluridine-3'-phosphate 5'-(E)-Vinylphosphonate
  modified_base 2: mod_base = OTHER; note = 2'-deoxy-2'-fluoroadenosine-3'-phosphate
  modified_base 3: mod_base = OTHER; note = 2'-O-methylguanosine-3'-phosphate
  modified_base 4: mod_base = OTHER; note = 2'-O-methyluridine-3'-phosphate
  modified_base 5: mod_base = OTHER; note = 2'-O-methyladenosine-3'-phosphate
  modified_base 6: mod_base = OTHER; note = 2'-deoxy-2'-fluorouridine-3'-phosphate
  modified_base 7: mod_base = OTHER; note = 2'-O-methyladenosine-3'-phosphate
  modified_base 8: mod_base = OTHER; note = 2'-O-methyluridine-3'-phosphate
  modified_base 9: mod_base = OTHER; note = 2'-O-methylcytidine-3'-phosphate
  modified_base 10: mod_base = OTHER; note = 2'-O-methylcytidine-3'-phosphate
  modified_base 11: mod_base = OTHER; note = 2'-O-methyluridine-3'-phosphate
  modified_base 12: mod_base = OTHER; note = 2'-O-methyluridine-3'-phosphate
  modified_base 13: mod_base = OTHER; note = 2'-O-methylcytidine-3'-phosphate
  modified_base 14: mod_base = OTHER; note = 2'-deoxy-2'-fluoroadenosine-3'-phosphate
  modified_base 15: mod_base = OTHER; note = 2'-O-methylguanosine-3'-phosphate
  modified_base 16: mod_base = OTHER; note = 2'-deoxy-2'-fluoroadenosine-3'-phosphate
  modified_base 17: mod_base = OTHER; note = 2'-O-methyladenosine-3'-phosphate
  modified_base 18: mod_base = OTHER; note = 2'-O-methylcytidine-3'-phosphate
  modified_base 19: mod_base = OTHER; note = 2'-O-methylguanosine-3'-phosphate
  modified_base 20: mod_base = OTHER; note = 2'-O-methylcytidine-3'-phosphate
  modified_base 21: mod_base = OTHER; note = 2'-O-methyluridine-3'-phosphate
  modified_base 22: mod_base = OTHER; note = 2'-O-methyladenosine-3'-phosphate
  modified_base 23: mod_base = OTHER; note = 2'-O-methyluridine
tagtatatccttcagaacgctat

SEQ ID NO: 5316 - RNA, 23 nt, synthetic construct
  source 1..23: mol_type = other RNA
  modified_base 1: mod_base = OTHER; note = 2'-O-methyluridine-3'-phosphate 5'-(E)-Vinylphosphonate
  modified_base 2: mod_base = OTHER; note = 2'-deoxy-2'-fluoroadenosine-3'-phosphate
  modified_base 3: mod_base = OTHER; note = 2'-O-methyladenosine-3'-phosphate
  modified_base 4: mod_base = OTHER; note = 2'-O-methylguanosine-3'-phosphate
  modified_base 5: mod_base = OTHER; note = 2'-O-methyluridine-3'-phosphate
  modified_base 6: mod_base = OTHER; note = 2'-deoxy-2'-fluoroadenosine-3'-phosphate
  modified_base 7: mod_base = OTHER; note = 2'-O-methyluridine-3'-phosphate
  modified_base 8: mod_base = OTHER; note = 2'-O-methyladenosine-3'-phosphate
  modified_base 9: mod_base = OTHER; note = 2'-O-methyluridine-3'-phosphate
  modified_base 10: mod_base = OTHER; note = 2'-O-methylcytidine-3'-phosphate
  modified_base 11: mod_base = OTHER; note = 2'-O-methylcytidine-3'-phosphate
  modified_base 12: mod_base = OTHER; note = 2'-O-methyluridine-3'-phosphate
  modified_base 13: mod_base = OTHER; note = 2'-O-methyluridine-3'-phosphate
  modified_base 14: mod_base = OTHER; note = 2'-deoxy-2'-fluorocytidine-3'-phosphate
  modified_base 15: mod_base = OTHER; note = 2'-O-methyladenosine-3'-phosphate
  modified_base 16: mod_base = OTHER; note = 2'-deoxy-2'-fluoroguanosine-3'-phosphate
  modified_base 17: mod_base = OTHER; note = 2'-O-methyladenosine-3'-phosphate
  modified_base 18: mod_base = OTHER; note = 2'-O-methyladenosine-3'-phosphate
  modified_base 19: mod_base = OTHER; note = 2'-O-methylcytidine-3'-phosphate
  modified_base 20: mod_base = OTHER; note = 2'-O-methylguanosine-3'-phosphate
  modified_base 21: mod_base = OTHER; note = 2'-O-methylcytidine-3'-phosphate
  modified_base 22: mod_base = OTHER; note = 2'-O-methyluridine-3'-phosphate
  modified_base 23: mod_base = OTHER; note = 2'-O-methyladenosine
taagtatatccttcagaacgcta

SEQ ID NO: 5317 - RNA, 23 nt, synthetic construct
  source 1..23: mol_type = other RNA
  modified_base 1: mod_base = OTHER; note = 2'-O-methyluridine-3'-phosphate 5'-(E)-Vinylphosphonate
  modified_base 2: mod_base = OTHER; note = 2'-deoxy-2'-fluoroguanosine-3'-phosphate
  modified_base 3: mod_base = OTHER; note = 2'-O-methyladenosine-3'-phosphate
  modified_base 4: mod_base = OTHER; note = 2'-O-methyladenosine-3'-phosphate
  modified_base 5: mod_base = OTHER; note = 2'-O-methylguanosine-3'-phosphate
  modified_base 6: mod_base = OTHER; note = 2'-deoxy-2'-fluorouridine-3'-phosphate
  modified_base 7: mod_base = OTHER; note = 2'-O-methyladenosine-3'-phosphate
  modified_base 8: mod_base = OTHER; note = 2'-O-methyluridine-3'-phosphate
  modified_base 9: mod_base = OTHER; note = 2'-O-methyladenosine-3'-phosphate
  modified_base 10: mod_base = OTHER; note = 2'-O-methyluridine-3'-phosphate
  modified_base 11: mod_base = OTHER; note = 2'-O-methylcytidine-3'-phosphate
  modified_base 12: mod_base = OTHER; note = 2'-O-methylcytidine-3'-phosphate
  modified_base 13: mod_base = OTHER; note = 2'-O-methyluridine-3'-phosphate
  modified_base 14: mod_base = OTHER; note = 2'-deoxy-2'-fluorouridine-3'-phosphate
  modified_base 15: mod_base = OTHER; note = 2'-O-methylcytidine-3'-phosphate
  modified_base 16: mod_base = OTHER; note = 2'-deoxy-2'-fluoroadenosine-3'-phosphate
  modified_base 17: mod_base = OTHER; note = 2'-O-methylguanosine-3'-phosphate
  modified_base 18: mod_base = OTHER; note = 2'-O-methyladenosine-3'-phosphate
  modified_base 19: mod_base = OTHER; note = 2'-O-methyladenosine-3'-phosphate
  modified_base 20: mod_base = OTHER; note = 2'-O-methylcytidine-3'-phosphate
  modified_base 21: mod_base = OTHER; note = 2'-O-methylguanosine-3'-phosphate
  modified_base 22: mod_base = OTHER; note = 2'-O-methylcytidine-3'-phosphate
  modified_base 23: mod_base = OTHER; note = 2'-O-methyluridine
tgaagtatatccttcagaacgct

SEQ ID NO: 5318 - RNA, 23 nt, synthetic construct
  source 1..23: mol_type = other RNA
  modified_base 1: mod_base = OTHER; note = 2'-O-methyluridine-3'-phosphate 5'-(E)-Vinylphosphonate
  modified_base 2: mod_base = OTHER; note = 2'-deoxy-2'-fluoroadenosine-3'-phosphate
  modified_base 3: mod_base = OTHER; note = 2'-O-methylguanosine-3'-phosphate
  modified_base 4: mod_base = OTHER; note = 2'-O-methyladenosine-3'-phosphate
  modified_base 5: mod_base = OTHER; note = 2'-O-methyladenosine-3'-phosphate
  modified_base 6: mod_base = OTHER; note = 2'-deoxy-2'-fluoroguanosine-3'-phosphate
  modified_base 7: mod_base = OTHER; note = 2'-O-methyluridine-3'-phosphate
  modified_base 8: mod_base = OTHER; note = 2'-O-methyladenosine-3'-phosphate
  modified_base 9: mod_base = OTHER; note = 2'-O-methyluridine-3'-phosphate
  modified_base 10: mod_base = OTHER; note = 2'-O-methyladenosine-3'-phosphate
  modified_base 11: mod_base = OTHER; note = 2'-O-methyluridine-3'-phosphate
  modified_base 12: mod_base = OTHER; note = 2'-O-methylcytidine-3'-phosphate
  modified_base 13: mod_base = OTHER; note = 2'-O-methylcytidine-3'-phosphate
  modified_base 14: mod_base = OTHER; note = 2'-deoxy-2'-fluorouridine-3'-phosphate
  modified_base 15: mod_base = OTHER; note = 2'-O-methyluridine-3'-phosphate
  modified_base 16: mod_base = OTHER; note = 2'-deoxy-2'-fluorocytidine-3'-phosphate
  modified_base 17: mod_base = OTHER; note = 2'-O-methyladenosine-3'-phosphate
  modified_base 18: mod_base = OTHER; note = 2'-O-methylguanosine-3'-phosphate
  modified_base 19: mod_base = OTHER; note = 2'-O-methyladenosine-3'-phosphate
  modified_base 20: mod_base = OTHER; note = 2'-O-methyladenosine-3'-phosphate
  modified_base 21: mod_base = OTHER; note = 2'-O-methylcytidine-3'-phosphate
  modified_base 22: mod_base = OTHER; note = 2'-O-methylguanosine-3'-phosphate
  modified_base 23: mod_base = OTHER; note = 2'-O-methylcytidine
tagaagtatatccttcagaacgc

SEQ ID NO: 5319 - RNA, 23 nt, synthetic construct
  source 1..23: mol_type = other RNA
  modified_base 1: mod_base = OTHER; note = 2'-O-methyluridine-3'-phosphate 5'-(E)-Vinylphosphonate
  modified_base 2: mod_base = OTHER; note = 2'-deoxy-2'-fluorocytidine-3'-phosphate
  modified_base 3: mod_base = OTHER; note = 2'-O-methyladenosine-3'-phosphate
  modified_base 4: mod_base = OTHER; note = 2'-O-methylguanosine-3'-phosphate
  modified_base 5: mod_base = OTHER; note = 2'-O-methyladenosine-3'-phosphate
  modified_base 6: mod_base = OTHER; note = 2'-deoxy-2'-fluoroadenosine-3'-phosphate
  modified_base 7: mod_base = OTHER; note = 2'-O-methylguanosine-3'-phosphate
  modified_base 8: mod_base = OTHER; note = 2'-O-methyluridine-3'-phosphate
  modified_base 9: mod_base = OTHER; note = 2'-O-methyladenosine-3'-phosphate
  modified_base 10: mod_base = OTHER; note = 2'-O-methyluridine-3'-phosphate
  modified_base 11: mod_base = OTHER; note = 2'-O-methyladenosine-3'-phosphate
  modified_base 12: mod_base = OTHER; note = 2'-O-methyluridine-3'-phosphate
  modified_base 13: mod_base = OTHER; note = 2'-O-methylcytidine-3'-phosphate
  modified_base 14: mod_base = OTHER; note = 2'-deoxy-2'-fluorocytidine-3'-phosphate
  modified_base 15: mod_base = OTHER; note = 2'-O-methyluridine-3'-phosphate
  modified_base 16: mod_base = OTHER; note = 2'-deoxy-2'-fluorouridine-3'-phosphate
  modified_base 17: mod_base = OTHER; note = 2'-O-methylcytidine-3'-phosphate
  modified_base 18: mod_base = OTHER; note = 2'-O-methyladenosine-3'-phosphate
  modified_base 19: mod_base = OTHER; note = 2'-O-methylguanosine-3'-phosphate
  modified_base 20: mod_base = OTHER; note = 2'-O-methyladenosine-3'-phosphate
  modified_base 21: mod_base = OTHER; note = 2'-O-methyladenosine-3'-phosphate
  modified_base 22: mod_base = OTHER; note = 2'-O-methylcytidine-3'-phosphate
  modified_base 23: mod_base = OTHER; note = 2'-O-methylguanosine
tcagaagtatatccttcagaacg

SEQ ID NO: 5320 - RNA, 23 nt, synthetic construct
  source 1..23: mol_type = other RNA
  modified_base 1: mod_base = OTHER; note = 2'-O-methyluridine-3'-phosphate 5'-(E)-Vinylphosphonate
  modified_base 2: mod_base = OTHER; note = 2'-deoxy-2'-fluoroadenosine-3'-phosphate
  modified_base 3: mod_base = OTHER; note = 2'-O-methylcytidine-3'-phosphate
  modified_base 4: mod_base = OTHER; note = 2'-O-methyladenosine-3'-phosphate
  modified_base 5: mod_base = OTHER; note = 2'-O-methylguanosine-3'-phosphate
  modified_base 6: mod_base = OTHER; note = 2'-deoxy-2'-fluoroadenosine-3'-phosphate
  modified_base 7: mod_base = OTHER; note = 2'-O-methyladenosine-3'-phosphate
  modified_base 8: mod_base = OTHER; note = 2'-O-methylguanosine-3'-phosphate
  modified_base 9: mod_base = OTHER; note = 2'-O-methyluridine-3'-phosphate
  modified_base 10: mod_base = OTHER; note = 2'-O-methyladenosine-3'-phosphate
  modified_base 11: mod_base = OTHER; note = 2'-O-methyluridine-3'-phosphate
  modified_base 12: mod_base = OTHER; note = 2'-O-methyladenosine-3'-phosphate
  modified_base 13: mod_base = OTHER; note = 2'-O-methyluridine-3'-phosphate
  modified_base 14: mod_base = OTHER; note = 2'-deoxy-2'-fluorocytidine-3'-phosphate
  modified_base 15: mod_base = OTHER; note = 2'-O-methylcytidine-3'-phosphate
  modified_base 16: mod_base = OTHER; note = 2'-deoxy-2'-fluorouridine-3'-phosphate
  modified_base 17: mod_base = OTHER; note = 2'-O-methyluridine-3'-phosphate
  modified_base 18: mod_base = OTHER; note = 2'-O-methylcytidine-3'-phosphate
  modified_base 19: mod_base = OTHER; note = 2'-O-methyladenosine-3'-phosphate
  modified_base 20: mod_base = OTHER; note = 2'-O-methylguanosine-3'-phosphate
  modified_base 21: mod_base = OTHER; note = 2'-O-methyladenosine-3'-phosphate
  modified_base 22: mod_base = OTHER; note = 2'-O-methyladenosine-3'-phosphate
  modified_base 23: mod_base = OTHER; note = 2'-O-methylcytidine
tacagaagtatatccttcagaac

SEQ ID NO: 5321 - RNA, 23 nt, synthetic construct
  source 1..23: mol_type = other RNA
  modified_base 1: mod_base = OTHER; note = 2'-O-methyluridine-3'-phosphate 5'-(E)-Vinylphosphonate
  modified_base 2: mod_base = OTHER; note = 2'-deoxy-2'-fluorouridine-3'-phosphate
  modified_base 3: mod_base = OTHER; note = 2'-O-methyladenosine-3'-phosphate
  modified_base 4: mod_base = OTHER; note = 2'-O-methylcytidine-3'-phosphate
  modified_base 5: mod_base = OTHER; note = 2'-O-methyladenosine-3'-phosphate
  modified_base 6: mod_base = OTHER; note = 2'-deoxy-2'-fluoroguanosine-3'-phosphate
  modified_base 7: mod_base = OTHER; note = 2'-O-methyladenosine-3'-phosphate
  modified_base 8: mod_base = OTHER; note = 2'-O-methyladenosine-3'-phosphate
  modified_base 9: mod_base = OTHER; note = 2'-O-methylguanosine-3'-phosphate
  modified_base 10: mod_base = OTHER; note = 2'-O-methyluridine-3'-phosphate
  modified_base 11: mod_base = OTHER; note = 2'-O-methyladenosine-3'-phosphate
  modified_base 12: mod_base = OTHER; note = 2'-O-methyluridine-3'-phosphate
  modified_base 13: mod_base = OTHER; note = 2'-O-methyladenosine-3'-phosphate
  modified_base 14: mod_base = OTHER; note = 2'-deoxy-2'-fluorouridine-3'-phosphate
  modified_base 15: mod_base = OTHER; note = 2'-O-methylcytidine-3'-phosphate
  modified_base 16: mod_base = OTHER; note = 2'-deoxy-2'-fluorocytidine-3'-phosphate
  modified_base 17: mod_base = OTHER; note = 2'-O-methyluridine-3'-phosphate
  modified_base 18: mod_base = OTHER; note = 2'-O-methyluridine-3'-phosphate
  modified_base 19: mod_base = OTHER; note = 2'-O-methylcytidine-3'-phosphate
  modified_base 20: mod_base = OTHER; note = 2'-O-methyladenosine-3'-phosphate
  modified_base 21: mod_base = OTHER; note = 2'-O-methylguanosine-3'-phosphate
  modified_base 22: mod_base = OTHER; note = 2'-O-methyladenosine-3'-phosphate
  modified_base 23: mod_base = OTHER; note = 2'-O-methyladenosine
ttacagaagtatatccttcagaa

SEQ ID NO: 5322 - RNA, 23 nt, synthetic construct
  source 1..23: mol_type = other RNA
  modified_base 1: mod_base = OTHER; note = 2'-O-methyluridine-3'-phosphate 5'-(E)-Vinylphosphonate
  modified_base 2: mod_base = OTHER; note = 2'-deoxy-2'-fluoroadenosine-3'-phosphate
  modified_base 3: mod_base = OTHER; note = 2'-O-methyluridine-3'-phosphate
  modified_base 4: mod_base = OTHER; note = 2'-O-methyladenosine-3'-phosphate
  modified_base 5: mod_base = OTHER; note = 2'-O-methylcytidine-3'-phosphate
  modified_base 6: mod_base = OTHER; note = 2'-deoxy-2'-fluoroadenosine-3'-phosphate
  modified_base 7: mod_base = OTHER; note = 2'-O-methylguanosine-3'-phosphate
  modified_base 8: mod_base = OTHER; note = 2'-O-methyladenosine-3'-phosphate
  modified_base 9: mod_base = OTHER; note = 2'-O-methyladenosine-3'-phosphate
  modified_base 10: mod_base = OTHER; note = 2'-O-methylguanosine-3'-phosphate
  modified_base 11: mod_base = OTHER; note = 2'-O-methyluridine-3'-phosphate
  modified_base 12: mod_base = OTHER; note = 2'-O-methyladenosine-3'-phosphate
  modified_base 13: mod_base = OTHER; note = 2'-O-methyluridine-3'-phosphate
  modified_base 14: mod_base = OTHER; note = 2'-deoxy-2'-fluoroadenosine-3'-phosphate
  modified_base 15: mod_base = OTHER; note = 2'-O-methyluridine-3'-phosphate
  modified_base 16: mod_base = OTHER; note = 2'-deoxy-2'-fluorocytidine-3'-phosphate
  modified_base 17: mod_base = OTHER; note = 2'-O-methylcytidine-3'-phosphate
  modified_base 18: mod_base = OTHER; note = 2'-O-methyluridine-3'-phosphate
  modified_base 19: mod_base = OTHER; note = 2'-O-methyluridine-3'-phosphate
  modified_base 20: mod_base = OTHER; note = 2'-O-methylcytidine-3'-phosphate
  modified_base 21: mod_base = OTHER; note = 2'-O-methyladenosine-3'-phosphate
  modified_base 22: mod_base = OTHER; note = 2'-O-methylguanosine-3'-phosphate
  modified_base 23: mod_base = OTHER; note = 2'-O-methyladenosine
tatacagaagtatatccttcaga

SEQ ID NO: 5323 - RNA, 23 nt, synthetic construct
  source 1..23: mol_type = other RNA
  modified_base 1: mod_base = OTHER; note = 2'-O-methyluridine-3'-phosphate 5'-(E)-Vinylphosphonate
  modified_base 2: mod_base = OTHER; note = 2'-deoxy-2'-fluoroadenosine-3'-phosphate
  modified_base 3: mod_base = OTHER; note = 2'-O-methyladenosine-3'-phosphate
  modified_base 4: mod_base = OTHER; note = 2'-O-methyluridine-3'-phosphate
  modified_base 5: mod_base = OTHER; note = 2'-O-methyladenosine-3'-phosphate
  modified_base 6: mod_base = OTHER; note = 2'-deoxy-2'-fluorocytidine-3'-phosphate
  modified_base 7: mod_base = OTHER; note = 2'-O-methyladenosine-3'-phosphate
  modified_base 8: mod_base = OTHER; note = 2'-O-methylguanosine-3'-phosphate
  modified_base 9: mod_base = OTHER; note = 2'-O-methyladenosine-3'-phosphate
  modified_base 10: mod_base = OTHER; note = 2'-O-methyladenosine-3'-phosphate
  modified_base 11: mod_base = OTHER; note = 2'-O-methylguanosine-3'-phosphate
  modified_base 12: mod_base = OTHER; note = 2'-O-methyluridine-3'-phosphate
  modified_base 13: mod_base = OTHER; note = 2'-O-methyladenosine-3'-phosphate
  modified_base 14: mod_base = OTHER; note = 2'-deoxy-2'-fluorouridine-3'-phosphate
  modified_base 15: mod_base = OTHER; note = 2'-O-methyladenosine-3'-phosphate
  modified_base 16: mod_base = OTHER; note = 2'-deoxy-2'-fluorouridine-3'-phosphate
  modified_base 17: mod_base = OTHER; note = 2'-O-methylcytidine-3'-phosphate
  modified_base 18: mod_base = OTHER; note = 2'-O-methylcytidine-3'-phosphate
  modified_base 19: mod_base = OTHER; note = 2'-O-methyluridine-3'-phosphate
  modified_base 20: mod_base = OTHER; note = 2'-O-methyluridine-3'-phosphate
  modified_base 21: mod_base = OTHER; note = 2'-O-methylcytidine-3'-phosphate
  modified_base 22: mod_base = OTHER; note = 2'-O-methyladenosine-3'-phosphate
  modified_base 23: mod_base = OTHER; note = 2'-O-methylguanosine
taatacagaagtatatccttcag

SEQ ID NO: 5324 - RNA, 23 nt, synthetic construct
  source 1..23: mol_type = other RNA
  modified_base 1: mod_base = OTHER; note = 2'-O-methyluridine-3'-phosphate 5'-(E)-Vinylphosphonate
  modified_base 2: mod_base = OTHER; note = 2'-deoxy-2'-fluoroadenosine-3'-phosphate
  modified_base 3: mod_base = OTHER; note = 2'-O-methyladenosine-3'-phosphate
  modified_base 4: mod_base = OTHER; note = 2'-O-methyladenosine-3'-phosphate
  modified_base 5: mod_base = OTHER; note = 2'-O-methyluridine-3'-phosphate
  modified_base 6: mod_base = OTHER; note = 2'-deoxy-2'-fluoroadenosine-3'-phosphate
  modified_base 7: mod_base = OTHER; note = 2'-O-methylcytidine-3'-phosphate
  modified_base 8: mod_base = OTHER; note = 2'-O-methyladenosine-3'-phosphate
  modified_base 9: mod_base = OTHER; note = 2'-O-methylguanosine-3'-phosphate
  modified_base 10: mod_base = OTHER; note = 2'-O-methyladenosine-3'-phosphate
  modified_base 11: mod_base = OTHER; note = 2'-O-methyladenosine-3'-phosphate
  modified_base 12: mod_base = OTHER; note = 2'-O-methylguanosine-3'-phosphate
  modified_base 13: mod_base = OTHER; note = 2'-O-methyluridine-3'-phosphate
  modified_base 14: mod_base = OTHER; note = 2'-deoxy-2'-fluoroadenosine-3'-phosphate
  modified_base 15: mod_base = OTHER; note = 2'-O-methyluridine-3'-phosphate
  modified_base 16: mod_base = OTHER; note = 2'-deoxy-2'-fluoroadenosine-3'-phosphate
  modified_base 17: mod_base = OTHER; note = 2'-O-methyluridine-3'-phosphate
  modified_base 18: mod_base = OTHER; note = 2'-O-methylcytidine-3'-phosphate
  modified_base 19: mod_base = OTHER; note = 2'-O-methylcytidine-3'-phosphate
  modified_base 20: mod_base = OTHER; note = 2'-O-methyluridine-3'-phosphate
  modified_base 21: mod_base = OTHER; note = 2'-O-methyluridine-3'-phosphate
  modified_base 22: mod_base = OTHER; note = 2'-O-methylcytidine-3'-phosphate
  modified_base 23: mod_base = OTHER; note = 2'-O-methyladenosine
taaatacagaagtatatccttca

SEQ ID NO: 5325 - RNA, 23 nt, synthetic construct
  source 1..23: mol_type = other RNA
  modified_base 1: mod_base = OTHER; note = 2'-O-methyluridine-3'-phosphate 5'-(E)-Vinylphosphonate
  modified_base 2: mod_base = OTHER; note = 2'-deoxy-2'-fluoroadenosine-3'-phosphate
  modified_base 3: mod_base = OTHER; note = 2'-O-methyladenosine-3'-phosphate
  modified_base 4: mod_base = OTHER; note = 2'-O-methyladenosine-3'-phosphate
  modified_base 5: mod_base = OTHER; note = 2'-O-methyladenosine-3'-phosphate
  modified_base 6: mod_base = OTHER; note = 2'-deoxy-2'-fluorouridine-3'-phosphate
  modified_base 7: mod_base = OTHER; note = 2'-O-methyladenosine-3'-phosphate
  modified_base 8: mod_base = OTHER; note = 2'-O-methylcytidine-3'-phosphate
  modified_base 9: mod_base = OTHER; note = 2'-O-methyladenosine-3'-phosphate
  modified_base 10: mod_base = OTHER; note = 2'-O-methylguanosine-3'-phosphate
  modified_base 11: mod_base = OTHER; note = 2'-O-methyladenosine-3'-phosphate
  modified_base 12: mod_base = OTHER; note = 2'-O-methyladenosine-3'-phosphate
  modified_base 13: mod_base = OTHER; note = 2'-O-methylguanosine-3'-phosphate
  modified_base 14: mod_base = OTHER; note = 2'-deoxy-2'-fluorouridine-3'-phosphate
  modified_base 15: mod_base = OTHER; note = 2'-O-methyladenosine-3'-phosphate
  modified_base 16: mod_base = OTHER; note = 2'-deoxy-2'-fluorouridine-3'-phosphate
  modified_base 17: mod_base = OTHER; note = 2'-O-methyladenosine-3'-phosphate
  modified_base 18: mod_base = OTHER; note = 2'-O-methyluridine-3'-phosphate
  modified_base 19: mod_base = OTHER; note = 2'-O-methylcytidine-3'-phosphate
  modified_base 20: mod_base = OTHER; note = 2'-O-methylcytidine-3'-phosphate
  modified_base 21: mod_base = OTHER; note = 2'-O-methyluridine-3'-phosphate
  modified_base 22: mod_base = OTHER; note = 2'-O-methyluridine-3'-phosphate
  modified_base 23: mod_base = OTHER; note = 2'-O-methylcytidine
taaaatacagaagtatatccttc

SEQ ID NO: 5326 - RNA, 23 nt, synthetic construct
  source 1..23: mol_type = other RNA
  modified_base 1: mod_base = OTHER; note = 2'-O-methyluridine-3'-phosphate 5'-(E)-Vinylphosphonate
  modified_base 2: mod_base = OTHER; note = 2'-deoxy-2'-fluoroguanosine-3'-phosphate
  modified_base 3: mod_base = OTHER; note = 2'-O-methyladenosine-3'-phosphate
  modified_base 4: mod_base = OTHER; note = 2'-O-methyladenosine-3'-phosphate
  modified_base 5: mod_base = OTHER; note = 2'-O-methyladenosine-3'-phosphate
  modified_base 6: mod_base = OTHER; note = 2'-deoxy-2'-fluoroadenosine-3'-phosphate
  modified_base 7: mod_base = OTHER; note = 2'-O-methyluridine-3'-phosphate
  modified_base 8: mod_base = OTHER; note = 2'-O-methyladenosine-3'-phosphate
  modified_base 9: mod_base = OTHER; note = 2'-O-methylcytidine-3'-phosphate
  modified_base 10: mod_base = OTHER; note = 2'-O-methyladenosine-3'-phosphate
  modified_base 11: mod_base = OTHER; note = 2'-O-methylguanosine-3'-phosphate
  modified_base 12: mod_base = OTHER; note = 2'-O-methyladenosine-3'-phosphate
  modified_base 13: mod_base = OTHER; note = 2'-O-methyladenosine-3'-phosphate
  modified_base 14: mod_base = OTHER; note = 2'-deoxy-2'-fluoroguanosine-3'-phosphate
  modified_base 15: mod_base = OTHER; note = 2'-O-methyluridine-3'-phosphate
  modified_base 16: mod_base = OTHER; note = 2'-deoxy-2'-fluoroadenosine-3'-phosphate
  modified_base 17: mod_base = OTHER; note = 2'-O-methyluridine-3'-phosphate
  modified_base 18: mod_base = OTHER; note = 2'-O-methyladenosine-3'-phosphate
  modified_base 19: mod_base = OTHER; note = 2'-O-methyluridine-3'-phosphate
  modified_base 20: mod_base = OTHER; note = 2'-O-methylcytidine-3'-phosphate
  modified_base 21: mod_base = OTHER; note = 2'-O-methylcytidine-3'-phosphate
  modified_base 22: mod_base = OTHER; note = 2'-O-methyluridine-3'-phosphate
  modified_base 23: mod_base = OTHER; note = 2'-O-methyluridine
tgaaaatacagaagtatatcctt

SEQ ID NO: 5327 - RNA, 23 nt, synthetic construct
  source 1..23: mol_type = other RNA
  modified_base 1: mod_base = OTHER; note = 2'-O-methyluridine-3'-phosphate 5'-(E)-Vinylphosphonate
  modified_base 2: mod_base = OTHER; note = 2'-deoxy-2'-fluoroadenosine-3'-phosphate
  modified_base 3: mod_base = OTHER; note = 2'-O-methylguanosine-3'-phosphate
  modified_base 4: mod_base = OTHER; note = 2'-O-methyladenosine-3'-phosphate
  modified_base 5: mod_base = OTHER; note = 2'-O-methyladenosine-3'-phosphate
  modified_base 6: mod_base = OTHER; note = 2'-deoxy-2'-fluoroadenosine-3'-phosphate
  modified_base 7: mod_base = OTHER; note = 2'-O-methyladenosine-3'-phosphate
  modified_base 8: mod_base = OTHER; note = 2'-O-methyluridine-3'-phosphate
  modified_base 9: mod_base = OTHER; note = 2'-O-methyladenosine-3'-phosphate
  modified_base 10: mod_base = OTHER; note = 2'-O-methylcytidine-3'-phosphate
  modified_base 11: mod_base = OTHER; note = 2'-O-methyladenosine-3'-phosphate
  modified_base 12: mod_base = OTHER; note = 2'-O-methylguanosine-3'-phosphate
  modified_base 13: mod_base = OTHER; note = 2'-O-methyladenosine-3'-phosphate
  modified_base 14: mod_base = OTHER; note = 2'-deoxy-2'-fluoroadenosine-3'-phosphate
  modified_base 15: mod_base = OTHER; note = 2'-O-methylguanosine-3'-phosphate
  modified_base 16: mod_base = OTHER; note = 2'-deoxy-2'-fluorouridine-3'-phosphate
  modified_base 17: mod_base = OTHER; note = 2'-O-methyladenosine-3'-phosphate
  modified_base 18: mod_base = OTHER; note = 2'-O-methyluridine-3'-phosphate
  modified_base 19: mod_base = OTHER; note = 2'-O-methyladenosine-3'-phosphate
  modified_base 20: mod_base = OTHER; note = 2'-O-methyluridine-3'-phosphate
  modified_base 21: mod_base = OTHER; note = 2'-O-methylcytidine-3'-phosphate
  modified_base 22: mod_base = OTHER; note = 2'-O-methylcytidine-3'-phosphate
  modified_base 23: mod_base = OTHER; note = 2'-O-methyluridine
tagaaaatacagaagtatatcct

SEQ ID NO: 5328 - RNA, 23 nt, synthetic construct
  source 1..23: mol_type = other RNA
  modified_base 1: mod_base = OTHER; note = 2'-O-methyluridine-3'-phosphate 5'-(E)-Vinylphosphonate
  modified_base 2: mod_base = OTHER; note = 2'-deoxy-2'-fluoroguanosine-3'-phosphate
  modified_base 3: mod_base = OTHER; note = 2'-O-methyladenosine-3'-phosphate
  modified_base 4: mod_base = OTHER; note = 2'-O-methylguanosine-3'-phosphate
  modified_base 5: mod_base = OTHER; note = 2'-O-methyladenosine-3'-phosphate
  modified_base 6: mod_base = OTHER; note = 2'-deoxy-2'-fluoroadenosine-3'-phosphate
  modified_base 7: mod_base = OTHER; note = 2'-O-methyladenosine-3'-phosphate
  modified_base 8: mod_base = OTHER; note = 2'-O-methyladenosine-3'-phosphate
  modified_base 9: mod_base = OTHER; note = 2'-O-methyluridine-3'-phosphate
  modified_base 10: mod_base = OTHER; note = 2'-O-methyladenosine-3'-phosphate
  modified_base 11: mod_base = OTHER; note = 2'-O-methylcytidine-3'-phosphate
  modified_base 12: mod_base = OTHER; note = 2'-O-methyladenosine-3'-phosphate
  modified_base 13: mod_base = OTHER; note = 2'-O-methylguanosine-3'-phosphate
  modified_base 14: mod_base = OTHER; note = 2'-deoxy-2'-fluoroadenosine-3'-phosphate
  modified_base 15: mod_base = OTHER; note = 2'-O-methyladenosine-3'-phosphate
  modified_base 16: mod_base = OTHER; note = 2'-deoxy-2'-fluoroguanosine-3'-phosphate
  modified_base 17: mod_base = OTHER; note = 2'-O-methyluridine-3'-phosphate
  modified_base 18: mod_base = OTHER; note = 2'-O-methyladenosine-3'-phosphate
  modified_base 19: mod_base = OTHER; note = 2'-O-methyluridine-3'-phosphate
  modified_base 20: mod_base = OTHER; note = 2'-O-methyladenosine-3'-phosphate
  modified_base 21: mod_base = OTHER; note = 2'-O-methyluridine-3'-phosphate
  modified_base 22: mod_base = OTHER; note = 2'-O-methylcytidine-3'-phosphate
  modified_base 23: mod_base = OTHER; note = 2'-O-methylcytidine
tgagaaaatacagaagtatatcc

SEQ ID NO: 5329 - RNA, 23 nt, synthetic construct
  source 1..23: mol_type = other RNA
  modified_base 1: mod_base = OTHER; note = 2'-O-methyluridine-3'-phosphate 5'-(E)-Vinylphosphonate
  modified_base 2: mod_base = OTHER; note = 2'-deoxy-2'-fluorouridine-3'-phosphate
  modified_base 3: mod_base = OTHER; note = 2'-O-methylguanosine-3'-phosphate
  modified_base 4: mod_base = OTHER; note = 2'-O-methyladenosine-3'-phosphate
  modified_base 5: mod_base = OTHER; note = 2'-O-methylguanosine-3'-phosphate
  modified_base 6: mod_base = OTHER; note = 2'-deoxy-2'-fluoroadenosine-3'-phosphate
  modified_base 7: mod_base = OTHER; note = 2'-O-methyladenosine-3'-phosphate
  modified_base 8: mod_base = OTHER; note = 2'-O-methyladenosine-3'-phosphate
  modified_base 9: mod_base = OTHER; note = 2'-O-methyladenosine-3'-phosphate
  modified_base 10: mod_base = OTHER; note = 2'-O-methyluridine-3'-phosphate
  modified_base 11: mod_base = OTHER; note = 2'-O-methyladenosine-3'-phosphate
  modified_base 12: mod_base = OTHER; note = 2'-O-methylcytidine-3'-phosphate
  modified_base 13: mod_base = OTHER; note = 2'-O-methyladenosine-3'-phosphate
  modified_base 14: mod_base = OTHER; note = 2'-deoxy-2'-fluoroguanosine-3'-phosphate
  modified_base 15: mod_base = OTHER; note = 2'-O-methyladenosine-3'-phosphate
  modified_base 16: mod_base = OTHER; note = 2'-deoxy-2'-fluoroadenosine-3'-phosphate
  modified_base 17: mod_base = OTHER; note = 2'-O-methylguanosine-3'-phosphate
  modified_base 18: mod_base = OTHER; note = 2'-O-methyluridine-3'-phosphate
  modified_base 19: mod_base = OTHER; note = 2'-O-methyladenosine-3'-phosphate
  modified_base 20: mod_base = OTHER; note = 2'-O-methyluridine-3'-phosphate
  modified_base 21: mod_base = OTHER; note = 2'-O-methyladenosine-3'-phosphate
  modified_base 22: mod_base = OTHER; note = 2'-O-methyluridine-3'-phosphate
  modified_base 23: mod_base = OTHER; note = 2'-O-methylcytidine
ttgagaaaatacagaagtatatc

SEQ ID NO: 5330 - RNA, 23 nt, synthetic construct
  source 1..23: mol_type = other RNA
  modified_base 1: mod_base = OTHER; note = 2'-O-methyluridine-3'-phosphate 5'-(E)-Vinylphosphonate
  modified_base 2: mod_base = OTHER; note = 2'-deoxy-2'-fluorocytidine-3'-phosphate
  modified_base 3: mod_base = OTHER; note = 2'-O-methyluridine-3'-phosphate
  modified_base 4: mod_base = OTHER; note = 2'-O-methyladenosine-3'-phosphate
  modified_base 5: mod_base = OTHER; note = 2'-O-methyluridine-3'-phosphate
  modified_base 6: mod_base = OTHER; note = 2'-deoxy-2'-fluoroguanosine-3'-phosphate
  modified_base 7: mod_base = OTHER; note = 2'-O-methyladenosine-3'-phosphate
  modified_base 8: mod_base = OTHER; note = 2'-O-methylguanosine-3'-phosphate
  modified_base 9: mod_base = OTHER; note = 2'-O-methyladenosine-3'-phosphate
  modified_base 10: mod_base = OTHER; note = 2'-O-methyladenosine-3'-phosphate
  modified_base 11: mod_base = OTHER; note = 2'-O-methyladenosine-3'-phosphate
  modified_base 12: mod_base = OTHER; note = 2'-O-methyladenosine-3'-phosphate
  modified_base 13: mod_base = OTHER; note = 2'-O-methyluridine-3'-phosphate
  modified_base 14: mod_base = OTHER; note = 2'-deoxy-2'-fluoroadenosine-3'-phosphate
  modified_base 15: mod_base = OTHER; note = 2'-O-methylcytidine-3'-phosphate
  modified_base 16: mod_base = OTHER; note = 2'-deoxy-2'-fluoroadenosine-3'-phosphate
  modified_base 17: mod_base = OTHER; note = 2'-O-methylguanosine-3'-phosphate
  modified_base 18: mod_base = OTHER; note = 2'-O-methyladenosine-3'-phosphate
  modified_base 19: mod_base = OTHER; note = 2'-O-methyladenosine-3'-phosphate
  modified_base 20: mod_base = OTHER; note = 2'-O-methylguanosine-3'-phosphate
  modified_base 21: mod_base = OTHER; note = 2'-O-methyluridine-3'-phosphate
  modified_base 22: mod_base = OTHER; note = 2'-O-methyladenosine-3'-phosphate
  modified_base 23: mod_base = OTHER; note = 2'-O-methyluridine
tctatgagaaaatacagaagtat

SEQ ID NO: 5331 - RNA, 23 nt, synthetic construct
  source 1..23: mol_type = other RNA
  modified_base 1: mod_base = OTHER; note = 2'-O-methyluridine-3'-phosphate 5'-(E)-Vinylphosphonate
  modified_base 2: mod_base = OTHER; note = 2'-deoxy-2'-fluorouridine-3'-phosphate
  modified_base 3: mod_base = OTHER; note = 2'-O-methylcytidine-3'-phosphate
  modified_base 4: mod_base = OTHER; note = 2'-O-methyluridine-3'-phosphate
  modified_base 5: mod_base = OTHER; note = 2'-O-methyladenosine-3'-phosphate
  modified_base 6: mod_base = OTHER; note = 2'-deoxy-2'-fluorouridine-3'-phosphate
  modified_base 7: mod_base = OTHER; note = 2'-O-methylguanosine-3'-phosphate
  modified_base 8: mod_base = OTHER; note = 2'-O-methyladenosine-3'-phosphate
  modified_base 9: mod_base = OTHER; note = 2'-O-methylguanosine-3'-phosphate
  modified_base 10: mod_base = OTHER; note = 2'-O-methyladenosine-3'-phosphate
  modified_base 11: mod_base = OTHER; note = 2'-O-methyladenosine-3'-phosphate
  modified_base 12: mod_base = OTHER; note = 2'-O-methyladenosine-3'-phosphate
  modified_base 13: mod_base = OTHER; note = 2'-O-methyladenosine-3'-phosphate
  modified_base 14: mod_base = OTHER; note = 2'-deoxy-2'-fluorouridine-3'-phosphate
  modified_base 15: mod_base = OTHER; note = 2'-O-methyladenosine-3'-phosphate
  modified_base 16: mod_base = OTHER; note = 2'-deoxy-2'-fluorocytidine-3'-phosphate
  modified_base 17: mod_base = OTHER; note = 2'-O-methyladenosine-3'-phosphate
  modified_base 18: mod_base = OTHER; note = 2'-O-methylguanosine-3'-phosphate
  modified_base 19: mod_base = OTHER; note = 2'-O-methyladenosine-3'-phosphate
  modified_base 20: mod_base = OTHER; note = 2'-O-methyladenosine-3'-phosphate
  modified_base 21: mod_base = OTHER; note = 2'-O-methylguanosine-3'-phosphate
  modified_base 22: mod_base = OTHER; note = 2'-O-methyluridine-3'-phosphate
  modified_base 23: mod_base = OTHER; note = 2'-O-methyladenosine
ttctatgagaaaatacagaagta

SEQ ID NO: 5332 - RNA, 23 nt, synthetic construct
  source 1..23: mol_type = other RNA
  modified_base 1: mod_base = OTHER; note = 2'-O-methyluridine-3'-phosphate 5'-(E)-Vinylphosphonate
  modified_base 2: mod_base = OTHER; note = 2'-deoxy-2'-fluorocytidine-3'-phosphate
  modified_base 3: mod_base = OTHER; note = 2'-O-methyluridine-3'-phosphate
  modified_base 4: mod_base = OTHER; note = 2'-O-methylcytidine-3'-phosphate
  modified_base 5: mod_base = OTHER; note = 2'-O-methyluridine-3'-phosphate
  modified_base 6: mod_base = OTHER; note = 2'-deoxy-2'-fluoroadenosine-3'-phosphate
  modified_base 7: mod_base = OTHER; note = 2'-O-methyluridine-3'-phosphate
  modified_base 8: mod_base = OTHER; note = 2'-O-methylguanosine-3'-phosphate
  modified_base 9: mod_base = OTHER; note = 2'-O-methyladenosine-3'-phosphate
  modified_base 10: mod_base = OTHER; note = 2'-O-methylguanosine-3'-phosphate
  modified_base 11: mod_base = OTHER; note = 2'-O-methyladenosine-3'-phosphate
  modified_base 12: mod_base = OTHER; note = 2'-O-methyladenosine-3'-phosphate
  modified_base 13: mod_base = OTHER; note = 2'-O-methyladenosine-3'-phosphate
  modified_base 14: mod_base = OTHER; note = 2'-deoxy-2'-fluoroadenosine-3'-phosphate
  modified_base 15: mod_base = OTHER; note = 2'-O-methyluridine-3'-phosphate
  modified_base 16: mod_base = OTHER; note = 2'-deoxy-2'-fluoroadenosine-3'-phosphate
  modified_base 17: mod_base = OTHER; note = 2'-O-methylcytidine-3'-phosphate
  modified_base 18: mod_base = OTHER; note = 2'-O-methyladenosine-3'-phosphate
  modified_base 19: mod_base = OTHER; note = 2'-O-methylguanosine-3'-phosphate
  modified_base 20: mod_base = OTHER; note = 2'-O-methyladenosine-3'-phosphate
  modified_base 21: mod_base = OTHER; note = 2'-O-methyladenosine-3'-phosphate
  modified_base 22: mod_base = OTHER; note = 2'-O-methylguanosine-3'-phosphate
  modified_base 23: mod_base = OTHER; note = 2'-O-methyluridine
tctctatgagaaaatacagaagt

SEQ ID NO: 5333 - RNA, 23 nt, synthetic construct
  source 1..23: mol_type = other RNA
  modified_base 1: mod_base = OTHER; note = 2'-O-methyluridine-3'-phosphate 5'-(E)-Vinylphosphonate
  modified_base 2: mod_base = OTHER; note = 2'-deoxy-2'-fluoroadenosine-3'-phosphate
  modified_base 3: mod_base = OTHER; note = 2'-O-methylcytidine-3'-phosphate
  modified_base 4: mod_base = OTHER; note = 2'-O-methyluridine-3'-phosphate
  modified_base 5: mod_base = OTHER; note = 2'-O-methylcytidine-3'-phosphate
  modified_base 6: mod_base = OTHER; note = 2'-deoxy-2'-fluorouridine-3'-phosphate
  modified_base 7: mod_base = OTHER; note = 2'-O-methyladenosine-3'-phosphate
  modified_base 8: mod_base = OTHER; note = 2'-O-methyluridine-3'-phosphate
  modified_base 9: mod_base = OTHER; note = 2'-O-methylguanosine-3'-phosphate
  modified_base 10: mod_base = OTHER; note = 2'-O-methyladenosine-3'-phosphate
  modified_base 11: mod_base = OTHER; note = 2'-O-methylguanosine-3'-phosphate
  modified_base 12: mod_base = OTHER; note = 2'-O-methyladenosine-3'-phosphate
  modified_base 13: mod_base = OTHER; note = 2'-O-methyladenosine-3'-phosphate
  modified_base 14: mod_base = OTHER; note = 2'-deoxy-2'-fluoroadenosine-3'-phosphate
  modified_base 15: mod_base = OTHER; note = 2'-O-methyladenosine-3'-phosphate
  modified_base 16: mod_base = OTHER; note = 2'-deoxy-2'-fluorouridine-3'-phosphate
  modified_base 17: mod_base = OTHER; note = 2'-O-methyladenosine-3'-phosphate
  modified_base 18: mod_base = OTHER; note = 2'-O-methylcytidine-3'-phosphate
  modified_base 19: mod_base = OTHER; note = 2'-O-methyladenosine-3'-phosphate
  modified_base 20: mod_base = OTHER; note = 2'-O-methylguanosine-3'-phosphate
  modified_base 21: mod_base = OTHER; note = 2'-O-methyladenosine-3'-phosphate
  modified_base 22: mod_base = OTHER; note = 2'-O-methyladenosine-3'-phosphate
  modified_base 23: mod_base = OTHER; note = 2'-O-methylguanosine
tactctatgagaaaatacagaag

SEQ ID NO: 5334 - RNA, 23 nt, synthetic construct
  source 1..23: mol_type = other RNA
  modified_base 1: mod_base = OTHER; note = 2'-O-methyluridine-3'-phosphate 5'-(E)-Vinylphosphonate
  modified_base 2: mod_base = OTHER; note = 2'-deoxy-2'-fluorouridine-3'-phosphate
  modified_base 3: mod_base = OTHER; note = 2'-O-methyladenosine-3'-phosphate
  modified_base 4: mod_base = OTHER; note = 2'-O-methylcytidine-3'-phosphate
  modified_base 5: mod_base = OTHER; note = 2'-O-methyluridine-3'-phosphate
  modified_base 6: mod_base = OTHER; note = 2'-deoxy-2'-fluorocytidine-3'-phosphate
  modified_base 7: mod_base = OTHER; note = 2'-O-methyluridine-3'-phosphate
  modified_base 8: mod_base = OTHER; note = 2'-O-methyladenosine-3'-phosphate
  modified_base 9: mod_base = OTHER; note = 2'-O-methyluridine-3'-phosphate
  modified_base 10: mod_base = OTHER; note = 2'-O-methylguanosine-3'-phosphate
  modified_base 11: mod_base = OTHER; note = 2'-O-methyladenosine-3'-phosphate
  modified_base 12: mod_base = OTHER; note = 2'-O-methylguanosine-3'-phosphate
  modified_base 13: mod_base = OTHER; note = 2'-O-methyladenosine-3'-phosphate
  modified_base 14: mod_base = OTHER; note = 2'-deoxy-2'-fluoroadenosine-3'-phosphate
  modified_base 15: mod_base = OTHER; note = 2'-O-methyladenosine-3'-phosphate
  modified_base 16: mod_base = OTHER; note = 2'-deoxy-2'-fluoroadenosine-3'-phosphate
  modified_base 17: mod_base = OTHER; note = 2'-O-methyluridine-3'-phosphate
  modified_base 18: mod_base = OTHER; note = 2'-O-methyladenosine-3'-phosphate
  modified_base 19: mod_base = OTHER; note = 2'-O-methylcytidine-3'-phosphate
  modified_base 20: mod_base = OTHER; note = 2'-O-methyladenosine-3'-phosphate
  modified_base 21: mod_base = OTHER; note = 2'-O-methylguanosine-3'-phosphate
  modified_base 22: mod_base = OTHER; note = 2'-O-methyladenosine-3'-phosphate
  modified_base 23: mod_base = OTHER; note = 2'-O-methyladenosine
ttactctatgagaaaatacagaa

SEQ ID NO: 5335 - RNA, 23 nt, synthetic construct
  source 1..23: mol_type = other RNA
  modified_base 1: mod_base = OTHER; note = 2'-O-methyluridine-3'-phosphate 5'-(E)-Vinylphosphonate
  modified_base 2: mod_base = OTHER; note = 2'-deoxy-2'-fluoroadenosine-3'-phosphate
  modified_base 3: mod_base = OTHER; note = 2'-O-methylcytidine-3'-phosphate
  modified_base 4: mod_base = OTHER; note = 2'-O-methyluridine-3'-phosphate
  modified_base 5: mod_base = OTHER; note = 2'-O-methyladenosine-3'-phosphate
  modified_base 6: mod_base = OTHER; note = 2'-deoxy-2'-fluoroadenosine-3'-phosphate
  modified_base 7: mod_base = OTHER; note = 2'-O-methyladenosine-3'-phosphate
  modified_base 8: mod_base = OTHER; note = 2'-O-methyluridine-3'-phosphate
  modified_base 9: mod_base = OTHER; note = 2'-O-methyluridine-3'-phosphate
  modified_base 10: mod_base = OTHER; note = 2'-O-methylguanosine-3'-phosphate
  modified_base 11: mod_base = OTHER; note = 2'-O-methyluridine-3'-phosphate
  modified_base 12: mod_base = OTHER; note = 2'-O-methyladenosine-3'-phosphate
  modified_base 13: mod_base = OTHER; note = 2'-O-methylcytidine-3'-phosphate
  modified_base 14: mod_base = OTHER; note = 2'-deoxy-2'-fluorouridine-3'-phosphate
  modified_base 15: mod_base = OTHER; note = 2'-O-methylcytidine-3'-phosphate
  modified_base 16: mod_base = OTHER; note = 2'-deoxy-2'-fluorouridine-3'-phosphate
  modified_base 17: mod_base = OTHER; note = 2'-O-methyladenosine-3'-phosphate
  modified_base 18: mod_base = OTHER; note = 2'-O-methyluridine-3'-phosphate
  modified_base 19: mod_base = OTHER; note = 2'-O-methylguanosine-3'-phosphate
  modified_base 20: mod_base = OTHER; note = 2'-O-methyladenosine-3'-phosphate
  modified_base 21: mod_base = OTHER; note = 2'-O-methylguanosine-3'-phosphate
  modified_base 22: mod_base = OTHER; note = 2'-O-methyladenosine-3'-phosphate
  modified_base 23: mod_base = OTHER; note = 2'-O-methyladenosine
tactaaattgtactctatgagaa

SEQ ID NO: 5336 - RNA, 23 nt, synthetic construct
  source 1..23: mol_type = other RNA
  modified_base 1: mod_base = OTHER; note = 2'-O-methyluridine-3'-phosphate 5'-(E)-Vinylphosphonate
  modified_base 2: mod_base = OTHER; note = 2'-deoxy-2'-fluorocytidine-3'-phosphate
  modified_base 3: mod_base = OTHER; note = 2'-O-methyladenosine-3'-phosphate
  modified_base 4: mod_base = OTHER; note = 2'-O-methylcytidine-3'-phosphate
  modified_base 5: mod_base = OTHER; note = 2'-O-methyluridine-3'-phosphate
  modified_base 6: mod_base = OTHER; note = 2'-deoxy-2'-fluoroadenosine-3'-phosphate
  modified_base 7: mod_base = OTHER; note = 2'-O-methyladenosine-3'-phosphate
  modified_base 8: mod_base = OTHER; note = 2'-O-methyladenosine-3'-phosphate
  modified_base 9: mod_base = OTHER; note = 2'-O-methyluridine-3'-phosphate
  modified_base 10: mod_base = OTHER; note = 2'-O-methyluridine-3'-phosphate
  modified_base 11: mod_base = OTHER; note = 2'-O-methylguanosine-3'-phosphate
  modified_base 12: mod_base = OTHER; note = 2'-O-methyluridine-3'-phosphate
  modified_base 13: mod_base = OTHER; note = 2'-O-methyladenosine-3'-phosphate
  modified_base 14: mod_base = OTHER; note = 2'-deoxy-2'-fluorocytidine-3'-phosphate
  modified_base 15: mod_base = OTHER; note = 2'-O-methyluridine-3'-phosphate
  modified_base 16: mod_base = OTHER; note = 2'-deoxy-2'-fluorocytidine-3'-phosphate
  modified_base 17: mod_base = OTHER; note = 2'-O-methyluridine-3'-phosphate
  modified_base 18: mod_base = OTHER; note = 2'-O-methyladenosine-3'-phosphate
  modified_base 19: mod_base = OTHER; note = 2'-O-methyluridine-3'-phosphate
  modified_base 20: mod_base = OTHER; note = 2'-O-methylguanosine-3'-phosphate
  modified_base 21: mod_base = OTHER; note = 2'-O-methyladenosine-3'-phosphate
  modified_base 22: mod_base = OTHER; note = 2'-O-methylguanosine-3'-phosphate
  modified_base 23: mod_base = OTHER; note = 2'-O-methyladenosine
tcactaaattgtactctatgaga

SEQ ID NO: 5337 - RNA, 23 nt, synthetic construct
  source 1..23: mol_type = other RNA
  modified_base 1: mod_base = OTHER; note = 2'-O-methyluridine-3'-phosphate 5'-(E)-Vinylphosphonate
  modified_base 2: mod_base = OTHER; note = 2'-deoxy-2'-fluorouridine-3'-phosphate
  modified_base 3: mod_base = OTHER; note = 2'-O-methylcytidine-3'-phosphate
  modified_base 4: mod_base = OTHER; note = 2'-O-methyladenosine-3'-phosphate
  modified_base 5: mod_base = OTHER; note = 2'-O-methylcytidine-3'-phosphate
  modified_base 6: mod_base = OTHER; note = 2'-deoxy-2'-fluorouridine-3'-phosphate
  modified_base 7: mod_base = OTHER; note = 2'-O-methyladenosine-3'-phosphate
  modified_base 8: mod_base = OTHER; note = 2'-O-methyladenosine-3'-phosphate
  modified_base 9: mod_base = OTHER; note = 2'-O-methyladenosine-3'-phosphate
  modified_base 10: mod_base = OTHER; note = 2'-O-methyluridine-3'-phosphate
  modified_base 11: mod_base = OTHER; note = 2'-O-methyluridine-3'-phosphate
  modified_base 12: mod_base = OTHER; note = 2'-O-methylguanosine-3'-phosphate
  modified_base 13: mod_base = OTHER; note = 2'-O-methyluridine-3'-phosphate
  modified_base 14: mod_base = OTHER; note = 2'-deoxy-2'-fluoroadenosine-3'-phosphate
  modified_base 15: mod_base = OTHER; note = 2'-O-methylcytidine-3'-phosphate
  modified_base 16: mod_base = OTHER; note = 2'-deoxy-2'-fluorouridine-3'-phosphate
  modified_base 17: mod_base = OTHER; note = 2'-O-methylcytidine-3'-phosphate
  modified_base 18: mod_base = OTHER; note = 2'-O-methyluridine-3'-phosphate
  modified_base 19: mod_base = OTHER; note = 2'-O-methyladenosine-3'-phosphate
  modified_base 20: mod_base = OTHER; note = 2'-O-methyluridine-3'-phosphate
  modified_base 21: mod_base = OTHER; note = 2'-O-methylguanosine-3'-phosphate
  modified_base 22: mod_base = OTHER; note = 2'-O-methyladenosine-3'-phosphate
  modified_base 23: mod_base = OTHER; note = 2'-O-methylguanosine
ttcactaaattgtactctatgag

SEQ ID NO: 5338 - RNA, 23 nt, synthetic construct
  source 1..23: mol_type = other RNA
  modified_base 1: mod_base = OTHER; note = 2'-O-methyluridine-3'-phosphate 5'-(E)-Vinylphosphonate
  modified_base 2: mod_base = OTHER; note = 2'-deoxy-2'-fluoroadenosine-3'-phosphate
  modified_base 3: mod_base = OTHER; note = 2'-O-methyluridine-3'-phosphate
  modified_base 4: mod_base = OTHER; note = 2'-O-methylcytidine-3'-phosphate
  modified_base 5: mod_base = OTHER; note = 2'-O-methyladenosine-3'-phosphate
  modified_base 6: mod_base = OTHER; note = 2'-deoxy-2'-fluorocytidine-3'-phosphate
  modified_base 7: mod_base = OTHER; note = 2'-O-methyluridine-3'-phosphate
  modified_base 8: mod_base = OTHER; note = 2'-O-methyladenosine-3'-phosphate
  modified_base 9: mod_base = OTHER; note = 2'-O-methyladenosine-3'-phosphate
  modified_base 10: mod_base = OTHER; note = 2'-O-methyladenosine-3'-phosphate
  modified_base 11: mod_base = OTHER; note = 2'-O-methyluridine-3'-phosphate
  modified_base 12: mod_base = OTHER; note = 2'-O-methyluridine-3'-phosphate
  modified_base 13: mod_base = OTHER; note = 2'-O-methylguanosine-3'-phosphate
  modified_base 14: mod_base = OTHER; note = 2'-deoxy-2'-fluorouridine-3'-phosphate
  modified_base 15: mod_base = OTHER; note = 2'-O-methyladenosine-3'-phosphate
  modified_base 16: mod_base = OTHER; note = 2'-deoxy-2'-fluorocytidine-3'-phosphate
  modified_base 17: mod_base = OTHER; note = 2'-O-methyluridine-3'-phosphate
  modified_base 18: mod_base = OTHER; note = 2'-O-methylcytidine-3'-phosphate
  modified_base 19: mod_base = OTHER; note = 2'-O-methyluridine-3'-phosphate
  modified_base 20: mod_base = OTHER; note = 2'-O-methyladenosine-3'-phosphate
  modified_base 21: mod_base = OTHER; note = 2'-O-methyluridine-3'-phosphate
  modified_base 22: mod_base = OTHER; note = 2'-O-methylguanosine-3'-phosphate
  modified_base 23: mod_base = OTHER; note = 2'-O-methyladenosine
tatcactaaattgtactctatga

SEQ ID NO: 5339 - RNA, 23 nt, synthetic construct
  source 1..23: mol_type = other RNA
  modified_base 1: mod_base = OTHER; note = 2'-O-methyluridine-3'-phosphate 5'-(E)-Vinylphosphonate
  modified_base 2: mod_base = OTHER; note = 2'-deoxy-2'-fluoroadenosine-3'-phosphate
  modified_base 3: mod_base = OTHER; note = 2'-O-methyladenosine-3'-phosphate
  modified_base 4: mod_base = OTHER; note = 2'-O-methyluridine-3'-phosphate
  modified_base 5: mod_base = OTHER; note = 2'-O-methylcytidine-3'-phosphate
  modified_base 6: mod_base = OTHER; note = 2'-deoxy-2'-fluoroadenosine-3'-phosphate
  modified_base 7: mod_base = OTHER; note = 2'-O-methylcytidine-3'-phosphate
  modified_base 8: mod_base = OTHER; note = 2'-O-methyluridine-3'-phosphate
  modified_base 9: mod_base = OTHER; note = 2'-O-methyladenosine-3'-phosphate
  modified_base 10: mod_base = OTHER; note = 2'-O-methyladenosine-3'-phosphate
  modified_base 11: mod_base = OTHER; note = 2'-O-methyladenosine-3'-phosphate
  modified_base 12: mod_base = OTHER; note = 2'-O-methyluridine-3'-phosphate
  modified_base 13: mod_base = OTHER; note = 2'-O-methyluridine-3'-phosphate
  modified_base 14: mod_base = OTHER; note = 2'-deoxy-2'-fluoroguanosine-3'-phosphate
  modified_base 15: mod_base = OTHER; note = 2'-O-methyluridine-3'-phosphate
  modified_base 16: mod_base = OTHER; note = 2'-deoxy-2'-fluoroadenosine-3'-phosphate
  modified_base 17: mod_base = OTHER; note = 2'-O-methylcytidine-3'-phosphate
  modified_base 18: mod_base = OTHER; note = 2'-O-methyluridine-3'-phosphate
  modified_base 19: mod_base = OTHER; note = 2'-O-methylcytidine-3'-phosphate
  modified_base 20: mod_base = OTHER; note = 2'-O-methyluridine-3'-phosphate
  modified_base 21: mod_base = OTHER; note = 2'-O-methyladenosine-3'-phosphate
  modified_base 22: mod_base = OTHER; note = 2'-O-methyluridine-3'-phosphate
  modified_base 23: mod_base = OTHER; note = 2'-O-methylguanosine
taatcactaaattgtactctatg

SEQ ID NO: 5340 - RNA, 23 nt, synthetic construct
  source 1..23: mol_type = other RNA
  modified_base 1: mod_base = OTHER; note = 2'-O-methyluridine-3'-phosphate 5'-(E)-Vinylphosphonate
  modified_base 2: mod_base = OTHER; note = 2'-deoxy-2'-fluorocytidine-3'-phosphate
  modified_base 3: mod_base = OTHER; note = 2'-O-methyladenosine-3'-phosphate
  modified_base 4: mod_base = OTHER; note = 2'-O-methyluridine-3'-phosphate
  modified_base 5: mod_base = OTHER; note = 2'-O-methyladenosine-3'-phosphate
  modified_base 6: mod_base = OTHER; note = 2'-deoxy-2'-fluoroadenosine-3'-phosphate
  modified_base 7: mod_base = OTHER; note = 2'-O-methyluridine-3'-phosphate
  modified_base 8: mod_base = OTHER; note = 2'-O-methylcytidine-3'-phosphate
  modified_base 9: mod_base = OTHER; note = 2'-O-methyladenosine-3'-phosphate
  modified_base 10: mod_base = OTHER; note = 2'-O-methylcytidine-3'-phosphate
  modified_base 11: mod_base = OTHER; note = 2'-O-methyluridine-3'-phosphate
  modified_base 12: mod_base = OTHER; note = 2'-O-methyladenosine-3'-phosphate
  modified_base 13: mod_base = OTHER; note = 2'-O-methyladenosine-3'-phosphate
  modified_base 14: mod_base = OTHER; note = 2'-deoxy-2'-fluoroadenosine-3'-phosphate
  modified_base 15: mod_base = OTHER; note = 2'-O-methyluridine-3'-phosphate
  modified_base 16: mod_base = OTHER; note = 2'-deoxy-2'-fluorouridine-3'-phosphate
  modified_base 17: mod_base = OTHER; note = 2'-O-methylguanosine-3'-phosphate
  modified_base 18: mod_base = OTHER; note = 2'-O-methyluridine-3'-phosphate
  modified_base 19: mod_base = OTHER; note = 2'-O-methyladenosine-3'-phosphate
  modified_base 20: mod_base = OTHER; note = 2'-O-methylcytidine-3'-phosphate
  modified_base 21: mod_base = OTHER; note = 2'-O-methyluridine-3'-phosphate
  modified_base 22: mod_base = OTHER; note = 2'-O-methylcytidine-3'-phosphate
  modified_base 23: mod_base = OTHER; note = 2'-O-methyluridine
tcataatcactaaattgtactct

SEQ ID NO: 5341 - RNA, 23 nt, synthetic construct
  source 1..23: mol_type = other RNA
  modified_base 1: mod_base = OTHER; note = 2'-O-methyluridine-3'-phosphate 5'-(E)-Vinylphosphonate
  modified_base 2: mod_base = OTHER; note = 2'-deoxy-2'-fluoroguanosine-3'-phosphate
  modified_base 3: mod_base = OTHER; note = 2'-O-methylcytidine-3'-phosphate
  modified_base 4: mod_base = OTHER; note = 2'-O-methyladenosine-3'-phosphate
  modified_base 5: mod_base = OTHER; note = 2'-O-methyluridine-3'-phosphate
  modified_base 6: mod_base = OTHER; note = 2'-deoxy-2'-fluoroadenosine-3'-phosphate
  modified_base 7: mod_base = OTHER; note = 2'-O-methyladenosine-3'-phosphate
  modified_base 8: mod_base = OTHER; note = 2'-O-methyluridine-3'-phosphate
  modified_base 9: mod_base = OTHER; note = 2'-O-methylcytidine-3'-phosphate
  modified_base 10: mod_base = OTHER; note = 2'-O-methyladenosine-3'-phosphate
  modified_base 11: mod_base = OTHER; note = 2'-O-methylcytidine-3'-phosphate
  modified_base 12: mod_base = OTHER; note = 2'-O-methyluridine-3'-phosphate
  modified_base 13: mod_base = OTHER; note = 2'-O-methyladenosine-3'-phosphate
  modified_base 14: mod_base = OTHER; note = 2'-deoxy-2'-fluoroadenosine-3'-phosphate
  modified_base 15: mod_base = OTHER; note = 2'-O-methyladenosine-3'-phosphate
  modified_base 16: mod_base = OTHER; note = 2'-deoxy-2'-fluorouridine-3'-phosphate
  modified_base 17: mod_base = OTHER; note = 2'-O-methyluridine-3'-phosphate
  modified_base 18: mod_base = OTHER; note = 2'-O-methylguanosine-3'-phosphate
  modified_base 19: mod_base = OTHER; note = 2'-O-methyluridine-3'-phosphate
  modified_base 20: mod_base = OTHER; note = 2'-O-methyladenosine-3'-phosphate
  modified_base 21: mod_base = OTHER; note = 2'-O-methylcytidine-3'-phosphate
  modified_base 22: mod_base = OTHER; note = 2'-O-methyluridine-3'-phosphate
  modified_base 23: mod_base = OTHER; note = 2'-O-methylcytidine
tgcataatcactaaattgtactc

SEQ ID NO: 5342 - RNA, 23 nt, synthetic construct
  source 1..23: mol_type = other RNA
  modified_base 1: mod_base = OTHER; note = 2'-O-methyluridine-3'-phosphate 5'-(E)-Vinylphosphonate
  modified_base 2: mod_base = OTHER; note = 2'-deoxy-2'-fluoroadenosine-3'-phosphate
  modified_base 3: mod_base = OTHER; note = 2'-O-methylguanosine-3'-phosphate
  modified_base 4: mod_base = OTHER; note = 2'-O-methylcytidine-3'-phosphate
  modified_base 5: mod_base = OTHER; note = 2'-O-methyladenosine-3'-phosphate
  modified_base 6: mod_base = OTHER; note = 2'-deoxy-2'-fluorouridine-3'-phosphate
  modified_base 7: mod_base = OTHER; note = 2'-O-methyladenosine-3'-phosphate
  modified_base 8: mod_base = OTHER; note = 2'-O-methyladenosine-3'-phosphate
  modified_base 9: mod_base = OTHER; note = 2'-O-methyluridine-3'-phosphate
  modified_base 10: mod_base = OTHER; note = 2'-O-methylcytidine-3'-phosphate
  modified_base 11: mod_base = OTHER; note = 2'-O-methyladenosine-3'-phosphate
  modified_base 12: mod_base = OTHER; note = 2'-O-methylcytidine-3'-phosphate
  modified_base 13: mod_base = OTHER; note = 2'-O-methyluridine-3'-phosphate
  modified_base 14: mod_base = OTHER; note = 2'-deoxy-2'-fluoroadenosine-3'-phosphate
  modified_base 15: mod_base = OTHER; note = 2'-O-methyladenosine-3'-phosphate
  modified_base 16: mod_base = OTHER; note = 2'-deoxy-2'-fluoroadenosine-3'-phosphate
  modified_base 17: mod_base = OTHER; note = 2'-O-methyluridine-3'-phosphate
  modified_base 18: mod_base = OTHER; note = 2'-O-methyluridine-3'-phosphate
  modified_base 19: mod_base = OTHER; note = 2'-O-methylguanosine-3'-phosphate
  modified_base 20: mod_base = OTHER; note = 2'-O-methyluridine-3'-phosphate
  modified_base 21: mod_base = OTHER; note = 2'-O-methyladenosine-3'-phosphate
  modified_base 22: mod_base = OTHER; note = 2'-O-methylcytidine-3'-phosphate
  modified_base 23: mod_base = OTHER; note = 2'-O-methyluridine
tagcataatcactaaattgtact

SEQ ID NO: 5343 - RNA, 23 nt, synthetic construct
  source 1..23: mol_type = other RNA
  modified_base 1: mod_base = OTHER; note = 2'-O-methyluridine-3'-phosphate 5'-(E)-Vinylphosphonate
  modified_base 2: mod_base = OTHER; note = 2'-deoxy-2'-fluoroadenosine-3'-phosphate
  modified_base 3: mod_base = OTHER; note = 2'-O-methyladenosine-3'-phosphate
  modified_base 4: mod_base = OTHER; note = 2'-O-methylguanosine-3'-phosphate
  modified_base 5: mod_base = OTHER; note = 2'-O-methylcytidine-3'-phosphate
  modified_base 6: mod_base = OTHER; note = 2'-deoxy-2'-fluoroadenosine-3'-phosphate
  modified_base 7: mod_base = OTHER; note = 2'-O-methyluridine-3'-phosphate
  modified_base 8: mod_base = OTHER; note = 2'-O-methyladenosine-3'-phosphate
  modified_base 9: mod_base = OTHER; note = 2'-O-methyladenosine-3'-phosphate
  modified_base 10: mod_base = OTHER; note = 2'-O-methyluridine-3'-phosphate
  modified_base 11: mod_base = OTHER; note = 2'-O-methylcytidine-3'-phosphate
  modified_base 12: mod_base = OTHER; note = 2'-O-methyladenosine-3'-phosphate
  modified_base 13: mod_base = OTHER; note = 2'-O-methylcytidine-3'-phosphate
  modified_base 14: mod_base = OTHER; note = 2'-deoxy-2'-fluorouridine-3'-phosphate
  modified_base 15: mod_base = OTHER; note = 2'-O-methyladenosine-3'-phosphate
  modified_base 16: mod_base = OTHER; note = 2'-deoxy-2'-fluoroadenosine-3'-phosphate
  modified_base 17: mod_base = OTHER; note = 2'-O-methyladenosine-3'-phosphate
  modified_base 18: mod_base = OTHER; note = 2'-O-methyluridine-3'-phosphate
  modified_base 19: mod_base = OTHER; note = 2'-O-methyluridine-3'-phosphate
  modified_base 20: mod_base = OTHER; note = 2'-O-methylguanosine-3'-phosphate
  modified_base 21: mod_base = OTHER; note = 2'-O-methyluridine-3'-phosphate
  modified_base 22: mod_base = OTHER; note = 2'-O-methyladenosine-3'-phosphate
  modified_base 23: mod_base = OTHER; note = 2'-O-methylcytidine
taagcataatcactaaattgtac

SEQ ID NO: 5344 - RNA, 23 nt, synthetic construct
  source 1..23: mol_type = other RNA
  modified_base 1: mod_base = OTHER; note = 2'-O-methyluridine-3'-phosphate 5'-(E)-Vinylphosphonate
  modified_base 2: mod_base = OTHER; note = 2'-deoxy-2'-fluorouridine-3'-phosphate
  modified_base 3: mod_base = OTHER; note = 2'-O-methylguanosine-3'-phosphate
  modified_base 4: mod_base = OTHER; note = 2'-O-methyladenosine-3'-phosphate
  modified_base 5: mod_base = OTHER; note = 2'-O-methyladenosine-3'-phosphate
  modified_base 6: mod_base = OTHER; note = 2'-deoxy-2'-fluoroadenosine-3'-phosphate
  modified_base 7: mod_base = OTHER; note = 2'-O-methyluridine-3'-phosphate
  modified_base 8: mod_base = OTHER; note = 2'-O-methylguanosine-3'-phosphate
  modified_base 9: mod_base = OTHER; note = 2'-O-methyladenosine-3'-phosphate
  modified_base 10: mod_base = OTHER; note = 2'-O-methyladenosine-3'-phosphate
  modified_base 11: mod_base = OTHER; note = 2'-O-methylguanosine-3'-phosphate
  modified_base 12: mod_base = OTHER; note = 2'-O-methylcytidine-3'-phosphate
  modified_base 13: mod_base = OTHER; note = 2'-O-methyladenosine-3'-phosphate
  modified_base 14: mod_base = OTHER; note = 2'-deoxy-2'-fluorouridine-3'-phosphate
  modified_base 15: mod_base = OTHER; note = 2'-O-methyladenosine-3'-phosphate
  modified_base 16: mod_base = OTHER; note = 2'-deoxy-2'-fluoroadenosine-3'-phosphate
  modified_base 17: mod_base = OTHER; note = 2'-O-methyluridine-3'-phosphate
  modified_base 18: mod_base = OTHER; note = 2'-O-methylcytidine-3'-phosphate
  modified_base 19: mod_base = OTHER; note = 2'-O-methyladenosine-3'-phosphate
  modified_base 20: mod_base = OTHER; note = 2'-O-methylcytidine-3'-phosphate
  modified_base 21: mod_base = OTHER; note = 2'-O-methyluridine-3'-phosphate
  modified_base 22: mod_base = OTHER; note = 2'-O-methyladenosine-3'-phosphate
  modified_base 23: mod_base = OTHER; note = 2'-O-methyladenosine
ttgaaatgaagcataatcactaa

SEQ ID NO: 5345 - RNA, 23 nt, synthetic construct
  source 1..23: mol_type = other RNA
  modified_base 1: mod_base = OTHER; note = 2'-O-methyluridine-3'-phosphate 5'-(E)-Vinylphosphonate
  modified_base 2: mod_base = OTHER; note = 2'-deoxy-2'-fluoroguanosine-3'-phosphate
  modified_base 3: mod_base = OTHER; note = 2'-O-methyluridine-3'-phosphate
  modified_base 4: mod_base = OTHER; note = 2'-O-methylguanosine-3'-phosphate
  modified_base 5: mod_base = OTHER; note = 2'-O-methyladenosine-3'-phosphate
  modified_base 6: mod_base = OTHER; note = 2'-deoxy-2'-fluoroadenosine-3'-phosphate
  modified_base 7: mod_base = OTHER; note = 2'-O-methyladenosine-3'-phosphate
  modified_base 8: mod_base = OTHER; note = 2'-O-methyluridine-3'-phosphate
  modified_base 9: mod_base = OTHER; note = 2'-O-methylguanosine-3'-phosphate
  modified_base 10: mod_base = OTHER; note = 2'-O-methyladenosine-3'-phosphate
  modified_base 11: mod_base = OTHER; note = 2'-O-methyladenosine-3'-phosphate
  modified_base 12: mod_base = OTHER; note = 2'-O-methylguanosine-3'-phosphate
  modified_base 13: mod_base = OTHER; note = 2'-O-methylcytidine-3'-phosphate
  modified_base 14: mod_base = OTHER; note = 2'-deoxy-2'-fluoroadenosine-3'-phosphate
  modified_base 15: mod_base = OTHER; note = 2'-O-methyluridine-3'-phosphate
  modified_base 16: mod_base = OTHER; note = 2'-deoxy-2'-fluoroadenosine-3'-phosphate
  modified_base 17: mod_base = OTHER; note = 2'-O-methyladenosine-3'-phosphate
  modified_base 18: mod_base = OTHER; note = 2'-O-methyluridine-3'-phosphate
  modified_base 19: mod_base = OTHER; note = 2'-O-methylcytidine-3'-phosphate
  modified_base 20: mod_base = OTHER; note = 2'-O-methyladenosine-3'-phosphate
  modified_base 21: mod_base = OTHER; note = 2'-O-methylcytidine-3'-phosphate
  modified_base 22: mod_base = OTHER; note = 2'-O-methyluridine-3'-phosphate
  modified_base 23: mod_base = OTHER; note = 2'-O-methyladenosine
tgtgaaatgaagcataatcacta

SEQ ID NO: 5346 - RNA, 23 nt, synthetic construct
  source 1..23: mol_type = other RNA
  modified_base 1: mod_base = OTHER; note = 2'-O-methyluridine-3'-phosphate 5'-(E)-Vinylphosphonate
  modified_base 2: mod_base = OTHER; note = 2'-deoxy-2'-fluoroadenosine-3'-phosphate
  modified_base 3: mod_base = OTHER; note = 2'-O-methylguanosine-3'-phosphate
  modified_base 4: mod_base = OTHER; note = 2'-O-methyluridine-3'-phosphate
  modified_base 5: mod_base = OTHER; note = 2'-O-methylguanosine-3'-phosphate
  modified_base 6: mod_base = OTHER; note = 2'-deoxy-2'-fluoroadenosine-3'-phosphate
  modified_base 7: mod_base = OTHER; note = 2'-O-methyladenosine-3'-phosphate
  modified_base 8: mod_base = OTHER; note = 2'-O-methyladenosine-3'-phosphate
  modified_base 9: mod_base = OTHER; note = 2'-O-methyluridine-3'-phosphate
  modified_base 10: mod_base = OTHER; note = 2'-O-methylguanosine-3'-phosphate
  modified_base 11: mod_base = OTHER; note = 2'-O-methyladenosine-3'-phosphate
  modified_base 12: mod_base = OTHER; note = 2'-O-methyladenosine-3'-phosphate
  modified_base 13: mod_base = OTHER; note = 2'-O-methylguanosine-3'-phosphate
  modified_base 14: mod_base = OTHER; note = 2'-deoxy-2'-fluorocytidine-3'-phosphate
  modified_base 15: mod_base = OTHER; note = 2'-O-methyladenosine-3'-phosphate
  modified_base 16: mod_base = OTHER; note = 2'-deoxy-2'-fluorouridine-3'-phosphate
  modified_base 17: mod_base = OTHER; note = 2'-O-methyladenosine-3'-phosphate
  modified_base 18: mod_base = OTHER; note = 2'-O-methyladenosine-3'-phosphate
  modified_base 19: mod_base = OTHER; note = 2'-O-methyluridine-3'-phosphate
  modified_base 20: mod_base = OTHER; note = 2'-O-methylcytidine-3'-phosphate
  modified_base 21: mod_base = OTHER; note = 2'-O-methyladenosine-3'-phosphate
  modified_base 22: mod_base = OTHER; note = 2'-O-methylcytidine-3'-phosphate
  modified_base 23: mod_base = OTHER; note = 2'-O-methyluridine
tagtgaaatgaagcataatcact

SEQ ID NO: 5347 - RNA, 23 nt, synthetic construct
  source 1..23: mol_type = other RNA
  modified_base 1: mod_base = OTHER; note = 2'-O-methyluridine-3'-phosphate 5'-(E)-Vinylphosphonate
  modified_base 2: mod_base = OTHER; note = 2'-deoxy-2'-fluorouridine-3'-phosphate
  modified_base 3: mod_base = OTHER; note = 2'-O-methyladenosine-3'-phosphate
  modified_base 4: mod_base = OTHER; note = 2'-O-methylguanosine-3'-phosphate
  modified_base 5: mod_base = OTHER; note = 2'-O-methyluridine-3'-phosphate
  modified_base 6: mod_base = OTHER; note = 2'-deoxy-2'-fluoroguanosine-3'-phosphate
  modified_base 7: mod_base = OTHER; note = 2'-O-methyladenosine-3'-phosphate
  modified_base 8: mod_base = OTHER; note = 2'-O-methyladenosine-3'-phosphate
  modified_base 9: mod_base = OTHER; note = 2'-O-methyladenosine-3'-phosphate
  modified_base 10: mod_base = OTHER; note = 2'-O-methyluridine-3'-phosphate
  modified_base 11: mod_base = OTHER; note = 2'-O-methylguanosine-3'-phosphate
  modified_base 12: mod_base = OTHER; note = 2'-O-methyladenosine-3'-phosphate
  modified_base 13: mod_base = OTHER; note = 2'-O-methyladenosine-3'-phosphate
  modified_base 14: mod_base = OTHER; note = 2'-deoxy-2'-fluoroguanosine-3'-phosphate
  modified_base 15: mod_base = OTHER; note = 2'-O-methylcytidine-3'-phosphate
  modified_base 16: mod_base = OTHER; note = 2'-deoxy-2'-fluoroadenosine-3'-phosphate
  modified_base 17: mod_base = OTHER; note = 2'-O-methyluridine-3'-phosphate
  modified_base 18: mod_base = OTHER; note = 2'-O-methyladenosine-3'-phosphate
  modified_base 19: mod_base = OTHER; note = 2'-O-methyladenosine-3'-phosphate
  modified_base 20: mod_base = OTHER; note = 2'-O-methyluridine-3'-phosphate
  modified_base 21: mod_base = OTHER; note = 2'-O-methylcytidine-3'-phosphate
  modified_base 22: mod_base = OTHER; note = 2'-O-methyladenosine-3'-phosphate
  modified_base 23: mod_base = OTHER; note = 2'-O-methylcytidine
ttagtgaaatgaagcataatcac

SEQ ID NO: 5348 - RNA, 23 nt, synthetic construct
  source 1..23: mol_type = other RNA
  modified_base 1: mod_base = OTHER; note = 2'-O-methyluridine-3'-phosphate 5'-(E)-Vinylphosphonate
  modified_base 2: mod_base = OTHER; note = 2'-deoxy-2'-fluoroadenosine-3'-phosphate
  modified_base 3: mod_base = OTHER; note = 2'-O-methyluridine-3'-phosphate
  modified_base 4: mod_base = OTHER; note = 2'-O-methyladenosine-3'-phosphate
  modified_base 5: mod_base = OTHER; note = 2'-O-methylguanosine-3'-phosphate
  modified_base 6: mod_base = OTHER; note = 2'-deoxy-2'-fluorouridine-3'-phosphate
  modified_base 7: mod_base = OTHER; note = 2'-O-methylguanosine-3'-phosphate
  modified_base 8: mod_base = OTHER; note = 2'-O-methyladenosine-3'-phosphate
  modified_base 9: mod_base = OTHER; note = 2'-O-methyladenosine-3'-phosphate
  modified_base 10: mod_base = OTHER; note = 2'-O-methyladenosine-3'-phosphate
  modified_base 11: mod_base = OTHER; note = 2'-O-methyluridine-3'-phosphate
  modified_base 12: mod_base = OTHER; note = 2'-O-methylguanosine-3'-phosphate
  modified_base 13: mod_base = OTHER; note = 2'-O-methyladenosine-3'-phosphate
  modified_base 14: mod_base = OTHER; note = 2'-deoxy-2'-fluoroadenosine-3'-phosphate
  modified_base 15: mod_base = OTHER; note = 2'-O-methylguanosine-3'-phosphate
  modified_base 16: mod_base = OTHER; note = 2'-deoxy-2'-fluorocytidine-3'-phosphate
  modified_base 17: mod_base = OTHER; note = 2'-O-methyladenosine-3'-phosphate
  modified_base 18: mod_base = OTHER; note = 2'-O-methyluridine-3'-phosphate
  modified_base 19: mod_base = OTHER; note = 2'-O-methyladenosine-3'-phosphate
  modified_base 20: mod_base = OTHER; note = 2'-O-methyladenosine-3'-phosphate
  modified_base 21: mod_base = OTHER; note = 2'-O-methyluridine-3'-phosphate
  modified_base 22: mod_base = OTHER; note = 2'-O-methylcytidine-3'-phosphate
  modified_base 23: mod_base = OTHER; note = 2'-O-methyladenosine
tatagtgaaatgaagcataatca

SEQ ID NO: 5349 - RNA, 23 nt, synthetic construct
  source 1..23: mol_type = other RNA
  modified_base 1: mod_base = OTHER; note = 2'-O-methyluridine-3'-phosphate 5'-(E)-Vinylphosphonate
  modified_base 2: mod_base = OTHER; note = 2'-deoxy-2'-fluorocytidine-3'-phosphate
  modified_base 3: mod_base = OTHER; note = 2'-O-methyladenosine-3'-phosphate
  modified_base 4: mod_base = OTHER; note = 2'-O-methyluridine-3'-phosphate
  modified_base 5: mod_base = OTHER; note = 2'-O-methyladenosine-3'-phosphate
  modified_base 6: mod_base = OTHER; note = 2'-deoxy-2'-fluoroguanosine-3'-phosphate
  modified_base 7: mod_base = OTHER; note = 2'-O-methyluridine-3'-phosphate
  modified_base 8: mod_base = OTHER; note = 2'-O-methylguanosine-3'-phosphate
  modified_base 9: mod_base = OTHER; note = 2'-O-methyladenosine-3'-phosphate
  modified_base 10: mod_base = OTHER; note = 2'-O-methyladenosine-3'-phosphate
  modified_base 11: mod_base = OTHER; note = 2'-O-methyladenosine-3'-phosphate
  modified_base 12: mod_base = OTHER; note = 2'-O-methyluridine-3'-phosphate
  modified_base 13: mod_base = OTHER; note = 2'-O-methylguanosine-3'-phosphate
  modified_base 14: mod_base = OTHER; note = 2'-deoxy-2'-fluoroadenosine-3'-phosphate
  modified_base 15: mod_base = OTHER; note = 2'-O-methyladenosine-3'-phosphate
  modified_base 16: mod_base = OTHER; note = 2'-deoxy-2'-fluoroguanosine-3'-phosphate
  modified_base 17: mod_base = OTHER; note = 2'-O-methylcytidine-3'-phosphate
  modified_base 18: mod_base = OTHER; note = 2'-O-methyladenosine-3'-phosphate
  modified_base 19: mod_base = OTHER; note = 2'-O-methyluridine-3'-phosphate
  modified_base 20: mod_base = OTHER; note = 2'-O-methyladenosine-3'-phosphate
  modified_base 21: mod_base = OTHER; note = 2'-O-methyladenosine-3'-phosphate
  modified_base 22: mod_base = OTHER; note = 2'-O-methyluridine-3'-phosphate
  modified_base 23: mod_base = OTHER; note = 2'-O-methylcytidine
tcatagtgaaatgaagcataatc

SEQ ID NO: 5350 - RNA, 23 nt, synthetic construct
  source 1..23: mol_type = other RNA
  modified_base 1: mod_base = OTHER; note = 2'-O-methyluridine-3'-phosphate 5'-(E)-Vinylphosphonate
  modified_base 2: mod_base = OTHER; note = 2'-deoxy-2'-fluorocytidine-3'-phosphate
  modified_base 3: mod_base = OTHER; note = 2'-O-methylcytidine-3'-phosphate
  modified_base 4: mod_base = OTHER; note = 2'-O-methyladenosine-3'-phosphate
  modified_base 5: mod_base = OTHER; note = 2'-O-methyluridine-3'-phosphate
  modified_base 6: mod_base = OTHER; note = 2'-deoxy-2'-fluoroadenosine-3'-phosphate
  modified_base 7: mod_base = OTHER; note = 2'-O-methylguanosine-3'-phosphate
  modified_base 8: mod_base = OTHER; note = 2'-O-methyluridine-3'-phosphate
  modified_base 9: mod_base = OTHER; note = 2'-O-methylguanosine-3'-phosphate
  modified_base 10: mod_base = OTHER; note = 2'-O-methyladenosine-3'-phosphate
  modified_base 11: mod_base = OTHER; note = 2'-O-methyladenosine-3'-phosphate
  modified_base 12: mod_base = OTHER; note = 2'-O-methyladenosine-3'-phosphate
  modified_base 13: mod_base = OTHER; note = 2'-O-methyluridine-3'-phosphate
  modified_base 14: mod_base = OTHER; note = 2'-deoxy-2'-fluoroguanosine-3'-phosphate
  modified_base 15: mod_base = OTHER; note = 2'-O-methyladenosine-3'-phosphate
  modified_base 16: mod_base = OTHER; note = 2'-deoxy-2'-fluoroadenosine-3'-phosphate
  modified_base 17: mod_base = OTHER; note = 2'-O-methylguanosine-3'-phosphate
  modified_base 18: mod_base = OTHER; note = 2'-O-methylcytidine-3'-phosphate
  modified_base 19: mod_base = OTHER; note = 2'-O-methyladenosine-3'-phosphate
  modified_base 20: mod_base = OTHER; note = 2'-O-methyluridine-3'-phosphate
  modified_base 21: mod_base = OTHER; note = 2'-O-methyladenosine-3'-phosphate
  modified_base 22: mod_base = OTHER; note = 2'-O-methyladenosine-3'-phosphate
  modified_base 23: mod_base = OTHER; note = 2'-O-methyluridine
tccatagtgaaatgaagcataat

SEQ ID NO: 5351 - RNA, 23 nt, synthetic construct
  source 1..23: mol_type = other RNA
  modified_base 1: mod_base = OTHER; note = 2'-O-methyluridine-3'-phosphate 5'-(E)-Vinylphosphonate
  modified_base 2: mod_base = OTHER; note = 2'-deoxy-2'-fluorouridine-3'-phosphate
  modified_base 3: mod_base = OTHER; note = 2'-O-methylcytidine-3'-phosphate
  modified_base 4: mod_base = OTHER; note = 2'-O-methylcytidine-3'-phosphate
  modified_base 5: mod_base = OTHER; note = 2'-O-methyladenosine-3'-phosphate
  modified_base 6: mod_base = OTHER; note = 2'-deoxy-2'-fluorouridine-3'-phosphate
  modified_base 7: mod_base = OTHER; note = 2'-O-methyladenosine-3'-phosphate
  modified_base 8: mod_base = OTHER; note = 2'-O-methylguanosine-3'-phosphate
  modified_base 9: mod_base = OTHER; note = 2'-O-methyluridine-3'-phosphate
  modified_base 10: mod_base = OTHER; note = 2'-O-methylguanosine-3'-phosphate
  modified_base 11: mod_base = OTHER; note = 2'-O-methyladenosine-3'-phosphate
  modified_base 12: mod_base = OTHER; note = 2'-O-methyladenosine-3'-phosphate
  modified_base 13: mod_base = OTHER; note = 2'-O-methyladenosine-3'-phosphate
  modified_base 14: mod_base = OTHER; note = 2'-deoxy-2'-fluorouridine-3'-phosphate
  modified_base 15: mod_base = OTHER; note = 2'-O-methylguanosine-3'-phosphate
  modified_base 16: mod_base = OTHER; note = 2'-deoxy-2'-fluoroadenosine-3'-phosphate
  modified_base 17: mod_base = OTHER; note = 2'-O-methyladenosine-3'-phosphate
  modified_base 18: mod_base = OTHER; note = 2'-O-methylguanosine-3'-phosphate
  modified_base 19: mod_base = OTHER; note = 2'-O-methylcytidine-3'-phosphate
  modified_base 20: mod_base = OTHER; note = 2'-O-methyladenosine-3'-phosphate
  modified_base 21: mod_base = OTHER; note = 2'-O-methyluridine-3'-phosphate
  modified_base 22: mod_base = OTHER; note = 2'-O-methyladenosine-3'-phosphate
  modified_base 23: mod_base = OTHER; note = 2'-O-methyladenosine
ttccatagtgaaatgaagcataa

SEQ ID NO: 5352 - RNA, 23 nt, synthetic construct
  source 1..23: mol_type = other RNA
  modified_base 1: mod_base = OTHER; note = 2'-O-methyluridine-3'-phosphate 5'-(E)-Vinylphosphonate
  modified_base 2: mod_base = OTHER; note = 2'-deoxy-2'-fluorouridine-3'-phosphate
  modified_base 3: mod_base = OTHER; note = 2'-O-methyluridine-3'-phosphate
  modified_base 4: mod_base = OTHER; note = 2'-O-methylcytidine-3'-phosphate
  modified_base 5: mod_base = OTHER; note = 2'-O-methylcytidine-3'-phosphate
  modified_base 6: mod_base = OTHER; note = 2'-deoxy-2'-fluoroadenosine-3'-phosphate
  modified_base 7: mod_base = OTHER; note = 2'-O-methyluridine-3'-phosphate
  modified_base 8: mod_base = OTHER; note = 2'-O-methyladenosine-3'-phosphate
  modified_base 9: mod_base = OTHER; note = 2'-O-methylguanosine-3'-phosphate
  modified_base 10: mod_base = OTHER; note = 2'-O-methyluridine-3'-phosphate
  modified_base 11: mod_base = OTHER; note = 2'-O-methylguanosine-3'-phosphate
  modified_base 12: mod_base = OTHER; note = 2'-O-methyladenosine-3'-phosphate
  modified_base 13: mod_base = OTHER; note = 2'-O-methyladenosine-3'-phosphate
  modified_base 14: mod_base = OTHER; note = 2'-deoxy-2'-fluoroadenosine-3'-phosphate
  modified_base 15: mod_base = OTHER; note = 2'-O-methyluridine-3'-phosphate
  modified_base 16: mod_base = OTHER; note = 2'-deoxy-2'-fluoroguanosine-3'-phosphate
  modified_base 17: mod_base = OTHER; note = 2'-O-methyladenosine-3'-phosphate
  modified_base 18: mod_base = OTHER; note = 2'-O-methyladenosine-3'-phosphate
  modified_base 19: mod_base = OTHER; note = 2'-O-methylguanosine-3'-phosphate
  modified_base 20: mod_base = OTHER; note = 2'-O-methylcytidine-3'-phosphate
  modified_base 21: mod_base = OTHER; note = 2'-O-methyladenosine-3'-phosphate
  modified_base 22: mod_base = OTHER; note = 2'-O-methyluridine-3'-phosphate
  modified_base 23: mod_base = OTHER; note = 2'-O-methyladenosine
tttccatagtgaaatgaagcata

SEQ ID NO: 5353 - RNA, 23 nt, synthetic construct
  source 1..23: mol_type = other RNA
  modified_base 1: mod_base = OTHER; note = 2'-O-methyluridine-3'-phosphate 5'-(E)-Vinylphosphonate
  modified_base 2: mod_base = OTHER; note = 2'-deoxy-2'-fluorouridine-3'-phosphate
  modified_base 3: mod_base = OTHER; note = 2'-O-methyluridine-3'-phosphate
  modified_base 4: mod_base = OTHER; note = 2'-O-methyluridine-3'-phosphate
  modified_base 5: mod_base = OTHER; note = 2'-O-methylcytidine-3'-phosphate
  modified_base 6: mod_base = OTHER; note = 2'-deoxy-2'-fluorocytidine-3'-phosphate
  modified_base 7: mod_base = OTHER; note = 2'-O-methyladenosine-3'-phosphate
  modified_base 8: mod_base = OTHER; note = 2'-O-methyluridine-3'-phosphate
  modified_base 9: mod_base = OTHER; note = 2'-O-methyladenosine-3'-phosphate
  modified_base 10: mod_base = OTHER; note = 2'-O-methylguanosine-3'-phosphate
  modified_base 11: mod_base = OTHER; note = 2'-O-methyluridine-3'-phosphate
  modified_base 12: mod_base = OTHER; note = 2'-O-methylguanosine-3'-phosphate
  modified_base 13: mod_base = OTHER; note = 2'-O-methyladenosine-3'-phosphate
  modified_base 14: mod_base = OTHER; note = 2'-deoxy-2'-fluoroadenosine-3'-phosphate
  modified_base 15: mod_base = OTHER; note = 2'-O-methyladenosine-3'-phosphate
  modified_base 16: mod_base = OTHER; note = 2'-deoxy-2'-fluorouridine-3'-phosphate
  modified_base 17: mod_base = OTHER; note = 2'-O-methylguanosine-3'-phosphate
  modified_base 18: mod_base = OTHER; note = 2'-O-methyladenosine-3'-phosphate
  modified_base 19: mod_base = OTHER; note = 2'-O-methyladenosine-3'-phosphate
  modified_base 20: mod_base = OTHER; note = 2'-O-methylguanosine-3'-phosphate
  modified_base 21: mod_base = OTHER; note = 2'-O-methylcytidine-3'-phosphate
  modified_base 22: mod_base = OTHER; note = 2'-O-methyladenosine-3'-phosphate
  modified_base 23: mod_base = OTHER; note = 2'-O-methyluridine
ttttccatagtgaaatgaagcat

SEQ ID NO: 5354 - RNA, 23 nt, synthetic construct
  source 1..23: mol_type = other RNA
  modified_base 1: mod_base = OTHER; note = 2'-O-methyluridine-3'-phosphate 5'-(E)-Vinylphosphonate
  modified_base 2: mod_base = OTHER; note = 2'-deoxy-2'-fluoroadenosine-3'-phosphate
  modified_base 3: mod_base = OTHER; note = 2'-O-methyluridine-3'-phosphate
  modified_base 4: mod_base = OTHER; note = 2'-O-methyluridine-3'-phosphate
  modified_base 5: mod_base = OTHER; note = 2'-O-methyluridine-3'-phosphate
  modified_base 6: mod_base = OTHER; note = 2'-deoxy-2'-fluorocytidine-3'-phosphate
  modified_base 7: mod_base = OTHER; note = 2'-O-methylcytidine-3'-phosphate
  modified_base 8: mod_base = OTHER; note = 2'-O-methyladenosine-3'-phosphate
  modified_base 9: mod_base = OTHER; note = 2'-O-methyluridine-3'-phosphate
  modified_base 10: mod_base = OTHER; note = 2'-O-methyladenosine-3'-phosphate
  modified_base 11: mod_base = OTHER; note = 2'-O-methylguanosine-3'-phosphate
  modified_base 12: mod_base = OTHER; note = 2'-O-methyluridine-3'-phosphate
  modified_base 13: mod_base = OTHER; note = 2'-O-methylguanosine-3'-phosphate
  modified_base 14: mod_base = OTHER; note = 2'-deoxy-2'-fluoroadenosine-3'-phosphate
  modified_base 15: mod_base = OTHER; note = 2'-O-methyladenosine-3'-phosphate
  modified_base 16: mod_base = OTHER; note = 2'-deoxy-2'-fluoroadenosine-3'-phosphate
  modified_base 17: mod_base = OTHER; note = 2'-O-methyluridine-3'-phosphate
  modified_base 18: mod_base = OTHER; note = 2'-O-methylguanosine-3'-phosphate
  modified_base 19: mod_base = OTHER; note = 2'-O-methyladenosine-3'-phosphate
  modified_base 20: mod_base = OTHER; note = 2'-O-methyladenosine-3'-phosphate
  modified_base 21: mod_base = OTHER; note = 2'-O-methylguanosine-3'-phosphate
  modified_base 22: mod_base = OTHER; note = 2'-O-methylcytidine-3'-phosphate
  modified_base 23: mod_base = OTHER; note = 2'-O-methyladenosine
tatttccatagtgaaatgaagca

SEQ ID NO: 5355 - RNA, 23 nt, synthetic construct
  source 1..23: mol_type = other RNA
  modified_base 1: mod_base = OTHER; note = 2'-O-methyluridine-3'-phosphate 5'-(E)-Vinylphosphonate
  modified_base 2: mod_base = OTHER; note = 2'-deoxy-2'-fluorouridine-3'-phosphate
  modified_base 3: mod_base = OTHER; note = 2'-O-methyladenosine-3'-phosphate
  modified_base 4: mod_base = OTHER; note = 2'-O-methyluridine-3'-phosphate
  modified_base 5: mod_base = OTHER; note = 2'-O-methyluridine-3'-phosphate
  modified_base 6: mod_base = OTHER; note = 2'-deoxy-2'-fluorouridine-3'-phosphate
  modified_base 7: mod_base = OTHER; note = 2'-O-methylcytidine-3'-phosphate
  modified_base 8: mod_base = OTHER; note = 2'-O-methylcytidine-3'-phosphate
  modified_base 9: mod_base = OTHER; note = 2'-O-methyladenosine-3'-phosphate
  modified_base 10: mod_base = OTHER; note = 2'-O-methyluridine-3'-phosphate
  modified_base 11: mod_base = OTHER; note = 2'-O-methyladenosine-3'-phosphate
  modified_base 12: mod_base = OTHER; note = 2'-O-methylguanosine-3'-phosphate
  modified_base 13: mod_base = OTHER; note = 2'-O-methyluridine-3'-phosphate
  modified_base 14: mod_base = OTHER; note = 2'-deoxy-2'-fluoroguanosine-3'-phosphate
  modified_base 15: mod_base = OTHER; note = 2'-O-methyladenosine-3'-phosphate
  modified_base 16: mod_base = OTHER; note = 2'-deoxy-2'-fluoroadenosine-3'-phosphate
  modified_base 17: mod_base = OTHER; note = 2'-O-methyladenosine-3'-phosphate
  modified_base 18: mod_base = OTHER; note = 2'-O-methyluridine-3'-phosphate
  modified_base 19: mod_base = OTHER; note = 2'-O-methylguanosine-3'-phosphate
  modified_base 20: mod_base = OTHER; note = 2'-O-methyladenosine-3'-phosphate
  modified_base 21: mod_base = OTHER; note = 2'-O-methyladenosine-3'-phosphate
  modified_base 22: mod_base = OTHER; note = 2'-O-methylguanosine-3'-phosphate
  modified_base 23: mod_base = OTHER; note = 2'-O-methylcytidine
ttatttccatagtgaaatgaagc

SEQ ID NO: 5356 - RNA, 23 nt, synthetic construct
  source 1..23: mol_type = other RNA
  modified_base 1: mod_base = OTHER; note = 2'-O-methyluridine-3'-phosphate 5'-(E)-Vinylphosphonate
  modified_base 2: mod_base = OTHER; note = 2'-deoxy-2'-fluoroadenosine-3'-phosphate
  modified_base 3: mod_base = OTHER; note = 2'-O-methyluridine-3'-phosphate
  modified_base 4: mod_base = OTHER; note = 2'-O-methyladenosine-3'-phosphate
  modified_base 5: mod_base = OTHER; note = 2'-O-methyluridine-3'-phosphate
  modified_base 6: mod_base = OTHER; note = 2'-deoxy-2'-fluorouridine-3'-phosphate
  modified_base 7: mod_base = OTHER; note = 2'-O-methyluridine-3'-phosphate
  modified_base 8: mod_base = OTHER; note = 2'-O-methylcytidine-3'-phosphate
  modified_base 9: mod_base = OTHER; note = 2'-O-methylcytidine-3'-phosphate
  modified_base 10: mod_base = OTHER; note = 2'-O-methyladenosine-3'-phosphate
  modified_base 11: mod_base = OTHER; note = 2'-O-methyluridine-3'-phosphate
  modified_base 12: mod_base = OTHER; note = 2'-O-methyladenosine-3'-phosphate
  modified_base 13: mod_base = OTHER; note = 2'-O-methylguanosine-3'-phosphate
  modified_base 14: mod_base = OTHER; note = 2'-deoxy-2'-fluorouridine-3'-phosphate
  modified_base 15: mod_base = OTHER; note = 2'-O-methylguanosine-3'-phosphate
  modified_base 16: mod_base = OTHER; note = 2'-deoxy-2'-fluoroadenosine-3'-phosphate
  modified_base 17: mod_base = OTHER; note = 2'-O-methyladenosine-3'-phosphate
  modified_base 18: mod_base = OTHER; note = 2'-O-methyladenosine-3'-phosphate
  modified_base 19: mod_base = OTHER; note = 2'-O-methyluridine-3'-phosphate
  modified_base 20: mod_base = OTHER; note = 2'-O-methylguanosine-3'-phosphate
  modified_base 21: mod_base = OTHER; note = 2'-O-methyladenosine-3'-phosphate
  modified_base 22: mod_base = OTHER; note = 2'-O-methyladenosine-3'-phosphate
  modified_base 23: mod_base = OTHER; note = 2'-O-methylguanosine
tatatttccatagtgaaatgaag

SEQ ID NO: 5357 - RNA, 23 nt, synthetic construct
  source 1..23: mol_type = other RNA
  modified_base 1: mod_base = OTHER; note = 2'-O-methyluridine-3'-phosphate 5'-(E)-Vinylphosphonate
  modified_base 2: mod_base = OTHER; note = 2'-deoxy-2'-fluoroadenosine-3'-phosphate
  modified_base 3: mod_base = OTHER; note = 2'-O-methyladenosine-3'-phosphate
  modified_base 4: mod_base = OTHER; note = 2'-O-methylcytidine-3'-phosphate
  modified_base 5: mod_base = OTHER; note = 2'-O-methyladenosine-3'-phosphate
  modified_base 6: mod_base = OTHER; note = 2'-deoxy-2'-fluorouridine-3'-phosphate
  modified_base 7: mod_base = OTHER; note = 2'-O-methyladenosine-3'-phosphate
  modified_base 8: mod_base = OTHER; note = 2'-O-methyluridine-3'-phosphate
  modified_base 9: mod_base = OTHER; note = 2'-O-methyluridine-3'-phosphate
  modified_base 10: mod_base = OTHER; note = 2'-O-methyluridine-3'-phosphate
  modified_base 11: mod_base = OTHER; note = 2'-O-methylcytidine-3'-phosphate
  modified_base 12: mod_base = OTHER; note = 2'-O-methylcytidine-3'-phosphate
  modified_base 13: mod_base = OTHER; note = 2'-O-methyladenosine-3'-phosphate
  modified_base 14: mod_base = OTHER; note = 2'-deoxy-2'-fluorouridine-3'-phosphate
  modified_base 15: mod_base = OTHER; note = 2'-O-methyladenosine-3'-phosphate
  modified_base 16: mod_base = OTHER; note = 2'-deoxy-2'-fluoroguanosine-3'-phosphate
  modified_base 17: mod_base = OTHER; note = 2'-O-methyluridine-3'-phosphate
  modified_base 18: mod_base = OTHER; note = 2'-O-methylguanosine-3'-phosphate
  modified_base 19: mod_base = OTHER; note = 2'-O-methyladenosine-3'-phosphate
  modified_base 20: mod_base = OTHER; note = 2'-O-methyladenosine-3'-phosphate
  modified_base 21: mod_base = OTHER; note = 2'-O-methyladenosine-3'-phosphate
  modified_base 22: mod_base = OTHER; note = 2'-O-methyluridine-3'-phosphate
  modified_base 23: mod_base = OTHER; note = 2'-O-methylguanosine
taacatatttccatagtgaaatg

SEQ ID NO: 5358 - RNA, 23 nt, synthetic construct
  source 1..23: mol_type = other RNA
  modified_base 1: mod_base = OTHER; note = 2'-O-methyluridine-3'-phosphate 5'-(E)-Vinylphosphonate
  modified_base 2: mod_base = OTHER; note = 2'-deoxy-2'-fluorocytidine-3'-phosphate
  modified_base 3: mod_base = OTHER; note = 2'-O-methyladenosine-3'-phosphate
  modified_base 4: mod_base = OTHER; note = 2'-O-methylguanosine-3'-phosphate
  modified_base 5: mod_base = OTHER; note = 2'-O-methyluridine-3'-phosphate
  modified_base 6: mod_base = OTHER; note = 2'-deoxy-2'-fluoroadenosine-3'-phosphate
  modified_base 7: mod_base = OTHER; note = 2'-O-methyladenosine-3'-phosphate
  modified_base 8: mod_base = OTHER; note = 2'-O-methylcytidine-3'-phosphate
  modified_base 9: mod_base = OTHER; note = 2'-O-methyladenosine-3'-phosphate
  modified_base 10: mod_base = OTHER; note = 2'-O-methyluridine-3'-phosphate
  modified_base 11: mod_base = OTHER; note = 2'-O-methyladenosine-3'-phosphate
  modified_base 12: mod_base = OTHER; note = 2'-O-methyluridine-3'-phosphate
  modified_base 13: mod_base = OTHER; note = 2'-O-methyluridine-3'-phosphate
  modified_base 14: mod_base = OTHER; note = 2'-deoxy-2'-fluorouridine-3'-phosphate
  modified_base 15: mod_base = OTHER; note = 2'-O-methylcytidine-3'-phosphate
  modified_base 16: mod_base = OTHER; note = 2'-deoxy-2'-fluorocytidine-3'-phosphate
  modified_base 17: mod_base = OTHER; note = 2'-O-methyladenosine-3'-phosphate
  modified_base 18: mod_base = OTHER; note = 2'-O-methyluridine-3'-phosphate
  modified_base 19: mod_base = OTHER; note = 2'-O-methyladenosine-3'-phosphate
  modified_base 20: mod_base = OTHER; note = 2'-O-methylguanosine-3'-phosphate
  modified_base 21: mod_base = OTHER; note = 2'-O-methyluridine-3'-phosphate
  modified_base 22: mod_base = OTHER; note = 2'-O-methylguanosine-3'-phosphate
  modified_base 23: mod_base = OTHER; note = 2'-O-methyladenosine
tcagtaacatatttccatagtga

SEQ ID NO: 5359 - RNA, 23 nt, synthetic construct
  source 1..23: mol_type = other RNA
  modified_base 1: mod_base = OTHER; note = 2'-O-methyluridine-3'-phosphate 5'-(E)-Vinylphosphonate
  modified_base 2: mod_base = OTHER; note = 2'-deoxy-2'-fluorouridine-3'-phosphate
  modified_base 3: mod_base = OTHER; note = 2'-O-methylcytidine-3'-phosphate
  modified_base 4: mod_base = OTHER; note = 2'-O-methyladenosine-3'-phosphate
  modified_base 5: mod_base = OTHER; note = 2'-O-methylguanosine-3'-phosphate
  modified_base 6: mod_base = OTHER; note = 2'-deoxy-2'-fluorouridine-3'-phosphate
  modified_base 7: mod_base = OTHER; note = 2'-O-methyladenosine-3'-phosphate
  modified_base 8: mod_base = OTHER; note = 2'-O-methyladenosine-3'-phosphate
  modified_base 9: mod_base = OTHER; note = 2'-O-methylcytidine-3'-phosphate
  modified_base 10: mod_base = OTHER; note = 2'-O-methyladenosine-3'-phosphate
  modified_base 11: mod_base = OTHER; note = 2'-O-methyluridine-3'-phosphate
  modified_base 12: mod_base = OTHER; note = 2'-O-methyladenosine-3'-phosphate
  modified_base 13: mod_base = OTHER; note = 2'-O-methyluridine-3'-phosphate
  modified_base 14: mod_base = OTHER; note = 2'-deoxy-2'-fluorouridine-3'-phosphate
  modified_base 15: mod_base = OTHER; note = 2'-O-methyluridine-3'-phosphate
  modified_base 16: mod_base = OTHER; note = 2'-deoxy-2'-fluorocytidine-3'-phosphate
  modified_base 17: mod_base = OTHER; note = 2'-O-methylcytidine-3'-phosphate
  modified_base 18: mod_base = OTHER; note = 2'-O-methyladenosine-3'-phosphate
  modified_base 19: mod_base = OTHER; note = 2'-O-methyluridine-3'-phosphate
  modified_base 20: mod_base = OTHER; note = 2'-O-methyladenosine-3'-phosphate
  modified_base 21: mod_base = OTHER; note = 2'-O-methylguanosine-3'-phosphate
  modified_base 22: mod_base = OTHER; note = 2'-O-methyluridine-3'-phosphate
  modified_base 23: mod_base = OTHER; note = 2'-O-methylguanosine
ttcagtaacatatttccatagtg

SEQ ID NO: 5360 - RNA, 23 nt, synthetic construct
  source 1..23: mol_type = other RNA
  modified_base 1: mod_base = OTHER; note = 2'-O-methyluridine-3'-phosphate 5'-(E)-Vinylphosphonate
  modified_base 2: mod_base = OTHER; note = 2'-deoxy-2'-fluorouridine-3'-phosphate
  modified_base 3: mod_base = OTHER; note = 2'-O-methyluridine-3'-phosphate
  modified_base 4: mod_base = OTHER; note = 2'-O-methylcytidine-3'-phosphate
  modified_base 5: mod_base = OTHER; note = 2'-O-methyladenosine-3'-phosphate
  modified_base 6: mod_base = OTHER; note = 2'-deoxy-2'-fluoroguanosine-3'-phosphate
  modified_base 7: mod_base = OTHER; note = 2'-O-methyluridine-3'-phosphate
  modified_base 8: mod_base = OTHER; note = 2'-O-methyladenosine-3'-phosphate
  modified_base 9: mod_base = OTHER; note = 2'-O-methyladenosine-3'-phosphate
  modified_base 10: mod_base = OTHER; note = 2'-O-methylcytidine-3'-phosphate
  modified_base 11: mod_base = OTHER; note = 2'-O-methyladenosine-3'-phosphate
  modified_base 12: mod_base = OTHER; note = 2'-O-methyluridine-3'-phosphate
  modified_base 13: mod_base = OTHER; note = 2'-O-methyladenosine-3'-phosphate
  modified_base 14: mod_base = OTHER; note = 2'-deoxy-2'-fluorouridine-3'-phosphate
  modified_base 15: mod_base = OTHER; note = 2'-O-methyluridine-3'-phosphate
  modified_base 16: mod_base = OTHER; note = 2'-deoxy-2'-fluorouridine-3'-phosphate
  modified_base 17: mod_base = OTHER; note = 2'-O-methylcytidine-3'-phosphate
  modified_base 18: mod_base = OTHER; note = 2'-O-methylcytidine-3'-phosphate
  modified_base 19: mod_base = OTHER; note = 2'-O-methyladenosine-3'-phosphate
  modified_base 20: mod_base = OTHER; note = 2'-O-methyluridine-3'-phosphate
  modified_base 21: mod_base = OTHER; note = 2'-O-methyladenosine-3'-phosphate
  modified_base 22: mod_base = OTHER; note = 2'-O-methylguanosine-3'-phosphate
  modified_base 23: mod_base = OTHER; note = 2'-O-methyluridine
tttcagtaacatatttccatagt

SEQ ID NO: 5361 - RNA, 23 nt, synthetic construct
  source 1..23: mol_type = other RNA
  modified_base 1: mod_base = OTHER; note = 2'-O-methyluridine-3'-phosphate 5'-(E)-Vinylphosphonate
  modified_base 2: mod_base = OTHER; note = 2'-deoxy-2'-fluoroadenosine-3'-phosphate
  modified_base 3: mod_base = OTHER; note = 2'-O-methyluridine-3'-phosphate
  modified_base 4: mod_base = OTHER; note = 2'-O-methyluridine-3'-phosphate
  modified_base 5: mod_base = OTHER; note = 2'-O-methylcytidine-3'-phosphate
  modified_base 6: mod_base = OTHER; note = 2'-deoxy-2'-fluoroadenosine-3'-phosphate
  modified_base 7: mod_base = OTHER; note = 2'-O-methylguanosine-3'-phosphate
  modified_base 8: mod_base = OTHER; note = 2'-O-methyluridine-3'-phosphate
  modified_base 9: mod_base = OTHER; note = 2'-O-methyladenosine-3'-phosphate
  modified_base 10: mod_base = OTHER; note = 2'-O-methyladenosine-3'-phosphate
  modified_base 11: mod_base = OTHER; note = 2'-O-methylcytidine-3'-phosphate
  modified_base 12: mod_base = OTHER; note = 2'-O-methyladenosine-3'-phosphate
  modified_base 13: mod_base = OTHER; note = 2'-O-methyluridine-3'-phosphate
  modified_base 14: mod_base = OTHER; note = 2'-deoxy-2'-fluoroadenosine-3'-phosphate
  modified_base 15: mod_base = OTHER; note = 2'-O-methyluridine-3'-phosphate
  modified_base 16: mod_base = OTHER; note = 2'-deoxy-2'-fluorouridine-3'-phosphate
  modified_base 17: mod_base = OTHER; note = 2'-O-methyluridine-3'-phosphate
  modified_base 18: mod_base = OTHER; note = 2'-O-methylcytidine-3'-phosphate
  modified_base 19: mod_base = OTHER; note = 2'-O-methylcytidine-3'-phosphate
  modified_base 20: mod_base = OTHER; note = 2'-O-methyladenosine-3'-phosphate
  modified_base 21: mod_base = OTHER; note = 2'-O-methyluridine-3'-phosphate
  modified_base 22: mod_base = OTHER; note = 2'-O-methyladenosine-3'-phosphate
  modified_base 23: mod_base = OTHER; note = 2'-O-methylguanosine
tattcagtaacatatttccatag

SEQ ID NO: 5362 - RNA, 23 nt, synthetic construct
  source 1..23: mol_type = other RNA
  modified_base 1: mod_base = OTHER; note = 2'-O-methyluridine-3'-phosphate 5'-(E)-Vinylphosphonate
  modified_base 2: mod_base = OTHER; note = 2'-deoxy-2'-fluorocytidine-3'-phosphate
  modified_base 3: mod_base = OTHER; note = 2'-O-methyladenosine-3'-phosphate
  modified_base 4: mod_base = OTHER; note = 2'-O-methyladenosine-3'-phosphate
  modified_base 5: mod_base = OTHER; note = 2'-O-methyladenosine-3'-phosphate
  modified_base 6: mod_base = OTHER; note = 2'-deoxy-2'-fluorocytidine-3'-phosphate
  modified_base 7: mod_base = OTHER; note = 2'-O-methyluridine-3'-phosphate
  modified_base 8: mod_base = OTHER; note = 2'-O-methylcytidine-3'-phosphate
  modified_base 9: mod_base = OTHER; note = 2'-O-methylcytidine-3'-phosphate
  modified_base 10: mod_base = OTHER; note = 2'-O-methyladenosine-3'-phosphate
  modified_base 11: mod_base = OTHER; note = 2'-O-methyluridine-3'-phosphate
  modified_base 12: mod_base = OTHER; note = 2'-O-methyladenosine-3'-phosphate
  modified_base 13: mod_base = OTHER; note = 2'-O-methylguanosine-3'-phosphate
  modified_base 14: mod_base = OTHER; note = 2'-deoxy-2'-fluorocytidine-3'-phosphate
  modified_base 15: mod_base = OTHER; note = 2'-O-methyluridine-3'-phosphate
  modified_base 16: mod_base = OTHER; note = 2'-deoxy-2'-fluoroguanosine-3'-phosphate
  modified_base 17: mod_base = OTHER; note = 2'-O-methyluridine-3'-phosphate
  modified_base 18: mod_base = OTHER; note = 2'-O-methylcytidine-3'-phosphate
  modified_base 19: mod_base = OTHER; note = 2'-O-methyladenosine-3'-phosphate
  modified_base 20: mod_base = OTHER; note = 2'-O-methylguanosine-3'-phosphate
  modified_base 21: mod_base = OTHER; note = 2'-O-methyluridine-3'-phosphate
  modified_base 22: mod_base = OTHER; note = 2'-O-methyluridine-3'-phosphate
  modified_base 23: mod_base = OTHER; note = 2'-O-methyluridine
tcaaactccatagctgtcagttt

SEQ ID NO: 5363 - RNA, 23 nt, synthetic construct
  source 1..23: mol_type = other RNA
  modified_base 1: mod_base = OTHER; note = 2'-O-methyluridine-3'-phosphate 5'-(E)-Vinylphosphonate
  modified_base 2: mod_base = OTHER; note = 2'-deoxy-2'-fluoroguanosine-3'-phosphate
  modified_base 3: mod_base = OTHER; note = 2'-O-methylcytidine-3'-phosphate
  modified_base 4: mod_base = OTHER; note = 2'-O-methyladenosine-3'-phosphate
  modified_base 5: mod_base = OTHER; note = 2'-O-methyladenosine-3'-phosphate
  modified_base 6: mod_base = OTHER; note = 2'-deoxy-2'-fluoroadenosine-3'-phosphate
  modified_base 7: mod_base = OTHER; note = 2'-O-methylcytidine-3'-phosphate
  modified_base 8: mod_base = OTHER; note = 2'-O-methyluridine-3'-phosphate
  modified_base 9: mod_base = OTHER; note = 2'-O-methylcytidine-3'-phosphate
  modified_base 10: mod_base = OTHER; note = 2'-O-methylcytidine-3'-phosphate
  modified_base 11: mod_base = OTHER; note = 2'-O-methyladenosine-3'-phosphate
  modified_base 12: mod_base = OTHER; note = 2'-O-methyluridine-3'-phosphate
  modified_base 13: mod_base = OTHER; note = 2'-O-methyladenosine-3'-phosphate
  modified_base 14: mod_base = OTHER; note = 2'-deoxy-2'-fluoroguanosine-3'-phosphate
  modified_base 15: mod_base = OTHER; note = 2'-O-methylcytidine-3'-phosphate
  modified_base 16: mod_base = OTHER; note = 2'-deoxy-2'-fluorouridine-3'-phosphate
  modified_base 17: mod_base = OTHER; note = 2'-O-methylguanosine-3'-phosphate
  modified_base 18: mod_base = OTHER; note = 2'-O-methyluridine-3'-phosphate
  modified_base 19: mod_base = OTHER; note = 2'-O-methylcytidine-3'-phosphate
  modified_base 20: mod_base = OTHER; note = 2'-O-methyladenosine-3'-phosphate
  modified_base 21: mod_base = OTHER; note = 2'-O-methylguanosine-3'-phosphate
  modified_base 22: mod_base = OTHER; note = 2'-O-methyluridine-3'-phosphate
  modified_base 23: mod_base = OTHER; note = 2'-O-methyluridine
tgcaaactccatagctgtcagtt

SEQ ID NO: 5364 - RNA, 23 nt, synthetic construct
  source 1..23: mol_type = other RNA
  modified_base 1: mod_base = OTHER; note = 2'-O-methyluridine-3'-phosphate 5'-(E)-Vinylphosphonate
  modified_base 2: mod_base = OTHER; note = 2'-deoxy-2'-fluorocytidine-3'-phosphate
  modified_base 3: mod_base = OTHER; note = 2'-O-methylguanosine-3'-phosphate
  modified_base 4: mod_base = OTHER; note = 2'-O-methylcytidine-3'-phosphate
  modified_base 5: mod_base = OTHER; note = 2'-O-methyladenosine-3'-phosphate
  modified_base 6: mod_base = OTHER; note = 2'-deoxy-2'-fluoroadenosine-3'-phosphate
  modified_base 7: mod_base = OTHER; note = 2'-O-methyladenosine-3'-phosphate
  modified_base 8: mod_base = OTHER; note = 2'-O-methylcytidine-3'-phosphate
  modified_base 9: mod_base = OTHER; note = 2'-O-methyluridine-3'-phosphate
  modified_base 10: mod_base = OTHER; note = 2'-O-methylcytidine-3'-phosphate
  modified_base 11: mod_base = OTHER; note = 2'-O-methylcytidine-3'-phosphate
  modified_base 12: mod_base = OTHER; note = 2'-O-methyladenosine-3'-phosphate
  modified_base 13: mod_base = OTHER; note = 2'-O-methyluridine-3'-phosphate
  modified_base 14: mod_base = OTHER; note = 2'-deoxy-2'-fluoroadenosine-3'-phosphate
  modified_base 15: mod_base = OTHER; note = 2'-O-methylguanosine-3'-phosphate
  modified_base 16: mod_base = OTHER; note = 2'-deoxy-2'-fluorocytidine-3'-phosphate
  modified_base 17: mod_base = OTHER; note = 2'-O-methyluridine-3'-phosphate
  modified_base 18: mod_base = OTHER; note = 2'-O-methylguanosine-3'-phosphate
  modified_base 19: mod_base = OTHER; note = 2'-O-methyluridine-3'-phosphate
  modified_base 20: mod_base = OTHER; note = 2'-O-methylcytidine-3'-phosphate
  modified_base 21: mod_base = OTHER; note = 2'-O-methyladenosine-3'-phosphate
  modified_base 22: mod_base = OTHER; note = 2'-O-methylguanosine-3'-phosphate
  modified_base 23: mod_base = OTHER; note = 2'-O-methyluridine
tcgcaaactccatagctgtcagt

SEQ ID NO: 5365 - RNA, 23 nt, synthetic construct
  source 1..23: mol_type = other RNA
  modified_base 1: mod_base = OTHER; note = 2'-O-methyluridine-3'-phosphate 5'-(E)-Vinylphosphonate
  modified_base 2: mod_base = OTHER; note = 2'-deoxy-2'-fluoroadenosine-3'-phosphate
  modified_base 3: mod_base = OTHER; note = 2'-O-methylcytidine-3'-phosphate
  modified_base 4: mod_base = OTHER; note = 2'-O-methylguanosine-3'-phosphate
  modified_base 5: mod_base = OTHER; note = 2'-O-methylcytidine-3'-phosphate
  modified_base 6: mod_base = OTHER; note = 2'-deoxy-2'-fluoroadenosine-3'-phosphate
  modified_base 7: mod_base = OTHER; note = 2'-O-methyladenosine-3'-phosphate
  modified_base 8: mod_base = OTHER; note = 2'-O-methyladenosine-3'-phosphate
  modified_base 9: mod_base = OTHER; note = 2'-O-methylcytidine-3'-phosphate
  modified_base 10: mod_base = OTHER; note = 2'-O-methyluridine-3'-phosphate
  modified_base 11: mod_base = OTHER; note = 2'-O-methylcytidine-3'-phosphate
  modified_base 12: mod_base = OTHER; note = 2'-O-methylcytidine-3'-phosphate
  modified_base 13: mod_base = OTHER; note = 2'-O-methyladenosine-3'-phosphate
  modified_base 14: mod_base = OTHER; note = 2'-deoxy-2'-fluorouridine-3'-phosphate
  modified_base 15: mod_base = OTHER; note = 2'-O-methyladenosine-3'-phosphate
  modified_base 16: mod_base = OTHER; note = 2'-deoxy-2'-fluoroguanosine-3'-phosphate
  modified_base 17: mod_base = OTHER; note = 2'-O-methylcytidine-3'-phosphate
  modified_base 18: mod_base = OTHER; note = 2'-O-methyluridine-3'-phosphate
  modified_base 19: mod_base = OTHER; note = 2'-O-methylguanosine-3'-phosphate
  modified_base 20: mod_base = OTHER; note = 2'-O-methyluridine-3'-phosphate
  modified_base 21: mod_base = OTHER; note = 2'-O-methylcytidine-3'-phosphate
  modified_base 22: mod_base = OTHER; note = 2'-O-methyladenosine-3'-phosphate
  modified_base 23: mod_base = OTHER; note = 2'-O-methylguanosine
tacgcaaactccatagctgtcag

SEQ ID NO: 5366 - RNA, 23 nt, synthetic construct
  source 1..23: mol_type = other RNA
  modified_base 1: mod_base = OTHER; note = 2'-O-methyluridine-3'-phosphate 5'-(E)-Vinylphosphonate
  modified_base 2: mod_base = OTHER; note = 2'-deoxy-2'-fluorocytidine-3'-phosphate
  modified_base 3: mod_base = OTHER; note = 2'-O-methyladenosine-3'-phosphate
  modified_base 4: mod_base = OTHER; note = 2'-O-methylcytidine-3'-phosphate
  modified_base 5: mod_base = OTHER; note = 2'-O-methylguanosine-3'-phosphate
  modified_base 6: mod_base = OTHER; note = 2'-deoxy-2'-fluorocytidine-3'-phosphate
  modified_base 7: mod_base = OTHER; note = 2'-O-methyladenosine-3'-phosphate
  modified_base 8: mod_base = OTHER; note = 2'-O-methyladenosine-3'-phosphate
  modified_base 9: mod_base = OTHER; note = 2'-O-methyladenosine-3'-phosphate
  modified_base 10: mod_base = OTHER; note = 2'-O-methylcytidine-3'-phosphate
  modified_base 11: mod_base = OTHER; note = 2'-O-methyluridine-3'-phosphate
  modified_base 12: mod_base = OTHER; note = 2'-O-methylcytidine-3'-phosphate
  modified_base 13: mod_base = OTHER; note = 2'-O-methylcytidine-3'-phosphate
  modified_base 14: mod_base = OTHER; note = 2'-deoxy-2'-fluoroadenosine-3'-phosphate
  modified_base 15: mod_base = OTHER; note = 2'-O-methyluridine-3'-phosphate
  modified_base 16: mod_base = OTHER; note = 2'-deoxy-2'-fluoroadenosine-3'-phosphate
  modified_base 17: mod_base = OTHER; note = 2'-O-methylguanosine-3'-phosphate
  modified_base 18: mod_base = OTHER; note = 2'-O-methylcytidine-3'-phosphate
  modified_base 19: mod_base = OTHER; note = 2'-O-methyluridine-3'-phosphate
  modified_base 20: mod_base = OTHER; note = 2'-O-methylguanosine-3'-phosphate
  modified_base 21: mod_base = OTHER; note = 2'-O-methyluridine-3'-phosphate
  modified_base 22: mod_base = OTHER; note = 2'-O-methylcytidine-3'-phosphate
  modified_base 23: mod_base = OTHER; note = 2'-O-methyladenosine
tcacgcaaactccatagctgtca

SEQ ID NO: 5367 - RNA, 23 nt, synthetic construct
  source 1..23: mol_type = other RNA
  modified_base 1: mod_base = OTHER; note = 2'-O-methyluridine-3'-phosphate 5'-(E)-Vinylphosphonate
  modified_base 2: mod_base = OTHER; note = 2'-deoxy-2'-fluoroadenosine-3'-phosphate
  modified_base 3: mod_base = OTHER; note = 2'-O-methylcytidine-3'-phosphate
  modified_base 4: mod_base = OTHER; note = 2'-O-methyladenosine-3'-phosphate
  modified_base 5: mod_base = OTHER; note = 2'-O-methylcytidine-3'-phosphate
  modified_base 6: mod_base = OTHER; note = 2'-deoxy-2'-fluoroguanosine-3'-phosphate
  modified_base 7: mod_base = OTHER; note = 2'-O-methylcytidine-3'-phosphate
  modified_base 8: mod_base = OTHER; note = 2'-O-methyladenosine-3'-phosphate
  modified_base 9: mod_base = OTHER; note = 2'-O-methyladenosine-3'-phosphate
  modified_base 10: mod_base = OTHER; note = 2'-O-methyladenosine-3'-phosphate
  modified_base 11: mod_base = OTHER; note = 2'-O-methylcytidine-3'-phosphate
  modified_base 12: mod_base = OTHER; note = 2'-O-methyluridine-3'-phosphate
  modified_base 13: mod_base = OTHER; note = 2'-O-methylcytidine-3'-phosphate
  modified_base 14: mod_base = OTHER; note = 2'-deoxy-2'-fluorocytidine-3'-phosphate
  modified_base 15: mod_base = OTHER; note = 2'-O-methyladenosine-3'-phosphate
  modified_base 16: mod_base = OTHER; note = 2'-deoxy-2'-fluorouridine-3'-phosphate
  modified_base 17: mod_base = OTHER; note = 2'-O-methyladenosine-3'-phosphate
  modified_base 18: mod_base = OTHER; note = 2'-O-methylguanosine-3'-phosphate
  modified_base 19: mod_base = OTHER; note = 2'-O-methylcytidine-3'-phosphate
  modified_base 20: mod_base = OTHER; note = 2'-O-methyluridine-3'-phosphate
  modified_base 21: mod_base = OTHER; note = 2'-O-methylguanosine-3'-phosphate
  modified_base 22: mod_base = OTHER; note = 2'-O-methyluridine-3'-phosphate
  modified_base 23: mod_base = OTHER; note = 2'-O-methylcytidine
tacacgcaaactccatagctgtc

SEQ ID NO: 5368 - RNA, 23 nt, synthetic construct
  source 1..23: mol_type = other RNA
  modified_base 1: mod_base = OTHER; note = 2'-O-methyluridine-3'-phosphate 5'-(E)-Vinylphosphonate
  modified_base 2: mod_base = OTHER; note = 2'-deoxy-2'-fluorouridine-3'-phosphate
  modified_base 3: mod_base = OTHER; note = 2'-O-methyladenosine-3'-phosphate
  modified_base 4: mod_base = OTHER; note = 2'-O-methylcytidine-3'-phosphate
  modified_base 5: mod_base = OTHER; note = 2'-O-methyladenosine-3'-phosphate
  modified_base 6: mod_base = OTHER; note = 2'-deoxy-2'-fluorocytidine-3'-phosphate
  modified_base 7: mod_base = OTHER; note = 2'-O-methylguanosine-3'-phosphate
  modified_base 8: mod_base = OTHER; note = 2'-O-methylcytidine-3'-phosphate
  modified_base 9: mod_base = OTHER; note = 2'-O-methyladenosine-3'-phosphate
  modified_base 10: mod_base = OTHER; note = 2'-O-methyladenosine-3'-phosphate
  modified_base 11: mod_base = OTHER; note = 2'-O-methyladenosine-3'-phosphate
  modified_base 12: mod_base = OTHER; note = 2'-O-methylcytidine-3'-phosphate
  modified_base 13: mod_base = OTHER; note = 2'-O-methyluridine-3'-phosphate
  modified_base 14: mod_base = OTHER; note = 2'-deoxy-2'-fluorocytidine-3'-phosphate
  modified_base 15: mod_base = OTHER; note = 2'-O-methylcytidine-3'-phosphate
  modified_base 16: mod_base = OTHER; note = 2'-deoxy-2'-fluoroadenosine-3'-phosphate
  modified_base 17: mod_base = OTHER; note = 2'-O-methyluridine-3'-phosphate
  modified_base 18: mod_base = OTHER; note = 2'-O-methyladenosine-3'-phosphate
  modified_base 19: mod_base = OTHER; note = 2'-O-methylguanosine-3'-phosphate
  modified_base 20: mod_base = OTHER; note = 2'-O-methylcytidine-3'-phosphate
  modified_base 21: mod_base = OTHER; note = 2'-O-methyluridine-3'-phosphate
  modified_base 22: mod_base = OTHER; note = 2'-O-methylguanosine-3'-phosphate
  modified_base 23: mod_base = OTHER; note = 2'-O-methyluridine
ttacacgcaaactccatagctgt

SEQ ID NO: 5369 - RNA, 23 nt, synthetic construct
  source 1..23: mol_type = other RNA
  modified_base 1: mod_base = OTHER; note = 2'-O-methyluridine-3'-phosphate 5'-(E)-Vinylphosphonate
  modified_base 2: mod_base = OTHER; note = 2'-deoxy-2'-fluoroguanosine-3'-phosphate
  modified_base 3: mod_base = OTHER; note = 2'-O-methyluridine-3'-phosphate
  modified_base 4: mod_base = OTHER; note = 2'-O-methyladenosine-3'-phosphate
  modified_base 5: mod_base = OTHER; note = 2'-O-methylcytidine-3'-phosphate
  modified_base 6: mod_base = OTHER; note = 2'-deoxy-2'-fluoroadenosine-3'-phosphate
  modified_base 7: mod_base = OTHER; note = 2'-O-methylcytidine-3'-phosphate
  modified_base 8: mod_base = OTHER; note = 2'-O-methylguanosine-3'-phosphate
  modified_base 9: mod_base = OTHER; note = 2'-O-methylcytidine-3'-phosphate
  modified_base 10: mod_base = OTHER; note = 2'-O-methyladenosine-3'-phosphate
  modified_base 11: mod_base = OTHER; note = 2'-O-methyladenosine-3'-phosphate
  modified_base 12: mod_base = OTHER; note = 2'-O-methyladenosine-3'-phosphate
  modified_base 13: mod_base = OTHER; note = 2'-O-methylcytidine-3'-phosphate
  modified_base 14: mod_base = OTHER; note = 2'-deoxy-2'-fluorouridine-3'-phosphate
  modified_base 15: mod_base = OTHER; note = 2'-O-methylcytidine-3'-phosphate
  modified_base 16: mod_base = OTHER; note = 2'-deoxy-2'-fluorocytidine-3'-phosphate
  modified_base 17: mod_base = OTHER; note = 2'-O-methyladenosine-3'-phosphate
  modified_base 18: mod_base = OTHER; note = 2'-O-methyluridine-3'-phosphate
  modified_base 19: mod_base = OTHER; note = 2'-O-methyladenosine-3'-phosphate
  modified_base 20: mod_base = OTHER; note = 2'-O-methylguanosine-3'-phosphate
  modified_base 21: mod_base = OTHER; note = 2'-O-methylcytidine-3'-phosphate
  modified_base 22: mod_base = OTHER; note = 2'-O-methyluridine-3'-phosphate
  modified_base 23: mod_base = OTHER; note = 2'-O-methylguanosine
tgtacacgcaaactccatagctg

SEQ ID NO: 5370 - RNA, 23 nt, synthetic construct
  source 1..23: mol_type = other RNA
  modified_base 1: mod_base = OTHER; note = 2'-O-methyluridine-3'-phosphate 5'-(E)-Vinylphosphonate
  modified_base 2: mod_base = OTHER; note = 2'-deoxy-2'-fluoroadenosine-3'-phosphate
  modified_base 3: mod_base = OTHER; note = 2'-O-methylguanosine-3'-phosphate
  modified_base 4: mod_base = OTHER; note = 2'-O-methyluridine-3'-phosphate
  modified_base 5: mod_base = OTHER; note = 2'-O-methyladenosine-3'-phosphate
  modified_base 6: mod_base = OTHER; note = 2'-deoxy-2'-fluorocytidine-3'-phosphate
  modified_base 7: mod_base = OTHER; note = 2'-O-methyladenosine-3'-phosphate
  modified_base 8: mod_base = OTHER; note = 2'-O-methylcytidine-3'-phosphate
  modified_base 9: mod_base = OTHER; note = 2'-O-methylguanosine-3'-phosphate
  modified_base 10: mod_base = OTHER; note = 2'-O-methylcytidine-3'-phosphate
  modified_base 11: mod_base = OTHER; note = 2'-O-methyladenosine-3'-phosphate
  modified_base 12: mod_base = OTHER; note = 2'-O-methyladenosine-3'-phosphate
  modified_base 13: mod_base = OTHER; note = 2'-O-methyladenosine-3'-phosphate
  modified_base 14: mod_base = OTHER; note = 2'-deoxy-2'-fluorocytidine-3'-phosphate
  modified_base 15: mod_base = OTHER; note = 2'-O-methyluridine-3'-phosphate
  modified_base 16: mod_base = OTHER; note = 2'-deoxy-2'-fluorocytidine-3'-phosphate
  modified_base 17: mod_base = OTHER; note = 2'-O-methylcytidine-3'-phosphate
  modified_base 18: mod_base = OTHER; note = 2'-O-methyladenosine-3'-phosphate
  modified_base 19: mod_base = OTHER; note = 2'-O-methyluridine-3'-phosphate
  modified_base 20: mod_base = OTHER; note = 2'-O-methyladenosine-3'-phosphate
  modified_base 21: mod_base = OTHER; note = 2'-O-methylguanosine-3'-phosphate
  modified_base 22: mod_base = OTHER; note = 2'-O-methylcytidine-3'-phosphate
  modified_base 23: mod_base = OTHER; note = 2'-O-methyluridine
tagtacacgcaaactccatagct

SEQ ID NO: 5371 - RNA, 23 nt, synthetic construct
  source 1..23: mol_type = other RNA
  modified_base 1: mod_base = OTHER; note = 2'-O-methyluridine-3'-phosphate 5'-(E)-Vinylphosphonate
  modified_base 2: mod_base = OTHER; note = 2'-deoxy-2'-fluoroadenosine-3'-phosphate
  modified_base 3: mod_base = OTHER; note = 2'-O-methyladenosine-3'-phosphate
  modified_base 4: mod_base = OTHER; note = 2'-O-methylguanosine-3'-phosphate
  modified_base 5: mod_base = OTHER; note = 2'-O-methyluridine-3'-phosphate
  modified_base 6: mod_base = OTHER; note = 2'-deoxy-2'-fluoroadenosine-3'-phosphate
  modified_base 7: mod_base = OTHER; note = 2'-O-methylcytidine-3'-phosphate
  modified_base 8: mod_base = OTHER; note = 2'-O-methyladenosine-3'-phosphate
  modified_base 9: mod_base = OTHER; note = 2'-O-methylcytidine-3'-phosphate
  modified_base 10: mod_base = OTHER; note = 2'-O-methylguanosine-3'-phosphate
  modified_base 11: mod_base = OTHER; note = 2'-O-methylcytidine-3'-phosphate
  modified_base 12: mod_base = OTHER; note = 2'-O-methyladenosine-3'-phosphate
  modified_base 13: mod_base = OTHER; note = 2'-O-methyladenosine-3'-phosphate
  modified_base 14: mod_base = OTHER; note = 2'-deoxy-2'-fluoroadenosine-3'-phosphate
  modified_base 15: mod_base = OTHER; note = 2'-O-methylcytidine-3'-phosphate
  modified_base 16: mod_base = OTHER; note = 2'-deoxy-2'-fluorouridine-3'-phosphate
  modified_base 17: mod_base = OTHER; note = 2'-O-methylcytidine-3'-phosphate
  modified_base 18: mod_base = OTHER; note = 2'-O-methylcytidine-3'-phosphate
  modified_base 19: mod_base = OTHER; note = 2'-O-methyladenosine-3'-phosphate
  modified_base 20: mod_base = OTHER; note = 2'-O-methyluridine-3'-phosphate
  modified_base 21: mod_base = OTHER; note = 2'-O-methyladenosine-3'-phosphate
  modified_base 22: mod_base = OTHER; note = 2'-O-methylguanosine-3'-phosphate
  modified_base 23: mod_base = OTHER; note = 2'-O-methylcytidine
taagtacacgcaaactccatagc

SEQ ID NO: 5372 - RNA, 23 nt, synthetic construct
  source 1..23: mol_type = other RNA
  modified_base 1: mod_base = OTHER; note = 2'-O-methyluridine-3'-phosphate 5'-(E)-Vinylphosphonate
  modified_base 2: mod_base = OTHER; note = 2'-deoxy-2'-fluoroguanosine-3'-phosphate
  modified_base 3: mod_base = OTHER; note = 2'-O-methyladenosine-3'-phosphate
  modified_base 4: mod_base = OTHER; note = 2'-O-methyladenosine-3'-phosphate
  modified_base 5: mod_base = OTHER; note = 2'-O-methylguanosine-3'-phosphate
  modified_base 6: mod_base = OTHER; note = 2'-deoxy-2'-fluorouridine-3'-phosphate
  modified_base 7: mod_base = OTHER; note = 2'-O-methyladenosine-3'-phosphate
  modified_base 8: mod_base = OTHER; note = 2'-O-methylcytidine-3'-phosphate
  modified_base 9: mod_base = OTHER; note = 2'-O-methyladenosine-3'-phosphate
  modified_base 10: mod_base = OTHER; note = 2'-O-methylcytidine-3'-phosphate
  modified_base 11: mod_base = OTHER; note = 2'-O-methylguanosine-3'-phosphate
  modified_base 12: mod_base = OTHER; note = 2'-O-methylcytidine-3'-phosphate
  modified_base 13: mod_base = OTHER; note = 2'-O-methyladenosine-3'-phosphate
  modified_base 14: mod_base = OTHER; note = 2'-deoxy-2'-fluoroadenosine-3'-phosphate
  modified_base 15: mod_base = OTHER; note = 2'-O-methyladenosine-3'-phosphate
  modified_base 16: mod_base = OTHER; note = 2'-deoxy-2'-fluorocytidine-3'-phosphate
  modified_base 17: mod_base = OTHER; note = 2'-O-methyluridine-3'-phosphate
  modified_base 18: mod_base = OTHER; note = 2'-O-methylcytidine-3'-phosphate
  modified_base 19: mod_base = OTHER; note = 2'-O-methylcytidine-3'-phosphate
  modified_base 20: mod_base = OTHER; note = 2'-O-methyladenosine-3'-phosphate
  modified_base 21: mod_base = OTHER; note = 2'-O-methyluridine-3'-phosphate
  modified_base 22: mod_base = OTHER; note = 2'-O-methyladenosine-3'-phosphate
  modified_base 23: mod_base = OTHER; note = 2'-O-methylguanosine
tgaagtacacgcaaactccatag

SEQ ID NO: 5373 - RNA, 23 nt, synthetic construct
  source 1..23: mol_type = other RNA
  modified_base 1: mod_base = OTHER; note = 2'-O-methyluridine-3'-phosphate 5'-(E)-Vinylphosphonate
  modified_base 2: mod_base = OTHER; note = 2'-deoxy-2'-fluoroadenosine-3'-phosphate
  modified_base 3: mod_base = OTHER; note = 2'-O-methylguanosine-3'-phosphate
  modified_base 4: mod_base = OTHER; note = 2'-O-methyluridine-3'-phosphate
  modified_base 5: mod_base = OTHER; note = 2'-O-methyladenosine-3'-phosphate
  modified_base 6: mod_base = OTHER; note = 2'-deoxy-2'-fluorouridine-3'-phosphate
  modified_base 7: mod_base = OTHER; note = 2'-O-methylguanosine-3'-phosphate
  modified_base 8: mod_base = OTHER; note = 2'-O-methylguanosine-3'-phosphate
  modified_base 9: mod_base = OTHER; note = 2'-O-methyladenosine-3'-phosphate
  modified_base 10: mod_base = OTHER; note = 2'-O-methyladenosine-3'-phosphate
  modified_base 11: mod_base = OTHER; note = 2'-O-methylguanosine-3'-phosphate
  modified_base 12: mod_base = OTHER; note = 2'-O-methyluridine-3'-phosphate
  modified_base 13: mod_base = OTHER; note = 2'-O-methyladenosine-3'-phosphate
  modified_base 14: mod_base = OTHER; note = 2'-deoxy-2'-fluorocytidine-3'-phosphate
  modified_base 15: mod_base = OTHER; note = 2'-O-methyladenosine-3'-phosphate
  modified_base 16: mod_base = OTHER; note = 2'-deoxy-2'-fluorocytidine-3'-phosphate
  modified_base 17: mod_base = OTHER; note = 2'-O-methylguanosine-3'-phosphate
  modified_base 18: mod_base = OTHER; note = 2'-O-methylcytidine-3'-phosphate
  modified_base 19: mod_base = OTHER; note = 2'-O-methyladenosine-3'-phosphate
  modified_base 20: mod_base = OTHER; note = 2'-O-methyladenosine-3'-phosphate
  modified_base 21: mod_base = OTHER; note = 2'-O-methyladenosine-3'-phosphate
  modified_base 22: mod_base = OTHER; note = 2'-O-methylcytidine-3'-phosphate
  modified_base 23: mod_base = OTHER; note = 2'-O-methyluridine
tagtatggaagtacacgcaaact

SEQ ID NO: 5374 - RNA, 23 nt, synthetic construct
  source 1..23: mol_type = other RNA
  modified_base 1: mod_base = OTHER; note = 2'-O-methyluridine-3'-phosphate 5'-(E)-Vinylphosphonate
  modified_base 2: mod_base = OTHER; note = 2'-deoxy-2'-fluorocytidine-3'-phosphate
  modified_base 3: mod_base = OTHER; note = 2'-O-methylguanosine-3'-phosphate
  modified_base 4: mod_base = OTHER; note = 2'-O-methyladenosine-3'-phosphate
  modified_base 5: mod_base = OTHER; note = 2'-O-methylguanosine-3'-phosphate
  modified_base 6: mod_base = OTHER; note = 2'-deoxy-2'-fluorouridine-3'-phosphate
  modified_base 7: mod_base = OTHER; note = 2'-O-methyladenosine-3'-phosphate
  modified_base 8: mod_base = OTHER; note = 2'-O-methyluridine-3'-phosphate
  modified_base 9: mod_base = OTHER; note = 2'-O-methylguanosine-3'-phosphate
  modified_base 10: mod_base = OTHER; note = 2'-O-methylguanosine-3'-phosphate
  modified_base 11: mod_base = OTHER; note = 2'-O-methyladenosine-3'-phosphate
  modified_base 12: mod_base = OTHER; note = 2'-O-methyladenosine-3'-phosphate
  modified_base 13: mod_base = OTHER; note = 2'-O-methylguanosine-3'-phosphate
  modified_base 14: mod_base = OTHER; note = 2'-deoxy-2'-fluorouridine-3'-phosphate
  modified_base 15: mod_base = OTHER; note = 2'-O-methyladenosine-3'-phosphate
  modified_base 16: mod_base = OTHER; note = 2'-deoxy-2'-fluorocytidine-3'-phosphate
  modified_base 17: mod_base = OTHER; note = 2'-O-methyladenosine-3'-phosphate
  modified_base 18: mod_base = OTHER; note = 2'-O-methylcytidine-3'-phosphate
  modified_base 19: mod_base = OTHER; note = 2'-O-methylguanosine-3'-phosphate
  modified_base 20: mod_base = OTHER; note = 2'-O-methylcytidine-3'-phosphate
  modified_base 21: mod_base = OTHER; note = 2'-O-methyladenosine-3'-phosphate
  modified_base 22: mod_base = OTHER; note = 2'-O-methyladenosine-3'-phosphate
  modified_base 23: mod_base = OTHER; note = 2'-O-methyladenosine
tcgagtatggaagtacacgcaaa

SEQ ID NO: 5375 - RNA, 23 nt, synthetic construct
  source 1..23: mol_type = other RNA
  modified_base 1: mod_base = OTHER; note = 2'-O-methyluridine-3'-phosphate 5'-(E)-Vinylphosphonate
  modified_base 2: mod_base = OTHER; note = 2'-deoxy-2'-fluoroadenosine-3'-phosphate
  modified_base 3: mod_base = OTHER; note = 2'-O-methylcytidine-3'-phosphate
  modified_base 4: mod_base = OTHER; note = 2'-O-methylguanosine-3'-phosphate
  modified_base 5: mod_base = OTHER; note = 2'-O-methyladenosine-3'-phosphate
  modified_base 6: mod_base = OTHER; note = 2'-deoxy-2'-fluoroguanosine-3'-phosphate
  modified_base 7: mod_base = OTHER; note = 2'-O-methyluridine-3'-phosphate
  modified_base 8: mod_base = OTHER; note = 2'-O-methyladenosine-3'-phosphate
  modified_base 9: mod_base = OTHER; note = 2'-O-methyluridine-3'-phosphate
  modified_base 10: mod_base = OTHER; note = 2'-O-methylguanosine-3'-phosphate
  modified_base 11: mod_base = OTHER; note = 2'-O-methylguanosine-3'-phosphate
  modified_base 12: mod_base = OTHER; note = 2'-O-methyladenosine-3'-phosphate
  modified_base 13: mod_base = OTHER; note = 2'-O-methyladenosine-3'-phosphate
  modified_base 14: mod_base = OTHER; note = 2'-deoxy-2'-fluoroguanosine-3'-phosphate
  modified_base 15: mod_base = OTHER; note = 2'-O-methyluridine-3'-phosphate
  modified_base 16: mod_base = OTHER; note = 2'-deoxy-2'-fluoroadenosine-3'-phosphate
  modified_base 17: mod_base = OTHER; note = 2'-O-methylcytidine-3'-phosphate
  modified_base 18: mod_base = OTHER; note = 2'-O-methyladenosine-3'-phosphate
  modified_base 19: mod_base = OTHER; note = 2'-O-methylcytidine-3'-phosphate
  modified_base 20: mod_base = OTHER; note = 2'-O-methylguanosine-3'-phosphate
  modified_base 21: mod_base = OTHER; note = 2'-O-methylcytidine-3'-phosphate
  modified_base 22: mod_base = OTHER; note = 2'-O-methyladenosine-3'-phosphate
  modified_base 23: mod_base = OTHER; note = 2'-O-methyladenosine
tacgagtatggaagtacacgcaa

SEQ ID NO: 5376 - RNA, 23 nt, synthetic construct
  source 1..23: mol_type = other RNA
  modified_base 1: mod_base = OTHER; note = 2'-O-methyluridine-3'-phosphate 5'-(E)-Vinylphosphonate
  modified_base 2: mod_base = OTHER; note = 2'-deoxy-2'-fluoroadenosine-3'-phosphate
  modified_base 3: mod_base = OTHER; note = 2'-O-methyladenosine-3'-phosphate
  modified_base 4: mod_base = OTHER; note = 2'-O-methylcytidine-3'-phosphate
  modified_base 5: mod_base = OTHER; note = 2'-O-methylguanosine-3'-phosphate
  modified_base 6: mod_base = OTHER; note = 2'-deoxy-2'-fluoroadenosine-3'-phosphate
  modified_base 7: mod_base = OTHER; note = 2'-O-methylguanosine-3'-phosphate
  modified_base 8: mod_base = OTHER; note = 2'-O-methyluridine-3'-phosphate
  modified_base 9: mod_base = OTHER; note = 2'-O-methyladenosine-3'-phosphate
  modified_base 10: mod_base = OTHER; note = 2'-O-methyluridine-3'-phosphate
  modified_base 11: mod_base = OTHER; note = 2'-O-methylguanosine-3'-phosphate
  modified_base 12: mod_base = OTHER; note = 2'-O-methylguanosine-3'-phosphate
  modified_base 13: mod_base = OTHER; note = 2'-O-methyladenosine-3'-phosphate
  modified_base 14: mod_base = OTHER; note = 2'-deoxy-2'-fluoroadenosine-3'-phosphate
  modified_base 15: mod_base = OTHER; note = 2'-O-methylguanosine-3'-phosphate
  modified_base 16: mod_base = OTHER; note = 2'-deoxy-2'-fluorouridine-3'-phosphate
  modified_base 17: mod_base = OTHER; note = 2'-O-methyladenosine-3'-phosphate
  modified_base 18: mod_base = OTHER; note = 2'-O-methylcytidine-3'-phosphate
  modified_base 19: mod_base = OTHER; note = 2'-O-methyladenosine-3'-phosphate
  modified_base 20: mod_base = OTHER; note = 2'-O-methylcytidine-3'-phosphate
  modified_base 21: mod_base = OTHER; note = 2'-O-methylguanosine-3'-phosphate
  modified_base 22: mod_base = OTHER; note = 2'-O-methylcytidine-3'-phosphate
  modified_base 23: mod_base = OTHER; note = 2'-O-methyladenosine
taacgagtatggaagtacacgca

SEQ ID NO: 5377 - RNA, 23 nt, synthetic construct
  source 1..23: mol_type = other RNA
  modified_base 1: mod_base = OTHER; note = 2'-O-methyluridine-3'-phosphate 5'-(E)-Vinylphosphonate
  modified_base 2: mod_base = OTHER; note = 2'-deoxy-2'-fluorouridine-3'-phosphate
  modified_base 3: mod_base = OTHER; note = 2'-O-methyladenosine-3'-phosphate
  modified_base 4: mod_base = OTHER; note = 2'-O-methyladenosine-3'-phosphate
  modified_base 5: mod_base = OTHER; note = 2'-O-methylcytidine-3'-phosphate
  modified_base 6: mod_base = OTHER; note = 2'-deoxy-2'-fluoroguanosine-3'-phosphate
  modified_base 7: mod_base = OTHER; note = 2'-O-methyladenosine-3'-phosphate
  modified_base 8: mod_base = OTHER; note = 2'-O-methylguanosine-3'-phosphate
  modified_base 9: mod_base = OTHER; note = 2'-O-methyluridine-3'-phosphate
  modified_base 10: mod_base = OTHER; note = 2'-O-methyladenosine-3'-phosphate
  modified_base 11: mod_base = OTHER; note = 2'-O-methyluridine-3'-phosphate
  modified_base 12: mod_base = OTHER; note = 2'-O-methylguanosine-3'-phosphate
  modified_base 13: mod_base = OTHER; note = 2'-O-methylguanosine-3'-phosphate
  modified_base 14: mod_base = OTHER; note = 2'-deoxy-2'-fluoroadenosine-3'-phosphate
  modified_base 15: mod_base = OTHER; note = 2'-O-methyladenosine-3'-phosphate
  modified_base 16: mod_base = OTHER; note = 2'-deoxy-2'-fluoroguanosine-3'-phosphate
  modified_base 17: mod_base = OTHER; note = 2'-O-methyluridine-3'-phosphate
  modified_base 18: mod_base = OTHER; note = 2'-O-methyladenosine-3'-phosphate
  modified_base 19: mod_base = OTHER; note = 2'-O-methylcytidine-3'-phosphate
  modified_base 20: mod_base = OTHER; note = 2'-O-methyladenosine-3'-phosphate
  modified_base 21: mod_base = OTHER; note = 2'-O-methylcytidine-3'-phosphate
  modified_base 22: mod_base = OTHER; note = 2'-O-methylguanosine-3'-phosphate
  modified_base 23: mod_base = OTHER; note = 2'-O-methylcytidine
ttaacgagtatggaagtacacgc

SEQ ID NO: 5378 - RNA, 23 nt, synthetic construct
  source 1..23: mol_type = other RNA
  modified_base 1: mod_base = OTHER; note = 2'-O-methyluridine-3'-phosphate 5'-(E)-Vinylphosphonate
  modified_base 2: mod_base = OTHER; note = 2'-deoxy-2'-fluorouridine-3'-phosphate
  modified_base 3: mod_base = OTHER; note = 2'-O-methyluridine-3'-phosphate
  modified_base 4: mod_base = OTHER; note = 2'-O-methyladenosine-3'-phosphate
  modified_base 5: mod_base = OTHER; note = 2'-O-methyladenosine-3'-phosphate
  modified_base 6: mod_base = OTHER; note = 2'-deoxy-2'-fluorocytidine-3'-phosphate
  modified_base 7: mod_base = OTHER; note = 2'-O-methylguanosine-3'-phosphate
  modified_base 8: mod_base = OTHER; note = 2'-O-methyladenosine-3'-phosphate
  modified_base 9: mod_base = OTHER; note = 2'-O-methylguanosine-3'-phosphate
  modified_base 10: mod_base = OTHER; note = 2'-O-methyluridine-3'-phosphate
  modified_base 11: mod_base = OTHER; note = 2'-O-methyladenosine-3'-phosphate
  modified_base 12: mod_base = OTHER; note = 2'-O-methyluridine-3'-phosphate
  modified_base 13: mod_base = OTHER; note = 2'-O-methylguanosine-3'-phosphate
  modified_base 14: mod_base = OTHER; note = 2'-deoxy-2'-fluoroguanosine-3'-phosphate
  modified_base 15: mod_base = OTHER; note = 2'-O-methyladenosine-3'-phosphate
  modified_base 16: mod_base = OTHER; note = 2'-deoxy-2'-fluoroadenosine-3'-phosphate
  modified_base 17: mod_base = OTHER; note = 2'-O-methylguanosine-3'-phosphate
  modified_base 18: mod_base = OTHER; note = 2'-O-methyluridine-3'-phosphate
  modified_base 19: mod_base = OTHER; note = 2'-O-methyladenosine-3'-phosphate
  modified_base 20: mod_base = OTHER; note = 2'-O-methylcytidine-3'-phosphate
  modified_base 21: mod_base = OTHER; note = 2'-O-methyladenosine-3'-phosphate
  modified_base 22: mod_base = OTHER; note = 2'-O-methylcytidine-3'-phosphate
  modified_base 23: mod_base = OTHER; note = 2'-O-methylguanosine
tttaacgagtatggaagtacacg

SEQ ID NO: 5379 - RNA, 23 nt, synthetic construct
  source 1..23: mol_type = other RNA
  modified_base 1: mod_base = OTHER; note = 2'-O-methyluridine-3'-phosphate 5'-(E)-Vinylphosphonate
  modified_base 2: mod_base = OTHER; note = 2'-deoxy-2'-fluoroadenosine-3'-phosphate
  modified_base 3: mod_base = OTHER; note = 2'-O-methyluridine-3'-phosphate
  modified_base 4: mod_base = OTHER; note = 2'-O-methyluridine-3'-phosphate
  modified_base 5: mod_base = OTHER; note = 2'-O-methyladenosine-3'-phosphate
  modified_base 6: mod_base = OTHER; note = 2'-deoxy-2'-fluoroadenosine-3'-phosphate
  modified_base 7: mod_base = OTHER; note = 2'-O-methylcytidine-3'-phosphate
  modified_base 8: mod_base = OTHER; note = 2'-O-methylguanosine-3'-phosphate
  modified_base 9: mod_base = OTHER; note = 2'-O-methyladenosine-3'-phosphate
  modified_base 10: mod_base = OTHER; note = 2'-O-methylguanosine-3'-phosphate
  modified_base 11: mod_base = OTHER; note = 2'-O-methyluridine-3'-phosphate
  modified_base 12: mod_base = OTHER; note = 2'-O-methyladenosine-3'-phosphate
  modified_base 13: mod_base = OTHER; note = 2'-O-methyluridine-3'-phosphate
  modified_base 14: mod_base = OTHER; note = 2'-deoxy-2'-fluoroguanosine-3'-phosphate
  modified_base 15: mod_base = OTHER; note = 2'-O-methylguanosine-3'-phosphate
  modified_base 16: mod_base = OTHER; note = 2'-deoxy-2'-fluoroadenosine-3'-phosphate
  modified_base 17: mod_base = OTHER; note = 2'-O-methyladenosine-3'-phosphate
  modified_base 18: mod_base = OTHER; note = 2'-O-methylguanosine-3'-phosphate
  modified_base 19: mod_base = OTHER; note = 2'-O-methyluridine-3'-phosphate
  modified_base 20: mod_base = OTHER; note = 2'-O-methyladenosine-3'-phosphate
  modified_base 21: mod_base = OTHER; note = 2'-O-methylcytidine-3'-phosphate
  modified_base 22: mod_base = OTHER; note = 2'-O-methyladenosine-3'-phosphate
  modified_base 23: mod_base = OTHER; note = 2'-O-methylcytidine
tattaacgagtatggaagtacac

SEQ ID NO: 5380 - RNA, 23 nt, synthetic construct
  source 1..23: mol_type = other RNA
  modified_base 1: mod_base = OTHER; note = 2'-O-methyluridine-3'-phosphate 5'-(E)-Vinylphosphonate
  modified_base 2: mod_base = OTHER; note = 2'-deoxy-2'-fluorocytidine-3'-phosphate
  modified_base 3: mod_base = OTHER; note = 2'-O-methyladenosine-3'-phosphate
  modified_base 4: mod_base = OTHER; note = 2'-O-methyluridine-3'-phosphate
  modified_base 5: mod_base = OTHER; note = 2'-O-methyluridine-3'-phosphate
  modified_base 6: mod_base = OTHER; note = 2'-deoxy-2'-fluoroadenosine-3'-phosphate
  modified_base 7: mod_base = OTHER; note = 2'-O-methyladenosine-3'-phosphate
  modified_base 8: mod_base = OTHER; note = 2'-O-methylcytidine-3'-phosphate
  modified_base 9: mod_base = OTHER; note = 2'-O-methylguanosine-3'-phosphate
  modified_base 10: mod_base = OTHER; note = 2'-O-methyladenosine-3'-phosphate
  modified_base 11: mod_base = OTHER; note = 2'-O-methylguanosine-3'-phosphate
  modified_base 12: mod_base = OTHER; note = 2'-O-methyluridine-3'-phosphate
  modified_base 13: mod_base = OTHER; note = 2'-O-methyladenosine-3'-phosphate
  modified_base 14: mod_base = OTHER; note = 2'-deoxy-2'-fluorouridine-3'-phosphate
  modified_base 15: mod_base = OTHER; note = 2'-O-methylguanosine-3'-phosphate
  modified_base 16: mod_base = OTHER; note = 2'-deoxy-2'-fluoroguanosine-3'-phosphate
  modified_base 17: mod_base = OTHER; note = 2'-O-methyladenosine-3'-phosphate
  modified_base 18: mod_base = OTHER; note = 2'-O-methyladenosine-3'-phosphate
  modified_base 19: mod_base = OTHER; note = 2'-O-methylguanosine-3'-phosphate
  modified_base 20: mod_base = OTHER; note = 2'-O-methyluridine-3'-phosphate
  modified_base 21: mod_base = OTHER; note = 2'-O-methyladenosine-3'-phosphate
  modified_base 22: mod_base = OTHER; note = 2'-O-methylcytidine-3'-phosphate
  modified_base 23: mod_base = OTHER; note = 2'-O-methyladenosine
tcattaacgagtatggaagtaca

SEQ ID NO: 5381 - RNA, 23 nt, synthetic construct
  source 1..23: mol_type = other RNA
  modified_base 1: mod_base = OTHER; note = 2'-O-methyluridine-3'-phosphate 5'-(E)-Vinylphosphonate
  modified_base 2: mod_base = OTHER; note = 2'-deoxy-2'-fluoroguanosine-3'-phosphate
  modified_base 3: mod_base = OTHER; note = 2'-O-methylcytidine-3'-phosphate
  modified_base 4: mod_base = OTHER; note = 2'-O-methyladenosine-3'-phosphate
  modified_base 5: mod_base = OTHER; note = 2'-O-methyluridine-3'-phosphate
  modified_base 6: mod_base = OTHER; note = 2'-deoxy-2'-fluorouridine-3'-phosphate
  modified_base 7: mod_base = OTHER; note = 2'-O-methyladenosine-3'-phosphate
  modified_base 8: mod_base = OTHER; note = 2'-O-methyladenosine-3'-phosphate
  modified_base 9: mod_base = OTHER; note = 2'-O-methylcytidine-3'-phosphate
  modified_base 10: mod_base = OTHER; note = 2'-O-methylguanosine-3'-phosphate
  modified_base 11: mod_base = OTHER; note = 2'-O-methyladenosine-3'-phosphate
  modified_base 12: mod_base = OTHER; note = 2'-O-methylguanosine-3'-phosphate
  modified_base 13: mod_base = OTHER; note = 2'-O-methyluridine-3'-phosphate
  modified_base 14: mod_base = OTHER; note = 2'-deoxy-2'-fluoroadenosine-3'-phosphate
  modified_base 15: mod_base = OTHER; note = 2'-O-methyluridine-3'-phosphate
  modified_base 16: mod_base = OTHER; note = 2'-deoxy-2'-fluoroguanosine-3'-phosphate
  modified_base 17: mod_base = OTHER; note = 2'-O-methylguanosine-3'-phosphate
  modified_base 18: mod_base = OTHER; note = 2'-O-methyladenosine-3'-phosphate
  modified_base 19: mod_base = OTHER; note = 2'-O-methyladenosine-3'-phosphate
  modified_base 20: mod_base = OTHER; note = 2'-O-methylguanosine-3'-phosphate
  modified_base 21: mod_base = OTHER; note = 2'-O-methyluridine-3'-phosphate
  modified_base 22: mod_base = OTHER; note = 2'-O-methyladenosine-3'-phosphate
  modified_base 23: mod_base = OTHER; note = 2'-O-methylcytidine
tgcattaacgagtatggaagtac

SEQ ID NO: 5382 - RNA, 23 nt, synthetic construct
  source 1..23: mol_type = other RNA
  modified_base 1: mod_base = OTHER; note = 2'-O-methyluridine-3'-phosphate 5'-(E)-Vinylphosphonate
  modified_base 2: mod_base = OTHER; note = 2'-deoxy-2'-fluoroadenosine-3'-phosphate
  modified_base 3: mod_base = OTHER; note = 2'-O-methylguanosine-3'-phosphate
  modified_base 4: mod_base = OTHER; note = 2'-O-methylcytidine-3'-phosphate
  modified_base 5: mod_base = OTHER; note = 2'-O-methyladenosine-3'-phosphate
  modified_base 6: mod_base = OTHER; note = 2'-deoxy-2'-fluorouridine-3'-phosphate
  modified_base 7: mod_base = OTHER; note = 2'-O-methyluridine-3'-phosphate
  modified_base 8: mod_base = OTHER; note = 2'-O-methyladenosine-3'-phosphate
  modified_base 9: mod_base = OTHER; note = 2'-O-methyladenosine-3'-phosphate
  modified_base 10: mod_base = OTHER; note = 2'-O-methylcytidine-3'-phosphate
  modified_base 11: mod_base = OTHER; note = 2'-O-methylguanosine-3'-phosphate
  modified_base 12: mod_base = OTHER; note = 2'-O-methyladenosine-3'-phosphate
  modified_base 13: mod_base = OTHER; note = 2'-O-methylguanosine-3'-phosphate
  modified_base 14: mod_base = OTHER; note = 2'-deoxy-2'-fluorouridine-3'-phosphate
  modified_base 15: mod_base = OTHER; note = 2'-O-methyladenosine-3'-phosphate
  modified_base 16: mod_base = OTHER; note = 2'-deoxy-2'-fluorouridine-3'-phosphate
  modified_base 17: mod_base = OTHER; note = 2'-O-methylguanosine-3'-phosphate
  modified_base 18: mod_base = OTHER; note = 2'-O-methylguanosine-3'-phosphate
  modified_base 19: mod_base = OTHER; note = 2'-O-methyladenosine-3'-phosphate
  modified_base 20: mod_base = OTHER; note = 2'-O-methyladenosine-3'-phosphate
  modified_base 21: mod_base = OTHER; note = 2'-O-methylguanosine-3'-phosphate
  modified_base 22: mod_base = OTHER; note = 2'-O-methyluridine-3'-phosphate
  modified_base 23: mod_base = OTHER; note = 2'-O-methyladenosine
tagcattaacgagtatggaagta

SEQ ID NO: 5383 - RNA, 23 nt, synthetic construct
  source 1..23: mol_type = other RNA
  modified_base 1: mod_base = OTHER; note = 2'-O-methyluridine-3'-phosphate 5'-(E)-Vinylphosphonate
  modified_base 2: mod_base = OTHER; note = 2'-deoxy-2'-fluoroguanosine-3'-phosphate
  modified_base 3: mod_base = OTHER; note = 2'-O-methyladenosine-3'-phosphate
  modified_base 4: mod_base = OTHER; note = 2'-O-methylguanosine-3'-phosphate
  modified_base 5: mod_base = OTHER; note = 2'-O-methylcytidine-3'-phosphate
  modified_base 6: mod_base = OTHER; note = 2'-deoxy-2'-fluoroadenosine-3'-phosphate
  modified_base 7: mod_base = OTHER; note = 2'-O-methyluridine-3'-phosphate
  modified_base 8: mod_base = OTHER; note = 2'-O-methyluridine-3'-phosphate
  modified_base 9: mod_base = OTHER; note = 2'-O-methyladenosine-3'-phosphate
  modified_base 10: mod_base = OTHER; note = 2'-O-methyladenosine-3'-phosphate
  modified_base 11: mod_base = OTHER; note = 2'-O-methylcytidine-3'-phosphate
  modified_base 12: mod_base = OTHER; note = 2'-O-methylguanosine-3'-phosphate
  modified_base 13: mod_base = OTHER; note = 2'-O-methyladenosine-3'-phosphate
  modified_base 14: mod_base = OTHER; note = 2'-deoxy-2'-fluoroguanosine-3'-phosphate
  modified_base 15: mod_base = OTHER; note = 2'-O-methyluridine-3'-phosphate
  modified_base 16: mod_base = OTHER; note = 2'-deoxy-2'-fluoroadenosine-3'-phosphate
  modified_base 17: mod_base = OTHER; note = 2'-O-methyluridine-3'-phosphate
  modified_base 18: mod_base = OTHER; note = 2'-O-methylguanosine-3'-phosphate
  modified_base 19: mod_base = OTHER; note = 2'-O-methylguanosine-3'-phosphate
  modified_base 20: mod_base = OTHER; note = 2'-O-methyladenosine-3'-phosphate
  modified_base 21: mod_base = OTHER; note = 2'-O-methyladenosine-3'-phosphate
  modified_base 22: mod_base = OTHER; note = 2'-O-methylguanosine-3'-phosphate
  modified_base 23: mod_base = OTHER; note = 2'-O-methyluridine
tgagcattaacgagtatggaagt

SEQ ID NO: 5384 - RNA, 23 nt, synthetic construct
  source 1..23: mol_type = other RNA
  modified_base 1: mod_base = OTHER; note = 2'-O-methyluridine-3'-phosphate 5'-(E)-Vinylphosphonate
  modified_base 2: mod_base = OTHER; note = 2'-deoxy-2'-fluoroadenosine-3'-phosphate
  modified_base 3: mod_base = OTHER; note = 2'-O-methylguanosine-3'-phosphate
  modified_base 4: mod_base = OTHER; note = 2'-O-methyladenosine-3'-phosphate
  modified_base 5: mod_base = OTHER; note = 2'-O-methylguanosine-3'-phosphate
  modified_base 6: mod_base = OTHER; note = 2'-deoxy-2'-fluorocytidine-3'-phosphate
  modified_base 7: mod_base = OTHER; note = 2'-O-methyladenosine-3'-phosphate
  modified_base 8: mod_base = OTHER; note = 2'-O-methyluridine-3'-phosphate
  modified_base 9: mod_base = OTHER; note = 2'-O-methyluridine-3'-phosphate
  modified_base 10: mod_base = OTHER; note = 2'-O-methyladenosine-3'-phosphate
  modified_base 11: mod_base = OTHER; note = 2'-O-methyladenosine-3'-phosphate
  modified_base 12: mod_base = OTHER; note = 2'-O-methylcytidine-3'-phosphate
  modified_base 13: mod_base = OTHER; note = 2'-O-methylguanosine-3'-phosphate
  modified_base 14: mod_base = OTHER; note = 2'-deoxy-2'-fluoroadenosine-3'-phosphate
  modified_base 15: mod_base = OTHER; note = 2'-O-methylguanosine-3'-phosphate
  modified_base 16: mod_base = OTHER; note = 2'-deoxy-2'-fluorouridine-3'-phosphate
  modified_base 17: mod_base = OTHER; note = 2'-O-methyladenosine-3'-phosphate
  modified_base 18: mod_base = OTHER; note = 2'-O-methyluridine-3'-phosphate
  modified_base 19: mod_base = OTHER; note = 2'-O-methylguanosine-3'-phosphate
  modified_base 20: mod_base = OTHER; note = 2'-O-methylguanosine-3'-phosphate
  modified_base 21: mod_base = OTHER; note = 2'-O-methyladenosine-3'-phosphate
  modified_base 22: mod_base = OTHER; note = 2'-O-methyladenosine-3'-phosphate
  modified_base 23: mod_base = OTHER; note = 2'-O-methylguanosine
tagagcattaacgagtatggaag

SEQ ID NO: 5385 - RNA, 23 nt, synthetic construct
  source 1..23: mol_type = other RNA
  modified_base 1: mod_base = OTHER; note = 2'-O-methyluridine-3'-phosphate 5'-(E)-Vinylphosphonate
  modified_base 2: mod_base = OTHER; note = 2'-deoxy-2'-fluoroguanosine-3'-phosphate
  modified_base 3: mod_base = OTHER; note = 2'-O-methyladenosine-3'-phosphate
  modified_base 4: mod_base = OTHER; note = 2'-O-methylguanosine-3'-phosphate
  modified_base 5: mod_base = OTHER; note = 2'-O-methyladenosine-3'-phosphate
  modified_base 6: mod_base = OTHER; note = 2'-deoxy-2'-fluoroguanosine-3'-phosphate
  modified_base 7: mod_base = OTHER; note = 2'-O-methylcytidine-3'-phosphate
  modified_base 8: mod_base = OTHER; note = 2'-O-methyladenosine-3'-phosphate
  modified_base 9: mod_base = OTHER; note = 2'-O-methyluridine-3'-phosphate
  modified_base 10: mod_base = OTHER; note = 2'-O-methyluridine-3'-phosphate
  modified_base 11: mod_base = OTHER; note = 2'-O-methyladenosine-3'-phosphate
  modified_base 12: mod_base = OTHER; note = 2'-O-methyladenosine-3'-phosphate
  modified_base 13: mod_base = OTHER; note = 2'-O-methylcytidine-3'-phosphate
  modified_base 14: mod_base = OTHER; note = 2'-deoxy-2'-fluoroguanosine-3'-phosphate
  modified_base 15: mod_base = OTHER; note = 2'-O-methyladenosine-3'-phosphate
  modified_base 16: mod_base = OTHER; note = 2'-deoxy-2'-fluoroguanosine-3'-phosphate
  modified_base 17: mod_base = OTHER; note = 2'-O-methyluridine-3'-phosphate
  modified_base 18: mod_base = OTHER; note = 2'-O-methyladenosine-3'-phosphate
  modified_base 19: mod_base = OTHER; note = 2'-O-methyluridine-3'-phosphate
  modified_base 20: mod_base = OTHER; note = 2'-O-methylguanosine-3'-phosphate
  modified_base 21: mod_base = OTHER; note = 2'-O-methylguanosine-3'-phosphate
  modified_base 22: mod_base = OTHER; note = 2'-O-methyladenosine-3'-phosphate
  modified_base 23: mod_base = OTHER; note = 2'-O-methyladenosine
tgagagcattaacgagtatggaa

SEQ ID NO: 5386 - RNA, 23 nt, synthetic construct
  source 1..23: mol_type = other RNA
  modified_base 1: mod_base = OTHER; note = 2'-O-methyluridine-3'-phosphate 5'-(E)-Vinylphosphonate
  modified_base 2: mod_base = OTHER; note = 2'-deoxy-2'-fluorouridine-3'-phosphate
  modified_base 3: mod_base = OTHER; note = 2'-O-methylguanosine-3'-phosphate
  modified_base 4: mod_base = OTHER; note = 2'-O-methyladenosine-3'-phosphate
  modified_base 5: mod_base = OTHER; note = 2'-O-methylguanosine-3'-phosphate
  modified_base 6: mod_base = OTHER; note = 2'-deoxy-2'-fluoroadenosine-3'-phosphate
  modified_base 7: mod_base = OTHER; note = 2'-O-methylguanosine-3'-phosphate
  modified_base 8: mod_base = OTHER; note = 2'-O-methylcytidine-3'-phosphate
  modified_base 9: mod_base = OTHER; note = 2'-O-methyladenosine-3'-phosphate
  modified_base 10: mod_base = OTHER; note = 2'-O-methyluridine-3'-phosphate
  modified_base 11: mod_base = OTHER; note = 2'-O-methyluridine-3'-phosphate
  modified_base 12: mod_base = OTHER; note = 2'-O-methyladenosine-3'-phosphate
  modified_base 13: mod_base = OTHER; note = 2'-O-methyladenosine-3'-phosphate
  modified_base 14: mod_base = OTHER; note = 2'-deoxy-2'-fluorocytidine-3'-phosphate
  modified_base 15: mod_base = OTHER; note = 2'-O-methylguanosine-3'-phosphate
  modified_base 16: mod_base = OTHER; note = 2'-deoxy-2'-fluoroadenosine-3'-phosphate
  modified_base 17: mod_base = OTHER; note = 2'-O-methylguanosine-3'-phosphate
  modified_base 18: mod_base = OTHER; note = 2'-O-methyluridine-3'-phosphate
  modified_base 19: mod_base = OTHER; note = 2'-O-methyladenosine-3'-phosphate
  modified_base 20: mod_base = OTHER; note = 2'-O-methyluridine-3'-phosphate
  modified_base 21: mod_base = OTHER; note = 2'-O-methylguanosine-3'-phosphate
  modified_base 22: mod_base = OTHER; note = 2'-O-methylguanosine-3'-phosphate
  modified_base 23: mod_base = OTHER; note = 2'-O-methyladenosine
ttgagagcattaacgagtatgga

SEQ ID NO: 5387 - RNA, 23 nt, synthetic construct
  source 1..23: mol_type = other RNA
  modified_base 1: mod_base = OTHER; note = 2'-O-methyluridine-3'-phosphate 5'-(E)-Vinylphosphonate
  modified_base 2: mod_base = OTHER; note = 2'-deoxy-2'-fluoroadenosine-3'-phosphate
  modified_base 3: mod_base = OTHER; note = 2'-O-methyluridine-3'-phosphate
  modified_base 4: mod_base = OTHER; note = 2'-O-methylguanosine-3'-phosphate
  modified_base 5: mod_base = OTHER; note = 2'-O-methyladenosine-3'-phosphate
  modified_base 6: mod_base = OTHER; note = 2'-deoxy-2'-fluoroguanosine-3'-phosphate
  modified_base 7: mod_base = OTHER; note = 2'-O-methyladenosine-3'-phosphate
  modified_base 8: mod_base = OTHER; note = 2'-O-methylguanosine-3'-phosphate
  modified_base 9: mod_base = OTHER; note = 2'-O-methylcytidine-3'-phosphate
  modified_base 10: mod_base = OTHER; note = 2'-O-methyladenosine-3'-phosphate
  modified_base 11: mod_base = OTHER; note = 2'-O-methyluridine-3'-phosphate
  modified_base 12: mod_base = OTHER; note = 2'-O-methyluridine-3'-phosphate
  modified_base 13: mod_base = OTHER; note = 2'-O-methyladenosine-3'-phosphate
  modified_base 14: mod_base = OTHER; note = 2'-deoxy-2'-fluoroadenosine-3'-phosphate
  modified_base 15: mod_base = OTHER; note = 2'-O-methylcytidine-3'-phosphate
  modified_base 16: mod_base = OTHER; note = 2'-deoxy-2'-fluoroguanosine-3'-phosphate
  modified_base 17: mod_base = OTHER; note = 2'-O-methyladenosine-3'-phosphate
  modified_base 18: mod_base = OTHER; note = 2'-O-methylguanosine-3'-phosphate
  modified_base 19: mod_base = OTHER; note = 2'-O-methyluridine-3'-phosphate
  modified_base 20: mod_base = OTHER; note = 2'-O-methyladenosine-3'-phosphate
  modified_base 21: mod_base = OTHER; note = 2'-O-methyluridine-3'-phosphate
  modified_base 22: mod_base = OTHER; note = 2'-O-methylguanosine-3'-phosphate
  modified_base 23: mod_base = OTHER; note = 2'-O-methylguanosine
tatgagagcattaacgagtatgg

SEQ ID NO: 5388 - RNA, 23 nt, synthetic construct
  source 1..23: mol_type = other RNA
  modified_base 1: mod_base = OTHER; note = 2'-O-methyluridine-3'-phosphate 5'-(E)-Vinylphosphonate
  modified_base 2: mod_base = OTHER; note = 2'-deoxy-2'-fluorouridine-3'-phosphate
  modified_base 3: mod_base = OTHER; note = 2'-O-methylguanosine-3'-phosphate
  modified_base 4: mod_base = OTHER; note = 2'-O-methylguanosine-3'-phosphate
  modified_base 5: mod_base = OTHER; note = 2'-O-methyladenosine-3'-phosphate
  modified_base 6: mod_base = OTHER; note = 2'-deoxy-2'-fluorouridine-3'-phosphate
  modified_base 7: mod_base = OTHER; note = 2'-O-methylguanosine-3'-phosphate
  modified_base 8: mod_base = OTHER; note = 2'-O-methyladenosine-3'-phosphate
  modified_base 9: mod_base = OTHER; note = 2'-O-methylguanosine-3'-phosphate
  modified_base 10: mod_base = OTHER; note = 2'-O-methyladenosine-3'-phosphate
  modified_base 11: mod_base = OTHER; note = 2'-O-methylguanosine-3'-phosphate
  modified_base 12: mod_base = OTHER; note = 2'-O-methylcytidine-3'-phosphate
  modified_base 13: mod_base = OTHER; note = 2'-O-methyladenosine-3'-phosphate
  modified_base 14: mod_base = OTHER; note = 2'-deoxy-2'-fluorouridine-3'-phosphate
  modified_base 15: mod_base = OTHER; note = 2'-O-methyluridine-3'-phosphate
  modified_base 16: mod_base = OTHER; note = 2'-deoxy-2'-fluoroadenosine-3'-phosphate
  modified_base 17: mod_base = OTHER; note = 2'-O-methyladenosine-3'-phosphate
  modified_base 18: mod_base = OTHER; note = 2'-O-methylcytidine-3'-phosphate
  modified_base 19: mod_base = OTHER; note = 2'-O-methylguanosine-3'-phosphate
  modified_base 20: mod_base = OTHER; note = 2'-O-methyladenosine-3'-phosphate
  modified_base 21: mod_base = OTHER; note = 2'-O-methylguanosine-3'-phosphate
  modified_base 22: mod_base = OTHER; note = 2'-O-methyluridine-3'-phosphate
  modified_base 23: mod_base = OTHER; note = 2'-O-methyladenosine
ttggatgagagcattaacgagta

SEQ ID NO: 5389 - RNA, 23 nt, synthetic construct
  source 1..23: mol_type = other RNA
  modified_base 1: mod_base = OTHER; note = 2'-O-methyluridine-3'-phosphate 5'-(E)-Vinylphosphonate
  modified_base 2: mod_base = OTHER; note = 2'-deoxy-2'-fluoroguanosine-3'-phosphate
  modified_base 3: mod_base = OTHER; note = 2'-O-methyluridine-3'-phosphate
  modified_base 4: mod_base = OTHER; note = 2'-O-methylguanosine-3'-phosphate
  modified_base 5: mod_base = OTHER; note = 2'-O-methylguanosine-3'-phosphate
  modified_base 6: mod_base = OTHER; note = 2'-deoxy-2'-fluoroadenosine-3'-phosphate
  modified_base 7: mod_base = OTHER; note = 2'-O-methyluridine-3'-phosphate
  modified_base 8: mod_base = OTHER; note = 2'-O-methylguanosine-3'-phosphate
  modified_base 9: mod_base = OTHER; note = 2'-O-methyladenosine-3'-phosphate
  modified_base 10: mod_base = OTHER; note = 2'-O-methylguanosine-3'-phosphate
  modified_base 11: mod_base = OTHER; note = 2'-O-methyladenosine-3'-phosphate
  modified_base 12: mod_base = OTHER; note = 2'-O-methylguanosine-3'-phosphate
  modified_base 13: mod_base = OTHER; note = 2'-O-methylcytidine-3'-phosphate
  modified_base 14: mod_base = OTHER; note = 2'-deoxy-2'-fluoroadenosine-3'-phosphate
  modified_base 15: mod_base = OTHER; note = 2'-O-methyluridine-3'-phosphate
  modified_base 16: mod_base = OTHER; note = 2'-deoxy-2'-fluorouridine-3'-phosphate
  modified_base 17: mod_base = OTHER; note = 2'-O-methyladenosine-3'-phosphate
  modified_base 18: mod_base = OTHER; note = 2'-O-methyladenosine-3'-phosphate
  modified_base 19: mod_base = OTHER; note = 2'-O-methylcytidine-3'-phosphate
  modified_base 20: mod_base = OTHER; note = 2'-O-methylguanosine-3'-phosphate
  modified_base 21: mod_base = OTHER; note = 2'-O-methyladenosine-3'-phosphate
  modified_base 22: mod_base = OTHER; note = 2'-O-methylguanosine-3'-phosphate
  modified_base 23: mod_base = OTHER; note = 2'-O-methyluridine
tgtggatgagagcattaacgagt

SEQ ID NO: 5390 - RNA, 23 nt, synthetic construct
  source 1..23: mol_type = other RNA
  modified_base 1: mod_base = OTHER; note = 2'-O-methyluridine-3'-phosphate 5'-(E)-Vinylphosphonate
  modified_base 2: mod_base = OTHER; note = 2'-deoxy-2'-fluoroadenosine-3'-phosphate
  modified_base 3: mod_base = OTHER; note = 2'-O-methylguanosine-3'-phosphate
  modified_base 4: mod_base = OTHER; note = 2'-O-methyluridine-3'-phosphate
  modified_base 5: mod_base = OTHER; note = 2'-O-methylguanosine-3'-phosphate
  modified_base 6: mod_base = OTHER; note = 2'-deoxy-2'-fluoroguanosine-3'-phosphate
  modified_base 7: mod_base = OTHER; note = 2'-O-methyladenosine-3'-phosphate
  modified_base 8: mod_base = OTHER; note = 2'-O-methyluridine-3'-phosphate
  modified_base 9: mod_base = OTHER; note = 2'-O-methylguanosine-3'-phosphate
  modified_base 10: mod_base = OTHER; note = 2'-O-methyladenosine-3'-phosphate
  modified_base 11: mod_base = OTHER; note = 2'-O-methylguanosine-3'-phosphate
  modified_base 12: mod_base = OTHER; note = 2'-O-methyladenosine-3'-phosphate
  modified_base 13: mod_base = OTHER; note = 2'-O-methylguanosine-3'-phosphate
  modified_base 14: mod_base = OTHER; note = 2'-deoxy-2'-fluorocytidine-3'-phosphate
  modified_base 15: mod_base = OTHER; note = 2'-O-methyladenosine-3'-phosphate
  modified_base 16: mod_base = OTHER; note = 2'-deoxy-2'-fluorouridine-3'-phosphate
  modified_base 17: mod_base = OTHER; note = 2'-O-methyluridine-3'-phosphate
  modified_base 18: mod_base = OTHER; note = 2'-O-methyladenosine-3'-phosphate
  modified_base 19: mod_base = OTHER; note = 2'-O-methyladenosine-3'-phosphate
  modified_base 20: mod_base = OTHER; note = 2'-O-methylcytidine-3'-phosphate
  modified_base 21: mod_base = OTHER; note = 2'-O-methylguanosine-3'-phosphate
  modified_base 22: mod_base = OTHER; note = 2'-O-methyladenosine-3'-phosphate
  modified_base 23: mod_base = OTHER; note = 2'-O-methylguanosine
tagtggatgagagcattaacgag

SEQ ID NO: 5391 - RNA, 23 nt, synthetic construct
  source 1..23: mol_type = other RNA
  modified_base 1: mod_base = OTHER; note = 2'-O-methyluridine-3'-phosphate 5'-(E)-Vinylphosphonate
  modified_base 2: mod_base = OTHER; note = 2'-deoxy-2'-fluoroadenosine-3'-phosphate
  modified_base 3: mod_base = OTHER; note = 2'-O-methyladenosine-3'-phosphate
  modified_base 4: mod_base = OTHER; note = 2'-O-methylguanosine-3'-phosphate
  modified_base 5: mod_base = OTHER; note = 2'-O-methyluridine-3'-phosphate
  modified_base 6: mod_base = OTHER; note = 2'-deoxy-2'-fluoroguanosine-3'-phosphate
  modified_base 7: mod_base = OTHER; note = 2'-O-methylguanosine-3'-phosphate
  modified_base 8: mod_base = OTHER; note = 2'-O-methyladenosine-3'-phosphate
  modified_base 9: mod_base = OTHER; note = 2'-O-methyluridine-3'-phosphate
  modified_base 10: mod_base = OTHER; note = 2'-O-methylguanosine-3'-phosphate
  modified_base 11: mod_base = OTHER; note = 2'-O-methyladenosine-3'-phosphate
  modified_base 12: mod_base = OTHER; note = 2'-O-methylguanosine-3'-phosphate
  modified_base 13: mod_base = OTHER; note = 2'-O-methyladenosine-3'-phosphate
  modified_base 14: mod_base = OTHER; note = 2'-deoxy-2'-fluoroguanosine-3'-phosphate
  modified_base 15: mod_base = OTHER; note = 2'-O-methylcytidine-3'-phosphate
  modified_base 16: mod_base = OTHER; note = 2'-deoxy-2'-fluoroadenosine-3'-phosphate
  modified_base 17: mod_base = OTHER; note = 2'-O-methyluridine-3'-phosphate
  modified_base 18: mod_base = OTHER; note = 2'-O-methyluridine-3'-phosphate
  modified_base 19: mod_base = OTHER; note = 2'-O-methyladenosine-3'-phosphate
  modified_base 20: mod_base = OTHER; note = 2'-O-methyladenosine-3'-phosphate
  modified_base 21: mod_base = OTHER; note = 2'-O-methylcytidine-3'-phosphate
  modified_base 22: mod_base = OTHER; note = 2'-O-methylguanosine-3'-phosphate
  modified_base 23: mod_base = OTHER; note = 2'-O-methyladenosine
taagtggatgagagcattaacga

SEQ ID NO: 5392 - RNA, 23 nt, synthetic construct
  source 1..23: mol_type = other RNA
  modified_base 1: mod_base = OTHER; note = 2'-O-methyluridine-3'-phosphate 5'-(E)-Vinylphosphonate
  modified_base 2: mod_base = OTHER; note = 2'-deoxy-2'-fluorouridine-3'-phosphate
  modified_base 3: mod_base = OTHER; note = 2'-O-methyladenosine-3'-phosphate
  modified_base 4: mod_base = OTHER; note = 2'-O-methyladenosine-3'-phosphate
  modified_base 5: mod_base = OTHER; note = 2'-O-methylguanosine-3'-phosphate
  modified_base 6: mod_base = OTHER; note = 2'-deoxy-2'-fluorouridine-3'-phosphate
  modified_base 7: mod_base = OTHER; note = 2'-O-methylguanosine-3'-phosphate
  modified_base 8: mod_base = OTHER; note = 2'-O-methylguanosine-3'-phosphate
  modified_base 9: mod_base = OTHER; note = 2'-O-methyladenosine-3'-phosphate
  modified_base 10: mod_base = OTHER; note = 2'-O-methyluridine-3'-phosphate
  modified_base 11: mod_base = OTHER; note = 2'-O-methylguanosine-3'-phosphate
  modified_base 12: mod_base = OTHER; note = 2'-O-methyladenosine-3'-phosphate
  modified_base 13: mod_base = OTHER; note = 2'-O-methylguanosine-3'-phosphate
  modified_base 14: mod_base = OTHER; note = 2'-deoxy-2'-fluoroadenosine-3'-phosphate
  modified_base 15: mod_base = OTHER; note = 2'-O-methylguanosine-3'-phosphate
  modified_base 16: mod_base = OTHER; note = 2'-deoxy-2'-fluorocytidine-3'-phosphate
  modified_base 17: mod_base = OTHER; note = 2'-O-methyladenosine-3'-phosphate
  modified_base 18: mod_base = OTHER; note = 2'-O-methyluridine-3'-phosphate
  modified_base 19: mod_base = OTHER; note = 2'-O-methyluridine-3'-phosphate
  modified_base 20: mod_base = OTHER; note = 2'-O-methyladenosine-3'-phosphate
  modified_base 21: mod_base = OTHER; note = 2'-O-methyladenosine-3'-phosphate
  modified_base 22: mod_base = OTHER; note = 2'-O-methylcytidine-3'-phosphate
  modified_base 23: mod_base = OTHER; note = 2'-O-methylguanosine
ttaagtggatgagagcattaacg

SEQ ID NO: 5393 - RNA, 23 nt, synthetic construct
  source 1..23: mol_type = other RNA
  modified_base 1: mod_base = OTHER; note = 2'-O-methyluridine-3'-phosphate 5'-(E)-Vinylphosphonate
  modified_base 2: mod_base = OTHER; note = 2'-deoxy-2'-fluoroadenosine-3'-phosphate
  modified_base 3: mod_base = OTHER; note = 2'-O-methyluridine-3'-phosphate
  modified_base 4: mod_base = OTHER; note = 2'-O-methyladenosine-3'-phosphate
  modified_base 5: mod_base = OTHER; note = 2'-O-methyladenosine-3'-phosphate
  modified_base 6: mod_base = OTHER; note = 2'-deoxy-2'-fluoroguanosine-3'-phosphate
  modified_base 7: mod_base = OTHER; note = 2'-O-methyluridine-3'-phosphate
  modified_base 8: mod_base = OTHER; note = 2'-O-methylguanosine-3'-phosphate
  modified_base 9: mod_base = OTHER; note = 2'-O-methylguanosine-3'-phosphate
  modified_base 10: mod_base = OTHER; note = 2'-O-methyladenosine-3'-phosphate
  modified_base 11: mod_base = OTHER; note = 2'-O-methyluridine-3'-phosphate
  modified_base 12: mod_base = OTHER; note = 2'-O-methylguanosine-3'-phosphate
  modified_base 13: mod_base = OTHER; note = 2'-O-methyladenosine-3'-phosphate
  modified_base 14: mod_base = OTHER; note = 2'-deoxy-2'-fluoroguanosine-3'-phosphate
  modified_base 15: mod_base = OTHER; note = 2'-O-methyladenosine-3'-phosphate
  modified_base 16: mod_base = OTHER; note = 2'-deoxy-2'-fluoroguanosine-3'-phosphate
  modified_base 17: mod_base = OTHER; note = 2'-O-methylcytidine-3'-phosphate
  modified_base 18: mod_base = OTHER; note = 2'-O-methyladenosine-3'-phosphate
  modified_base 19: mod_base = OTHER; note = 2'-O-methyluridine-3'-phosphate
  modified_base 20: mod_base = OTHER; note = 2'-O-methyluridine-3'-phosphate
  modified_base 21: mod_base = OTHER; note = 2'-O-methyladenosine-3'-phosphate
  modified_base 22: mod_base = OTHER; note = 2'-O-methyladenosine-3'-phosphate
  modified_base 23: mod_base = OTHER; note = 2'-O-methylcytidine
tataagtggatgagagcattaac

SEQ ID NO: 5394 - RNA, 23 nt, synthetic construct
  source 1..23: mol_type = other RNA
  modified_base 1: mod_base = OTHER; note = 2'-O-methyluridine-3'-phosphate 5'-(E)-Vinylphosphonate
  modified_base 2: mod_base = OTHER; note = 2'-deoxy-2'-fluoroadenosine-3'-phosphate
  modified_base 3: mod_base = OTHER; note = 2'-O-methyladenosine-3'-phosphate
  modified_base 4: mod_base = OTHER; note = 2'-O-methyluridine-3'-phosphate
  modified_base 5: mod_base = OTHER; note = 2'-O-methyladenosine-3'-phosphate
  modified_base 6: mod_base = OTHER; note = 2'-deoxy-2'-fluoroadenosine-3'-phosphate
  modified_base 7: mod_base = OTHER; note = 2'-O-methylguanosine-3'-phosphate
  modified_base 8: mod_base = OTHER; note = 2'-O-methyluridine-3'-phosphate
  modified_base 9: mod_base = OTHER; note = 2'-O-methylguanosine-3'-phosphate
  modified_base 10: mod_base = OTHER; note = 2'-O-methylguanosine-3'-phosphate
  modified_base 11: mod_base = OTHER; note = 2'-O-methyladenosine-3'-phosphate
  modified_base 12: mod_base = OTHER; note = 2'-O-methyluridine-3'-phosphate
  modified_base 13: mod_base = OTHER; note = 2'-O-methylguanosine-3'-phosphate
  modified_base 14: mod_base = OTHER; note = 2'-deoxy-2'-fluoroadenosine-3'-phosphate
  modified_base 15: mod_base = OTHER; note = 2'-O-methylguanosine-3'-phosphate
  modified_base 16: mod_base = OTHER; note = 2'-deoxy-2'-fluoroadenosine-3'-phosphate
  modified_base 17: mod_base = OTHER; note = 2'-O-methylguanosine-3'-phosphate
  modified_base 18: mod_base = OTHER; note = 2'-O-methylcytidine-3'-phosphate
  modified_base 19: mod_base = OTHER; note = 2'-O-methyladenosine-3'-phosphate
  modified_base 20: mod_base = OTHER; note = 2'-O-methyluridine-3'-phosphate
  modified_base 21: mod_base = OTHER; note = 2'-O-methyluridine-3'-phosphate
  modified_base 22: mod_base = OTHER; note = 2'-O-methyladenosine-3'-phosphate
  modified_base 23: mod_base = OTHER; note = 2'-O-methyladenosine
taataagtggatgagagcattaa

SEQ ID NO: 5395 - RNA, 23 nt, synthetic construct
  source 1..23: mol_type = other RNA
  modified_base 1: mod_base = OTHER; note = 2'-O-methyluridine-3'-phosphate 5'-(E)-Vinylphosphonate
  modified_base 2: mod_base = OTHER; note = 2'-deoxy-2'-fluorouridine-3'-phosphate
  modified_base 3: mod_base = OTHER; note = 2'-O-methyladenosine-3'-phosphate
  modified_base 4: mod_base = OTHER; note = 2'-O-methyladenosine-3'-phosphate
  modified_base 5: mod_base = OTHER; note = 2'-O-methyluridine-3'-phosphate
  modified_base 6: mod_base = OTHER; note = 2'-deoxy-2'-fluoroadenosine-3'-phosphate
  modified_base 7: mod_base = OTHER; note = 2'-O-methyladenosine-3'-phosphate
  modified_base 8: mod_base = OTHER; note = 2'-O-methylguanosine-3'-phosphate
  modified_base 9: mod_base = OTHER; note = 2'-O-methyluridine-3'-phosphate
  modified_base 10: mod_base = OTHER; note = 2'-O-methylguanosine-3'-phosphate
  modified_base 11: mod_base = OTHER; note = 2'-O-methylguanosine-3'-phosphate
  modified_base 12: mod_base = OTHER; note = 2'-O-methyladenosine-3'-phosphate
  modified_base 13: mod_base = OTHER; note = 2'-O-methyluridine-3'-phosphate
  modified_base 14: mod_base = OTHER; note = 2'-deoxy-2'-fluoroguanosine-3'-phosphate
  modified_base 15: mod_base = OTHER; note = 2'-O-methyladenosine-3'-phosphate
  modified_base 16: mod_base = OTHER; note = 2'-deoxy-2'-fluoroguanosine-3'-phosphate
  modified_base 17: mod_base = OTHER; note = 2'-O-methyladenosine-3'-phosphate
  modified_base 18: mod_base = OTHER; note = 2'-O-methylguanosine-3'-phosphate
  modified_base 19: mod_base = OTHER; note = 2'-O-methylcytidine-3'-phosphate
  modified_base 20: mod_base = OTHER; note = 2'-O-methyladenosine-3'-phosphate
  modified_base 21: mod_base = OTHER; note = 2'-O-methyluridine-3'-phosphate
  modified_base 22: mod_base = OTHER; note = 2'-O-methyluridine-3'-phosphate
  modified_base 23: mod_base = OTHER; note = 2'-O-methyladenosine
ttaataagtggatgagagcatta

SEQ ID NO: 5396 - RNA, 23 nt, synthetic construct
  source 1..23: mol_type = other RNA
  modified_base 1: mod_base = OTHER; note = 2'-O-methyluridine-3'-phosphate 5'-(E)-Vinylphosphonate
  modified_base 2: mod_base = OTHER; note = 2'-deoxy-2'-fluorouridine-3'-phosphate
  modified_base 3: mod_base = OTHER; note = 2'-O-methyluridine-3'-phosphate
  modified_base 4: mod_base = OTHER; note = 2'-O-methyladenosine-3'-phosphate
  modified_base 5: mod_base = OTHER; note = 2'-O-methyladenosine-3'-phosphate
  modified_base 6: mod_base = OTHER; note = 2'-deoxy-2'-fluorouridine-3'-phosphate
  modified_base 7: mod_base = OTHER; note = 2'-O-methyladenosine-3'-phosphate
  modified_base 8: mod_base = OTHER; note = 2'-O-methyladenosine-3'-phosphate
  modified_base 9: mod_base = OTHER; note = 2'-O-methylguanosine-3'-phosphate
  modified_base 10: mod_base = OTHER; note = 2'-O-methyluridine-3'-phosphate
  modified_base 11: mod_base = OTHER; note = 2'-O-methylguanosine-3'-phosphate
  modified_base 12: mod_base = OTHER; note = 2'-O-methylguanosine-3'-phosphate
  modified_base 13: mod_base = OTHER; note = 2'-O-methyladenosine-3'-phosphate
  modified_base 14: mod_base = OTHER; note = 2'-deoxy-2'-fluorouridine-3'-phosphate
  modified_base 15: mod_base = OTHER; note = 2'-O-methylguanosine-3'-phosphate
  modified_base 16: mod_base = OTHER; note = 2'-deoxy-2'-fluoroadenosine-3'-phosphate
  modified_base 17: mod_base = OTHER; note = 2'-O-methylguanosine-3'-phosphate
  modified_base 18: mod_base = OTHER; note = 2'-O-methyladenosine-3'-phosphate
  modified_base 19: mod_base = OTHER; note = 2'-O-methylguanosine-3'-phosphate
  modified_base 20: mod_base = OTHER; note = 2'-O-methylcytidine-3'-phosphate
  modified_base 21: mod_base = OTHER; note = 2'-O-methyladenosine-3'-phosphate
  modified_base 22: mod_base = OTHER; note = 2'-O-methyluridine-3'-phosphate
  modified_base 23: mod_base = OTHER; note = 2'-O-methyluridine
tttaataagtggatgagagcatt

SEQ ID NO: 5397 - RNA, 23 nt, synthetic construct
  source 1..23: mol_type = other RNA
  modified_base 1: mod_base = OTHER; note = 2'-O-methyluridine-3'-phosphate 5'-(E)-Vinylphosphonate
  modified_base 2: mod_base = OTHER; note = 2'-deoxy-2'-fluorouridine-3'-phosphate
  modified_base 3: mod_base = OTHER; note = 2'-O-methyluridine-3'-phosphate
  modified_base 4: mod_base = OTHER; note = 2'-O-methyluridine-3'-phosphate
  modified_base 5: mod_base = OTHER; note = 2'-O-methyladenosine-3'-phosphate
  modified_base 6: mod_base = OTHER; note = 2'-deoxy-2'-fluoroadenosine-3'-phosphate
  modified_base 7: mod_base = OTHER; note = 2'-O-methyluridine-3'-phosphate
  modified_base 8: mod_base = OTHER; note = 2'-O-methyladenosine-3'-phosphate
  modified_base 9: mod_base = OTHER; note = 2'-O-methyladenosine-3'-phosphate
  modified_base 10: mod_base = OTHER; note = 2'-O-methylguanosine-3'-phosphate
  modified_base 11: mod_base = OTHER; note = 2'-O-methyluridine-3'-phosphate
  modified_base 12: mod_base = OTHER; note = 2'-O-methylguanosine-3'-phosphate
  modified_base 13: mod_base = OTHER; note = 2'-O-methylguanosine-3'-phosphate
  modified_base 14: mod_base = OTHER; note = 2'-deoxy-2'-fluoroadenosine-3'-phosphate
  modified_base 15: mod_base = OTHER; note = 2'-O-methyluridine-3'-phosphate
  modified_base 16: mod_base = OTHER; note = 2'-deoxy-2'-fluoroguanosine-3'-phosphate
  modified_base 17: mod_base = OTHER; note = 2'-O-methyladenosine-3'-phosphate
  modified_base 18: mod_base = OTHER; note = 2'-O-methylguanosine-3'-phosphate
  modified_base 19: mod_base = OTHER; note = 2'-O-methyladenosine-3'-phosphate
  modified_base 20: mod_base = OTHER; note = 2'-O-methylguanosine-3'-phosphate
  modified_base 21: mod_base = OTHER; note = 2'-O-methylcytidine-3'-phosphate
  modified_base 22: mod_base = OTHER; note = 2'-O-methyladenosine-3'-phosphate
  modified_base 23: mod_base = OTHER; note = 2'-O-methyluridine
ttttaataagtggatgagagcat

SEQ ID NO: 5398 - RNA, 23 nt, synthetic construct
  source 1..23: mol_type = other RNA
  modified_base 1: mod_base = OTHER; note = 2'-O-methyluridine-3'-phosphate 5'-(E)-Vinylphosphonate
  modified_base 2: mod_base = OTHER; note = 2'-deoxy-2'-fluoroadenosine-3'-phosphate
  modified_base 3: mod_base = OTHER; note = 2'-O-methyluridine-3'-phosphate
  modified_base 4: mod_base = OTHER; note = 2'-O-methyluridine-3'-phosphate
  modified_base 5: mod_base = OTHER; note = 2'-O-methyluridine-3'-phosphate
  modified_base 6: mod_base = OTHER; note = 2'-deoxy-2'-fluoroadenosine-3'-phosphate
  modified_base 7: mod_base = OTHER; note = 2'-O-methyladenosine-3'-phosphate
  modified_base 8: mod_base = OTHER; note = 2'-O-methyluridine-3'-phosphate
  modified_base 9: mod_base = OTHER; note = 2'-O-methyladenosine-3'-phosphate
  modified_base 10: mod_base = OTHER; note = 2'-O-methyladenosine-3'-phosphate
  modified_base 11: mod_base = OTHER; note = 2'-O-methylguanosine-3'-phosphate
  modified_base 12: mod_base = OTHER; note = 2'-O-methyluridine-3'-phosphate
  modified_base 13: mod_base = OTHER; note = 2'-O-methylguanosine-3'-phosphate
  modified_base 14: mod_base = OTHER; note = 2'-deoxy-2'-fluoroguanosine-3'-phosphate
  modified_base 15: mod_base = OTHER; note = 2'-O-methyladenosine-3'-phosphate
  modified_base 16: mod_base = OTHER; note = 2'-deoxy-2'-fluorouridine-3'-phosphate
  modified_base 17: mod_base = OTHER; note = 2'-O-methylguanosine-3'-phosphate
  modified_base 18: mod_base = OTHER; note = 2'-O-methyladenosine-3'-phosphate
  modified_base 19: mod_base = OTHER; note = 2'-O-methylguanosine-3'-phosphate
  modified_base 20: mod_base = OTHER; note = 2'-O-methyladenosine-3'-phosphate
  modified_base 21: mod_base = OTHER; note = 2'-O-methylguanosine-3'-phosphate
  modified_base 22: mod_base = OTHER; note = 2'-O-methylcytidine-3'-phosphate
  modified_base 23: mod_base = OTHER; note = 2'-O-methyladenosine
tatttaataagtggatgagagca

SEQ ID NO: 5399 - RNA, 23 nt, synthetic construct
  source 1..23: mol_type = other RNA
  modified_base 1: mod_base = OTHER; note = 2'-O-methyluridine-3'-phosphate 5'-(E)-Vinylphosphonate
  modified_base 2: mod_base = OTHER; note = 2'-deoxy-2'-fluorouridine-3'-phosphate
  modified_base 3: mod_base = OTHER; note = 2'-O-methyladenosine-3'-phosphate
  modified_base 4: mod_base = OTHER; note = 2'-O-methyluridine-3'-phosphate
  modified_base 5: mod_base = OTHER; note = 2'-O-methyluridine-3'-phosphate
  modified_base 6: mod_base = OTHER; note = 2'-deoxy-2'-fluorouridine-3'-phosphate
  modified_base 7: mod_base = OTHER; note = 2'-O-methyladenosine-3'-phosphate
  modified_base 8: mod_base = OTHER; note = 2'-O-methyladenosine-3'-phosphate
  modified_base 9: mod_base = OTHER; note = 2'-O-methyluridine-3'-phosphate
  modified_base 10: mod_base = OTHER; note = 2'-O-methyladenosine-3'-phosphate
  modified_base 11: mod_base = OTHER; note = 2'-O-methyladenosine-3'-phosphate
  modified_base 12: mod_base = OTHER; note = 2'-O-methylguanosine-3'-phosphate
  modified_base 13: mod_base = OTHER; note = 2'-O-methyluridine-3'-phosphate
  modified_base 14: mod_base = OTHER; note = 2'-deoxy-2'-fluoroguanosine-3'-phosphate
  modified_base 15: mod_base = OTHER; note = 2'-O-methylguanosine-3'-phosphate
  modified_base 16: mod_base = OTHER; note = 2'-deoxy-2'-fluoroadenosine-3'-phosphate
  modified_base 17: mod_base = OTHER; note = 2'-O-methyluridine-3'-phosphate
  modified_base 18: mod_base = OTHER; note = 2'-O-methylguanosine-3'-phosphate
  modified_base 19: mod_base = OTHER; note = 2'-O-methyladenosine-3'-phosphate
  modified_base 20: mod_base = OTHER; note = 2'-O-methylguanosine-3'-phosphate
  modified_base 21: mod_base = OTHER; note = 2'-O-methyladenosine-3'-phosphate
  modified_base 22: mod_base = OTHER; note = 2'-O-methylguanosine-3'-phosphate
  modified_base 23: mod_base = OTHER; note = 2'-O-methylcytidine
ttatttaataagtggatgagagc

SEQ ID NO: 5400 - RNA, 23 nt, synthetic construct
  source 1..23: mol_type = other RNA
  modified_base 1: mod_base = OTHER; note = 2'-O-methyluridine-3'-phosphate 5'-(E)-Vinylphosphonate
  modified_base 2: mod_base = OTHER; note = 2'-deoxy-2'-fluorouridine-3'-phosphate
  modified_base 3: mod_base = OTHER; note = 2'-O-methyluridine-3'-phosphate
  modified_base 4: mod_base = OTHER; note = 2'-O-methyladenosine-3'-phosphate
  modified_base 5: mod_base = OTHER; note = 2'-O-methyluridine-3'-phosphate
  modified_base 6: mod_base = OTHER; note = 2'-deoxy-2'-fluorouridine-3'-phosphate
  modified_base 7: mod_base = OTHER; note = 2'-O-methyluridine-3'-phosphate
  modified_base 8: mod_base = OTHER; note = 2'-O-methyladenosine-3'-phosphate
  modified_base 9: mod_base = OTHER; note = 2'-O-methyladenosine-3'-phosphate
  modified_base 10: mod_base = OTHER; note = 2'-O-methyluridine-3'-phosphate
  modified_base 11: mod_base = OTHER; note = 2'-O-methyladenosine-3'-phosphate
  modified_base 12: mod_base = OTHER; note = 2'-O-methyladenosine-3'-phosphate
  modified_base 13: mod_base = OTHER; note = 2'-O-methylguanosine-3'-phosphate
  modified_base 14: mod_base = OTHER; note = 2'-deoxy-2'-fluorouridine-3'-phosphate
  modified_base 15: mod_base = OTHER; note = 2'-O-methylguanosine-3'-phosphate
  modified_base 16: mod_base = OTHER; note = 2'-deoxy-2'-fluoroguanosine-3'-phosphate
  modified_base 17: mod_base = OTHER; note = 2'-O-methyladenosine-3'-phosphate
  modified_base 18: mod_base = OTHER; note = 2'-O-methyluridine-3'-phosphate
  modified_base 19: mod_base = OTHER; note = 2'-O-methylguanosine-3'-phosphate
  modified_base 20: mod_base = OTHER; note = 2'-O-methyladenosine-3'-phosphate
  modified_base 21: mod_base = OTHER; note = 2'-O-methylguanosine-3'-phosphate
  modified_base 22: mod_base = OTHER; note = 2'-O-methyladenosine-3'-phosphate
  modified_base 23: mod_base = OTHER; note = 2'-O-methylguanosine
tttatttaataagtggatgagag

SEQ ID NO: 5401 - RNA, 23 nt, synthetic construct
  source 1..23: mol_type = other RNA
  modified_base 1: mod_base = OTHER; note = 2'-O-methyluridine-3'-phosphate 5'-(E)-Vinylphosphonate
  modified_base 2: mod_base = OTHER; note = 2'-deoxy-2'-fluoroguanosine-3'-phosphate
  modified_base 3: mod_base = OTHER; note = 2'-O-methylguanosine-3'-phosphate
  modified_base 4: mod_base = OTHER; note = 2'-O-methyluridine-3'-phosphate
  modified_base 5: mod_base = OTHER; note = 2'-O-methylguanosine-3'-phosphate
  modified_base 6: mod_base = OTHER; note = 2'-deoxy-2'-fluorocytidine-3'-phosphate
  modified_base 7: mod_base = OTHER; note = 2'-O-methyluridine-3'-phosphate
  modified_base 8: mod_base = OTHER; note = 2'-O-methylcytidine-3'-phosphate
  modified_base 9: mod_base = OTHER; note = 2'-O-methyluridine-3'-phosphate
  modified_base 10: mod_base = OTHER; note = 2'-O-methyladenosine-3'-phosphate
  modified_base 11: mod_base = OTHER; note = 2'-O-methyluridine-3'-phosphate
  modified_base 12: mod_base = OTHER; note = 2'-O-methylguanosine-3'-phosphate
  modified_base 13: mod_base = OTHER; note = 2'-O-methyladenosine-3'-phosphate
  modified_base 14: mod_base = OTHER; note = 2'-deoxy-2'-fluorouridine-3'-phosphate
  modified_base 15: mod_base = OTHER; note = 2'-O-methyluridine-3'-phosphate
  modified_base 16: mod_base = OTHER; note = 2'-deoxy-2'-fluoroadenosine-3'-phosphate
  modified_base 17: mod_base = OTHER; note = 2'-O-methyluridine-3'-phosphate
  modified_base 18: mod_base = OTHER; note = 2'-O-methyluridine-3'-phosphate
  modified_base 19: mod_base = OTHER; note = 2'-O-methyluridine-3'-phosphate
  modified_base 20: mod_base = OTHER; note = 2'-O-methyladenosine-3'-phosphate
  modified_base 21: mod_base = OTHER; note = 2'-O-methyladenosine-3'-phosphate
  modified_base 22: mod_base = OTHER; note = 2'-O-methyluridine-3'-phosphate
  modified_base 23: mod_base = OTHER; note = 2'-O-methyladenosine
tggtgctctatgattatttaata

SEQ ID NO: 5402 - RNA, 23 nt, synthetic construct
  source 1..23: mol_type = other RNA
  modified_base 1: mod_base = OTHER; note = 2'-O-methyluridine-3'-phosphate 5'-(E)-Vinylphosphonate
  modified_base 2: mod_base = OTHER; note = 2'-deoxy-2'-fluoroguanosine-3'-phosphate
  modified_base 3: mod_base = OTHER; note = 2'-O-methylguanosine-3'-phosphate
  modified_base 4: mod_base = OTHER; note = 2'-O-methylguanosine-3'-phosphate
  modified_base 5: mod_base = OTHER; note = 2'-O-methyluridine-3'-phosphate
  modified_base 6: mod_base = OTHER; note = 2'-deoxy-2'-fluoroguanosine-3'-phosphate
  modified_base 7: mod_base = OTHER; note = 2'-O-methylcytidine-3'-phosphate
  modified_base 8: mod_base = OTHER; note = 2'-O-methyluridine-3'-phosphate
  modified_base 9: mod_base = OTHER; note = 2'-O-methylcytidine-3'-phosphate
  modified_base 10: mod_base = OTHER; note = 2'-O-methyluridine-3'-phosphate
  modified_base 11: mod_base = OTHER; note = 2'-O-methyladenosine-3'-phosphate
  modified_base 12: mod_base = OTHER; note = 2'-O-methyluridine-3'-phosphate
  modified_base 13: mod_base = OTHER; note = 2'-O-methylguanosine-3'-phosphate
  modified_base 14: mod_base = OTHER; note = 2'-deoxy-2'-fluoroadenosine-3'-phosphate
  modified_base 15: mod_base = OTHER; note = 2'-O-methyluridine-3'-phosphate
  modified_base 16: mod_base = OTHER; note = 2'-deoxy-2'-fluorouridine-3'-phosphate
  modified_base 17: mod_base = OTHER; note = 2'-O-methyladenosine-3'-phosphate
  modified_base 18: mod_base = OTHER; note = 2'-O-methyluridine-3'-phosphate
  modified_base 19: mod_base = OTHER; note = 2'-O-methyluridine-3'-phosphate
  modified_base 20: mod_base = OTHER; note = 2'-O-methyluridine-3'-phosphate
  modified_base 21: mod_base = OTHER; note = 2'-O-methyladenosine-3'-phosphate
  modified_base 22: mod_base = OTHER; note = 2'-O-methyladenosine-3'-phosphate
  modified_base 23: mod_base = OTHER; note = 2'-O-methyluridine
tgggtgctctatgattatttaat

SEQ ID NO: 5403 - RNA, 23 nt, synthetic construct
  source 1..23: mol_type = other RNA
  modified_base 1: mod_base = OTHER; note = 2'-O-methyluridine-3'-phosphate 5'-(E)-Vinylphosphonate
  modified_base 2: mod_base = OTHER; note = 2'-deoxy-2'-fluorouridine-3'-phosphate
  modified_base 3: mod_base = OTHER; note = 2'-O-methylguanosine-3'-phosphate
  modified_base 4: mod_base = OTHER; note = 2'-O-methylguanosine-3'-phosphate
  modified_base 5: mod_base = OTHER; note = 2'-O-methylguanosine-3'-phosphate
  modified_base 6: mod_base = OTHER; note = 2'-deoxy-2'-fluorouridine-3'-phosphate
  modified_base 7: mod_base = OTHER; note = 2'-O-methylguanosine-3'-phosphate
  modified_base 8: mod_base = OTHER; note = 2'-O-methylcytidine-3'-phosphate
  modified_base 9: mod_base = OTHER; note = 2'-O-methyluridine-3'-phosphate
  modified_base 10: mod_base = OTHER; note = 2'-O-methylcytidine-3'-phosphate
  modified_base 11: mod_base = OTHER; note = 2'-O-methyluridine-3'-phosphate
  modified_base 12: mod_base = OTHER; note = 2'-O-methyladenosine-3'-phosphate
  modified_base 13: mod_base = OTHER; note = 2'-O-methyluridine-3'-phosphate
  modified_base 14: mod_base = OTHER; note = 2'-deoxy-2'-fluoroguanosine-3'-phosphate
  modified_base 15: mod_base = OTHER; note = 2'-O-methyladenosine-3'-phosphate
  modified_base 16: mod_base = OTHER; note = 2'-deoxy-2'-fluorouridine-3'-phosphate
  modified_base 17: mod_base = OTHER; note = 2'-O-methyluridine-3'-phosphate
  modified_base 18: mod_base = OTHER; note = 2'-O-methyladenosine-3'-phosphate
  modified_base 19: mod_base = OTHER; note = 2'-O-methyluridine-3'-phosphate
  modified_base 20: mod_base = OTHER; note = 2'-O-methyluridine-3'-phosphate
  modified_base 21: mod_base = OTHER; note = 2'-O-methyluridine-3'-phosphate
  modified_base 22: mod_base = OTHER; note = 2'-O-methyladenosine-3'-phosphate
  modified_base 23: mod_base = OTHER; note = 2'-O-methyladenosine
ttgggtgctctatgattatttaa

SEQ ID NO: 5404 - RNA, 23 nt, synthetic construct
  source 1..23: mol_type = other RNA
  modified_base 1: mod_base = OTHER; note = 2'-O-methyluridine-3'-phosphate 5'-(E)-Vinylphosphonate
  modified_base 2: mod_base = OTHER; note = 2'-deoxy-2'-fluoroadenosine-3'-phosphate
  modified_base 3: mod_base = OTHER; note = 2'-O-methyluridine-3'-phosphate
  modified_base 4: mod_base = OTHER; note = 2'-O-methylguanosine-3'-phosphate
  modified_base 5: mod_base = OTHER; note = 2'-O-methylguanosine-3'-phosphate
  modified_base 6: mod_base = OTHER; note = 2'-deoxy-2'-fluoroguanosine-3'-phosphate
  modified_base 7: mod_base = OTHER; note = 2'-O-methyluridine-3'-phosphate
  modified_base 8: mod_base = OTHER; note = 2'-O-methylguanosine-3'-phosphate
  modified_base 9: mod_base = OTHER; note = 2'-O-methylcytidine-3'-phosphate
  modified_base 10: mod_base = OTHER; note = 2'-O-methyluridine-3'-phosphate
  modified_base 11: mod_base = OTHER; note = 2'-O-methylcytidine-3'-phosphate
  modified_base 12: mod_base = OTHER; note = 2'-O-methyluridine-3'-phosphate
  modified_base 13: mod_base = OTHER; note = 2'-O-methyladenosine-3'-phosphate
  modified_base 14: mod_base = OTHER; note = 2'-deoxy-2'-fluorouridine-3'-phosphate
  modified_base 15: mod_base = OTHER; note = 2'-O-methylguanosine-3'-phosphate
  modified_base 16: mod_base = OTHER; note = 2'-deoxy-2'-fluoroadenosine-3'-phosphate
  modified_base 17: mod_base = OTHER; note = 2'-O-methyluridine-3'-phosphate
  modified_base 18: mod_base = OTHER; note = 2'-O-methyluridine-3'-phosphate
  modified_base 19: mod_base = OTHER; note = 2'-O-methyladenosine-3'-phosphate
  modified_base 20: mod_base = OTHER; note = 2'-O-methyluridine-3'-phosphate
  modified_base 21: mod_base = OTHER; note = 2'-O-methyluridine-3'-phosphate
  modified_base 22: mod_base = OTHER; note = 2'-O-methyluridine-3'-phosphate
  modified_base 23: mod_base = OTHER; note = 2'-O-methyladenosine
tatgggtgctctatgattattta

SEQ ID NO: 5405 - RNA, 23 nt, synthetic construct
  source 1..23: mol_type = other RNA
  modified_base 1: mod_base = OTHER; note = 2'-O-methyluridine-3'-phosphate 5'-(E)-Vinylphosphonate
  modified_base 2: mod_base = OTHER; note = 2'-deoxy-2'-fluorouridine-3'-phosphate
  modified_base 3: mod_base = OTHER; note = 2'-O-methyladenosine-3'-phosphate
  modified_base 4: mod_base = OTHER; note = 2'-O-methyluridine-3'-phosphate
  modified_base 5: mod_base = OTHER; note = 2'-O-methylguanosine-3'-phosphate
  modified_base 6: mod_base = OTHER; note = 2'-deoxy-2'-fluoroguanosine-3'-phosphate
  modified_base 7: mod_base = OTHER; note = 2'-O-methylguanosine-3'-phosphate
  modified_base 8: mod_base = OTHER; note = 2'-O-methyluridine-3'-phosphate
  modified_base 9: mod_base = OTHER; note = 2'-O-methylguanosine-3'-phosphate
  modified_base 10: mod_base = OTHER; note = 2'-O-methylcytidine-3'-phosphate
  modified_base 11: mod_base = OTHER; note = 2'-O-methyluridine-3'-phosphate
  modified_base 12: mod_base = OTHER; note = 2'-O-methylcytidine-3'-phosphate
  modified_base 13: mod_base = OTHER; note = 2'-O-methyluridine-3'-phosphate
  modified_base 14: mod_base = OTHER; note = 2'-deoxy-2'-fluoroadenosine-3'-phosphate
  modified_base 15: mod_base = OTHER; note = 2'-O-methyluridine-3'-phosphate
  modified_base 16: mod_base = OTHER; note = 2'-deoxy-2'-fluoroguanosine-3'-phosphate
  modified_base 17: mod_base = OTHER; note = 2'-O-methyladenosine-3'-phosphate
  modified_base 18: mod_base = OTHER; note = 2'-O-methyluridine-3'-phosphate
  modified_base 19: mod_base = OTHER; note = 2'-O-methyluridine-3'-phosphate
  modified_base 20: mod_base = OTHER; note = 2'-O-methyladenosine-3'-phosphate
  modified_base 21: mod_base = OTHER; note = 2'-O-methyluridine-3'-phosphate
  modified_base 22: mod_base = OTHER; note = 2'-O-methyluridine-3'-phosphate
  modified_base 23: mod_base = OTHER; note = 2'-O-methyluridine
ttatgggtgctctatgattattt

SEQ ID NO: 5406 - RNA, 23 nt, synthetic construct
  source 1..23: mol_type = other RNA
  modified_base 1: mod_base = OTHER; note = 2'-O-methyluridine-3'-phosphate 5'-(E)-Vinylphosphonate
  modified_base 2: mod_base = OTHER; note = 2'-deoxy-2'-fluoroadenosine-3'-phosphate
  modified_base 3: mod_base = OTHER; note = 2'-O-methyluridine-3'-phosphate
  modified_base 4: mod_base = OTHER; note = 2'-O-methyladenosine-3'-phosphate
  modified_base 5: mod_base = OTHER; note = 2'-O-methyluridine-3'-phosphate
  modified_base 6: mod_base = OTHER; note = 2'-deoxy-2'-fluoroguanosine-3'-phosphate
  modified_base 7: mod_base = OTHER; note = 2'-O-methylguanosine-3'-phosphate
  modified_base 8: mod_base = OTHER; note = 2'-O-methylguanosine-3'-phosphate
  modified_base 9: mod_base = OTHER; note = 2'-O-methyluridine-3'-phosphate
  modified_base 10: mod_base = OTHER; note = 2'-O-methylguanosine-3'-phosphate
  modified_base 11: mod_base = OTHER; note = 2'-O-methylcytidine-3'-phosphate
  modified_base 12: mod_base = OTHER; note = 2'-O-methyluridine-3'-phosphate
  modified_base 13: mod_base = OTHER; note = 2'-O-methylcytidine-3'-phosphate
  modified_base 14: mod_base = OTHER; note = 2'-deoxy-2'-fluorouridine-3'-phosphate
  modified_base 15: mod_base = OTHER; note = 2'-O-methyladenosine-3'-phosphate
  modified_base 16: mod_base = OTHER; note = 2'-deoxy-2'-fluorouridine-3'-phosphate
  modified_base 17: mod_base = OTHER; note = 2'-O-methylguanosine-3'-phosphate
  modified_base 18: mod_base = OTHER; note = 2'-O-methyladenosine-3'-phosphate
  modified_base 19: mod_base = OTHER; note = 2'-O-methyluridine-3'-phosphate
  modified_base 20: mod_base = OTHER; note = 2'-O-methyluridine-3'-phosphate
  modified_base 21: mod_base = OTHER; note = 2'-O-methyladenosine-3'-phosphate
  modified_base 22: mod_base = OTHER; note = 2'-O-methyluridine-3'-phosphate
  modified_base 23: mod_base = OTHER; note = 2'-O-methyluridine
tatatgggtgctctatgattatt

SEQ ID NO: 5407 - RNA, 23 nt, synthetic construct
  source 1..23: mol_type = other RNA
  modified_base 1: mod_base = OTHER; note = 2'-O-methyluridine-3'-phosphate 5'-(E)-Vinylphosphonate
  modified_base 2: mod_base = OTHER; note = 2'-deoxy-2'-fluorocytidine-3'-phosphate
  modified_base 3: mod_base = OTHER; note = 2'-O-methyladenosine-3'-phosphate
  modified_base 4: mod_base = OTHER; note = 2'-O-methyladenosine-3'-phosphate
  modified_base 5: mod_base = OTHER; note = 2'-O-methylguanosine-3'-phosphate
  modified_base 6: mod_base = OTHER; note = 2'-deoxy-2'-fluorocytidine-3'-phosphate
  modified_base 7: mod_base = OTHER; note = 2'-O-methyladenosine-3'-phosphate
  modified_base 8: mod_base = OTHER; note = 2'-O-methyladenosine-3'-phosphate
  modified_base 9: mod_base = OTHER; note = 2'-O-methylguanosine-3'-phosphate
  modified_base 10: mod_base = OTHER; note = 2'-O-methyladenosine-3'-phosphate
  modified_base 11: mod_base = OTHER; note = 2'-O-methyluridine-3'-phosphate
  modified_base 12: mod_base = OTHER; note = 2'-O-methyladenosine-3'-phosphate
  modified_base 13: mod_base = OTHER; note = 2'-O-methyluridine-3'-phosphate
  modified_base 14: mod_base = OTHER; note = 2'-deoxy-2'-fluoroguanosine-3'-phosphate
  modified_base 15: mod_base = OTHER; note = 2'-O-methylguanosine-3'-phosphate
  modified_base 16: mod_base = OTHER; note = 2'-deoxy-2'-fluoroguanosine-3'-phosphate
  modified_base 17: mod_base = OTHER; note = 2'-O-methyluridine-3'-phosphate
  modified_base 18: mod_base = OTHER; note = 2'-O-methylguanosine-3'-phosphate
  modified_base 19: mod_base = OTHER; note = 2'-O-methylcytidine-3'-phosphate
  modified_base 20: mod_base = OTHER; note = 2'-O-methyluridine-3'-phosphate
  modified_base 21: mod_base = OTHER; note = 2'-O-methylcytidine-3'-phosphate
  modified_base 22: mod_base = OTHER; note = 2'-O-methyluridine-3'-phosphate
  modified_base 23: mod_base = OTHER; note = 2'-O-methyladenosine
tcaagcaagatatgggtgctcta

SEQ ID NO: 5408 - RNA, 23 nt, synthetic construct
  source 1..23: mol_type = other RNA
  modified_base 1: mod_base = OTHER; note = 2'-O-methyluridine-3'-phosphate 5'-(E)-Vinylphosphonate
  modified_base 2: mod_base = OTHER; note = 2'-deoxy-2'-fluorouridine-3'-phosphate
  modified_base 3: mod_base = OTHER; note = 2'-O-methyladenosine-3'-phosphate
  modified_base 4: mod_base = OTHER; note = 2'-O-methyluridine-3'-phosphate
  modified_base 5: mod_base = OTHER; note = 2'-O-methyluridine-3'-phosphate
  modified_base 6: mod_base = OTHER; note = 2'-deoxy-2'-fluoroguanosine-3'-phosphate
  modified_base 7: mod_base = OTHER; note = 2'-O-methyluridine-3'-phosphate
  modified_base 8: mod_base = OTHER; note = 2'-O-methylguanosine-3'-phosphate
  modified_base 9: mod_base = OTHER; note = 2'-O-methylguanosine-3'-phosphate
  modified_base 10: mod_base = OTHER; note = 2'-O-methylcytidine-3'-phosphate
  modified_base 11: mod_base = OTHER; note = 2'-O-methyladenosine-3'-phosphate
  modified_base 12: mod_base = OTHER; note = 2'-O-methyladenosine-3'-phosphate
  modified_base 13: mod_base = OTHER; note = 2'-O-methylguanosine-3'-phosphate
  modified_base 14: mod_base = OTHER; note = 2'-deoxy-2'-fluorocytidine-3'-phosphate
  modified_base 15: mod_base = OTHER; note = 2'-O-methyladenosine-3'-phosphate
  modified_base 16: mod_base = OTHER; note = 2'-deoxy-2'-fluoroadenosine-3'-phosphate
  modified_base 17: mod_base = OTHER; note = 2'-O-methylguanosine-3'-phosphate
  modified_base 18: mod_base = OTHER; note = 2'-O-methyladenosine-3'-phosphate
  modified_base 19: mod_base = OTHER; note = 2'-O-methyluridine-3'-phosphate
  modified_base 20: mod_base = OTHER; note = 2'-O-methyladenosine-3'-phosphate
  modified_base 21: mod_base = OTHER; note = 2'-O-methyluridine-3'-phosphate
  modified_base 22: mod_base = OTHER; note = 2'-O-methylguanosine-3'-phosphate
  modified_base 23: mod_base = OTHER; note = 2'-O-methylguanosine
ttattgtggcaagcaagatatgg

SEQ ID NO: 5409 - RNA, 23 nt, synthetic construct
  source 1..23: mol_type = other RNA
  modified_base 1: mod_base = OTHER; note = 2'-O-methyluridine-3'-phosphate 5'-(E)-Vinylphosphonate
  modified_base 2: mod_base = OTHER; note = 2'-deoxy-2'-fluorouridine-3'-phosphate
  modified_base 3: mod_base = OTHER; note = 2'-O-methylcytidine-3'-phosphate
  modified_base 4: mod_base = OTHER; note = 2'-O-methylcytidine-3'-phosphate
  modified_base 5: mod_base = OTHER; note = 2'-O-methylcytidine-3'-phosphate
  modified_base 6: mod_base = OTHER; note = 2'-deoxy-2'-fluorouridine-3'-phosphate
  modified_base 7: mod_base = OTHER; note = 2'-O-methylguanosine-3'-phosphate
  modified_base 8: mod_base = OTHER; note = 2'-O-methyladenosine-3'-phosphate
  modified_base 9: mod_base = OTHER; note = 2'-O-methylguanosine-3'-phosphate
  modified_base 10: mod_base = OTHER; note = 2'-O-methylguanosine-3'-phosphate
  modified_base 11: mod_base = OTHER; note = 2'-O-methylguanosine-3'-phosphate
  modified_base 12: mod_base = OTHER; note = 2'-O-methylcytidine-3'-phosphate
  modified_base 13: mod_base = OTHER; note = 2'-O-methyladenosine-3'-phosphate
  modified_base 14: mod_base = OTHER; note = 2'-deoxy-2'-fluoroguanosine-3'-phosphate
  modified_base 15: mod_base = OTHER; note = 2'-O-methylguanosine-3'-phosphate
  modified_base 16: mod_base = OTHER; note = 2'-deoxy-2'-fluoroadenosine-3'-phosphate
  modified_base 17: mod_base = OTHER; note = 2'-O-methylcytidine-3'-phosphate
  modified_base 18: mod_base = OTHER; note = 2'-O-methylcytidine-3'-phosphate
  modified_base 19: mod_base = OTHER; note = 2'-O-methyluridine-3'-phosphate
  modified_base 20: mod_base = OTHER; note = 2'-O-methyladenosine-3'-phosphate
  modified_base 21: mod_base = OTHER; note = 2'-O-methyluridine-3'-phosphate
  modified_base 22: mod_base = OTHER; note = 2'-O-methylcytidine-3'-phosphate
  modified_base 23: mod_base = OTHER; note = 2'-O-methyluridine
ttccctgagggcaggacctatct

SEQ ID NO: 5410 - RNA, 23 nt, synthetic construct
  source 1..23: mol_type = other RNA
  modified_base 1: mod_base = OTHER; note = 2'-O-methyluridine-3'-phosphate 5'-(E)-Vinylphosphonate
  modified_base 2: mod_base = OTHER; note = 2'-deoxy-2'-fluoroadenosine-3'-phosphate
  modified_base 3: mod_base = OTHER; note = 2'-O-methyluridine-3'-phosphate
  modified_base 4: mod_base = OTHER; note = 2'-O-methylcytidine-3'-phosphate
  modified_base 5: mod_base = OTHER; note = 2'-O-methylcytidine-3'-phosphate
  modified_base 6: mod_base = OTHER; note = 2'-deoxy-2'-fluorocytidine-3'-phosphate
  modified_base 7: mod_base = OTHER; note = 2'-O-methyluridine-3'-phosphate
  modified_base 8: mod_base = OTHER; note = 2'-O-methylguanosine-3'-phosphate
  modified_base 9: mod_base = OTHER; note = 2'-O-methyladenosine-3'-phosphate
  modified_base 10: mod_base = OTHER; note = 2'-O-methylguanosine-3'-phosphate
  modified_base 11: mod_base = OTHER; note = 2'-O-methylguanosine-3'-phosphate
  modified_base 12: mod_base = OTHER; note = 2'-O-methylguanosine-3'-phosphate
  modified_base 13: mod_base = OTHER; note = 2'-O-methylcytidine-3'-phosphate
  modified_base 14: mod_base = OTHER; note = 2'-deoxy-2'-fluoroadenosine-3'-phosphate
  modified_base 15: mod_base = OTHER; note = 2'-O-methylguanosine-3'-phosphate
  modified_base 16: mod_base = OTHER; note = 2'-deoxy-2'-fluoroguanosine-3'-phosphate
  modified_base 17: mod_base = OTHER; note = 2'-O-methyladenosine-3'-phosphate
  modified_base 18: mod_base = OTHER; note = 2'-O-methylcytidine-3'-phosphate
  modified_base 19: mod_base = OTHER; note = 2'-O-methylcytidine-3'-phosphate
  modified_base 20: mod_base = OTHER; note = 2'-O-methyluridine-3'-phosphate
  modified_base 21: mod_base = OTHER; note = 2'-O-methyladenosine-3'-phosphate
  modified_base 22: mod_base = OTHER; note = 2'-O-methyluridine-3'-phosphate
  modified_base 23: mod_base = OTHER; note = 2'-O-methylcytidine
tatccctgagggcaggacctatc

SEQ ID NO: 5411 - RNA, 23 nt, synthetic construct
  source 1..23: mol_type = other RNA
  modified_base 1: mod_base = OTHER; note = 2'-O-methyluridine-3'-phosphate 5'-(E)-Vinylphosphonate
  modified_base 2: mod_base = OTHER; note = 2'-deoxy-2'-fluoroadenosine-3'-phosphate
  modified_base 3: mod_base = OTHER; note = 2'-O-methyladenosine-3'-phosphate
  modified_base 4: mod_base = OTHER; note = 2'-O-methyluridine-3'-phosphate
  modified_base 5: mod_base = OTHER; note = 2'-O-methylcytidine-3'-phosphate
  modified_base 6: mod_base = OTHER; note = 2'-deoxy-2'-fluorocytidine-3'-phosphate
  modified_base 7: mod_base = OTHER; note = 2'-O-methylcytidine-3'-phosphate
  modified_base 8: mod_base = OTHER; note = 2'-O-methyluridine-3'-phosphate
  modified_base 9: mod_base = OTHER; note = 2'-O-methylguanosine-3'-phosphate
  modified_base 10: mod_base = OTHER; note = 2'-O-methyladenosine-3'-phosphate
  modified_base 11: mod_base = OTHER; note = 2'-O-methylguanosine-3'-phosphate
  modified_base 12: mod_base = OTHER; note = 2'-O-methylguanosine-3'-phosphate
  modified_base 13: mod_base = OTHER; note = 2'-O-methylguanosine-3'-phosphate
  modified_base 14: mod_base = OTHER; note = 2'-deoxy-2'-fluorocytidine-3'-phosphate
  modified_base 15: mod_base = OTHER; note = 2'-O-methyladenosine-3'-phosphate
  modified_base 16: mod_base = OTHER; note = 2'-deoxy-2'-fluoroguanosine-3'-phosphate
  modified_base 17: mod_base = OTHER; note = 2'-O-methylguanosine-3'-phosphate
  modified_base 18: mod_base = OTHER; note = 2'-O-methyladenosine-3'-phosphate
  modified_base 19: mod_base = OTHER; note = 2'-O-methylcytidine-3'-phosphate
  modified_base 20: mod_base = OTHER; note = 2'-O-methylcytidine-3'-phosphate
  modified_base 21: mod_base = OTHER; note = 2'-O-methyluridine-3'-phosphate
  modified_base 22: mod_base = OTHER; note = 2'-O-methyladenosine-3'-phosphate
  modified_base 23: mod_base = OTHER; note = 2'-O-methyluridine
taatccctgagggcaggacctat

SEQ ID NO: 5412 - RNA, 23 nt, synthetic construct
  source 1..23: mol_type = other RNA
  modified_base 1: mod_base = OTHER; note = 2'-O-methyluridine-3'-phosphate 5'-(E)-Vinylphosphonate
  modified_base 2: mod_base = OTHER; note = 2'-deoxy-2'-fluoroadenosine-3'-phosphate
  modified_base 3: mod_base = OTHER; note = 2'-O-methyladenosine-3'-phosphate
  modified_base 4: mod_base = OTHER; note = 2'-O-methyladenosine-3'-phosphate
  modified_base 5: mod_base = OTHER; note = 2'-O-methyluridine-3'-phosphate
  modified_base 6: mod_base = OTHER; note = 2'-deoxy-2'-fluorocytidine-3'-phosphate
  modified_base 7: mod_base = OTHER; note = 2'-O-methylcytidine-3'-phosphate
  modified_base 8: mod_base = OTHER; note = 2'-O-methylcytidine-3'-phosphate
  modified_base 9: mod_base = OTHER; note = 2'-O-methyluridine-3'-phosphate
  modified_base 10: mod_base = OTHER; note = 2'-O-methylguanosine-3'-phosphate
  modified_base 11: mod_base = OTHER; note = 2'-O-methyladenosine-3'-phosphate
  modified_base 12: mod_base = OTHER; note = 2'-O-methylguanosine-3'-phosphate
  modified_base 13: mod_base = OTHER; note = 2'-O-methylguanosine-3'-phosphate
  modified_base 14: mod_base = OTHER; note = 2'-deoxy-2'-fluoroguanosine-3'-phosphate
  modified_base 15: mod_base = OTHER; note = 2'-O-methylcytidine-3'-phosphate
  modified_base 16: mod_base = OTHER; note = 2'-deoxy-2'-fluoroadenosine-3'-phosphate
  modified_base 17: mod_base = OTHER; note = 2'-O-methylguanosine-3'-phosphate
  modified_base 18: mod_base = OTHER; note = 2'-O-methylguanosine-3'-phosphate
  modified_base 19: mod_base = OTHER; note = 2'-O-methyladenosine-3'-phosphate
  modified_base 20: mod_base = OTHER; note = 2'-O-methylcytidine-3'-phosphate
  modified_base 21: mod_base = OTHER; note = 2'-O-methylcytidine-3'-phosphate
  modified_base 22: mod_base = OTHER; note = 2'-O-methyluridine-3'-phosphate
  modified_base 23: mod_base = OTHER; note = 2'-O-methyladenosine
taaatccctgagggcaggaccta

SEQ ID NO: 5413 - RNA, 23 nt, synthetic construct
  source 1..23: mol_type = other RNA
  modified_base 1: mod_base = OTHER; note = 2'-O-methyluridine-3'-phosphate 5'-(E)-Vinylphosphonate
  modified_base 2: mod_base = OTHER; note = 2'-deoxy-2'-fluoroadenosine-3'-phosphate
  modified_base 3: mod_base = OTHER; note = 2'-O-methyladenosine-3'-phosphate
  modified_base 4: mod_base = OTHER; note = 2'-O-methyladenosine-3'-phosphate
  modified_base 5: mod_base = OTHER; note = 2'-O-methyladenosine-3'-phosphate
  modified_base 6: mod_base = OTHER; note = 2'-deoxy-2'-fluorouridine-3'-phosphate
  modified_base 7: mod_base = OTHER; note = 2'-O-methylcytidine-3'-phosphate
  modified_base 8: mod_base = OTHER; note = 2'-O-methylcytidine-3'-phosphate
  modified_base 9: mod_base = OTHER; note = 2'-O-methylcytidine-3'-phosphate
  modified_base 10: mod_base = OTHER; note = 2'-O-methyluridine-3'-phosphate
  modified_base 11: mod_base = OTHER; note = 2'-O-methylguanosine-3'-phosphate
  modified_base 12: mod_base = OTHER; note = 2'-O-methyladenosine-3'-phosphate
  modified_base 13: mod_base = OTHER; note = 2'-O-methylguanosine-3'-phosphate
  modified_base 14: mod_base = OTHER; note = 2'-deoxy-2'-fluoroguanosine-3'-phosphate
  modified_base 15: mod_base = OTHER; note = 2'-O-methylguanosine-3'-phosphate
  modified_base 16: mod_base = OTHER; note = 2'-deoxy-2'-fluorocytidine-3'-phosphate
  modified_base 17: mod_base = OTHER; note = 2'-O-methyladenosine-3'-phosphate
  modified_base 18: mod_base = OTHER; note = 2'-O-methylguanosine-3'-phosphate
  modified_base 19: mod_base = OTHER; note = 2'-O-methylguanosine-3'-phosphate
  modified_base 20: mod_base = OTHER; note = 2'-O-methyladenosine-3'-phosphate
  modified_base 21: mod_base = OTHER; note = 2'-O-methylcytidine-3'-phosphate
  modified_base 22: mod_base = OTHER; note = 2'-O-methylcytidine-3'-phosphate
  modified_base 23: mod_base = OTHER; note = 2'-O-methyluridine
taaaatccctgagggcaggacct

SEQ ID NO: 5414 - RNA, 23 nt, synthetic construct
  source 1..23: mol_type = other RNA
  modified_base 1: mod_base = OTHER; note = 2'-O-methyluridine-3'-phosphate 5'-(E)-Vinylphosphonate
  modified_base 2: mod_base = OTHER; note = 2'-deoxy-2'-fluorouridine-3'-phosphate
  modified_base 3: mod_base = OTHER; note = 2'-O-methyladenosine-3'-phosphate
  modified_base 4: mod_base = OTHER; note = 2'-O-methyladenosine-3'-phosphate
  modified_base 5: mod_base = OTHER; note = 2'-O-methyladenosine-3'-phosphate
  modified_base 6: mod_base = OTHER; note = 2'-deoxy-2'-fluoroadenosine-3'-phosphate
  modified_base 7: mod_base = OTHER; note = 2'-O-methyluridine-3'-phosphate
  modified_base 8: mod_base = OTHER; note = 2'-O-methylcytidine-3'-phosphate
  modified_base 9: mod_base = OTHER; note = 2'-O-methylcytidine-3'-phosphate
  modified_base 10: mod_base = OTHER; note = 2'-O-methylcytidine-3'-phosphate
  modified_base 11: mod_base = OTHER; note = 2'-O-methyluridine-3'-phosphate
  modified_base 12: mod_base = OTHER; note = 2'-O-methylguanosine-3'-phosphate
  modified_base 13: mod_base = OTHER; note = 2'-O-methyladenosine-3'-phosphate
  modified_base 14: mod_base = OTHER; note = 2'-deoxy-2'-fluoroguanosine-3'-phosphate
  modified_base 15: mod_base = OTHER; note = 2'-O-methylguanosine-3'-phosphate
  modified_base 16: mod_base = OTHER; note = 2'-deoxy-2'-fluoroguanosine-3'-phosphate
  modified_base 17: mod_base = OTHER; note = 2'-O-methylcytidine-3'-phosphate
  modified_base 18: mod_base = OTHER; note = 2'-O-methyladenosine-3'-phosphate
  modified_base 19: mod_base = OTHER; note = 2'-O-methylguanosine-3'-phosphate
  modified_base 20: mod_base = OTHER; note = 2'-O-methylguanosine-3'-phosphate
  modified_base 21: mod_base = OTHER; note = 2'-O-methyladenosine-3'-phosphate
  modified_base 22: mod_base = OTHER; note = 2'-O-methylcytidine-3'-phosphate
  modified_base 23: mod_base = OTHER; note = 2'-O-methylcytidine
ttaaaatccctgagggcaggacc

SEQ ID NO: 5415 - RNA, 23 nt, synthetic construct
  source 1..23: mol_type = other RNA
  modified_base 1: mod_base = OTHER; note = 2'-O-methyluridine-3'-phosphate 5'-(E)-Vinylphosphonate
  modified_base 2: mod_base = OTHER; note = 2'-deoxy-2'-fluorouridine-3'-phosphate
  modified_base 3: mod_base = OTHER; note = 2'-O-methyluridine-3'-phosphate
  modified_base 4: mod_base = OTHER; note = 2'-O-methyladenosine-3'-phosphate
  modified_base 5: mod_base = OTHER; note = 2'-O-methyladenosine-3'-phosphate
  modified_base 6: mod_base = OTHER; note = 2'-deoxy-2'-fluoroadenosine-3'-phosphate
  modified_base 7: mod_base = OTHER; note = 2'-O-methyladenosine-3'-phosphate
  modified_base 8: mod_base = OTHER; note = 2'-O-methyluridine-3'-phosphate
  modified_base 9: mod_base = OTHER; note = 2'-O-methylcytidine-3'-phosphate
  modified_base 10: mod_base = OTHER; note = 2'-O-methylcytidine-3'-phosphate
  modified_base 11: mod_base = OTHER; note = 2'-O-methylcytidine-3'-phosphate
  modified_base 12: mod_base = OTHER; note = 2'-O-methyluridine-3'-phosphate
  modified_base 13: mod_base = OTHER; note = 2'-O-methylguanosine-3'-phosphate
  modified_base 14: mod_base = OTHER; note = 2'-deoxy-2'-fluoroadenosine-3'-phosphate
  modified_base 15: mod_base = OTHER; note = 2'-O-methylguanosine-3'-phosphate
  modified_base 16: mod_base = OTHER; note = 2'-deoxy-2'-fluoroguanosine-3'-phosphate
  modified_base 17: mod_base = OTHER; note = 2'-O-methylguanosine-3'-phosphate
  modified_base 18: mod_base = OTHER; note = 2'-O-methylcytidine-3'-phosphate
  modified_base 19: mod_base = OTHER; note = 2'-O-methyladenosine-3'-phosphate
  modified_base 20: mod_base = OTHER; note = 2'-O-methylguanosine-3'-phosphate
  modified_base 21: mod_base = OTHER; note = 2'-O-methylguanosine-3'-phosphate
  modified_base 22: mod_base = OTHER; note = 2'-O-methyladenosine-3'-phosphate
  modified_base 23: mod_base = OTHER; note = 2'-O-methylcytidine
tttaaaatccctgagggcaggac

SEQ ID NO: 5416 - RNA, 23 nt, synthetic construct
  source 1..23: mol_type = other RNA
  modified_base 1: mod_base = OTHER; note = 2'-O-methyluridine-3'-phosphate 5'-(E)-Vinylphosphonate
  modified_base 2: mod_base = OTHER; note = 2'-deoxy-2'-fluorouridine-3'-phosphate
  modified_base 3: mod_base = OTHER; note = 2'-O-methyluridine-3'-phosphate
  modified_base 4: mod_base = OTHER; note = 2'-O-methyluridine-3'-phosphate
  modified_base 5: mod_base = OTHER; note = 2'-O-methyladenosine-3'-phosphate
  modified_base 6: mod_base = OTHER; note = 2'-deoxy-2'-fluoroadenosine-3'-phosphate
  modified_base 7: mod_base = OTHER; note = 2'-O-methyladenosine-3'-phosphate
  modified_base 8: mod_base = OTHER; note = 2'-O-methyladenosine-3'-phosphate
  modified_base 9: mod_base = OTHER; note = 2'-O-methyluridine-3'-phosphate
  modified_base 10: mod_base = OTHER; note = 2'-O-methylcytidine-3'-phosphate
  modified_base 11: mod_base = OTHER; note = 2'-O-methylcytidine-3'-phosphate
  modified_base 12: mod_base = OTHER; note = 2'-O-methylcytidine-3'-phosphate
  modified_base 13: mod_base = OTHER; note = 2'-O-methyluridine-3'-phosphate
  modified_base 14: mod_base = OTHER; note = 2'-deoxy-2'-fluoroguanosine-3'-phosphate
  modified_base 15: mod_base = OTHER; note = 2'-O-methyladenosine-3'-phosphate
  modified_base 16: mod_base = OTHER; note = 2'-deoxy-2'-fluoroguanosine-3'-phosphate
  modified_base 17: mod_base = OTHER; note = 2'-O-methylguanosine-3'-phosphate
  modified_base 18: mod_base = OTHER; note = 2'-O-methylguanosine-3'-phosphate
  modified_base 19: mod_base = OTHER; note = 2'-O-methylcytidine-3'-phosphate
  modified_base 20: mod_base = OTHER; note = 2'-O-methyladenosine-3'-phosphate
  modified_base 21: mod_base = OTHER; note = 2'-O-methylguanosine-3'-phosphate
  modified_base 22: mod_base = OTHER; note = 2'-O-methylguanosine-3'-phosphate
  modified_base 23: mod_base = OTHER; note = 2'-O-methyladenosine
ttttaaaatccctgagggcagga

SEQ ID NO: 5417 - RNA, 23 nt, synthetic construct
  source 1..23: mol_type = other RNA
  modified_base 1: mod_base = OTHER; note = 2'-O-methyluridine-3'-phosphate 5'-(E)-Vinylphosphonate
  modified_base 2: mod_base = OTHER; note = 2'-deoxy-2'-fluorocytidine-3'-phosphate
  modified_base 3: mod_base = OTHER; note = 2'-O-methyluridine-3'-phosphate
  modified_base 4: mod_base = OTHER; note = 2'-O-methyluridine-3'-phosphate
  modified_base 5: mod_base = OTHER; note = 2'-O-methyluridine-3'-phosphate
  modified_base 6: mod_base = OTHER; note = 2'-deoxy-2'-fluoroadenosine-3'-phosphate
  modified_base 7: mod_base = OTHER; note = 2'-O-methyladenosine-3'-phosphate
  modified_base 8: mod_base = OTHER; note = 2'-O-methyladenosine-3'-phosphate
  modified_base 9: mod_base = OTHER; note = 2'-O-methyladenosine-3'-phosphate
  modified_base 10: mod_base = OTHER; note = 2'-O-methyluridine-3'-phosphate
  modified_base 11: mod_base = OTHER; note = 2'-O-methylcytidine-3'-phosphate
  modified_base 12: mod_base = OTHER; note = 2'-O-methylcytidine-3'-phosphate
  modified_base 13: mod_base = OTHER; note = 2'-O-methylcytidine-3'-phosphate
  modified_base 14: mod_base = OTHER; note = 2'-deoxy-2'-fluorouridine-3'-phosphate
  modified_base 15: mod_base = OTHER; note = 2'-O-methylguanosine-3'-phosphate
  modified_base 16: mod_base = OTHER; note = 2'-deoxy-2'-fluoroadenosine-3'-phosphate
  modified_base 17: mod_base = OTHER; note = 2'-O-methylguanosine-3'-phosphate
  modified_base 18: mod_base = OTHER; note = 2'-O-methylguanosine-3'-phosphate
  modified_base 19: mod_base = OTHER; note = 2'-O-methylguanosine-3'-phosphate
  modified_base 20: mod_base = OTHER; note = 2'-O-methylcytidine-3'-phosphate
  modified_base 21: mod_base = OTHER; note = 2'-O-methyladenosine-3'-phosphate
  modified_base 22: mod_base = OTHER; note = 2'-O-methylguanosine-3'-phosphate
  modified_base 23: mod_base = OTHER; note = 2'-O-methylguanosine
tctttaaaatccctgagggcagg

SEQ ID NO: 5418 - RNA, 23 nt, synthetic construct
  source 1..23: mol_type = other RNA
  modified_base 1: mod_base = OTHER; note = 2'-O-methyluridine-3'-phosphate 5'-(E)-Vinylphosphonate
  modified_base 2: mod_base = OTHER; note = 2'-deoxy-2'-fluoroadenosine-3'-phosphate
  modified_base 3: mod_base = OTHER; note = 2'-O-methylcytidine-3'-phosphate
  modified_base 4: mod_base = OTHER; note = 2'-O-methyluridine-3'-phosphate
  modified_base 5: mod_base = OTHER; note = 2'-O-methyluridine-3'-phosphate
  modified_base 6: mod_base = OTHER; note = 2'-deoxy-2'-fluorouridine-3'-phosphate
  modified_base 7: mod_base = OTHER; note = 2'-O-methyladenosine-3'-phosphate
  modified_base 8: mod_base = OTHER; note = 2'-O-methyladenosine-3'-phosphate
  modified_base 9: mod_base = OTHER; note = 2'-O-methyladenosine-3'-phosphate
  modified_base 10: mod_base = OTHER; note = 2'-O-methyladenosine-3'-phosphate
  modified_base 11: mod_base = OTHER; note = 2'-O-methyluridine-3'-phosphate
  modified_base 12: mod_base = OTHER; note = 2'-O-methylcytidine-3'-phosphate
  modified_base 13: mod_base = OTHER; note = 2'-O-methylcytidine-3'-phosphate
  modified_base 14: mod_base = OTHER; note = 2'-deoxy-2'-fluorocytidine-3'-phosphate
  modified_base 15: mod_base = OTHER; note = 2'-O-methyluridine-3'-phosphate
  modified_base 16: mod_base = OTHER; note = 2'-deoxy-2'-fluoroguanosine-3'-phosphate
  modified_base 17: mod_base = OTHER; note = 2'-O-methyladenosine-3'-phosphate
  modified_base 18: mod_base = OTHER; note = 2'-O-methylguanosine-3'-phosphate
  modified_base 19: mod_base = OTHER; note = 2'-O-methylguanosine-3'-phosphate
  modified_base 20: mod_base = OTHER; note = 2'-O-methylguanosine-3'-phosphate
  modified_base 21: mod_base = OTHER; note = 2'-O-methylcytidine-3'-phosphate
  modified_base 22: mod_base = OTHER; note = 2'-O-methyladenosine-3'-phosphate
  modified_base 23: mod_base = OTHER; note = 2'-O-methylguanosine
tactttaaaatccctgagggcag

SEQ ID NO: 5419 - RNA, 23 nt, synthetic construct
  source 1..23: mol_type = other RNA
  modified_base 1: mod_base = OTHER; note = 2'-O-methyluridine-3'-phosphate 5'-(E)-Vinylphosphonate
  modified_base 2: mod_base = OTHER; note = 2'-deoxy-2'-fluoroguanosine-3'-phosphate
  modified_base 3: mod_base = OTHER; note = 2'-O-methyladenosine-3'-phosphate
  modified_base 4: mod_base = OTHER; note = 2'-O-methylcytidine-3'-phosphate
  modified_base 5: mod_base = OTHER; note = 2'-O-methyluridine-3'-phosphate
  modified_base 6: mod_base = OTHER; note = 2'-deoxy-2'-fluorouridine-3'-phosphate
  modified_base 7: mod_base = OTHER; note = 2'-O-methyluridine-3'-phosphate
  modified_base 8: mod_base = OTHER; note = 2'-O-methyladenosine-3'-phosphate
  modified_base 9: mod_base = OTHER; note = 2'-O-methyladenosine-3'-phosphate
  modified_base 10: mod_base = OTHER; note = 2'-O-methyladenosine-3'-phosphate
  modified_base 11: mod_base = OTHER; note = 2'-O-methyladenosine-3'-phosphate
  modified_base 12: mod_base = OTHER; note = 2'-O-methyluridine-3'-phosphate
  modified_base 13: mod_base = OTHER; note = 2'-O-methylcytidine-3'-phosphate
  modified_base 14: mod_base = OTHER; note = 2'-deoxy-2'-fluorocytidine-3'-phosphate
  modified_base 15: mod_base = OTHER; note = 2'-O-methylcytidine-3'-phosphate
  modified_base 16: mod_base = OTHER; note = 2'-deoxy-2'-fluorouridine-3'-phosphate
  modified_base 17: mod_base = OTHER; note = 2'-O-methylguanosine-3'-phosphate
  modified_base 18: mod_base = OTHER; note = 2'-O-methyladenosine-3'-phosphate
  modified_base 19: mod_base = OTHER; note = 2'-O-methylguanosine-3'-phosphate
  modified_base 20: mod_base = OTHER; note = 2'-O-methylguanosine-3'-phosphate
  modified_base 21: mod_base = OTHER; note = 2'-O-methylguanosine-3'-phosphate
  modified_base 22: mod_base = OTHER; note = 2'-O-methylcytidine-3'-phosphate
  modified_base 23: mod_base = OTHER; note = 2'-O-methyladenosine
tgactttaaaatccctgagggca

SEQ ID NO: 5420 - RNA, 23 nt, synthetic construct
  source 1..23: mol_type = other RNA
  modified_base 1: mod_base = OTHER; note = 2'-O-methyluridine-3'-phosphate 5'-(E)-Vinylphosphonate
  modified_base 2: mod_base = OTHER; note = 2'-deoxy-2'-fluoroadenosine-3'-phosphate
  modified_base 3: mod_base = OTHER; note = 2'-O-methyladenosine-3'-phosphate
  modified_base 4: mod_base = OTHER; note = 2'-O-methyluridine-3'-phosphate
  modified_base 5: mod_base = OTHER; note = 2'-O-methyluridine-3'-phosphate
  modified_base 6: mod_base = OTHER; note = 2'-deoxy-2'-fluoroadenosine-3'-phosphate
  modified_base 7: mod_base = OTHER; note = 2'-O-methylguanosine-3'-phosphate
  modified_base 8: mod_base = OTHER; note = 2'-O-methyladenosine-3'-phosphate
  modified_base 9: mod_base = OTHER; note = 2'-O-methylcytidine-3'-phosphate
  modified_base 10: mod_base = OTHER; note = 2'-O-methyluridine-3'-phosphate
  modified_base 11: mod_base = OTHER; note = 2'-O-methyluridine-3'-phosphate
  modified_base 12: mod_base = OTHER; note = 2'-O-methyluridine-3'-phosphate
  modified_base 13: mod_base = OTHER; note = 2'-O-methyladenosine-3'-phosphate
  modified_base 14: mod_base = OTHER; note = 2'-deoxy-2'-fluoroadenosine-3'-phosphate
  modified_base 15: mod_base = OTHER; note = 2'-O-methyladenosine-3'-phosphate
  modified_base 16: mod_base = OTHER; note = 2'-deoxy-2'-fluoroadenosine-3'-phosphate
  modified_base 17: mod_base = OTHER; note = 2'-O-methyluridine-3'-phosphate
  modified_base 18: mod_base = OTHER; note = 2'-O-methylcytidine-3'-phosphate
  modified_base 19: mod_base = OTHER; note = 2'-O-methylcytidine-3'-phosphate
  modified_base 20: mod_base = OTHER; note = 2'-O-methylcytidine-3'-phosphate
  modified_base 21: mod_base = OTHER; note = 2'-O-methyluridine-3'-phosphate
  modified_base 22: mod_base = OTHER; note = 2'-O-methylguanosine-3'-phosphate
  modified_base 23: mod_base = OTHER; note = 2'-O-methyladenosine
taattagactttaaaatccctga

SEQ ID NO: 5421 - RNA, 23 nt, synthetic construct
  source 1..23: mol_type = other RNA
  modified_base 1: mod_base = OTHER; note = 2'-O-methyluridine-3'-phosphate 5'-(E)-Vinylphosphonate
  modified_base 2: mod_base = OTHER; note = 2'-deoxy-2'-fluoroadenosine-3'-phosphate
  modified_base 3: mod_base = OTHER; note = 2'-O-methyladenosine-3'-phosphate
  modified_base 4: mod_base = OTHER; note = 2'-O-methyladenosine-3'-phosphate
  modified_base 5: mod_base = OTHER; note = 2'-O-methyluridine-3'-phosphate
  modified_base 6: mod_base = OTHER; note = 2'-deoxy-2'-fluorouridine-3'-phosphate
  modified_base 7: mod_base = OTHER; note = 2'-O-methyladenosine-3'-phosphate
  modified_base 8: mod_base = OTHER; note = 2'-O-methylguanosine-3'-phosphate
  modified_base 9: mod_base = OTHER; note = 2'-O-methyladenosine-3'-phosphate
  modified_base 10: mod_base = OTHER; note = 2'-O-methylcytidine-3'-phosphate
  modified_base 11: mod_base = OTHER; note = 2'-O-methyluridine-3'-phosphate
  modified_base 12: mod_base = OTHER; note = 2'-O-methyluridine-3'-phosphate
  modified_base 13: mod_base = OTHER; note = 2'-O-methyluridine-3'-phosphate
  modified_base 14: mod_base = OTHER; note = 2'-deoxy-2'-fluoroadenosine-3'-phosphate
  modified_base 15: mod_base = OTHER; note = 2'-O-methyladenosine-3'-phosphate
  modified_base 16: mod_base = OTHER; note = 2'-deoxy-2'-fluoroadenosine-3'-phosphate
  modified_base 17: mod_base = OTHER; note = 2'-O-methyladenosine-3'-phosphate
  modified_base 18: mod_base = OTHER; note = 2'-O-methyluridine-3'-phosphate
  modified_base 19: mod_base = OTHER; note = 2'-O-methylcytidine-3'-phosphate
  modified_base 20: mod_base = OTHER; note = 2'-O-methylcytidine-3'-phosphate
  modified_base 21: mod_base = OTHER; note = 2'-O-methylcytidine-3'-phosphate
  modified_base 22: mod_base = OTHER; note = 2'-O-methyluridine-3'-phosphate
  modified_base 23: mod_base = OTHER; note = 2'-O-methylguanosine
taaattagactttaaaatccctg

SEQ ID NO: 5422 - RNA, 23 nt, synthetic construct
  source 1..23: mol_type = other RNA
  modified_base 1: mod_base = OTHER; note = 2'-O-methyluridine-3'-phosphate 5'-(E)-Vinylphosphonate
  modified_base 2: mod_base = OTHER; note = 2'-deoxy-2'-fluorouridine-3'-phosphate
  modified_base 3: mod_base = OTHER; note = 2'-O-methylcytidine-3'-phosphate
  modified_base 4: mod_base = OTHER; note = 2'-O-methyluridine-3'-phosphate
  modified_base 5: mod_base = OTHER; note = 2'-O-methylguanosine-3'-phosphate
  modified_base 6: mod_base = OTHER; note = 2'-deoxy-2'-fluorouridine-3'-phosphate
  modified_base 7: mod_base = OTHER; note = 2'-O-methylcytidine-3'-phosphate
  modified_base 8: mod_base = OTHER; note = 2'-O-methyladenosine-3'-phosphate
  modified_base 9: mod_base = OTHER; note = 2'-O-methyladenosine-3'-phosphate
  modified_base 10: mod_base = OTHER; note = 2'-O-methyluridine-3'-phosphate
  modified_base 11: mod_base = OTHER; note = 2'-O-methyluridine-3'-phosphate
  modified_base 12: mod_base = OTHER; note = 2'-O-methyluridine-3'-phosphate
  modified_base 13: mod_base = OTHER; note = 2'-O-methyladenosine-3'-phosphate
  modified_base 14: mod_base = OTHER; note = 2'-deoxy-2'-fluoroadenosine-3'-phosphate
  modified_base 15: mod_base = OTHER; note = 2'-O-methyluridine-3'-phosphate
  modified_base 16: mod_base = OTHER; note = 2'-deoxy-2'-fluorocytidine-3'-phosphate
  modified_base 17: mod_base = OTHER; note = 2'-O-methyluridine-3'-phosphate
  modified_base 18: mod_base = OTHER; note = 2'-O-methylcytidine-3'-phosphate
  modified_base 19: mod_base = OTHER; note = 2'-O-methyluridine-3'-phosphate
  modified_base 20: mod_base = OTHER; note = 2'-O-methyluridine-3'-phosphate
  modified_base 21: mod_base = OTHER; note = 2'-O-methylcytidine-3'-phosphate
  modified_base 22: mod_base = OTHER; note = 2'-O-methylcytidine-3'-phosphate
  modified_base 23: mod_base = OTHER; note = 2'-O-methylcytidine
ttctgtcaatttaatctcttccc

SEQ ID NO: 5423 - RNA, 23 nt, synthetic construct
  source 1..23: mol_type = other RNA
  modified_base 1: mod_base = OTHER; note = 2'-O-methyluridine-3'-phosphate 5'-(E)-Vinylphosphonate
  modified_base 2: mod_base = OTHER; note = 2'-deoxy-2'-fluoroadenosine-3'-phosphate
  modified_base 3: mod_base = OTHER; note = 2'-O-methyluridine-3'-phosphate
  modified_base 4: mod_base = OTHER; note = 2'-O-methylcytidine-3'-phosphate
  modified_base 5: mod_base = OTHER; note = 2'-O-methyluridine-3'-phosphate
  modified_base 6: mod_base = OTHER; note = 2'-deoxy-2'-fluoroguanosine-3'-phosphate
  modified_base 7: mod_base = OTHER; note = 2'-O-methyluridine-3'-phosphate
  modified_base 8: mod_base = OTHER; note = 2'-O-methylcytidine-3'-phosphate
  modified_base 9: mod_base = OTHER; note = 2'-O-methyladenosine-3'-phosphate
  modified_base 10: mod_base = OTHER; note = 2'-O-methyladenosine-3'-phosphate
  modified_base 11: mod_base = OTHER; note = 2'-O-methyluridine-3'-phosphate
  modified_base 12: mod_base = OTHER; note = 2'-O-methyluridine-3'-phosphate
  modified_base 13: mod_base = OTHER; note = 2'-O-methyluridine-3'-phosphate
  modified_base 14: mod_base = OTHER; note = 2'-deoxy-2'-fluoroadenosine-3'-phosphate
  modified_base 15: mod_base = OTHER; note = 2'-O-methyladenosine-3'-phosphate
  modified_base 16: mod_base = OTHER; note = 2'-deoxy-2'-fluorouridine-3'-phosphate
  modified_base 17: mod_base = OTHER; note = 2'-O-methylcytidine-3'-phosphate
  modified_base 18: mod_base = OTHER; note = 2'-O-methyluridine-3'-phosphate
  modified_base 19: mod_base = OTHER; note = 2'-O-methylcytidine-3'-phosphate
  modified_base 20: mod_base = OTHER; note = 2'-O-methyluridine-3'-phosphate
  modified_base 21: mod_base = OTHER; note = 2'-O-methyluridine-3'-phosphate
  modified_base 22: mod_base = OTHER; note = 2'-O-methylcytidine-3'-phosphate
  modified_base 23: mod_base = OTHER; note = 2'-O-methylcytidine
tatctgtcaatttaatctcttcc

SEQ ID NO: 5424 - RNA, 23 nt, synthetic construct
  source 1..23: mol_type = other RNA
  modified_base 1: mod_base = OTHER; note = 2'-O-methyluridine-3'-phosphate 5'-(E)-Vinylphosphonate
  modified_base 2: mod_base = OTHER; note = 2'-deoxy-2'-fluorouridine-3'-phosphate
  modified_base 3: mod_base = OTHER; note = 2'-O-methyladenosine-3'-phosphate
  modified_base 4: mod_base = OTHER; note = 2'-O-methyluridine-3'-phosphate
  modified_base 5: mod_base = OTHER; note = 2'-O-methylcytidine-3'-phosphate
  modified_base 6: mod_base = OTHER; note = 2'-deoxy-2'-fluorouridine-3'-phosphate
  modified_base 7: mod_base = OTHER; note = 2'-O-methylguanosine-3'-phosphate
  modified_base 8: mod_base = OTHER; note = 2'-O-methyluridine-3'-phosphate
  modified_base 9: mod_base = OTHER; note = 2'-O-methylcytidine-3'-phosphate
  modified_base 10: mod_base = OTHER; note = 2'-O-methyladenosine-3'-phosphate
  modified_base 11: mod_base = OTHER; note = 2'-O-methyladenosine-3'-phosphate
  modified_base 12: mod_base = OTHER; note = 2'-O-methyluridine-3'-phosphate
  modified_base 13: mod_base = OTHER; note = 2'-O-methyluridine-3'-phosphate
  modified_base 14: mod_base = OTHER; note = 2'-deoxy-2'-fluorouridine-3'-phosphate
  modified_base 15: mod_base = OTHER; note = 2'-O-methyladenosine-3'-phosphate
  modified_base 16: mod_base = OTHER; note = 2'-deoxy-2'-fluoroadenosine-3'-phosphate
  modified_base 17: mod_base = OTHER; note = 2'-O-methyluridine-3'-phosphate
  modified_base 18: mod_base = OTHER; note = 2'-O-methylcytidine-3'-phosphate
  modified_base 19: mod_base = OTHER; note = 2'-O-methyluridine-3'-phosphate
  modified_base 20: mod_base = OTHER; note = 2'-O-methylcytidine-3'-phosphate
  modified_base 21: mod_base = OTHER; note = 2'-O-methyluridine-3'-phosphate
  modified_base 22: mod_base = OTHER; note = 2'-O-methyluridine-3'-phosphate
  modified_base 23: mod_base = OTHER; note = 2'-O-methylcytidine
ttatctgtcaatttaatctcttc

SEQ ID NO: 5425 - RNA, 23 nt, synthetic construct
  source 1..23: mol_type = other RNA
  modified_base 1: mod_base = OTHER; note = 2'-O-methyluridine-3'-phosphate 5'-(E)-Vinylphosphonate
  modified_base 2: mod_base = OTHER; note = 2'-deoxy-2'-fluorocytidine-3'-phosphate
  modified_base 3: mod_base = OTHER; note = 2'-O-methyluridine-3'-phosphate
  modified_base 4: mod_base = OTHER; note = 2'-O-methyluridine-3'-phosphate
  modified_base 5: mod_base = OTHER; note = 2'-O-methylcytidine-3'-phosphate
  modified_base 6: mod_base = OTHER; note = 2'-deoxy-2'-fluoroguanosine-3'-phosphate
  modified_base 7: mod_base = OTHER; note = 2'-O-methyluridine-3'-phosphate
  modified_base 8: mod_base = OTHER; note = 2'-O-methyladenosine-3'-phosphate
  modified_base 9: mod_base = OTHER; note = 2'-O-methyluridine-3'-phosphate
  modified_base 10: mod_base = OTHER; note = 2'-O-methyluridine-3'-phosphate
  modified_base 11: mod_base = OTHER; note = 2'-O-methyluridine-3'-phosphate
  modified_base 12: mod_base = OTHER; note = 2'-O-methyluridine-3'-phosphate
  modified_base 13: mod_base = OTHER; note = 2'-O-methyladenosine-3'-phosphate
  modified_base 14: mod_base = OTHER; note = 2'-deoxy-2'-fluorouridine-3'-phosphate
  modified_base 15: mod_base = OTHER; note = 2'-O-methylcytidine-3'-phosphate
  modified_base 16: mod_base = OTHER; note = 2'-deoxy-2'-fluorouridine-3'-phosphate
  modified_base 17: mod_base = OTHER; note = 2'-O-methylguanosine-3'-phosphate
  modified_base 18: mod_base = OTHER; note = 2'-O-methyluridine-3'-phosphate
  modified_base 19: mod_base = OTHER; note = 2'-O-methylcytidine-3'-phosphate
  modified_base 20: mod_base = OTHER; note = 2'-O-methyladenosine-3'-phosphate
  modified_base 21: mod_base = OTHER; note = 2'-O-methyladenosine-3'-phosphate
  modified_base 22: mod_base = OTHER; note = 2'-O-methyluridine-3'-phosphate
  modified_base 23: mod_base = OTHER; note = 2'-O-methyluridine
tcttcgtattttatctgtcaatt

SEQ ID NO: 5426 - RNA, 23 nt, synthetic construct
  source 1..23: mol_type = other RNA
  modified_base 1: mod_base = OTHER; note = 2'-O-methyluridine-3'-phosphate 5'-(E)-Vinylphosphonate
  modified_base 2: mod_base = OTHER; note = 2'-deoxy-2'-fluoroadenosine-3'-phosphate
  modified_base 3: mod_base = OTHER; note = 2'-O-methylcytidine-3'-phosphate
  modified_base 4: mod_base = OTHER; note = 2'-O-methyluridine-3'-phosphate
  modified_base 5: mod_base = OTHER; note = 2'-O-methyluridine-3'-phosphate
  modified_base 6: mod_base = OTHER; note = 2'-deoxy-2'-fluorocytidine-3'-phosphate
  modified_base 7: mod_base = OTHER; note = 2'-O-methylguanosine-3'-phosphate
  modified_base 8: mod_base = OTHER; note = 2'-O-methyluridine-3'-phosphate
  modified_base 9: mod_base = OTHER; note = 2'-O-methyladenosine-3'-phosphate
  modified_base 10: mod_base = OTHER; note = 2'-O-methyluridine-3'-phosphate
  modified_base 11: mod_base = OTHER; note = 2'-O-methyluridine-3'-phosphate
  modified_base 12: mod_base = OTHER; note = 2'-O-methyluridine-3'-phosphate
  modified_base 13: mod_base = OTHER; note = 2'-O-methyluridine-3'-phosphate
  modified_base 14: mod_base = OTHER; note = 2'-deoxy-2'-fluoroadenosine-3'-phosphate
  modified_base 15: mod_base = OTHER; note = 2'-O-methyluridine-3'-phosphate
  modified_base 16: mod_base = OTHER; note = 2'-deoxy-2'-fluorocytidine-3'-phosphate
  modified_base 17: mod_base = OTHER; note = 2'-O-methyluridine-3'-phosphate
  modified_base 18: mod_base = OTHER; note = 2'-O-methylguanosine-3'-phosphate
  modified_base 19: mod_base = OTHER; note = 2'-O-methyluridine-3'-phosphate
  modified_base 20: mod_base = OTHER; note = 2'-O-methylcytidine-3'-phosphate
  modified_base 21: mod_base = OTHER; note = 2'-O-methyladenosine-3'-phosphate
  modified_base 22: mod_base = OTHER; note = 2'-O-methyladenosine-3'-phosphate
  modified_base 23: mod_base = OTHER; note = 2'-O-methyluridine
tacttcgtattttatctgtcaat

SEQ ID NO: 5427 - RNA, 23 nt, synthetic construct
  source 1..23: mol_type = other RNA
  modified_base 1: mod_base = OTHER; note = 2'-O-methyluridine-3'-phosphate 5'-(E)-Vinylphosphonate
  modified_base 2: mod_base = OTHER; note = 2'-deoxy-2'-fluorocytidine-3'-phosphate
  modified_base 3: mod_base = OTHER; note = 2'-O-methyladenosine-3'-phosphate
  modified_base 4: mod_base = OTHER; note = 2'-O-methylcytidine-3'-phosphate
  modified_base 5: mod_base = OTHER; note = 2'-O-methyluridine-3'-phosphate
  modified_base 6: mod_base = OTHER; note = 2'-deoxy-2'-fluorouridine-3'-phosphate
  modified_base 7: mod_base = OTHER; note = 2'-O-methylcytidine-3'-phosphate
  modified_base 8: mod_base = OTHER; note = 2'-O-methylguanosine-3'-phosphate
  modified_base 9: mod_base = OTHER; note = 2'-O-methyluridine-3'-phosphate
  modified_base 10: mod_base = OTHER; note = 2'-O-methyladenosine-3'-phosphate
  modified_base 11: mod_base = OTHER; note = 2'-O-methyluridine-3'-phosphate
  modified_base 12: mod_base = OTHER; note = 2'-O-methyluridine-3'-phosphate
  modified_base 13: mod_base = OTHER; note = 2'-O-methyluridine-3'-phosphate
  modified_base 14: mod_base = OTHER; note = 2'-deoxy-2'-fluorouridine-3'-phosphate
  modified_base 15: mod_base = OTHER; note = 2'-O-methyladenosine-3'-phosphate
  modified_base 16: mod_base = OTHER; note = 2'-deoxy-2'-fluorouridine-3'-phosphate
  modified_base 17: mod_base = OTHER; note = 2'-O-methylcytidine-3'-phosphate
  modified_base 18: mod_base = OTHER; note = 2'-O-methyluridine-3'-phosphate
  modified_base 19: mod_base = OTHER; note = 2'-O-methylguanosine-3'-phosphate
  modified_base 20: mod_base = OTHER; note = 2'-O-methyluridine-3'-phosphate
  modified_base 21: mod_base = OTHER; note = 2'-O-methylcytidine-3'-phosphate
  modified_base 22: mod_base = OTHER; note = 2'-O-methyladenosine-3'-phosphate
  modified_base 23: mod_base = OTHER; note = 2'-O-methyladenosine
tcacttcgtattttatctgtcaa

SEQ ID NO: 5428 - RNA, 23 nt, synthetic construct
  source 1..23: mol_type = other RNA
  modified_base 1: mod_base = OTHER; note = 2'-O-methyluridine-3'-phosphate 5'-(E)-Vinylphosphonate
  modified_base 2: mod_base = OTHER; note = 2'-deoxy-2'-fluorocytidine-3'-phosphate
  modified_base 3: mod_base = OTHER; note = 2'-O-methylcytidine-3'-phosphate
  modified_base 4: mod_base = OTHER; note = 2'-O-methyladenosine-3'-phosphate
  modified_base 5: mod_base = OTHER; note = 2'-O-methylcytidine-3'-phosphate
  modified_base 6: mod_base = OTHER; note = 2'-deoxy-2'-fluorouridine-3'-phosphate
  modified_base 7: mod_base = OTHER; note = 2'-O-methyluridine-3'-phosphate
  modified_base 8: mod_base = OTHER; note = 2'-O-methylcytidine-3'-phosphate
  modified_base 9: mod_base = OTHER; note = 2'-O-methylguanosine-3'-phosphate
  modified_base 10: mod_base = OTHER; note = 2'-O-methyluridine-3'-phosphate
  modified_base 11: mod_base = OTHER; note = 2'-O-methyladenosine-3'-phosphate
  modified_base 12: mod_base = OTHER; note = 2'-O-methyluridine-3'-phosphate
  modified_base 13: mod_base = OTHER; note = 2'-O-methyluridine-3'-phosphate
  modified_base 14: mod_base = OTHER; note = 2'-deoxy-2'-fluorouridine-3'-phosphate
  modified_base 15: mod_base = OTHER; note = 2'-O-methyluridine-3'-phosphate
  modified_base 16: mod_base = OTHER; note = 2'-deoxy-2'-fluoroadenosine-3'-phosphate
  modified_base 17: mod_base = OTHER; note = 2'-O-methyluridine-3'-phosphate
  modified_base 18: mod_base = OTHER; note = 2'-O-methylcytidine-3'-phosphate
  modified_base 19: mod_base = OTHER; note = 2'-O-methyluridine-3'-phosphate
  modified_base 20: mod_base = OTHER; note = 2'-O-methylguanosine-3'-phosphate
  modified_base 21: mod_base = OTHER; note = 2'-O-methyluridine-3'-phosphate
  modified_base 22: mod_base = OTHER; note = 2'-O-methylcytidine-3'-phosphate
  modified_base 23: mod_base = OTHER; note = 2'-O-methyladenosine
tccacttcgtattttatctgtca

SEQ ID NO: 5429 - RNA, 23 nt, synthetic construct
  source 1..23: mol_type = other RNA
  modified_base 1: mod_base = OTHER; note = 2'-O-methyluridine-3'-phosphate 5'-(E)-Vinylphosphonate
  modified_base 2: mod_base = OTHER; note = 2'-deoxy-2'-fluoroadenosine-3'-phosphate
  modified_base 3: mod_base = OTHER; note = 2'-O-methyladenosine-3'-phosphate
  modified_base 4: mod_base = OTHER; note = 2'-O-methylcytidine-3'-phosphate
  modified_base 5: mod_base = OTHER; note = 2'-O-methyluridine-3'-phosphate
  modified_base 6: mod_base = OTHER; note = 2'-deoxy-2'-fluorocytidine-3'-phosphate
  modified_base 7: mod_base = OTHER; note = 2'-O-methyladenosine-3'-phosphate
  modified_base 8: mod_base = OTHER; note = 2'-O-methyladenosine-3'-phosphate
  modified_base 9: mod_base = OTHER; note = 2'-O-methylguanosine-3'-phosphate
  modified_base 10: mod_base = OTHER; note = 2'-O-methyladenosine-3'-phosphate
  modified_base 11: mod_base = OTHER; note = 2'-O-methylcytidine-3'-phosphate
  modified_base 12: mod_base = OTHER; note = 2'-O-methyladenosine-3'-phosphate
  modified_base 13: mod_base = OTHER; note = 2'-O-methyluridine-3'-phosphate
  modified_base 14: mod_base = OTHER; note = 2'-deoxy-2'-fluorocytidine-3'-phosphate
  modified_base 15: mod_base = OTHER; note = 2'-O-methylcytidine-3'-phosphate
  modified_base 16: mod_base = OTHER; note = 2'-deoxy-2'-fluorocytidine-3'-phosphate
  modified_base 17: mod_base = OTHER; note = 2'-O-methyladenosine-3'-phosphate
  modified_base 18: mod_base = OTHER; note = 2'-O-methylcytidine-3'-phosphate
  modified_base 19: mod_base = OTHER; note = 2'-O-methyluridine-3'-phosphate
  modified_base 20: mod_base = OTHER; note = 2'-O-methyluridine-3'-phosphate
  modified_base 21: mod_base = OTHER; note = 2'-O-methylcytidine-3'-phosphate
  modified_base 22: mod_base = OTHER; note = 2'-O-methylguanosine-3'-phosphate
  modified_base 23: mod_base = OTHER; note = 2'-O-methyluridine
taactcaagacatcccacttcgt

SEQ ID NO: 5430 - RNA, 23 nt, synthetic construct
  source 1..23: mol_type = other RNA
  modified_base 1: mod_base = OTHER; note = 2'-O-methyluridine-3'-phosphate 5'-(E)-Vinylphosphonate
  modified_base 2: mod_base = OTHER; note = 2'-deoxy-2'-fluoroadenosine-3'-phosphate
  modified_base 3: mod_base = OTHER; note = 2'-O-methylguanosine-3'-phosphate
  modified_base 4: mod_base = OTHER; note = 2'-O-methyladenosine-3'-phosphate
  modified_base 5: mod_base = OTHER; note = 2'-O-methyladenosine-3'-phosphate
  modified_base 6: mod_base = OTHER; note = 2'-deoxy-2'-fluorocytidine-3'-phosphate
  modified_base 7: mod_base = OTHER; note = 2'-O-methyluridine-3'-phosphate
  modified_base 8: mod_base = OTHER; note = 2'-O-methylcytidine-3'-phosphate
  modified_base 9: mod_base = OTHER; note = 2'-O-methyladenosine-3'-phosphate
  modified_base 10: mod_base = OTHER; note = 2'-O-methyladenosine-3'-phosphate
  modified_base 11: mod_base = OTHER; note = 2'-O-methylguanosine-3'-phosphate
  modified_base 12: mod_base = OTHER; note = 2'-O-methyladenosine-3'-phosphate
  modified_base 13: mod_base = OTHER; note = 2'-O-methylcytidine-3'-phosphate
  modified_base 14: mod_base = OTHER; note = 2'-deoxy-2'-fluoroadenosine-3'-phosphate
  modified_base 15: mod_base = OTHER; note = 2'-O-methyluridine-3'-phosphate
  modified_base 16: mod_base = OTHER; note = 2'-deoxy-2'-fluorocytidine-3'-phosphate
  modified_base 17: mod_base = OTHER; note = 2'-O-methylcytidine-3'-phosphate
  modified_base 18: mod_base = OTHER; note = 2'-O-methylcytidine-3'-phosphate
  modified_base 19: mod_base = OTHER; note = 2'-O-methyladenosine-3'-phosphate
  modified_base 20: mod_base = OTHER; note = 2'-O-methylcytidine-3'-phosphate
  modified_base 21: mod_base = OTHER; note = 2'-O-methyluridine-3'-phosphate
  modified_base 22: mod_base = OTHER; note = 2'-O-methyluridine-3'-phosphate
  modified_base 23: mod_base = OTHER; note = 2'-O-methylcytidine
tagaactcaagacatcccacttc

SEQ ID NO: 5431 - RNA, 23 nt, synthetic construct
  source 1..23: mol_type = other RNA
  modified_base 1: mod_base = OTHER; note = 2'-O-methyluridine-3'-phosphate 5'-(E)-Vinylphosphonate
  modified_base 2: mod_base = OTHER; note = 2'-deoxy-2'-fluorocytidine-3'-phosphate
  modified_base 3: mod_base = OTHER; note = 2'-O-methyladenosine-3'-phosphate
  modified_base 4: mod_base = OTHER; note = 2'-O-methyluridine-3'-phosphate
  modified_base 5: mod_base = OTHER; note = 2'-O-methylguanosine-3'-phosphate
  modified_base 6: mod_base = OTHER; note = 2'-deoxy-2'-fluorocytidine-3'-phosphate
  modified_base 7: mod_base = OTHER; note = 2'-O-methyladenosine-3'-phosphate
  modified_base 8: mod_base = OTHER; note = 2'-O-methylguanosine-3'-phosphate
  modified_base 9: mod_base = OTHER; note = 2'-O-methyladenosine-3'-phosphate
  modified_base 10: mod_base = OTHER; note = 2'-O-methyladenosine-3'-phosphate
  modified_base 11: mod_base = OTHER; note = 2'-O-methylcytidine-3'-phosphate
  modified_base 12: mod_base = OTHER; note = 2'-O-methyluridine-3'-phosphate
  modified_base 13: mod_base = OTHER; note = 2'-O-methylcytidine-3'-phosphate
  modified_base 14: mod_base = OTHER; note = 2'-deoxy-2'-fluoroadenosine-3'-phosphate
  modified_base 15: mod_base = OTHER; note = 2'-O-methyladenosine-3'-phosphate
  modified_base 16: mod_base = OTHER; note = 2'-deoxy-2'-fluoroguanosine-3'-phosphate
  modified_base 17: mod_base = OTHER; note = 2'-O-methyladenosine-3'-phosphate
  modified_base 18: mod_base = OTHER; note = 2'-O-methylcytidine-3'-phosphate
  modified_base 19: mod_base = OTHER; note = 2'-O-methyladenosine-3'-phosphate
  modified_base 20: mod_base = OTHER; note = 2'-O-methyluridine-3'-phosphate
  modified_base 21: mod_base = OTHER; note = 2'-O-methylcytidine-3'-phosphate
  modified_base 22: mod_base = OTHER; note = 2'-O-methylcytidine-3'-phosphate
  modified_base 23: mod_base = OTHER; note = 2'-O-methylcytidine
tcatgcagaactcaagacatccc

SEQ ID NO: 5432 - RNA, 23 nt, synthetic construct
  source 1..23: mol_type = other RNA
  modified_base 1: mod_base = OTHER; note = 2'-O-methyluridine-3'-phosphate 5'-(E)-Vinylphosphonate
  modified_base 2: mod_base = OTHER; note = 2'-deoxy-2'-fluoroadenosine-3'-phosphate
  modified_base 3: mod_base = OTHER; note = 2'-O-methylcytidine-3'-phosphate
  modified_base 4: mod_base = OTHER; note = 2'-O-methylcytidine-3'-phosphate
  modified_base 5: mod_base = OTHER; note = 2'-O-methyluridine-3'-phosphate
  modified_base 6: mod_base = OTHER; note = 2'-deoxy-2'-fluoroadenosine-3'-phosphate
  modified_base 7: mod_base = OTHER; note = 2'-O-methyluridine-3'-phosphate
  modified_base 8: mod_base = OTHER; note = 2'-O-methylcytidine-3'-phosphate
  modified_base 9: mod_base = OTHER; note = 2'-O-methylcytidine-3'-phosphate
  modified_base 10: mod_base = OTHER; note = 2'-O-methyluridine-3'-phosphate
  modified_base 11: mod_base = OTHER; note = 2'-O-methyladenosine-3'-phosphate
  modified_base 12: mod_base = OTHER; note = 2'-O-methylguanosine-3'-phosphate
  modified_base 13: mod_base = OTHER; note = 2'-O-methyladenosine-3'-phosphate
  modified_base 14: mod_base = OTHER; note = 2'-deoxy-2'-fluoroadenosine-3'-phosphate
  modified_base 15: mod_base = OTHER; note = 2'-O-methyladenosine-3'-phosphate
  modified_base 16: mod_base = OTHER; note = 2'-deoxy-2'-fluorocytidine-3'-phosphate
  modified_base 17: mod_base = OTHER; note = 2'-O-methylcytidine-3'-phosphate
  modified_base 18: mod_base = OTHER; note = 2'-O-methylcytidine-3'-phosphate
  modified_base 19: mod_base = OTHER; note = 2'-O-methyladenosine-3'-phosphate
  modified_base 20: mod_base = OTHER; note = 2'-O-methylcytidine-3'-phosphate
  modified_base 21: mod_base = OTHER; note = 2'-O-methyluridine-3'-phosphate
  modified_base 22: mod_base = OTHER; note = 2'-O-methylguanosine-3'-phosphate
  modified_base 23: mod_base = OTHER; note = 2'-O-methyluridine
tacctatcctagaaacccactgt

SEQ ID NO: 5433 - RNA, 23 nt, synthetic construct
  source 1..23: mol_type = other RNA
  modified_base 1: mod_base = OTHER; note = 2'-O-methyluridine-3'-phosphate 5'-(E)-Vinylphosphonate
  modified_base 2: mod_base = OTHER; note = 2'-deoxy-2'-fluoroguanosine-3'-phosphate
  modified_base 3: mod_base = OTHER; note = 2'-O-methyladenosine-3'-phosphate
  modified_base 4: mod_base = OTHER; note = 2'-O-methylcytidine-3'-phosphate
  modified_base 5: mod_base = OTHER; note = 2'-O-methylcytidine-3'-phosphate
  modified_base 6: mod_base = OTHER; note = 2'-deoxy-2'-fluorouridine-3'-phosphate
  modified_base 7: mod_base = OTHER; note = 2'-O-methyladenosine-3'-phosphate
  modified_base 8: mod_base = OTHER; note = 2'-O-methyluridine-3'-phosphate
  modified_base 9: mod_base = OTHER; note = 2'-O-methylcytidine-3'-phosphate
  modified_base 10: mod_base = OTHER; note = 2'-O-methylcytidine-3'-phosphate
  modified_base 11: mod_base = OTHER; note = 2'-O-methyluridine-3'-phosphate
  modified_base 12: mod_base = OTHER; note = 2'-O-methyladenosine-3'-phosphate
  modified_base 13: mod_base = OTHER; note = 2'-O-methylguanosine-3'-phosphate
  modified_base 14: mod_base = OTHER; note = 2'-deoxy-2'-fluoroadenosine-3'-phosphate
  modified_base 15: mod_base = OTHER; note = 2'-O-methyladenosine-3'-phosphate
  modified_base 16: mod_base = OTHER; note = 2'-deoxy-2'-fluoroadenosine-3'-phosphate
  modified_base 17: mod_base = OTHER; note = 2'-O-methylcytidine-3'-phosphate
  modified_base 18: mod_base = OTHER; note = 2'-O-methylcytidine-3'-phosphate
  modified_base 19: mod_base = OTHER; note = 2'-O-methylcytidine-3'-phosphate
  modified_base 20: mod_base = OTHER; note = 2'-O-methyladenosine-3'-phosphate
  modified_base 21: mod_base = OTHER; note = 2'-O-methylcytidine-3'-phosphate
  modified_base 22: mod_base = OTHER; note = 2'-O-methyluridine-3'-phosphate
  modified_base 23: mod_base = OTHER; note = 2'-O-methylguanosine
tgacctatcctagaaacccactg

SEQ ID NO: 5434 - RNA, 23 nt, synthetic construct
  source 1..23: mol_type = other RNA
  modified_base 1: mod_base = OTHER; note = 2'-O-methyluridine-3'-phosphate 5'-(E)-Vinylphosphonate
  modified_base 2: mod_base = OTHER; note = 2'-deoxy-2'-fluoroadenosine-3'-phosphate
  modified_base 3: mod_base = OTHER; note = 2'-O-methylguanosine-3'-phosphate
  modified_base 4: mod_base = OTHER; note = 2'-O-methyladenosine-3'-phosphate
  modified_base 5: mod_base = OTHER; note = 2'-O-methylcytidine-3'-phosphate
  modified_base 6: mod_base = OTHER; note = 2'-deoxy-2'-fluorocytidine-3'-phosphate
  modified_base 7: mod_base = OTHER; note = 2'-O-methyluridine-3'-phosphate
  modified_base 8: mod_base = OTHER; note = 2'-O-methyladenosine-3'-phosphate
  modified_base 9: mod_base = OTHER; note = 2'-O-methyluridine-3'-phosphate
  modified_base 10: mod_base = OTHER; note = 2'-O-methylcytidine-3'-phosphate
  modified_base 11: mod_base = OTHER; note = 2'-O-methylcytidine-3'-phosphate
  modified_base 12: mod_base = OTHER; note = 2'-O-methyluridine-3'-phosphate
  modified_base 13: mod_base = OTHER; note = 2'-O-methyladenosine-3'-phosphate
  modified_base 14: mod_base = OTHER; note = 2'-deoxy-2'-fluoroguanosine-3'-phosphate
  modified_base 15: mod_base = OTHER; note = 2'-O-methyladenosine-3'-phosphate
  modified_base 16: mod_base = OTHER; note = 2'-deoxy-2'-fluoroadenosine-3'-phosphate
  modified_base 17: mod_base = OTHER; note = 2'-O-methyladenosine-3'-phosphate
  modified_base 18: mod_base = OTHER; note = 2'-O-methylcytidine-3'-phosphate
  modified_base 19: mod_base = OTHER; note = 2'-O-methylcytidine-3'-phosphate
  modified_base 20: mod_base = OTHER; note = 2'-O-methylcytidine-3'-phosphate
  modified_base 21: mod_base = OTHER; note = 2'-O-methyladenosine-3'-phosphate
  modified_base 22: mod_base = OTHER; note = 2'-O-methylcytidine-3'-phosphate
  modified_base 23: mod_base = OTHER; note = 2'-O-methyluridine
tagacctatcctagaaacccact

SEQ ID NO: 5435 - RNA, 23 nt, synthetic construct
  source 1..23: mol_type = other RNA
  modified_base 1: mod_base = OTHER; note = 2'-O-methyluridine-3'-phosphate 5'-(E)-Vinylphosphonate
  modified_base 2: mod_base = OTHER; note = 2'-deoxy-2'-fluorocytidine-3'-phosphate
  modified_base 3: mod_base = OTHER; note = 2'-O-methyladenosine-3'-phosphate
  modified_base 4: mod_base = OTHER; note = 2'-O-methylguanosine-3'-phosphate
  modified_base 5: mod_base = OTHER; note = 2'-O-methyladenosine-3'-phosphate
  modified_base 6: mod_base = OTHER; note = 2'-deoxy-2'-fluorocytidine-3'-phosphate
  modified_base 7: mod_base = OTHER; note = 2'-O-methylcytidine-3'-phosphate
  modified_base 8: mod_base = OTHER; note = 2'-O-methyluridine-3'-phosphate
  modified_base 9: mod_base = OTHER; note = 2'-O-methyladenosine-3'-phosphate
  modified_base 10: mod_base = OTHER; note = 2'-O-methyluridine-3'-phosphate
  modified_base 11: mod_base = OTHER; note = 2'-O-methylcytidine-3'-phosphate
  modified_base 12: mod_base = OTHER; note = 2'-O-methylcytidine-3'-phosphate
  modified_base 13: mod_base = OTHER; note = 2'-O-methyluridine-3'-phosphate
  modified_base 14: mod_base = OTHER; note = 2'-deoxy-2'-fluoroadenosine-3'-phosphate
  modified_base 15: mod_base = OTHER; note = 2'-O-methylguanosine-3'-phosphate
  modified_base 16: mod_base = OTHER; note = 2'-deoxy-2'-fluoroadenosine-3'-phosphate
  modified_base 17: mod_base = OTHER; note = 2'-O-methyladenosine-3'-phosphate
  modified_base 18: mod_base = OTHER; note = 2'-O-methyladenosine-3'-phosphate
  modified_base 19: mod_base = OTHER; note = 2'-O-methylcytidine-3'-phosphate
  modified_base 20: mod_base = OTHER; note = 2'-O-methylcytidine-3'-phosphate
  modified_base 21: mod_base = OTHER; note = 2'-O-methylcytidine-3'-phosphate
  modified_base 22: mod_base = OTHER; note = 2'-O-methyladenosine-3'-phosphate
  modified_base 23: mod_base = OTHER; note = 2'-O-methylcytidine
tcagacctatcctagaaacccac

SEQ ID NO: 5436 - RNA, 23 nt, synthetic construct
  source 1..23: mol_type = other RNA
  modified_base 1: mod_base = OTHER; note = 2'-O-methyluridine-3'-phosphate 5'-(E)-Vinylphosphonate
  modified_base 2: mod_base = OTHER; note = 2'-deoxy-2'-fluorouridine-3'-phosphate
  modified_base 3: mod_base = OTHER; note = 2'-O-methylcytidine-3'-phosphate
  modified_base 4: mod_base = OTHER; note = 2'-O-methyladenosine-3'-phosphate
  modified_base 5: mod_base = OTHER; note = 2'-O-methylguanosine-3'-phosphate
  modified_base 6: mod_base = OTHER; note = 2'-deoxy-2'-fluoroadenosine-3'-phosphate
  modified_base 7: mod_base = OTHER; note = 2'-O-methylcytidine-3'-phosphate
  modified_base 8: mod_base = OTHER; note = 2'-O-methylcytidine-3'-phosphate
  modified_base 9: mod_base = OTHER; note = 2'-O-methyluridine-3'-phosphate
  modified_base 10: mod_base = OTHER; note = 2'-O-methyladenosine-3'-phosphate
  modified_base 11: mod_base = OTHER; note = 2'-O-methyluridine-3'-phosphate
  modified_base 12: mod_base = OTHER; note = 2'-O-methylcytidine-3'-phosphate
  modified_base 13: mod_base = OTHER; note = 2'-O-methylcytidine-3'-phosphate
  modified_base 14: mod_base = OTHER; note = 2'-deoxy-2'-fluorouridine-3'-phosphate
  modified_base 15: mod_base = OTHER; note = 2'-O-methyladenosine-3'-phosphate
  modified_base 16: mod_base = OTHER; note = 2'-deoxy-2'-fluoroguanosine-3'-phosphate
  modified_base 17: mod_base = OTHER; note = 2'-O-methyladenosine-3'-phosphate
  modified_base 18: mod_base = OTHER; note = 2'-O-methyladenosine-3'-phosphate
  modified_base 19: mod_base = OTHER; note = 2'-O-methyladenosine-3'-phosphate
  modified_base 20: mod_base = OTHER; note = 2'-O-methylcytidine-3'-phosphate
  modified_base 21: mod_base = OTHER; note = 2'-O-methylcytidine-3'-phosphate
  modified_base 22: mod_base = OTHER; note = 2'-O-methylcytidine-3'-phosphate
  modified_base 23: mod_base = OTHER; note = 2'-O-methyladenosine
ttcagacctatcctagaaaccca

SEQ ID NO: 5437 - RNA, 23 nt, synthetic construct
  source 1..23: mol_type = other RNA
  modified_base 1: mod_base = OTHER; note = 2'-O-methyluridine-3'-phosphate 5'-(E)-Vinylphosphonate
  modified_base 2: mod_base = OTHER; note = 2'-deoxy-2'-fluorouridine-3'-phosphate
  modified_base 3: mod_base = OTHER; note = 2'-O-methyluridine-3'-phosphate
  modified_base 4: mod_base = OTHER; note = 2'-O-methylcytidine-3'-phosphate
  modified_base 5: mod_base = OTHER; note = 2'-O-methyladenosine-3'-phosphate
  modified_base 6: mod_base = OTHER; note = 2'-deoxy-2'-fluoroguanosine-3'-phosphate
  modified_base 7: mod_base = OTHER; note = 2'-O-methyladenosine-3'-phosphate
  modified_base 8: mod_base = OTHER; note = 2'-O-methylcytidine-3'-phosphate
  modified_base 9: mod_base = OTHER; note = 2'-O-methylcytidine-3'-phosphate
  modified_base 10: mod_base = OTHER; note = 2'-O-methyluridine-3'-phosphate
  modified_base 11: mod_base = OTHER; note = 2'-O-methyladenosine-3'-phosphate
  modified_base 12: mod_base = OTHER; note = 2'-O-methyluridine-3'-phosphate
  modified_base 13: mod_base = OTHER; note = 2'-O-methylcytidine-3'-phosphate
  modified_base 14: mod_base = OTHER; note = 2'-deoxy-2'-fluorocytidine-3'-phosphate
  modified_base 15: mod_base = OTHER; note = 2'-O-methyluridine-3'-phosphate
  modified_base 16: mod_base = OTHER; note = 2'-deoxy-2'-fluoroadenosine-3'-phosphate
  modified_base 17: mod_base = OTHER; note = 2'-O-methylguanosine-3'-phosphate
  modified_base 18: mod_base = OTHER; note = 2'-O-methyladenosine-3'-phosphate
  modified_base 19: mod_base = OTHER; note = 2'-O-methyladenosine-3'-phosphate
  modified_base 20: mod_base = OTHER; note = 2'-O-methyladenosine-3'-phosphate
  modified_base 21: mod_base = OTHER; note = 2'-O-methylcytidine-3'-phosphate
  modified_base 22: mod_base = OTHER; note = 2'-O-methylcytidine-3'-phosphate
  modified_base 23: mod_base = OTHER; note = 2'-O-methylcytidine
tttcagacctatcctagaaaccc

SEQ ID NO: 5438 - RNA, 23 nt, synthetic construct
  source 1..23: mol_type = other RNA
  modified_base 1: mod_base = OTHER; note = 2'-O-methyluridine-3'-phosphate 5'-(E)-Vinylphosphonate
  modified_base 2: mod_base = OTHER; note = 2'-deoxy-2'-fluorouridine-3'-phosphate
  modified_base 3: mod_base = OTHER; note = 2'-O-methyluridine-3'-phosphate
  modified_base 4: mod_base = OTHER; note = 2'-O-methyluridine-3'-phosphate
  modified_base 5: mod_base = OTHER; note = 2'-O-methylcytidine-3'-phosphate
  modified_base 6: mod_base = OTHER; note = 2'-deoxy-2'-fluoroadenosine-3'-phosphate
  modified_base 7: mod_base = OTHER; note = 2'-O-methylguanosine-3'-phosphate
  modified_base 8: mod_base = OTHER; note = 2'-O-methyladenosine-3'-phosphate
  modified_base 9: mod_base = OTHER; note = 2'-O-methylcytidine-3'-phosphate
  modified_base 10: mod_base = OTHER; note = 2'-O-methylcytidine-3'-phosphate
  modified_base 11: mod_base = OTHER; note = 2'-O-methyluridine-3'-phosphate
  modified_base 12: mod_base = OTHER; note = 2'-O-methyladenosine-3'-phosphate
  modified_base 13: mod_base = OTHER; note = 2'-O-methyluridine-3'-phosphate
  modified_base 14: mod_base = OTHER; note = 2'-deoxy-2'-fluorocytidine-3'-phosphate
  modified_base 15: mod_base = OTHER; note = 2'-O-methylcytidine-3'-phosphate
  modified_base 16: mod_base = OTHER; note = 2'-deoxy-2'-fluorouridine-3'-phosphate
  modified_base 17: mod_base = OTHER; note = 2'-O-methyladenosine-3'-phosphate
  modified_base 18: mod_base = OTHER; note = 2'-O-methylguanosine-3'-phosphate
  modified_base 19: mod_base = OTHER; note = 2'-O-methyladenosine-3'-phosphate
  modified_base 20: mod_base = OTHER; note = 2'-O-methyladenosine-3'-phosphate
  modified_base 21: mod_base = OTHER; note = 2'-O-methyladenosine-3'-phosphate
  modified_base 22: mod_base = OTHER; note = 2'-O-methylcytidine-3'-phosphate
  modified_base 23: mod_base = OTHER; note = 2'-O-methylcytidine
ttttcagacctatcctagaaacc

SEQ ID NO: 5439 - RNA, 23 nt, synthetic construct
  source 1..23: mol_type = other RNA
  modified_base 1: mod_base = OTHER; note = 2'-O-methyluridine-3'-phosphate 5'-(E)-Vinylphosphonate
  modified_base 2: mod_base = OTHER; note = 2'-deoxy-2'-fluorouridine-3'-phosphate
  modified_base 3: mod_base = OTHER; note = 2'-O-methyluridine-3'-phosphate
  modified_base 4: mod_base = OTHER; note = 2'-O-methyluridine-3'-phosphate
  modified_base 5: mod_base = OTHER; note = 2'-O-methyluridine-3'-phosphate
  modified_base 6: mod_base = OTHER; note = 2'-deoxy-2'-fluorocytidine-3'-phosphate
  modified_base 7: mod_base = OTHER; note = 2'-O-methyladenosine-3'-phosphate
  modified_base 8: mod_base = OTHER; note = 2'-O-methylguanosine-3'-phosphate
  modified_base 9: mod_base = OTHER; note = 2'-O-methyladenosine-3'-phosphate
  modified_base 10: mod_base = OTHER; note = 2'-O-methylcytidine-3'-phosphate
  modified_base 11: mod_base = OTHER; note = 2'-O-methylcytidine-3'-phosphate
  modified_base 12: mod_base = OTHER; note = 2'-O-methyluridine-3'-phosphate
  modified_base 13: mod_base = OTHER; note = 2'-O-methyladenosine-3'-phosphate
  modified_base 14: mod_base = OTHER; note = 2'-deoxy-2'-fluorouridine-3'-phosphate
  modified_base 15: mod_base = OTHER; note = 2'-O-methylcytidine-3'-phosphate
  modified_base 16: mod_base = OTHER; note = 2'-deoxy-2'-fluorocytidine-3'-phosphate
  modified_base 17: mod_base = OTHER; note = 2'-O-methyluridine-3'-phosphate
  modified_base 18: mod_base = OTHER; note = 2'-O-methyladenosine-3'-phosphate
  modified_base 19: mod_base = OTHER; note = 2'-O-methylguanosine-3'-phosphate
  modified_base 20: mod_base = OTHER; note = 2'-O-methyladenosine-3'-phosphate
  modified_base 21: mod_base = OTHER; note = 2'-O-methyladenosine-3'-phosphate
  modified_base 22: mod_base = OTHER; note = 2'-O-methyladenosine-3'-phosphate
  modified_base 23: mod_base = OTHER; note = 2'-O-methylcytidine
tttttcagacctatcctagaaac

SEQ ID NO: 5440 - RNA, 23 nt, synthetic construct
  source 1..23: mol_type = other RNA
  modified_base 1: mod_base = OTHER; note = 2'-O-methyluridine-3'-phosphate 5'-(E)-Vinylphosphonate
  modified_base 2: mod_base = OTHER; note = 2'-deoxy-2'-fluoroadenosine-3'-phosphate
  modified_base 3: mod_base = OTHER; note = 2'-O-methyluridine-3'-phosphate
  modified_base 4: mod_base = OTHER; note = 2'-O-methyluridine-3'-phosphate
  modified_base 5: mod_base = OTHER; note = 2'-O-methyluridine-3'-phosphate
  modified_base 6: mod_base = OTHER; note = 2'-deoxy-2'-fluorouridine-3'-phosphate
  modified_base 7: mod_base = OTHER; note = 2'-O-methylcytidine-3'-phosphate
  modified_base 8: mod_base = OTHER; note = 2'-O-methyladenosine-3'-phosphate
  modified_base 9: mod_base = OTHER; note = 2'-O-methylguanosine-3'-phosphate
  modified_base 10: mod_base = OTHER; note = 2'-O-methyladenosine-3'-phosphate
  modified_base 11: mod_base = OTHER; note = 2'-O-methylcytidine-3'-phosphate
  modified_base 12: mod_base = OTHER; note = 2'-O-methylcytidine-3'-phosphate
  modified_base 13: mod_base = OTHER; note = 2'-O-methyluridine-3'-phosphate
  modified_base 14: mod_base = OTHER; note = 2'-deoxy-2'-fluoroadenosine-3'-phosphate
  modified_base 15: mod_base = OTHER; note = 2'-O-methyluridine-3'-phosphate
  modified_base 16: mod_base = OTHER; note = 2'-deoxy-2'-fluorocytidine-3'-phosphate
  modified_base 17: mod_base = OTHER; note = 2'-O-methylcytidine-3'-phosphate
  modified_base 18: mod_base = OTHER; note = 2'-O-methyluridine-3'-phosphate
  modified_base 19: mod_base = OTHER; note = 2'-O-methyladenosine-3'-phosphate
  modified_base 20: mod_base = OTHER; note = 2'-O-methylguanosine-3'-phosphate
  modified_base 21: mod_base = OTHER; note = 2'-O-methyladenosine-3'-phosphate
  modified_base 22: mod_base = OTHER; note = 2'-O-methyladenosine-3'-phosphate
  modified_base 23: mod_base = OTHER; note = 2'-O-methyladenosine
tattttcagacctatcctagaaa

SEQ ID NO: 5441 - RNA, 23 nt, synthetic construct
  source 1..23: mol_type = other RNA
  modified_base 1: mod_base = OTHER; note = 2'-O-methyluridine-3'-phosphate 5'-(E)-Vinylphosphonate
  modified_base 2: mod_base = OTHER; note = 2'-deoxy-2'-fluoroadenosine-3'-phosphate
  modified_base 3: mod_base = OTHER; note = 2'-O-methyladenosine-3'-phosphate
  modified_base 4: mod_base = OTHER; note = 2'-O-methyluridine-3'-phosphate
  modified_base 5: mod_base = OTHER; note = 2'-O-methyluridine-3'-phosphate
  modified_base 6: mod_base = OTHER; note = 2'-deoxy-2'-fluorouridine-3'-phosphate
  modified_base 7: mod_base = OTHER; note = 2'-O-methyluridine-3'-phosphate
  modified_base 8: mod_base = OTHER; note = 2'-O-methylcytidine-3'-phosphate
  modified_base 9: mod_base = OTHER; note = 2'-O-methyladenosine-3'-phosphate
  modified_base 10: mod_base = OTHER; note = 2'-O-methylguanosine-3'-phosphate
  modified_base 11: mod_base = OTHER; note = 2'-O-methyladenosine-3'-phosphate
  modified_base 12: mod_base = OTHER; note = 2'-O-methylcytidine-3'-phosphate
  modified_base 13: mod_base = OTHER; note = 2'-O-methylcytidine-3'-phosphate
  modified_base 14: mod_base = OTHER; note = 2'-deoxy-2'-fluorouridine-3'-phosphate
  modified_base 15: mod_base = OTHER; note = 2'-O-methyladenosine-3'-phosphate
  modified_base 16: mod_base = OTHER; note = 2'-deoxy-2'-fluorouridine-3'-phosphate
  modified_base 17: mod_base = OTHER; note = 2'-O-methylcytidine-3'-phosphate
  modified_base 18: mod_base = OTHER; note = 2'-O-methylcytidine-3'-phosphate
  modified_base 19: mod_base = OTHER; note = 2'-O-methyluridine-3'-phosphate
  modified_base 20: mod_base = OTHER; note = 2'-O-methyladenosine-3'-phosphate
  modified_base 21: mod_base = OTHER; note = 2'-O-methylguanosine-3'-phosphate
  modified_base 22: mod_base = OTHER; note = 2'-O-methyladenosine-3'-phosphate
  modified_base 23: mod_base = OTHER; note = 2'-O-methyladenosine
taattttcagacctatcctagaa

SEQ ID NO: 5442 - RNA, 23 nt, synthetic construct
  source 1..23: mol_type = other RNA
  modified_base 1: mod_base = OTHER; note = 2'-O-methyluridine-3'-phosphate 5'-(E)-Vinylphosphonate
  modified_base 2: mod_base = OTHER; note = 2'-deoxy-2'-fluorocytidine-3'-phosphate
  modified_base 3: mod_base = OTHER; note = 2'-O-methyladenosine-3'-phosphate
  modified_base 4: mod_base = OTHER; note = 2'-O-methyladenosine-3'-phosphate
  modified_base 5: mod_base = OTHER; note = 2'-O-methyluridine-3'-phosphate
  modified_base 6: mod_base = OTHER; note = 2'-deoxy-2'-fluorouridine-3'-phosphate
  modified_base 7: mod_base = OTHER; note = 2'-O-methyluridine-3'-phosphate
  modified_base 8: mod_base = OTHER; note = 2'-O-methyluridine-3'-phosphate
  modified_base 9: mod_base = OTHER; note = 2'-O-methylcytidine-3'-phosphate
  modified_base 10: mod_base = OTHER; note = 2'-O-methyladenosine-3'-phosphate
  modified_base 11: mod_base = OTHER; note = 2'-O-methylguanosine-3'-phosphate
  modified_base 12: mod_base = OTHER; note = 2'-O-methyladenosine-3'-phosphate
  modified_base 13: mod_base = OTHER; note = 2'-O-methylcytidine-3'-phosphate
  modified_base 14: mod_base = OTHER; note = 2'-deoxy-2'-fluorocytidine-3'-phosphate
  modified_base 15: mod_base = OTHER; note = 2'-O-methyluridine-3'-phosphate
  modified_base 16: mod_base = OTHER; note = 2'-deoxy-2'-fluoroadenosine-3'-phosphate
  modified_base 17: mod_base = OTHER; note = 2'-O-methyluridine-3'-phosphate
  modified_base 18: mod_base = OTHER; note = 2'-O-methylcytidine-3'-phosphate
  modified_base 19: mod_base = OTHER; note = 2'-O-methylcytidine-3'-phosphate
  modified_base 20: mod_base = OTHER; note = 2'-O-methyluridine-3'-phosphate
  modified_base 21: mod_base = OTHER; note = 2'-O-methyladenosine-3'-phosphate
  modified_base 22: mod_base = OTHER; note = 2'-O-methylguanosine-3'-phosphate
  modified_base 23: mod_base = OTHER; note = 2'-O-methyladenosine
tcaattttcagacctatcctaga

SEQ ID NO: 5443 - RNA, 23 nt, synthetic construct
  source 1..23: mol_type = other RNA
  modified_base 1: mod_base = OTHER; note = 2'-O-methyluridine-3'-phosphate 5'-(E)-Vinylphosphonate
  modified_base 2: mod_base = OTHER; note = 2'-deoxy-2'-fluorocytidine-3'-phosphate
  modified_base 3: mod_base = OTHER; note = 2'-O-methyladenosine-3'-phosphate
  modified_base 4: mod_base = OTHER; note = 2'-O-methyladenosine-3'-phosphate
  modified_base 5: mod_base = OTHER; note = 2'-O-methyladenosine-3'-phosphate
  modified_base 6: mod_base = OTHER; note = 2'-deoxy-2'-fluorouridine-3'-phosphate
  modified_base 7: mod_base = OTHER; note = 2'-O-methylguanosine-3'-phosphate
  modified_base 8: mod_base = OTHER; note = 2'-O-methyladenosine-3'-phosphate
  modified_base 9: mod_base = OTHER; note = 2'-O-methyladenosine-3'-phosphate
  modified_base 10: mod_base = OTHER; note = 2'-O-methyladenosine-3'-phosphate
  modified_base 11: mod_base = OTHER; note = 2'-O-methylguanosine-3'-phosphate
  modified_base 12: mod_base = OTHER; note = 2'-O-methylcytidine-3'-phosphate
  modified_base 13: mod_base = OTHER; note = 2'-O-methyladenosine-3'-phosphate
  modified_base 14: mod_base = OTHER; note = 2'-deoxy-2'-fluoroadenosine-3'-phosphate
  modified_base 15: mod_base = OTHER; note = 2'-O-methyluridine-3'-phosphate
  modified_base 16: mod_base = OTHER; note = 2'-deoxy-2'-fluorouridine-3'-phosphate
  modified_base 17: mod_base = OTHER; note = 2'-O-methyluridine-3'-phosphate
  modified_base 18: mod_base = OTHER; note = 2'-O-methyluridine-3'-phosphate
  modified_base 19: mod_base = OTHER; note = 2'-O-methylcytidine-3'-phosphate
  modified_base 20: mod_base = OTHER; note = 2'-O-methyladenosine-3'-phosphate
  modified_base 21: mod_base = OTHER; note = 2'-O-methylguanosine-3'-phosphate
  modified_base 22: mod_base = OTHER; note = 2'-O-methyladenosine-3'-phosphate
  modified_base 23: mod_base = OTHER; note = 2'-O-methylcytidine
tcaaatgaaagcaattttcagac

SEQ ID NO: 5444 - RNA, 23 nt, synthetic construct
  source 1..23: mol_type = other RNA
  modified_base 1: mod_base = OTHER; note = 2'-O-methyluridine-3'-phosphate 5'-(E)-Vinylphosphonate
  modified_base 2: mod_base = OTHER; note = 2'-deoxy-2'-fluoroguanosine-3'-phosphate
  modified_base 3: mod_base = OTHER; note = 2'-O-methyluridine-3'-phosphate
  modified_base 4: mod_base = OTHER; note = 2'-O-methylguanosine-3'-phosphate
  modified_base 5: mod_base = OTHER; note = 2'-O-methyluridine-3'-phosphate
  modified_base 6: mod_base = OTHER; note = 2'-deoxy-2'-fluorouridine-3'-phosphate
  modified_base 7: mod_base = OTHER; note = 2'-O-methylguanosine-3'-phosphate
  modified_base 8: mod_base = OTHER; note = 2'-O-methylcytidine-3'-phosphate
  modified_base 9: mod_base = OTHER; note = 2'-O-methyladenosine-3'-phosphate
  modified_base 10: mod_base = OTHER; note = 2'-O-methyladenosine-3'-phosphate
  modified_base 11: mod_base = OTHER; note = 2'-O-methyladenosine-3'-phosphate
  modified_base 12: mod_base = OTHER; note = 2'-O-methyluridine-3'-phosphate
  modified_base 13: mod_base = OTHER; note = 2'-O-methylguanosine-3'-phosphate
  modified_base 14: mod_base = OTHER; note = 2'-deoxy-2'-fluoroadenosine-3'-phosphate
  modified_base 15: mod_base = OTHER; note = 2'-O-methyladenosine-3'-phosphate
  modified_base 16: mod_base = OTHER; note = 2'-deoxy-2'-fluoroadenosine-3'-phosphate
  modified_base 17: mod_base = OTHER; note = 2'-O-methylguanosine-3'-phosphate
  modified_base 18: mod_base = OTHER; note = 2'-O-methylcytidine-3'-phosphate
  modified_base 19: mod_base = OTHER; note = 2'-O-methyladenosine-3'-phosphate
  modified_base 20: mod_base = OTHER; note = 2'-O-methyladenosine-3'-phosphate
  modified_base 21: mod_base = OTHER; note = 2'-O-methyluridine-3'-phosphate
  modified_base 22: mod_base = OTHER; note = 2'-O-methyluridine-3'-phosphate
  modified_base 23: mod_base = OTHER; note = 2'-O-methyluridine
tgtgttgcaaatgaaagcaattt

SEQ ID NO: 5445 - RNA, 23 nt, synthetic construct
  source 1..23: mol_type = other RNA
  modified_base 1: mod_base = OTHER; note = 2'-O-methyluridine-3'-phosphate 5'-(E)-Vinylphosphonate
  modified_base 2: mod_base = OTHER; note = 2'-deoxy-2'-fluorouridine-3'-phosphate
  modified_base 3: mod_base = OTHER; note = 2'-O-methylguanosine-3'-phosphate
  modified_base 4: mod_base = OTHER; note = 2'-O-methyluridine-3'-phosphate
  modified_base 5: mod_base = OTHER; note = 2'-O-methylguanosine-3'-phosphate
  modified_base 6: mod_base = OTHER; note = 2'-deoxy-2'-fluorouridine-3'-phosphate
  modified_base 7: mod_base = OTHER; note = 2'-O-methyluridine-3'-phosphate
  modified_base 8: mod_base = OTHER; note = 2'-O-methylguanosine-3'-phosphate
  modified_base 9: mod_base = OTHER; note = 2'-O-methylcytidine-3'-phosphate
  modified_base 10: mod_base = OTHER; note = 2'-O-methyladenosine-3'-phosphate
  modified_base 11: mod_base = OTHER; note = 2'-O-methyladenosine-3'-phosphate
  modified_base 12: mod_base = OTHER; note = 2'-O-methyladenosine-3'-phosphate
  modified_base 13: mod_base = OTHER; note = 2'-O-methyluridine-3'-phosphate
  modified_base 14: mod_base = OTHER; note = 2'-deoxy-2'-fluoroguanosine-3'-phosphate
  modified_base 15: mod_base = OTHER; note = 2'-O-methyladenosine-3'-phosphate
  modified_base 16: mod_base = OTHER; note = 2'-deoxy-2'-fluoroadenosine-3'-phosphate
  modified_base 17: mod_base = OTHER; note = 2'-O-methyladenosine-3'-phosphate
  modified_base 18: mod_base = OTHER; note = 2'-O-methylguanosine-3'-phosphate
  modified_base 19: mod_base = OTHER; note = 2'-O-methylcytidine-3'-phosphate
  modified_base 20: mod_base = OTHER; note = 2'-O-methyladenosine-3'-phosphate
  modified_base 21: mod_base = OTHER; note = 2'-O-methyladenosine-3'-phosphate
  modified_base 22: mod_base = OTHER; note = 2'-O-methyluridine-3'-phosphate
  modified_base 23: mod_base = OTHER; note = 2'-O-methyluridine
ttgtgttgcaaatgaaagcaatt

SEQ ID NO: 5446 - RNA, 23 nt, synthetic construct
  source 1..23: mol_type = other RNA
  modified_base 1: mod_base = OTHER; note = 2'-O-methyluridine-3'-phosphate 5'-(E)-Vinylphosphonate
  modified_base 2: mod_base = OTHER; note = 2'-deoxy-2'-fluoroadenosine-3'-phosphate
  modified_base 3: mod_base = OTHER; note = 2'-O-methyluridine-3'-phosphate
  modified_base 4: mod_base = OTHER; note = 2'-O-methylguanosine-3'-phosphate
  modified_base 5: mod_base = OTHER; note = 2'-O-methyluridine-3'-phosphate
  modified_base 6: mod_base = OTHER; note = 2'-deoxy-2'-fluoroguanosine-3'-phosphate
  modified_base 7: mod_base = OTHER; note = 2'-O-methyluridine-3'-phosphate
  modified_base 8: mod_base = OTHER; note = 2'-O-methyluridine-3'-phosphate
  modified_base 9: mod_base = OTHER; note = 2'-O-methylguanosine-3'-phosphate
  modified_base 10: mod_base = OTHER; note = 2'-O-methylcytidine-3'-phosphate
  modified_base 11: mod_base = OTHER; note = 2'-O-methyladenosine-3'-phosphate
  modified_base 12: mod_base = OTHER; note = 2'-O-methyladenosine-3'-phosphate
  modified_base 13: mod_base = OTHER; note = 2'-O-methyladenosine-3'-phosphate
  modified_base 14: mod_base = OTHER; note = 2'-deoxy-2'-fluorouridine-3'-phosphate
  modified_base 15: mod_base = OTHER; note = 2'-O-methylguanosine-3'-phosphate
  modified_base 16: mod_base = OTHER; note = 2'-deoxy-2'-fluoroadenosine-3'-phosphate
  modified_base 17: mod_base = OTHER; note = 2'-O-methyladenosine-3'-phosphate
  modified_base 18: mod_base = OTHER; note = 2'-O-methyladenosine-3'-phosphate
  modified_base 19: mod_base = OTHER; note = 2'-O-methylguanosine-3'-phosphate
  modified_base 20: mod_base = OTHER; note = 2'-O-methylcytidine-3'-phosphate
  modified_base 21: mod_base = OTHER; note = 2'-O-methyladenosine-3'-phosphate
  modified_base 22: mod_base = OTHER; note = 2'-O-methyladenosine-3'-phosphate
  modified_base 23: mod_base = OTHER; note = 2'-O-methyluridine
tatgtgttgcaaatgaaagcaat

SEQ ID NO: 5447 - RNA, 23 nt, synthetic construct
  source 1..23: mol_type = other RNA
  modified_base 1: mod_base = OTHER; note = 2'-O-methyluridine-3'-phosphate 5'-(E)-Vinylphosphonate
  modified_base 2: mod_base = OTHER; note = 2'-deoxy-2'-fluoroadenosine-3'-phosphate
  modified_base 3: mod_base = OTHER; note = 2'-O-methyladenosine-3'-phosphate
  modified_base 4: mod_base = OTHER; note = 2'-O-methyluridine-3'-phosphate
  modified_base 5: mod_base = OTHER; note = 2'-O-methylguanosine-3'-phosphate
  modified_base 6: mod_base = OTHER; note = 2'-deoxy-2'-fluorouridine-3'-phosphate
  modified_base 7: mod_base = OTHER; note = 2'-O-methylguanosine-3'-phosphate
  modified_base 8: mod_base = OTHER; note = 2'-O-methyluridine-3'-phosphate
  modified_base 9: mod_base = OTHER; note = 2'-O-methyluridine-3'-phosphate
  modified_base 10: mod_base = OTHER; note = 2'-O-methylguanosine-3'-phosphate
  modified_base 11: mod_base = OTHER; note = 2'-O-methylcytidine-3'-phosphate
  modified_base 12: mod_base = OTHER; note = 2'-O-methyladenosine-3'-phosphate
  modified_base 13: mod_base = OTHER; note = 2'-O-methyladenosine-3'-phosphate
  modified_base 14: mod_base = OTHER; note = 2'-deoxy-2'-fluoroadenosine-3'-phosphate
  modified_base 15: mod_base = OTHER; note = 2'-O-methyluridine-3'-phosphate
  modified_base 16: mod_base = OTHER; note = 2'-deoxy-2'-fluoroguanosine-3'-phosphate
  modified_base 17: mod_base = OTHER; note = 2'-O-methyladenosine-3'-phosphate
  modified_base 18: mod_base = OTHER; note = 2'-O-methyladenosine-3'-phosphate
  modified_base 19: mod_base = OTHER; note = 2'-O-methyladenosine-3'-phosphate
  modified_base 20: mod_base = OTHER; note = 2'-O-methylguanosine-3'-phosphate
  modified_base 21: mod_base = OTHER; note = 2'-O-methylcytidine-3'-phosphate
  modified_base 22: mod_base = OTHER; note = 2'-O-methyladenosine-3'-phosphate
  modified_base 23: mod_base = OTHER; note = 2'-O-methyladenosine
taatgtgttgcaaatgaaagcaa

SEQ ID NO: 5448 - RNA, 23 nt, synthetic construct
  source 1..23: mol_type = other RNA
  modified_base 1: mod_base = OTHER; note = 2'-O-methyluridine-3'-phosphate 5'-(E)-Vinylphosphonate
  modified_base 2: mod_base = OTHER; note = 2'-deoxy-2'-fluoroadenosine-3'-phosphate
  modified_base 3: mod_base = OTHER; note = 2'-O-methyladenosine-3'-phosphate
  modified_base 4: mod_base = OTHER; note = 2'-O-methyladenosine-3'-phosphate
  modified_base 5: mod_base = OTHER; note = 2'-O-methyluridine-3'-phosphate
  modified_base 6: mod_base = OTHER; note = 2'-deoxy-2'-fluoroguanosine-3'-phosphate
  modified_base 7: mod_base = OTHER; note = 2'-O-methyluridine-3'-phosphate
  modified_base 8: mod_base = OTHER; note = 2'-O-methylguanosine-3'-phosphate
  modified_base 9: mod_base = OTHER; note = 2'-O-methyluridine-3'-phosphate
  modified_base 10: mod_base = OTHER; note = 2'-O-methyluridine-3'-phosphate
  modified_base 11: mod_base = OTHER; note = 2'-O-methylguanosine-3'-phosphate
  modified_base 12: mod_base = OTHER; note = 2'-O-methylcytidine-3'-phosphate
  modified_base 13: mod_base = OTHER; note = 2'-O-methyladenosine-3'-phosphate
  modified_base 14: mod_base = OTHER; note = 2'-deoxy-2'-fluoroadenosine-3'-phosphate
  modified_base 15: mod_base = OTHER; note = 2'-O-methyladenosine-3'-phosphate
  modified_base 16: mod_base = OTHER; note = 2'-deoxy-2'-fluorouridine-3'-phosphate
  modified_base 17: mod_base = OTHER; note = 2'-O-methylguanosine-3'-phosphate
  modified_base 18: mod_base = OTHER; note = 2'-O-methyladenosine-3'-phosphate
  modified_base 19: mod_base = OTHER; note = 2'-O-methyladenosine-3'-phosphate
  modified_base 20: mod_base = OTHER; note = 2'-O-methyladenosine-3'-phosphate
  modified_base 21: mod_base = OTHER; note = 2'-O-methylguanosine-3'-phosphate
  modified_base 22: mod_base = OTHER; note = 2'-O-methylcytidine-3'-phosphate
  modified_base 23: mod_base = OTHER; note = 2'-O-methyladenosine
taaatgtgttgcaaatgaaagca

SEQ ID NO: 5449 - RNA, 23 nt, synthetic construct
  source 1..23: mol_type = other RNA
  modified_base 1: mod_base = OTHER; note = 2'-O-methyluridine-3'-phosphate 5'-(E)-Vinylphosphonate
  modified_base 2: mod_base = OTHER; note = 2'-deoxy-2'-fluorouridine-3'-phosphate
  modified_base 3: mod_base = OTHER; note = 2'-O-methylcytidine-3'-phosphate
  modified_base 4: mod_base = OTHER; note = 2'-O-methylcytidine-3'-phosphate
  modified_base 5: mod_base = OTHER; note = 2'-O-methyladenosine-3'-phosphate
  modified_base 6: mod_base = OTHER; note = 2'-deoxy-2'-fluoroadenosine-3'-phosphate
  modified_base 7: mod_base = OTHER; note = 2'-O-methyladenosine-3'-phosphate
  modified_base 8: mod_base = OTHER; note = 2'-O-methyluridine-3'-phosphate
  modified_base 9: mod_base = OTHER; note = 2'-O-methyladenosine-3'-phosphate
  modified_base 10: mod_base = OTHER; note = 2'-O-methyladenosine-3'-phosphate
  modified_base 11: mod_base = OTHER; note = 2'-O-methyladenosine-3'-phosphate
  modified_base 12: mod_base = OTHER; note = 2'-O-methylguanosine-3'-phosphate
  modified_base 13: mod_base = OTHER; note = 2'-O-methylcytidine-3'-phosphate
  modified_base 14: mod_base = OTHER; note = 2'-deoxy-2'-fluorouridine-3'-phosphate
  modified_base 15: mod_base = OTHER; note = 2'-O-methyladenosine-3'-phosphate
  modified_base 16: mod_base = OTHER; note = 2'-deoxy-2'-fluorocytidine-3'-phosphate
  modified_base 17: mod_base = OTHER; note = 2'-O-methyluridine-3'-phosphate
  modified_base 18: mod_base = OTHER; note = 2'-O-methyluridine-3'-phosphate
  modified_base 19: mod_base = OTHER; note = 2'-O-methyluridine-3'-phosphate
  modified_base 20: mod_base = OTHER; note = 2'-O-methylcytidine-3'-phosphate
  modified_base 21: mod_base = OTHER; note = 2'-O-methyluridine-3'-phosphate
  modified_base 22: mod_base = OTHER; note = 2'-O-methyladenosine-3'-phosphate
  modified_base 23: mod_base = OTHER; note = 2'-O-methyladenosine
ttccaaataaagctactttctaa

SEQ ID NO: 5450 - RNA, 23 nt, synthetic construct
  source 1..23: mol_type = other RNA
  modified_base 1: mod_base = OTHER; note = 2'-O-methyluridine-3'-phosphate 5'-(E)-Vinylphosphonate
  modified_base 2: mod_base = OTHER; note = 2'-deoxy-2'-fluoroadenosine-3'-phosphate
  modified_base 3: mod_base = OTHER; note = 2'-O-methyluridine-3'-phosphate
  modified_base 4: mod_base = OTHER; note = 2'-O-methyladenosine-3'-phosphate
  modified_base 5: mod_base = OTHER; note = 2'-O-methyluridine-3'-phosphate
  modified_base 6: mod_base = OTHER; note = 2'-deoxy-2'-fluorocytidine-3'-phosphate
  modified_base 7: mod_base = OTHER; note = 2'-O-methylcytidine-3'-phosphate
  modified_base 8: mod_base = OTHER; note = 2'-O-methyladenosine-3'-phosphate
  modified_base 9: mod_base = OTHER; note = 2'-O-methyladenosine-3'-phosphate
  modified_base 10: mod_base = OTHER; note = 2'-O-methyladenosine-3'-phosphate
  modified_base 11: mod_base = OTHER; note = 2'-O-methyluridine-3'-phosphate
  modified_base 12: mod_base = OTHER; note = 2'-O-methyladenosine-3'-phosphate
  modified_base 13: mod_base = OTHER; note = 2'-O-methyladenosine-3'-phosphate
  modified_base 14: mod_base = OTHER; note = 2'-deoxy-2'-fluoroadenosine-3'-phosphate
  modified_base 15: mod_base = OTHER; note = 2'-O-methylguanosine-3'-phosphate
  modified_base 16: mod_base = OTHER; note = 2'-deoxy-2'-fluorocytidine-3'-phosphate
  modified_base 17: mod_base = OTHER; note = 2'-O-methyluridine-3'-phosphate
  modified_base 18: mod_base = OTHER; note = 2'-O-methyladenosine-3'-phosphate
  modified_base 19: mod_base = OTHER; note = 2'-O-methylcytidine-3'-phosphate
  modified_base 20: mod_base = OTHER; note = 2'-O-methyluridine-3'-phosphate
  modified_base 21: mod_base = OTHER; note = 2'-O-methyluridine-3'-phosphate
  modified_base 22: mod_base = OTHER; note = 2'-O-methyluridine-3'-phosphate
  modified_base 23: mod_base = OTHER; note = 2'-O-methylcytidine
tatatccaaataaagctactttc

SEQ ID NO: 5451 - RNA, 23 nt, synthetic construct
  source 1..23: mol_type = other RNA
  modified_base 1: mod_base = OTHER; note = 2'-O-methyluridine-3'-phosphate 5'-(E)-Vinylphosphonate
  modified_base 2: mod_base = OTHER; note = 2'-deoxy-2'-fluoroguanosine-3'-phosphate
  modified_base 3: mod_base = OTHER; note = 2'-O-methyladenosine-3'-phosphate
  modified_base 4: mod_base = OTHER; note = 2'-O-methyluridine-3'-phosphate
  modified_base 5: mod_base = OTHER; note = 2'-O-methylguanosine-3'-phosphate
  modified_base 6: mod_base = OTHER; note = 2'-deoxy-2'-fluoroadenosine-3'-phosphate
  modified_base 7: mod_base = OTHER; note = 2'-O-methyluridine-3'-phosphate
  modified_base 8: mod_base = OTHER; note = 2'-O-methyladenosine-3'-phosphate
  modified_base 9: mod_base = OTHER; note = 2'-O-methyluridine-3'-phosphate
  modified_base 10: mod_base = OTHER; note = 2'-O-methyladenosine-3'-phosphate
  modified_base 11: mod_base = OTHER; note = 2'-O-methyluridine-3'-phosphate
  modified_base 12: mod_base = OTHER; note = 2'-O-methyluridine-3'-phosphate
  modified_base 13: mod_base = OTHER; note = 2'-O-methyluridine-3'-phosphate
  modified_base 14: mod_base = OTHER; note = 2'-deoxy-2'-fluoroadenosine-3'-phosphate
  modified_base 15: mod_base = OTHER; note = 2'-O-methylguanosine-3'-phosphate
  modified_base 16: mod_base = OTHER; note = 2'-deoxy-2'-fluoroadenosine-3'-phosphate
  modified_base 17: mod_base = OTHER; note = 2'-O-methyluridine-3'-phosphate
  modified_base 18: mod_base = OTHER; note = 2'-O-methyluridine-3'-phosphate
  modified_base 19: mod_base = OTHER; note = 2'-O-methylguanosine-3'-phosphate
  modified_base 20: mod_base = OTHER; note = 2'-O-methyluridine-3'-phosphate
  modified_base 21: mod_base = OTHER; note = 2'-O-methylcytidine-3'-phosphate
  modified_base 22: mod_base = OTHER; note = 2'-O-methyluridine-3'-phosphate
  modified_base 23: mod_base = OTHER; note = 2'-O-methylguanosine
tgatgatatatttagattgtctg

SEQ ID NO: 5452 - RNA, 23 nt, synthetic construct
  source 1..23: mol_type = other RNA
  modified_base 1: mod_base = OTHER; note = 2'-O-methyluridine-3'-phosphate 5'-(E)-Vinylphosphonate
  modified_base 2: mod_base = OTHER; note = 2'-deoxy-2'-fluorocytidine-3'-phosphate
  modified_base 3: mod_base = OTHER; note = 2'-O-methyluridine-3'-phosphate
  modified_base 4: mod_base = OTHER; note = 2'-O-methylguanosine-3'-phosphate
  modified_base 5: mod_base = OTHER; note = 2'-O-methyladenosine-3'-phosphate
  modified_base 6: mod_base = OTHER; note = 2'-deoxy-2'-fluorouridine-3'-phosphate
  modified_base 7: mod_base = OTHER; note = 2'-O-methylguanosine-3'-phosphate
  modified_base 8: mod_base = OTHER; note = 2'-O-methyladenosine-3'-phosphate
  modified_base 9: mod_base = OTHER; note = 2'-O-methyluridine-3'-phosphate
  modified_base 10: mod_base = OTHER; note = 2'-O-methyladenosine-3'-phosphate
  modified_base 11: mod_base = OTHER; note = 2'-O-methyluridine-3'-phosphate
  modified_base 12: mod_base = OTHER; note = 2'-O-methyladenosine-3'-phosphate
  modified_base 13: mod_base = OTHER; note = 2'-O-methyluridine-3'-phosphate
  modified_base 14: mod_base = OTHER; note = 2'-deoxy-2'-fluorouridine-3'-phosphate
  modified_base 15: mod_base = OTHER; note = 2'-O-methyluridine-3'-phosphate
  modified_base 16: mod_base = OTHER; note = 2'-deoxy-2'-fluoroadenosine-3'-phosphate
  modified_base 17: mod_base = OTHER; note = 2'-O-methylguanosine-3'-phosphate
  modified_base 18: mod_base = OTHER; note = 2'-O-methyladenosine-3'-phosphate
  modified_base 19: mod_base = OTHER; note = 2'-O-methyluridine-3'-phosphate
  modified_base 20: mod_base = OTHER; note = 2'-O-methyluridine-3'-phosphate
  modified_base 21: mod_base = OTHER; note = 2'-O-methylguanosine-3'-phosphate
  modified_base 22: mod_base = OTHER; note = 2'-O-methyluridine-3'-phosphate
  modified_base 23: mod_base = OTHER; note = 2'-O-methylcytidine
tctgatgatatatttagattgtc

SEQ ID NO: 5453 - RNA, 23 nt, synthetic construct
  source 1..23: mol_type = other RNA
  modified_base 1: mod_base = OTHER; note = 2'-O-methyluridine-3'-phosphate 5'-(E)-Vinylphosphonate
  modified_base 2: mod_base = OTHER; note = 2'-deoxy-2'-fluoroguanosine-3'-phosphate
  modified_base 3: mod_base = OTHER; note = 2'-O-methylcytidine-3'-phosphate
  modified_base 4: mod_base = OTHER; note = 2'-O-methyladenosine-3'-phosphate
  modified_base 5: mod_base = OTHER; note = 2'-O-methylcytidine-3'-phosphate
  modified_base 6: mod_base = OTHER; note = 2'-deoxy-2'-fluorouridine-3'-phosphate
  modified_base 7: mod_base = OTHER; note = 2'-O-methyluridine-3'-phosphate
  modified_base 8: mod_base = OTHER; note = 2'-O-methyluridine-3'-phosphate
  modified_base 9: mod_base = OTHER; note = 2'-O-methyluridine-3'-phosphate
  modified_base 10: mod_base = OTHER; note = 2'-O-methyladenosine-3'-phosphate
  modified_base 11: mod_base = OTHER; note = 2'-O-methyladenosine-3'-phosphate
  modified_base 12: mod_base = OTHER; note = 2'-O-methyladenosine-3'-phosphate
  modified_base 13: mod_base = OTHER; note = 2'-O-methyladenosine-3'-phosphate
  modified_base 14: mod_base = OTHER; note = 2'-deoxy-2'-fluoroadenosine-3'-phosphate
  modified_base 15: mod_base = OTHER; note = 2'-O-methylcytidine-3'-phosphate
  modified_base 16: mod_base = OTHER; note = 2'-deoxy-2'-fluorouridine-3'-phosphate
  modified_base 17: mod_base = OTHER; note = 2'-O-methylguanosine-3'-phosphate
  modified_base 18: mod_base = OTHER; note = 2'-O-methyladenosine-3'-phosphate
  modified_base 19: mod_base = OTHER; note = 2'-O-methyluridine-3'-phosphate
  modified_base 20: mod_base = OTHER; note = 2'-O-methylguanosine-3'-phosphate
  modified_base 21: mod_base = OTHER; note = 2'-O-methyladenosine-3'-phosphate
  modified_base 22: mod_base = OTHER; note = 2'-O-methyluridine-3'-phosphate
  modified_base 23: mod_base = OTHER; note = 2'-O-methyladenosine
tgcacttttaaaaactgatgata

SEQ ID NO: 5454 - RNA, 23 nt, synthetic construct
  source 1..23: mol_type = other RNA
  modified_base 1: mod_base = OTHER; note = 2'-O-methyluridine-3'-phosphate 5'-(E)-Vinylphosphonate
  modified_base 2: mod_base = OTHER; note = 2'-deoxy-2'-fluoroguanosine-3'-phosphate
  modified_base 3: mod_base = OTHER; note = 2'-O-methylguanosine-3'-phosphate
  modified_base 4: mod_base = OTHER; note = 2'-O-methylcytidine-3'-phosphate
  modified_base 5: mod_base = OTHER; note = 2'-O-methyladenosine-3'-phosphate
  modified_base 6: mod_base = OTHER; note = 2'-deoxy-2'-fluorocytidine-3'-phosphate
  modified_base 7: mod_base = OTHER; note = 2'-O-methyluridine-3'-phosphate
  modified_base 8: mod_base = OTHER; note = 2'-O-methyluridine-3'-phosphate
  modified_base 9: mod_base = OTHER; note = 2'-O-methyluridine-3'-phosphate
  modified_base 10: mod_base = OTHER; note = 2'-O-methyluridine-3'-phosphate
  modified_base 11: mod_base = OTHER; note = 2'-O-methyladenosine-3'-phosphate
  modified_base 12: mod_base = OTHER; note = 2'-O-methyladenosine-3'-phosphate
  modified_base 13: mod_base = OTHER; note = 2'-O-methyladenosine-3'-phosphate
  modified_base 14: mod_base = OTHER; note = 2'-deoxy-2'-fluoroadenosine-3'-phosphate
  modified_base 15: mod_base = OTHER; note = 2'-O-methyladenosine-3'-phosphate
  modified_base 16: mod_base = OTHER; note = 2'-deoxy-2'-fluorocytidine-3'-phosphate
  modified_base 17: mod_base = OTHER; note = 2'-O-methyluridine-3'-phosphate
  modified_base 18: mod_base = OTHER; note = 2'-O-methylguanosine-3'-phosphate
  modified_base 19: mod_base = OTHER; note = 2'-O-methyladenosine-3'-phosphate
  modified_base 20: mod_base = OTHER; note = 2'-O-methyluridine-3'-phosphate
  modified_base 21: mod_base = OTHER; note = 2'-O-methylguanosine-3'-phosphate
  modified_base 22: mod_base = OTHER; note = 2'-O-methyladenosine-3'-phosphate
  modified_base 23: mod_base = OTHER; note = 2'-O-methyluridine
tggcacttttaaaaactgatgat

SEQ ID NO: 5455 - RNA, 23 nt, synthetic construct
  source 1..23: mol_type = other RNA
  modified_base 1: mod_base = OTHER; note = 2'-O-methyluridine-3'-phosphate 5'-(E)-Vinylphosphonate
  modified_base 2: mod_base = OTHER; note = 2'-deoxy-2'-fluoroadenosine-3'-phosphate
  modified_base 3: mod_base = OTHER; note = 2'-O-methylguanosine-3'-phosphate
  modified_base 4: mod_base = OTHER; note = 2'-O-methylguanosine-3'-phosphate
  modified_base 5: mod_base = OTHER; note = 2'-O-methylcytidine-3'-phosphate
  modified_base 6: mod_base = OTHER; note = 2'-deoxy-2'-fluoroadenosine-3'-phosphate
  modified_base 7: mod_base = OTHER; note = 2'-O-methylcytidine-3'-phosphate
  modified_base 8: mod_base = OTHER; note = 2'-O-methyluridine-3'-phosphate
  modified_base 9: mod_base = OTHER; note = 2'-O-methyluridine-3'-phosphate
  modified_base 10: mod_base = OTHER; note = 2'-O-methyluridine-3'-phosphate
  modified_base 11: mod_base = OTHER; note = 2'-O-methyluridine-3'-phosphate
  modified_base 12: mod_base = OTHER; note = 2'-O-methyladenosine-3'-phosphate
  modified_base 13: mod_base = OTHER; note = 2'-O-methyladenosine-3'-phosphate
  modified_base 14: mod_base = OTHER; note = 2'-deoxy-2'-fluoroadenosine-3'-phosphate
  modified_base 15: mod_base = OTHER; note = 2'-O-methyladenosine-3'-phosphate
  modified_base 16: mod_base = OTHER; note = 2'-deoxy-2'-fluoroadenosine-3'-phosphate
  modified_base 17: mod_base = OTHER; note = 2'-O-methylcytidine-3'-phosphate
  modified_base 18: mod_base = OTHER; note = 2'-O-methyluridine-3'-phosphate
  modified_base 19: mod_base = OTHER; note = 2'-O-methylguanosine-3'-phosphate
  modified_base 20: mod_base = OTHER; note = 2'-O-methyladenosine-3'-phosphate
  modified_base 21: mod_base = OTHER; note = 2'-O-methyluridine-3'-phosphate
  modified_base 22: mod_base = OTHER; note = 2'-O-methylguanosine-3'-phosphate
  modified_base 23: mod_base = OTHER; note = 2'-O-methyladenosine
taggcacttttaaaaactgatga

SEQ ID NO: 5456 - RNA, 23 nt, synthetic construct
  source 1..23: mol_type = other RNA
  modified_base 1: mod_base = OTHER; note = 2'-O-methyluridine-3'-phosphate 5'-(E)-Vinylphosphonate
  modified_base 2: mod_base = OTHER; note = 2'-deoxy-2'-fluorouridine-3'-phosphate
  modified_base 3: mod_base = OTHER; note = 2'-O-methyladenosine-3'-phosphate
  modified_base 4: mod_base = OTHER; note = 2'-O-methylguanosine-3'-phosphate
  modified_base 5: mod_base = OTHER; note = 2'-O-methylguanosine-3'-phosphate
  modified_base 6: mod_base = OTHER; note = 2'-deoxy-2'-fluorocytidine-3'-phosphate
  modified_base 7: mod_base = OTHER; note = 2'-O-methyladenosine-3'-phosphate
  modified_base 8: mod_base = OTHER; note = 2'-O-methylcytidine-3'-phosphate
  modified_base 9: mod_base = OTHER; note = 2'-O-methyluridine-3'-phosphate
  modified_base 10: mod_base = OTHER; note = 2'-O-methyluridine-3'-phosphate
  modified_base 11: mod_base = OTHER; note = 2'-O-methyluridine-3'-phosphate
  modified_base 12: mod_base = OTHER; note = 2'-O-methyluridine-3'-phosphate
  modified_base 13: mod_base = OTHER; note = 2'-O-methyladenosine-3'-phosphate
  modified_base 14: mod_base = OTHER; note = 2'-deoxy-2'-fluoroadenosine-3'-phosphate
  modified_base 15: mod_base = OTHER; note = 2'-O-methyladenosine-3'-phosphate
  modified_base 16: mod_base = OTHER; note = 2'-deoxy-2'-fluoroadenosine-3'-phosphate
  modified_base 17: mod_base = OTHER; note = 2'-O-methyladenosine-3'-phosphate
  modified_base 18: mod_base = OTHER; note = 2'-O-methylcytidine-3'-phosphate
  modified_base 19: mod_base = OTHER; note = 2'-O-methyluridine-3'-phosphate
  modified_base 20: mod_base = OTHER; note = 2'-O-methylguanosine-3'-phosphate
  modified_base 21: mod_base = OTHER; note = 2'-O-methyladenosine-3'-phosphate
  modified_base 22: mod_base = OTHER; note = 2'-O-methyluridine-3'-phosphate
  modified_base 23: mod_base = OTHER; note = 2'-O-methylguanosine
ttaggcacttttaaaaactgatg

SEQ ID NO: 5457 - RNA, 23 nt, synthetic construct
  source 1..23: mol_type = other RNA
  modified_base 1: mod_base = OTHER; note = 2'-O-methyluridine-3'-phosphate 5'-(E)-Vinylphosphonate
  modified_base 2: mod_base = OTHER; note = 2'-deoxy-2'-fluoroadenosine-3'-phosphate
  modified_base 3: mod_base = OTHER; note = 2'-O-methyluridine-3'-phosphate
  modified_base 4: mod_base = OTHER; note = 2'-O-methyladenosine-3'-phosphate
  modified_base 5: mod_base = OTHER; note = 2'-O-methylguanosine-3'-phosphate
  modified_base 6: mod_base = OTHER; note = 2'-deoxy-2'-fluoroguanosine-3'-phosphate
  modified_base 7: mod_base = OTHER; note = 2'-O-methylcytidine-3'-phosphate
  modified_base 8: mod_base = OTHER; note = 2'-O-methyladenosine-3'-phosphate
  modified_base 9: mod_base = OTHER; note = 2'-O-methylcytidine-3'-phosphate
  modified_base 10: mod_base = OTHER; note = 2'-O-methyluridine-3'-phosphate
  modified_base 11: mod_base = OTHER; note = 2'-O-methyluridine-3'-phosphate
  modified_base 12: mod_base = OTHER; note = 2'-O-methyluridine-3'-phosphate
  modified_base 13: mod_base = OTHER; note = 2'-O-methyluridine-3'-phosphate
  modified_base 14: mod_base = OTHER; note = 2'-deoxy-2'-fluoroadenosine-3'-phosphate
  modified_base 15: mod_base = OTHER; note = 2'-O-methyladenosine-3'-phosphate
  modified_base 16: mod_base = OTHER; note = 2'-deoxy-2'-fluoroadenosine-3'-phosphate
  modified_base 17: mod_base = OTHER; note = 2'-O-methyladenosine-3'-phosphate
  modified_base 18: mod_base = OTHER; note = 2'-O-methyladenosine-3'-phosphate
  modified_base 19: mod_base = OTHER; note = 2'-O-methylcytidine-3'-phosphate
  modified_base 20: mod_base = OTHER; note = 2'-O-methyluridine-3'-phosphate
  modified_base 21: mod_base = OTHER; note = 2'-O-methylguanosine-3'-phosphate
  modified_base 22: mod_base = OTHER; note = 2'-O-methyladenosine-3'-phosphate
  modified_base 23: mod_base = OTHER; note = 2'-O-methyluridine
tataggcacttttaaaaactgat

SEQ ID NO: 5458 - RNA, 23 nt, synthetic construct
  source 1..23: mol_type = other RNA
  modified_base 1: mod_base = OTHER; note = 2'-O-methyluridine-3'-phosphate 5'-(E)-Vinylphosphonate
  modified_base 2: mod_base = OTHER; note = 2'-deoxy-2'-fluorocytidine-3'-phosphate
  modified_base 3: mod_base = OTHER; note = 2'-O-methyladenosine-3'-phosphate
  modified_base 4: mod_base = OTHER; note = 2'-O-methyluridine-3'-phosphate
  modified_base 5: mod_base = OTHER; note = 2'-O-methyladenosine-3'-phosphate
  modified_base 6: mod_base = OTHER; note = 2'-deoxy-2'-fluoroguanosine-3'-phosphate
  modified_base 7: mod_base = OTHER; note = 2'-O-methylguanosine-3'-phosphate
  modified_base 8: mod_base = OTHER; note = 2'-O-methylcytidine-3'-phosphate
  modified_base 9: mod_base = OTHER; note = 2'-O-methyladenosine-3'-phosphate
  modified_base 10: mod_base = OTHER; note = 2'-O-methylcytidine-3'-phosphate
  modified_base 11: mod_base = OTHER; note = 2'-O-methyluridine-3'-phosphate
  modified_base 12: mod_base = OTHER; note = 2'-O-methyluridine-3'-phosphate
  modified_base 13: mod_base = OTHER; note = 2'-O-methyluridine-3'-phosphate
  modified_base 14: mod_base = OTHER; note = 2'-deoxy-2'-fluorouridine-3'-phosphate
  modified_base 15: mod_base = OTHER; note = 2'-O-methyladenosine-3'-phosphate
  modified_base 16: mod_base = OTHER; note = 2'-deoxy-2'-fluoroadenosine-3'-phosphate
  modified_base 17: mod_base = OTHER; note = 2'-O-methyladenosine-3'-phosphate
  modified_base 18: mod_base = OTHER; note = 2'-O-methyladenosine-3'-phosphate
  modified_base 19: mod_base = OTHER; note = 2'-O-methyladenosine-3'-phosphate
  modified_base 20: mod_base = OTHER; note = 2'-O-methylcytidine-3'-phosphate
  modified_base 21: mod_base = OTHER; note = 2'-O-methyluridine-3'-phosphate
  modified_base 22: mod_base = OTHER; note = 2'-O-methylguanosine-3'-phosphate
  modified_base 23: mod_base = OTHER; note = 2'-O-methyladenosine
tcataggcacttttaaaaactga

SEQ ID NO: 5459 - RNA, 23 nt, synthetic construct
  source 1..23: mol_type = other RNA
  modified_base 1: mod_base = OTHER; note = 2'-O-methyluridine-3'-phosphate 5'-(E)-Vinylphosphonate
  modified_base 2: mod_base = OTHER; note = 2'-deoxy-2'-fluoroadenosine-3'-phosphate
  modified_base 3: mod_base = OTHER; note = 2'-O-methylcytidine-3'-phosphate
  modified_base 4: mod_base = OTHER; note = 2'-O-methyladenosine-3'-phosphate
  modified_base 5: mod_base = OTHER; note = 2'-O-methyluridine-3'-phosphate
  modified_base 6: mod_base = OTHER; note = 2'-deoxy-2'-fluoroadenosine-3'-phosphate
  modified_base 7: mod_base = OTHER; note = 2'-O-methylguanosine-3'-phosphate
  modified_base 8: mod_base = OTHER; note = 2'-O-methylguanosine-3'-phosphate
  modified_base 9: mod_base = OTHER; note = 2'-O-methylcytidine-3'-phosphate
  modified_base 10: mod_base = OTHER; note = 2'-O-methyladenosine-3'-phosphate
  modified_base 11: mod_base = OTHER; note = 2'-O-methylcytidine-3'-phosphate
  modified_base 12: mod_base = OTHER; note = 2'-O-methyluridine-3'-phosphate
  modified_base 13: mod_base = OTHER; note = 2'-O-methyluridine-3'-phosphate
  modified_base 14: mod_base = OTHER; note = 2'-deoxy-2'-fluorouridine-3'-phosphate
  modified_base 15: mod_base = OTHER; note = 2'-O-methyluridine-3'-phosphate
  modified_base 16: mod_base = OTHER; note = 2'-deoxy-2'-fluoroadenosine-3'-phosphate
  modified_base 17: mod_base = OTHER; note = 2'-O-methyladenosine-3'-phosphate
  modified_base 18: mod_base = OTHER; note = 2'-O-methyladenosine-3'-phosphate
  modified_base 19: mod_base = OTHER; note = 2'-O-methyladenosine-3'-phosphate
  modified_base 20: mod_base = OTHER; note = 2'-O-methyladenosine-3'-phosphate
  modified_base 21: mod_base = OTHER; note = 2'-O-methylcytidine-3'-phosphate
  modified_base 22: mod_base = OTHER; note = 2'-O-methyluridine-3'-phosphate
  modified_base 23: mod_base = OTHER; note = 2'-O-methylguanosine
tacataggcacttttaaaaactg

SEQ ID NO: 5460 - RNA, 23 nt, synthetic construct
  source 1..23: mol_type = other RNA
  modified_base 1: mod_base = OTHER; note = 2'-O-methyluridine-3'-phosphate 5'-(E)-Vinylphosphonate
  modified_base 2: mod_base = OTHER; note = 2'-deoxy-2'-fluorocytidine-3'-phosphate
  modified_base 3: mod_base = OTHER; note = 2'-O-methyladenosine-3'-phosphate
  modified_base 4: mod_base = OTHER; note = 2'-O-methylcytidine-3'-phosphate
  modified_base 5: mod_base = OTHER; note = 2'-O-methyladenosine-3'-phosphate
  modified_base 6: mod_base = OTHER; note = 2'-deoxy-2'-fluorouridine-3'-phosphate
  modified_base 7: mod_base = OTHER; note = 2'-O-methyladenosine-3'-phosphate
  modified_base 8: mod_base = OTHER; note = 2'-O-methylguanosine-3'-phosphate
  modified_base 9: mod_base = OTHER; note = 2'-O-methylguanosine-3'-phosphate
  modified_base 10: mod_base = OTHER; note = 2'-O-methylcytidine-3'-phosphate
  modified_base 11: mod_base = OTHER; note = 2'-O-methyladenosine-3'-phosphate
  modified_base 12: mod_base = OTHER; note = 2'-O-methylcytidine-3'-phosphate
  modified_base 13: mod_base = OTHER; note = 2'-O-methyluridine-3'-phosphate
  modified_base 14: mod_base = OTHER; note = 2'-deoxy-2'-fluorouridine-3'-phosphate
  modified_base 15: mod_base = OTHER; note = 2'-O-methyluridine-3'-phosphate
  modified_base 16: mod_base = OTHER; note = 2'-deoxy-2'-fluorouridine-3'-phosphate
  modified_base 17: mod_base = OTHER; note = 2'-O-methyladenosine-3'-phosphate
  modified_base 18: mod_base = OTHER; note = 2'-O-methyladenosine-3'-phosphate
  modified_base 19: mod_base = OTHER; note = 2'-O-methyladenosine-3'-phosphate
  modified_base 20: mod_base = OTHER; note = 2'-O-methyladenosine-3'-phosphate
  modified_base 21: mod_base = OTHER; note = 2'-O-methyladenosine-3'-phosphate
  modified_base 22: mod_base = OTHER; note = 2'-O-methylcytidine-3'-phosphate
  modified_base 23: mod_base = OTHER; note = 2'-O-methyluridine
tcacataggcacttttaaaaact

SEQ ID NO: 5461 - RNA, 23 nt, synthetic construct
  source 1..23: mol_type = other RNA
  modified_base 1: mod_base = OTHER; note = 2'-O-methyluridine-3'-phosphate 5'-(E)-Vinylphosphonate
  modified_base 2: mod_base = OTHER; note = 2'-deoxy-2'-fluoroadenosine-3'-phosphate
  modified_base 3: mod_base = OTHER; note = 2'-O-methyluridine-3'-phosphate
  modified_base 4: mod_base = OTHER; note = 2'-O-methylcytidine-3'-phosphate
  modified_base 5: mod_base = OTHER; note = 2'-O-methyladenosine-3'-phosphate
  modified_base 6: mod_base = OTHER; note = 2'-deoxy-2'-fluorocytidine-3'-phosphate
  modified_base 7: mod_base = OTHER; note = 2'-O-methyluridine-3'-phosphate
  modified_base 8: mod_base = OTHER; note = 2'-O-methyluridine-3'-phosphate
  modified_base 9: mod_base = OTHER; note = 2'-O-methylcytidine-3'-phosphate
  modified_base 10: mod_base = OTHER; note = 2'-O-methyladenosine-3'-phosphate
  modified_base 11: mod_base = OTHER; note = 2'-O-methylcytidine-3'-phosphate
  modified_base 12: mod_base = OTHER; note = 2'-O-methyladenosine-3'-phosphate
  modified_base 13: mod_base = OTHER; note = 2'-O-methyluridine-3'-phosphate
  modified_base 14: mod_base = OTHER; note = 2'-deoxy-2'-fluoroadenosine-3'-phosphate
  modified_base 15: mod_base = OTHER; note = 2'-O-methylguanosine-3'-phosphate
  modified_base 16: mod_base = OTHER; note = 2'-deoxy-2'-fluoroguanosine-3'-phosphate
  modified_base 17: mod_base = OTHER; note = 2'-O-methylcytidine-3'-phosphate
  modified_base 18: mod_base = OTHER; note = 2'-O-methyladenosine-3'-phosphate
  modified_base 19: mod_base = OTHER; note = 2'-O-methylcytidine-3'-phosphate
  modified_base 20: mod_base = OTHER; note = 2'-O-methyluridine-3'-phosphate
  modified_base 21: mod_base = OTHER; note = 2'-O-methyluridine-3'-phosphate
  modified_base 22: mod_base = OTHER; note = 2'-O-methyluridine-3'-phosphate
  modified_base 23: mod_base = OTHER; note = 2'-O-methyluridine
tatcacttcacataggcactttt

SEQ ID NO: 5462 - RNA, 23 nt, synthetic construct
  source 1..23: mol_type = other RNA
  modified_base 1: mod_base = OTHER; note = 2'-O-methyluridine-3'-phosphate 5'-(E)-Vinylphosphonate
  modified_base 2: mod_base = OTHER; note = 2'-deoxy-2'-fluoroadenosine-3'-phosphate
  modified_base 3: mod_base = OTHER; note = 2'-O-methyladenosine-3'-phosphate
  modified_base 4: mod_base = OTHER; note = 2'-O-methyluridine-3'-phosphate
  modified_base 5: mod_base = OTHER; note = 2'-O-methylcytidine-3'-phosphate
  modified_base 6: mod_base = OTHER; note = 2'-deoxy-2'-fluoroadenosine-3'-phosphate
  modified_base 7: mod_base = OTHER; note = 2'-O-methylcytidine-3'-phosphate
  modified_base 8: mod_base = OTHER; note = 2'-O-methyluridine-3'-phosphate
  modified_base 9: mod_base = OTHER; note = 2'-O-methyluridine-3'-phosphate
  modified_base 10: mod_base = OTHER; note = 2'-O-methylcytidine-3'-phosphate
  modified_base 11: mod_base = OTHER; note = 2'-O-methyladenosine-3'-phosphate
  modified_base 12: mod_base = OTHER; note = 2'-O-methylcytidine-3'-phosphate
  modified_base 13: mod_base = OTHER; note = 2'-O-methyladenosine-3'-phosphate
  modified_base 14: mod_base = OTHER; note = 2'-deoxy-2'-fluorouridine-3'-phosphate
  modified_base 15: mod_base = OTHER; note = 2'-O-methyladenosine-3'-phosphate
  modified_base 16: mod_base = OTHER; note = 2'-deoxy-2'-fluoroguanosine-3'-phosphate
  modified_base 17: mod_base = OTHER; note = 2'-O-methylguanosine-3'-phosphate
  modified_base 18: mod_base = OTHER; note = 2'-O-methylcytidine-3'-phosphate
  modified_base 19: mod_base = OTHER; note = 2'-O-methyladenosine-3'-phosphate
  modified_base 20: mod_base = OTHER; note = 2'-O-methylcytidine-3'-phosphate
  modified_base 21: mod_base = OTHER; note = 2'-O-methyluridine-3'-phosphate
  modified_base 22: mod_base = OTHER; note = 2'-O-methyluridine-3'-phosphate
  modified_base 23: mod_base = OTHER; note = 2'-O-methyluridine
taatcacttcacataggcacttt

SEQ ID NO: 5463 - RNA, 23 nt, synthetic construct
  source 1..23: mol_type = other RNA
  modified_base 1: mod_base = OTHER; note = 2'-O-methyluridine-3'-phosphate 5'-(E)-Vinylphosphonate
  modified_base 2: mod_base = OTHER; note = 2'-deoxy-2'-fluoroadenosine-3'-phosphate
  modified_base 3: mod_base = OTHER; note = 2'-O-methyladenosine-3'-phosphate
  modified_base 4: mod_base = OTHER; note = 2'-O-methyladenosine-3'-phosphate
  modified_base 5: mod_base = OTHER; note = 2'-O-methyluridine-3'-phosphate
  modified_base 6: mod_base = OTHER; note = 2'-deoxy-2'-fluorocytidine-3'-phosphate
  modified_base 7: mod_base = OTHER; note = 2'-O-methyladenosine-3'-phosphate
  modified_base 8: mod_base = OTHER; note = 2'-O-methylcytidine-3'-phosphate
  modified_base 9: mod_base = OTHER; note = 2'-O-methyluridine-3'-phosphate
  modified_base 10: mod_base = OTHER; note = 2'-O-methyluridine-3'-phosphate
  modified_base 11: mod_base = OTHER; note = 2'-O-methylcytidine-3'-phosphate
  modified_base 12: mod_base = OTHER; note = 2'-O-methyladenosine-3'-phosphate
  modified_base 13: mod_base = OTHER; note = 2'-O-methylcytidine-3'-phosphate
  modified_base 14: mod_base = OTHER; note = 2'-deoxy-2'-fluoroadenosine-3'-phosphate
  modified_base 15: mod_base = OTHER; note = 2'-O-methyluridine-3'-phosphate
  modified_base 16: mod_base = OTHER; note = 2'-deoxy-2'-fluoroadenosine-3'-phosphate
  modified_base 17: mod_base = OTHER; note = 2'-O-methylguanosine-3'-phosphate
  modified_base 18: mod_base = OTHER; note = 2'-O-methylguanosine-3'-phosphate
  modified_base 19: mod_base = OTHER; note = 2'-O-methylcytidine-3'-phosphate
  modified_base 20: mod_base = OTHER; note = 2'-O-methyladenosine-3'-phosphate
  modified_base 21: mod_base = OTHER; note = 2'-O-methylcytidine-3'-phosphate
  modified_base 22: mod_base = OTHER; note = 2'-O-methyluridine-3'-phosphate
  modified_base 23: mod_base = OTHER; note = 2'-O-methyluridine
taaatcacttcacataggcactt

SEQ ID NO: 5464 - RNA, 23 nt, synthetic construct
  source 1..23: mol_type = other RNA
  modified_base 1: mod_base = OTHER; note = 2'-O-methyluridine-3'-phosphate 5'-(E)-Vinylphosphonate
  modified_base 2: mod_base = OTHER; note = 2'-deoxy-2'-fluoroadenosine-3'-phosphate
  modified_base 3: mod_base = OTHER; note = 2'-O-methyladenosine-3'-phosphate
  modified_base 4: mod_base = OTHER; note = 2'-O-methyladenosine-3'-phosphate
  modified_base 5: mod_base = OTHER; note = 2'-O-methyladenosine-3'-phosphate
  modified_base 6: mod_base = OTHER; note = 2'-deoxy-2'-fluorouridine-3'-phosphate
  modified_base 7: mod_base = OTHER; note = 2'-O-methylcytidine-3'-phosphate
  modified_base 8: mod_base = OTHER; note = 2'-O-methyladenosine-3'-phosphate
  modified_base 9: mod_base = OTHER; note = 2'-O-methylcytidine-3'-phosphate
  modified_base 10: mod_base = OTHER; note = 2'-O-methyluridine-3'-phosphate
  modified_base 11: mod_base = OTHER; note = 2'-O-methyluridine-3'-phosphate
  modified_base 12: mod_base = OTHER; note = 2'-O-methylcytidine-3'-phosphate
  modified_base 13: mod_base = OTHER; note = 2'-O-methyladenosine-3'-phosphate
  modified_base 14: mod_base = OTHER; note = 2'-deoxy-2'-fluorocytidine-3'-phosphate
  modified_base 15: mod_base = OTHER; note = 2'-O-methyladenosine-3'-phosphate
  modified_base 16: mod_base = OTHER; note = 2'-deoxy-2'-fluorouridine-3'-phosphate
  modified_base 17: mod_base = OTHER; note = 2'-O-methyladenosine-3'-phosphate
  modified_base 18: mod_base = OTHER; note = 2'-O-methylguanosine-3'-phosphate
  modified_base 19: mod_base = OTHER; note = 2'-O-methylguanosine-3'-phosphate
  modified_base 20: mod_base = OTHER; note = 2'-O-methylcytidine-3'-phosphate
  modified_base 21: mod_base = OTHER; note = 2'-O-methyladenosine-3'-phosphate
  modified_base 22: mod_base = OTHER; note = 2'-O-methylcytidine-3'-phosphate
  modified_base 23: mod_base = OTHER; note = 2'-O-methyluridine
taaaatcacttcacataggcact

SEQ ID NO: 5465 - RNA, 23 nt, synthetic construct
  source 1..23: mol_type = other RNA
  modified_base 1: mod_base = OTHER; note = 2'-O-methyluridine-3'-phosphate 5'-(E)-Vinylphosphonate
  modified_base 2: mod_base = OTHER; note = 2'-deoxy-2'-fluoroadenosine-3'-phosphate
  modified_base 3: mod_base = OTHER; note = 2'-O-methyladenosine-3'-phosphate
  modified_base 4: mod_base = OTHER; note = 2'-O-methyladenosine-3'-phosphate
  modified_base 5: mod_base = OTHER; note = 2'-O-methyladenosine-3'-phosphate
  modified_base 6: mod_base = OTHER; note = 2'-deoxy-2'-fluoroadenosine-3'-phosphate
  modified_base 7: mod_base = OTHER; note = 2'-O-methyluridine-3'-phosphate
  modified_base 8: mod_base = OTHER; note = 2'-O-methylcytidine-3'-phosphate
  modified_base 9: mod_base = OTHER; note = 2'-O-methyladenosine-3'-phosphate
  modified_base 10: mod_base = OTHER; note = 2'-O-methylcytidine-3'-phosphate
  modified_base 11: mod_base = OTHER; note = 2'-O-methyluridine-3'-phosphate
  modified_base 12: mod_base = OTHER; note = 2'-O-methyluridine-3'-phosphate
  modified_base 13: mod_base = OTHER; note = 2'-O-methylcytidine-3'-phosphate
  modified_base 14: mod_base = OTHER; note = 2'-deoxy-2'-fluoroadenosine-3'-phosphate
  modified_base 15: mod_base = OTHER; note = 2'-O-methylcytidine-3'-phosphate
  modified_base 16: mod_base = OTHER; note = 2'-deoxy-2'-fluoroadenosine-3'-phosphate
  modified_base 17: mod_base = OTHER; note = 2'-O-methyluridine-3'-phosphate
  modified_base 18: mod_base = OTHER; note = 2'-O-methyladenosine-3'-phosphate
  modified_base 19: mod_base = OTHER; note = 2'-O-methylguanosine-3'-phosphate
  modified_base 20: mod_base = OTHER; note = 2'-O-methylguanosine-3'-phosphate
  modified_base 21: mod_base = OTHER; note = 2'-O-methylcytidine-3'-phosphate
  modified_base 22: mod_base = OTHER; note = 2'-O-methyladenosine-3'-phosphate
  modified_base 23: mod_base = OTHER; note = 2'-O-methylcytidine
taaaaatcacttcacataggcac

SEQ ID NO: 5466 - RNA, 23 nt, synthetic construct
  source 1..23: mol_type = other RNA
  modified_base 1: mod_base = OTHER; note = 2'-O-methyluridine-3'-phosphate 5'-(E)-Vinylphosphonate
  modified_base 2: mod_base = OTHER; note = 2'-deoxy-2'-fluorouridine-3'-phosphate
  modified_base 3: mod_base = OTHER; note = 2'-O-methyladenosine-3'-phosphate
  modified_base 4: mod_base = OTHER; note = 2'-O-methyladenosine-3'-phosphate
  modified_base 5: mod_base = OTHER; note = 2'-O-methyladenosine-3'-phosphate
  modified_base 6: mod_base = OTHER; note = 2'-deoxy-2'-fluoroadenosine-3'-phosphate
  modified_base 7: mod_base = OTHER; note = 2'-O-methyladenosine-3'-phosphate
  modified_base 8: mod_base = OTHER; note = 2'-O-methyluridine-3'-phosphate
  modified_base 9: mod_base = OTHER; note = 2'-O-methylcytidine-3'-phosphate
  modified_base 10: mod_base = OTHER; note = 2'-O-methyladenosine-3'-phosphate
  modified_base 11: mod_base = OTHER; note = 2'-O-methylcytidine-3'-phosphate
  modified_base 12: mod_base = OTHER; note = 2'-O-methyluridine-3'-phosphate
  modified_base 13: mod_base = OTHER; note = 2'-O-methyluridine-3'-phosphate
  modified_base 14: mod_base = OTHER; note = 2'-deoxy-2'-fluorocytidine-3'-phosphate
  modified_base 15: mod_base = OTHER; note = 2'-O-methyladenosine-3'-phosphate
  modified_base 16: mod_base = OTHER; note = 2'-deoxy-2'-fluorocytidine-3'-phosphate
  modified_base 17: mod_base = OTHER; note = 2'-O-methyladenosine-3'-phosphate
  modified_base 18: mod_base = OTHER; note = 2'-O-methyluridine-3'-phosphate
  modified_base 19: mod_base = OTHER; note = 2'-O-methyladenosine-3'-phosphate
  modified_base 20: mod_base = OTHER; note = 2'-O-methylguanosine-3'-phosphate
  modified_base 21: mod_base = OTHER; note = 2'-O-methylguanosine-3'-phosphate
  modified_base 22: mod_base = OTHER; note = 2'-O-methylcytidine-3'-phosphate
  modified_base 23: mod_base = OTHER; note = 2'-O-methyladenosine
ttaaaaatcacttcacataggca

SEQ ID NO: 5467 - RNA, 23 nt, synthetic construct
  source 1..23: mol_type = other RNA
  modified_base 1: mod_base = OTHER; note = 2'-O-methyluridine-3'-phosphate 5'-(E)-Vinylphosphonate
  modified_base 2: mod_base = OTHER; note = 2'-deoxy-2'-fluorouridine-3'-phosphate
  modified_base 3: mod_base = OTHER; note = 2'-O-methyluridine-3'-phosphate
  modified_base 4: mod_base = OTHER; note = 2'-O-methyladenosine-3'-phosphate
  modified_base 5: mod_base = OTHER; note = 2'-O-methyladenosine-3'-phosphate
  modified_base 6: mod_base = OTHER; note = 2'-deoxy-2'-fluoroadenosine-3'-phosphate
  modified_base 7: mod_base = OTHER; note = 2'-O-methyladenosine-3'-phosphate
  modified_base 8: mod_base = OTHER; note = 2'-O-methyladenosine-3'-phosphate
  modified_base 9: mod_base = OTHER; note = 2'-O-methyluridine-3'-phosphate
  modified_base 10: mod_base = OTHER; note = 2'-O-methylcytidine-3'-phosphate
  modified_base 11: mod_base = OTHER; note = 2'-O-methyladenosine-3'-phosphate
  modified_base 12: mod_base = OTHER; note = 2'-O-methylcytidine-3'-phosphate
  modified_base 13: mod_base = OTHER; note = 2'-O-methyluridine-3'-phosphate
  modified_base 14: mod_base = OTHER; note = 2'-deoxy-2'-fluorouridine-3'-phosphate
  modified_base 15: mod_base = OTHER; note = 2'-O-methylcytidine-3'-phosphate
  modified_base 16: mod_base = OTHER; note = 2'-deoxy-2'-fluoroadenosine-3'-phosphate
  modified_base 17: mod_base = OTHER; note = 2'-O-methylcytidine-3'-phosphate
  modified_base 18: mod_base = OTHER; note = 2'-O-methyladenosine-3'-phosphate
  modified_base 19: mod_base = OTHER; note = 2'-O-methyluridine-3'-phosphate
  modified_base 20: mod_base = OTHER; note = 2'-O-methyladenosine-3'-phosphate
  modified_base 21: mod_base = OTHER; note = 2'-O-methylguanosine-3'-phosphate
  modified_base 22: mod_base = OTHER; note = 2'-O-methylguanosine-3'-phosphate
  modified_base 23: mod_base = OTHER; note = 2'-O-methylcytidine
tttaaaaatcacttcacataggc

SEQ ID NO: 5468 - RNA, 23 nt, synthetic construct
  source 1..23: mol_type = other RNA
  modified_base 1: mod_base = OTHER; note = 2'-O-methyluridine-3'-phosphate 5'-(E)-Vinylphosphonate
  modified_base 2: mod_base = OTHER; note = 2'-deoxy-2'-fluorouridine-3'-phosphate
  modified_base 3: mod_base = OTHER; note = 2'-O-methyluridine-3'-phosphate
  modified_base 4: mod_base = OTHER; note = 2'-O-methyluridine-3'-phosphate
  modified_base 5: mod_base = OTHER; note = 2'-O-methyladenosine-3'-phosphate
  modified_base 6: mod_base = OTHER; note = 2'-deoxy-2'-fluoroadenosine-3'-phosphate
  modified_base 7: mod_base = OTHER; note = 2'-O-methyladenosine-3'-phosphate
  modified_base 8: mod_base = OTHER; note = 2'-O-methyladenosine-3'-phosphate
  modified_base 9: mod_base = OTHER; note = 2'-O-methyladenosine-3'-phosphate
  modified_base 10: mod_base = OTHER; note = 2'-O-methyluridine-3'-phosphate
  modified_base 11: mod_base = OTHER; note = 2'-O-methylcytidine-3'-phosphate
  modified_base 12: mod_base = OTHER; note = 2'-O-methyladenosine-3'-phosphate
  modified_base 13: mod_base = OTHER; note = 2'-O-methylcytidine-3'-phosphate
  modified_base 14: mod_base = OTHER; note = 2'-deoxy-2'-fluorouridine-3'-phosphate
  modified_base 15: mod_base = OTHER; note = 2'-O-methyluridine-3'-phosphate
  modified_base 16: mod_base = OTHER; note = 2'-deoxy-2'-fluorocytidine-3'-phosphate
  modified_base 17: mod_base = OTHER; note = 2'-O-methyladenosine-3'-phosphate
  modified_base 18: mod_base = OTHER; note = 2'-O-methylcytidine-3'-phosphate
  modified_base 19: mod_base = OTHER; note = 2'-O-methyladenosine-3'-phosphate
  modified_base 20: mod_base = OTHER; note = 2'-O-methyluridine-3'-phosphate
  modified_base 21: mod_base = OTHER; note = 2'-O-methyladenosine-3'-phosphate
  modified_base 22: mod_base = OTHER; note = 2'-O-methylguanosine-3'-phosphate
  modified_base 23: mod_base = OTHER; note = 2'-O-methylguanosine
ttttaaaaatcacttcacatagg

SEQ ID NO: 5469 - RNA, 23 nt, synthetic construct
  source 1..23: mol_type = other RNA
  modified_base 1: mod_base = OTHER; note = 2'-O-methyluridine-3'-phosphate 5'-(E)-Vinylphosphonate
  modified_base 2: mod_base = OTHER; note = 2'-deoxy-2'-fluorocytidine-3'-phosphate
  modified_base 3: mod_base = OTHER; note = 2'-O-methyluridine-3'-phosphate
  modified_base 4: mod_base = OTHER; note = 2'-O-methylcytidine-3'-phosphate
  modified_base 5: mod_base = OTHER; note = 2'-O-methyluridine-3'-phosphate
  modified_base 6: mod_base = OTHER; note = 2'-deoxy-2'-fluorouridine-3'-phosphate
  modified_base 7: mod_base = OTHER; note = 2'-O-methyluridine-3'-phosphate
  modified_base 8: mod_base = OTHER; note = 2'-O-methyluridine-3'-phosphate
  modified_base 9: mod_base = OTHER; note = 2'-O-methyluridine-3'-phosphate
  modified_base 10: mod_base = OTHER; note = 2'-O-methyladenosine-3'-phosphate
  modified_base 11: mod_base = OTHER; note = 2'-O-methyladenosine-3'-phosphate
  modified_base 12: mod_base = OTHER; note = 2'-O-methyladenosine-3'-phosphate
  modified_base 13: mod_base = OTHER; note = 2'-O-methyladenosine-3'-phosphate
  modified_base 14: mod_base = OTHER; note = 2'-deoxy-2'-fluoroadenosine-3'-phosphate
  modified_base 15: mod_base = OTHER; note = 2'-O-methyluridine-3'-phosphate
  modified_base 16: mod_base = OTHER; note = 2'-deoxy-2'-fluorocytidine-3'-phosphate
  modified_base 17: mod_base = OTHER; note = 2'-O-methyladenosine-3'-phosphate
  modified_base 18: mod_base = OTHER; note = 2'-O-methylcytidine-3'-phosphate
  modified_base 19: mod_base = OTHER; note = 2'-O-methyluridine-3'-phosphate
  modified_base 20: mod_base = OTHER; note = 2'-O-methyluridine-3'-phosphate
  modified_base 21: mod_base = OTHER; note = 2'-O-methylcytidine-3'-phosphate
  modified_base 22: mod_base = OTHER; note = 2'-O-methyladenosine-3'-phosphate
  modified_base 23: mod_base = OTHER; note = 2'-O-methylcytidine
tctctttttaaaaatcacttcac

SEQ ID NO: 5470 - RNA, 23 nt, synthetic construct
  source 1..23: mol_type = other RNA
  modified_base 1: mod_base = OTHER; note = 2'-O-methyluridine-3'-phosphate 5'-(E)-Vinylphosphonate
  modified_base 2: mod_base = OTHER; note = 2'-deoxy-2'-fluoroguanosine-3'-phosphate
  modified_base 3: mod_base = OTHER; note = 2'-O-methylcytidine-3'-phosphate
  modified_base 4: mod_base = OTHER; note = 2'-O-methyluridine-3'-phosphate
  modified_base 5: mod_base = OTHER; note = 2'-O-methylcytidine-3'-phosphate
  modified_base 6: mod_base = OTHER; note = 2'-deoxy-2'-fluorouridine-3'-phosphate
  modified_base 7: mod_base = OTHER; note = 2'-O-methyluridine-3'-phosphate
  modified_base 8: mod_base = OTHER; note = 2'-O-methyluridine-3'-phosphate
  modified_base 9: mod_base = OTHER; note = 2'-O-methyluridine-3'-phosphate
  modified_base 10: mod_base = OTHER; note = 2'-O-methyluridine-3'-phosphate
  modified_base 11: mod_base = OTHER; note = 2'-O-methyladenosine-3'-phosphate
  modified_base 12: mod_base = OTHER; note = 2'-O-methyladenosine-3'-phosphate
  modified_base 13: mod_base = OTHER; note = 2'-O-methyladenosine-3'-phosphate
  modified_base 14: mod_base = OTHER; note = 2'-deoxy-2'-fluoroadenosine-3'-phosphate
  modified_base 15: mod_base = OTHER; note = 2'-O-methyladenosine-3'-phosphate
  modified_base 16: mod_base = OTHER; note = 2'-deoxy-2'-fluorouridine-3'-phosphate
  modified_base 17: mod_base = OTHER; note = 2'-O-methylcytidine-3'-phosphate
  modified_base 18: mod_base = OTHER; note = 2'-O-methyladenosine-3'-phosphate
  modified_base 19: mod_base = OTHER; note = 2'-O-methylcytidine-3'-phosphate
  modified_base 20: mod_base = OTHER; note = 2'-O-methyluridine-3'-phosphate
  modified_base 21: mod_base = OTHER; note = 2'-O-methyluridine-3'-phosphate
  modified_base 22: mod_base = OTHER; note = 2'-O-methylcytidine-3'-phosphate
  modified_base 23: mod_base = OTHER; note = 2'-O-methyladenosine
tgctctttttaaaaatcacttca

SEQ ID NO: 5471 - RNA, 23 nt, synthetic construct
  source 1..23: mol_type = other RNA
  modified_base 1: mod_base = OTHER; note = 2'-O-methyluridine-3'-phosphate 5'-(E)-Vinylphosphonate
  modified_base 2: mod_base = OTHER; note = 2'-deoxy-2'-fluorouridine-3'-phosphate
  modified_base 3: mod_base = OTHER; note = 2'-O-methyladenosine-3'-phosphate
  modified_base 4: mod_base = OTHER; note = 2'-O-methylguanosine-3'-phosphate
  modified_base 5: mod_base = OTHER; note = 2'-O-methylguanosine-3'-phosphate
  modified_base 6: mod_base = OTHER; note = 2'-deoxy-2'-fluorocytidine-3'-phosphate
  modified_base 7: mod_base = OTHER; note = 2'-O-methyluridine-3'-phosphate
  modified_base 8: mod_base = OTHER; note = 2'-O-methylcytidine-3'-phosphate
  modified_base 9: mod_base = OTHER; note = 2'-O-methyluridine-3'-phosphate
  modified_base 10: mod_base = OTHER; note = 2'-O-methyluridine-3'-phosphate
  modified_base 11: mod_base = OTHER; note = 2'-O-methyluridine-3'-phosphate
  modified_base 12: mod_base = OTHER; note = 2'-O-methyluridine-3'-phosphate
  modified_base 13: mod_base = OTHER; note = 2'-O-methyluridine-3'-phosphate
  modified_base 14: mod_base = OTHER; note = 2'-deoxy-2'-fluoroadenosine-3'-phosphate
  modified_base 15: mod_base = OTHER; note = 2'-O-methyladenosine-3'-phosphate
  modified_base 16: mod_base = OTHER; note = 2'-deoxy-2'-fluoroadenosine-3'-phosphate
  modified_base 17: mod_base = OTHER; note = 2'-O-methyladenosine-3'-phosphate
  modified_base 18: mod_base = OTHER; note = 2'-O-methyladenosine-3'-phosphate
  modified_base 19: mod_base = OTHER; note = 2'-O-methyluridine-3'-phosphate
  modified_base 20: mod_base = OTHER; note = 2'-O-methylcytidine-3'-phosphate
  modified_base 21: mod_base = OTHER; note = 2'-O-methyladenosine-3'-phosphate
  modified_base 22: mod_base = OTHER; note = 2'-O-methylcytidine-3'-phosphate
  modified_base 23: mod_base = OTHER; note = 2'-O-methyluridine
ttaggctctttttaaaaatcact

SEQ ID NO: 5472 - RNA, 23 nt, synthetic construct
  source 1..23: mol_type = other RNA
  modified_base 1: mod_base = OTHER; note = 2'-O-methyluridine-3'-phosphate 5'-(E)-Vinylphosphonate
  modified_base 2: mod_base = OTHER; note = 2'-deoxy-2'-fluoroadenosine-3'-phosphate
  modified_base 3: mod_base = OTHER; note = 2'-O-methyluridine-3'-phosphate
  modified_base 4: mod_base = OTHER; note = 2'-O-methyladenosine-3'-phosphate
  modified_base 5: mod_base = OTHER; note = 2'-O-methylguanosine-3'-phosphate
  modified_base 6: mod_base = OTHER; note = 2'-deoxy-2'-fluoroguanosine-3'-phosphate
  modified_base 7: mod_base = OTHER; note = 2'-O-methylcytidine-3'-phosphate
  modified_base 8: mod_base = OTHER; note = 2'-O-methyluridine-3'-phosphate
  modified_base 9: mod_base = OTHER; note = 2'-O-methylcytidine-3'-phosphate
  modified_base 10: mod_base = OTHER; note = 2'-O-methyluridine-3'-phosphate
  modified_base 11: mod_base = OTHER; note = 2'-O-methyluridine-3'-phosphate
  modified_base 12: mod_base = OTHER; note = 2'-O-methyluridine-3'-phosphate
  modified_base 13: mod_base = OTHER; note = 2'-O-methyluridine-3'-phosphate
  modified_base 14: mod_base = OTHER; note = 2'-deoxy-2'-fluorouridine-3'-phosphate
  modified_base 15: mod_base = OTHER; note = 2'-O-methyladenosine-3'-phosphate
  modified_base 16: mod_base = OTHER; note = 2'-deoxy-2'-fluoroadenosine-3'-phosphate
  modified_base 17: mod_base = OTHER; note = 2'-O-methyladenosine-3'-phosphate
  modified_base 18: mod_base = OTHER; note = 2'-O-methyladenosine-3'-phosphate
  modified_base 19: mod_base = OTHER; note = 2'-O-methyladenosine-3'-phosphate
  modified_base 20: mod_base = OTHER; note = 2'-O-methyluridine-3'-phosphate
  modified_base 21: mod_base = OTHER; note = 2'-O-methylcytidine-3'-phosphate
  modified_base 22: mod_base = OTHER; note = 2'-O-methyladenosine-3'-phosphate
  modified_base 23: mod_base = OTHER; note = 2'-O-methylcytidine
tataggctctttttaaaaatcac

SEQ ID NO: 5473 - RNA, 23 nt, synthetic construct
  source 1..23: mol_type = other RNA
  modified_base 1: mod_base = OTHER; note = 2'-O-methyluridine-3'-phosphate 5'-(E)-Vinylphosphonate
  modified_base 2: mod_base = OTHER; note = 2'-deoxy-2'-fluorocytidine-3'-phosphate
  modified_base 3: mod_base = OTHER; note = 2'-O-methyladenosine-3'-phosphate
  modified_base 4: mod_base = OTHER; note = 2'-O-methyluridine-3'-phosphate
  modified_base 5: mod_base = OTHER; note = 2'-O-methyladenosine-3'-phosphate
  modified_base 6: mod_base = OTHER; note = 2'-deoxy-2'-fluoroguanosine-3'-phosphate
  modified_base 7: mod_base = OTHER; note = 2'-O-methylguanosine-3'-phosphate
  modified_base 8: mod_base = OTHER; note = 2'-O-methylcytidine-3'-phosphate
  modified_base 9: mod_base = OTHER; note = 2'-O-methyluridine-3'-phosphate
  modified_base 10: mod_base = OTHER; note = 2'-O-methylcytidine-3'-phosphate
  modified_base 11: mod_base = OTHER; note = 2'-O-methyluridine-3'-phosphate
  modified_base 12: mod_base = OTHER; note = 2'-O-methyluridine-3'-phosphate
  modified_base 13: mod_base = OTHER; note = 2'-O-methyluridine-3'-phosphate
  modified_base 14: mod_base = OTHER; note = 2'-deoxy-2'-fluorouridine-3'-phosphate
  modified_base 15: mod_base = OTHER; note = 2'-O-methyluridine-3'-phosphate
  modified_base 16: mod_base = OTHER; note = 2'-deoxy-2'-fluoroadenosine-3'-phosphate
  modified_base 17: mod_base = OTHER; note = 2'-O-methyladenosine-3'-phosphate
  modified_base 18: mod_base = OTHER; note = 2'-O-methyladenosine-3'-phosphate
  modified_base 19: mod_base = OTHER; note = 2'-O-methyladenosine-3'-phosphate
  modified_base 20: mod_base = OTHER; note = 2'-O-methyladenosine-3'-phosphate
  modified_base 21: mod_base = OTHER; note = 2'-O-methyluridine-3'-phosphate
  modified_base 22: mod_base = OTHER; note = 2'-O-methylcytidine-3'-phosphate
  modified_base 23: mod_base = OTHER; note = 2'-O-methyladenosine
tcataggctctttttaaaaatca

SEQ ID NO: 5474 - RNA, 23 nt, synthetic construct
  source 1..23: mol_type = other RNA
  modified_base 1: mod_base = OTHER; note = 2'-O-methyluridine-3'-phosphate 5'-(E)-Vinylphosphonate
  modified_base 2: mod_base = OTHER; note = 2'-deoxy-2'-fluoroadenosine-3'-phosphate
  modified_base 3: mod_base = OTHER; note = 2'-O-methylcytidine-3'-phosphate
  modified_base 4: mod_base = OTHER; note = 2'-O-methyladenosine-3'-phosphate
  modified_base 5: mod_base = OTHER; note = 2'-O-methyluridine-3'-phosphate
  modified_base 6: mod_base = OTHER; note = 2'-deoxy-2'-fluoroadenosine-3'-phosphate
  modified_base 7: mod_base = OTHER; note = 2'-O-methylguanosine-3'-phosphate
  modified_base 8: mod_base = OTHER; note = 2'-O-methylguanosine-3'-phosphate
  modified_base 9: mod_base = OTHER; note = 2'-O-methylcytidine-3'-phosphate
  modified_base 10: mod_base = OTHER; note = 2'-O-methyluridine-3'-phosphate
  modified_base 11: mod_base = OTHER; note = 2'-O-methylcytidine-3'-phosphate
  modified_base 12: mod_base = OTHER; note = 2'-O-methyluridine-3'-phosphate
  modified_base 13: mod_base = OTHER; note = 2'-O-methyluridine-3'-phosphate
  modified_base 14: mod_base = OTHER; note = 2'-deoxy-2'-fluorouridine-3'-phosphate
  modified_base 15: mod_base = OTHER; note = 2'-O-methyluridine-3'-phosphate
  modified_base 16: mod_base = OTHER; note = 2'-deoxy-2'-fluorouridine-3'-phosphate
  modified_base 17: mod_base = OTHER; note = 2'-O-methyladenosine-3'-phosphate
  modified_base 18: mod_base = OTHER; note = 2'-O-methyladenosine-3'-phosphate
  modified_base 19: mod_base = OTHER; note = 2'-O-methyladenosine-3'-phosphate
  modified_base 20: mod_base = OTHER; note = 2'-O-methyladenosine-3'-phosphate
  modified_base 21: mod_base = OTHER; note = 2'-O-methyladenosine-3'-phosphate
  modified_base 22: mod_base = OTHER; note = 2'-O-methyluridine-3'-phosphate
  modified_base 23: mod_base = OTHER; note = 2'-O-methylcytidine
tacataggctctttttaaaaatc

SEQ ID NO: 5475 - RNA, 23 nt, synthetic construct
  source 1..23: mol_type = other RNA
  modified_base 1: mod_base = OTHER; note = 2'-O-methyluridine-3'-phosphate 5'-(E)-Vinylphosphonate
  modified_base 2: mod_base = OTHER; note = 2'-deoxy-2'-fluorocytidine-3'-phosphate
  modified_base 3: mod_base = OTHER; note = 2'-O-methyladenosine-3'-phosphate
  modified_base 4: mod_base = OTHER; note = 2'-O-methylcytidine-3'-phosphate
  modified_base 5: mod_base = OTHER; note = 2'-O-methyladenosine-3'-phosphate
  modified_base 6: mod_base = OTHER; note = 2'-deoxy-2'-fluorouridine-3'-phosphate
  modified_base 7: mod_base = OTHER; note = 2'-O-methyladenosine-3'-phosphate
  modified_base 8: mod_base = OTHER; note = 2'-O-methylguanosine-3'-phosphate
  modified_base 9: mod_base = OTHER; note = 2'-O-methylguanosine-3'-phosphate
  modified_base 10: mod_base = OTHER; note = 2'-O-methylcytidine-3'-phosphate
  modified_base 11: mod_base = OTHER; note = 2'-O-methyluridine-3'-phosphate
  modified_base 12: mod_base = OTHER; note = 2'-O-methylcytidine-3'-phosphate
  modified_base 13: mod_base = OTHER; note = 2'-O-methyluridine-3'-phosphate
  modified_base 14: mod_base = OTHER; note = 2'-deoxy-2'-fluorouridine-3'-phosphate
  modified_base 15: mod_base = OTHER; note = 2'-O-methyluridine-3'-phosphate
  modified_base 16: mod_base = OTHER; note = 2'-deoxy-2'-fluorouridine-3'-phosphate
  modified_base 17: mod_base = OTHER; note = 2'-O-methyluridine-3'-phosphate
  modified_base 18: mod_base = OTHER; note = 2'-O-methyladenosine-3'-phosphate
  modified_base 19: mod_base = OTHER; note = 2'-O-methyladenosine-3'-phosphate
  modified_base 20: mod_base = OTHER; note = 2'-O-methyladenosine-3'-phosphate
  modified_base 21: mod_base = OTHER; note = 2'-O-methyladenosine-3'-phosphate
  modified_base 22: mod_base = OTHER; note = 2'-O-methyladenosine-3'-phosphate
  modified_base 23: mod_base = OTHER; note = 2'-O-methyluridine
tcacataggctctttttaaaaat

SEQ ID NO: 5476 - RNA, 23 nt, synthetic construct
  source 1..23: mol_type = other RNA
  modified_base 1: mod_base = OTHER; note = 2'-O-methyluridine-3'-phosphate 5'-(E)-Vinylphosphonate
  modified_base 2: mod_base = OTHER; note = 2'-deoxy-2'-fluorouridine-3'-phosphate
  modified_base 3: mod_base = OTHER; note = 2'-O-methylcytidine-3'-phosphate
  modified_base 4: mod_base = OTHER; note = 2'-O-methyladenosine-3'-phosphate
  modified_base 5: mod_base = OTHER; note = 2'-O-methylcytidine-3'-phosphate
  modified_base 6: mod_base = OTHER; note = 2'-deoxy-2'-fluoroadenosine-3'-phosphate
  modified_base 7: mod_base = OTHER; note = 2'-O-methyluridine-3'-phosphate
  modified_base 8: mod_base = OTHER; note = 2'-O-methyladenosine-3'-phosphate
  modified_base 9: mod_base = OTHER; note = 2'-O-methylguanosine-3'-phosphate
  modified_base 10: mod_base = OTHER; note = 2'-O-methylguanosine-3'-phosphate
  modified_base 11: mod_base = OTHER; note = 2'-O-methylcytidine-3'-phosphate
  modified_base 12: mod_base = OTHER; note = 2'-O-methyluridine-3'-phosphate
  modified_base 13: mod_base = OTHER; note = 2'-O-methylcytidine-3'-phosphate
  modified_base 14: mod_base = OTHER; note = 2'-deoxy-2'-fluorouridine-3'-phosphate
  modified_base 15: mod_base = OTHER; note = 2'-O-methyluridine-3'-phosphate
  modified_base 16: mod_base = OTHER; note = 2'-deoxy-2'-fluorouridine-3'-phosphate
  modified_base 17: mod_base = OTHER; note = 2'-O-methyluridine-3'-phosphate
  modified_base 18: mod_base = OTHER; note = 2'-O-methyluridine-3'-phosphate
  modified_base 19: mod_base = OTHER; note = 2'-O-methyladenosine-3'-phosphate
  modified_base 20: mod_base = OTHER; note = 2'-O-methyladenosine-3'-phosphate
  modified_base 21: mod_base = OTHER; note = 2'-O-methyladenosine-3'-phosphate
  modified_base 22: mod_base = OTHER; note = 2'-O-methyladenosine-3'-phosphate
  modified_base 23: mod_base = OTHER; note = 2'-O-methyladenosine
ttcacataggctctttttaaaaa

SEQ ID NO: 5477 - RNA, 23 nt, synthetic construct
  source 1..23: mol_type = other RNA
  modified_base 1: mod_base = OTHER; note = 2'-O-methyluridine-3'-phosphate 5'-(E)-Vinylphosphonate
  modified_base 2: mod_base = OTHER; note = 2'-deoxy-2'-fluorouridine-3'-phosphate
  modified_base 3: mod_base = OTHER; note = 2'-O-methyluridine-3'-phosphate
  modified_base 4: mod_base = OTHER; note = 2'-O-methylcytidine-3'-phosphate
  modified_base 5: mod_base = OTHER; note = 2'-O-methyladenosine-3'-phosphate
  modified_base 6: mod_base = OTHER; note = 2'-deoxy-2'-fluorocytidine-3'-phosphate
  modified_base 7: mod_base = OTHER; note = 2'-O-methyladenosine-3'-phosphate
  modified_base 8: mod_base = OTHER; note = 2'-O-methyluridine-3'-phosphate
  modified_base 9: mod_base = OTHER; note = 2'-O-methyladenosine-3'-phosphate
  modified_base 10: mod_base = OTHER; note = 2'-O-methylguanosine-3'-phosphate
  modified_base 11: mod_base = OTHER; note = 2'-O-methylguanosine-3'-phosphate
  modified_base 12: mod_base = OTHER; note = 2'-O-methylcytidine-3'-phosphate
  modified_base 13: mod_base = OTHER; note = 2'-O-methyluridine-3'-phosphate
  modified_base 14: mod_base = OTHER; note = 2'-deoxy-2'-fluorocytidine-3'-phosphate
  modified_base 15: mod_base = OTHER; note = 2'-O-methyluridine-3'-phosphate
  modified_base 16: mod_base = OTHER; note = 2'-deoxy-2'-fluorouridine-3'-phosphate
  modified_base 17: mod_base = OTHER; note = 2'-O-methyluridine-3'-phosphate
  modified_base 18: mod_base = OTHER; note = 2'-O-methyluridine-3'-phosphate
  modified_base 19: mod_base = OTHER; note = 2'-O-methyluridine-3'-phosphate
  modified_base 20: mod_base = OTHER; note = 2'-O-methyladenosine-3'-phosphate
  modified_base 21: mod_base = OTHER; note = 2'-O-methyladenosine-3'-phosphate
  modified_base 22: mod_base = OTHER; note = 2'-O-methyladenosine-3'-phosphate
  modified_base 23: mod_base = OTHER; note = 2'-O-methyladenosine
tttcacataggctctttttaaaa

SEQ ID NO: 5478 - RNA, 23 nt, synthetic construct
  source 1..23: mol_type = other RNA
  modified_base 1: mod_base = OTHER; note = 2'-O-methyluridine-3'-phosphate 5'-(E)-Vinylphosphonate
  modified_base 2: mod_base = OTHER; note = 2'-deoxy-2'-fluorocytidine-3'-phosphate
  modified_base 3: mod_base = OTHER; note = 2'-O-methyluridine-3'-phosphate
  modified_base 4: mod_base = OTHER; note = 2'-O-methyluridine-3'-phosphate
  modified_base 5: mod_base = OTHER; note = 2'-O-methylcytidine-3'-phosphate
  modified_base 6: mod_base = OTHER; note = 2'-deoxy-2'-fluoroadenosine-3'-phosphate
  modified_base 7: mod_base = OTHER; note = 2'-O-methylcytidine-3'-phosphate
  modified_base 8: mod_base = OTHER; note = 2'-O-methyladenosine-3'-phosphate
  modified_base 9: mod_base = OTHER; note = 2'-O-methyluridine-3'-phosphate
  modified_base 10: mod_base = OTHER; note = 2'-O-methyladenosine-3'-phosphate
  modified_base 11: mod_base = OTHER; note = 2'-O-methylguanosine-3'-phosphate
  modified_base 12: mod_base = OTHER; note = 2'-O-methylguanosine-3'-phosphate
  modified_base 13: mod_base = OTHER; note = 2'-O-methylcytidine-3'-phosphate
  modified_base 14: mod_base = OTHER; note = 2'-deoxy-2'-fluorouridine-3'-phosphate
  modified_base 15: mod_base = OTHER; note = 2'-O-methylcytidine-3'-phosphate
  modified_base 16: mod_base = OTHER; note = 2'-deoxy-2'-fluorouridine-3'-phosphate
  modified_base 17: mod_base = OTHER; note = 2'-O-methyluridine-3'-phosphate
  modified_base 18: mod_base = OTHER; note = 2'-O-methyluridine-3'-phosphate
  modified_base 19: mod_base = OTHER; note = 2'-O-methyluridine-3'-phosphate
  modified_base 20: mod_base = OTHER; note = 2'-O-methyluridine-3'-phosphate
  modified_base 21: mod_base = OTHER; note = 2'-O-methyladenosine-3'-phosphate
  modified_base 22: mod_base = OTHER; note = 2'-O-methyladenosine-3'-phosphate
  modified_base 23: mod_base = OTHER; note = 2'-O-methyladenosine
tcttcacataggctctttttaaa

SEQ ID NO: 5479 - RNA, 23 nt, synthetic construct
  source 1..23: mol_type = other RNA
  modified_base 1: mod_base = OTHER; note = 2'-O-methyluridine-3'-phosphate 5'-(E)-Vinylphosphonate
  modified_base 2: mod_base = OTHER; note = 2'-deoxy-2'-fluorocytidine-3'-phosphate
  modified_base 3: mod_base = OTHER; note = 2'-O-methylcytidine-3'-phosphate
  modified_base 4: mod_base = OTHER; note = 2'-O-methyluridine-3'-phosphate
  modified_base 5: mod_base = OTHER; note = 2'-O-methyluridine-3'-phosphate
  modified_base 6: mod_base = OTHER; note = 2'-deoxy-2'-fluorocytidine-3'-phosphate
  modified_base 7: mod_base = OTHER; note = 2'-O-methyladenosine-3'-phosphate
  modified_base 8: mod_base = OTHER; note = 2'-O-methylcytidine-3'-phosphate
  modified_base 9: mod_base = OTHER; note = 2'-O-methyladenosine-3'-phosphate
  modified_base 10: mod_base = OTHER; note = 2'-O-methyluridine-3'-phosphate
  modified_base 11: mod_base = OTHER; note = 2'-O-methyladenosine-3'-phosphate
  modified_base 12: mod_base = OTHER; note = 2'-O-methylguanosine-3'-phosphate
  modified_base 13: mod_base = OTHER; note = 2'-O-methylguanosine-3'-phosphate
  modified_base 14: mod_base = OTHER; note = 2'-deoxy-2'-fluorocytidine-3'-phosphate
  modified_base 15: mod_base = OTHER; note = 2'-O-methyluridine-3'-phosphate
  modified_base 16: mod_base = OTHER; note = 2'-deoxy-2'-fluorocytidine-3'-phosphate
  modified_base 17: mod_base = OTHER; note = 2'-O-methyluridine-3'-phosphate
  modified_base 18: mod_base = OTHER; note = 2'-O-methyluridine-3'-phosphate
  modified_base 19: mod_base = OTHER; note = 2'-O-methyluridine-3'-phosphate
  modified_base 20: mod_base = OTHER; note = 2'-O-methyluridine-3'-phosphate
  modified_base 21: mod_base = OTHER; note = 2'-O-methyluridine-3'-phosphate
  modified_base 22: mod_base = OTHER; note = 2'-O-methyladenosine-3'-phosphate
  modified_base 23: mod_base = OTHER; note = 2'-O-methyladenosine
tccttcacataggctctttttaa

SEQ ID NO: 5480 - RNA, 23 nt, synthetic construct
  source 1..23: mol_type = other RNA
  modified_base 1: mod_base = OTHER; note = 2'-O-methyluridine-3'-phosphate 5'-(E)-Vinylphosphonate
  modified_base 2: mod_base = OTHER; note = 2'-deoxy-2'-fluoroadenosine-3'-phosphate
  modified_base 3: mod_base = OTHER; note = 2'-O-methylcytidine-3'-phosphate
  modified_base 4: mod_base = OTHER; note = 2'-O-methyladenosine-3'-phosphate
  modified_base 5: mod_base = OTHER; note = 2'-O-methyladenosine-3'-phosphate
  modified_base 6: mod_base = OTHER; note = 2'-deoxy-2'-fluoroguanosine-3'-phosphate
  modified_base 7: mod_base = OTHER; note = 2'-O-methyladenosine-3'-phosphate
  modified_base 8: mod_base = OTHER; note = 2'-O-methyladenosine-3'-phosphate
  modified_base 9: mod_base = OTHER; note = 2'-O-methylcytidine-3'-phosphate
  modified_base 10: mod_base = OTHER; note = 2'-O-methyladenosine-3'-phosphate
  modified_base 11: mod_base = OTHER; note = 2'-O-methyladenosine-3'-phosphate
  modified_base 12: mod_base = OTHER; note = 2'-O-methylguanosine-3'-phosphate
  modified_base 13: mod_base = OTHER; note = 2'-O-methylcytidine-3'-phosphate
  modified_base 14: mod_base = OTHER; note = 2'-deoxy-2'-fluoroadenosine-3'-phosphate
  modified_base 15: mod_base = OTHER; note = 2'-O-methyladenosine-3'-phosphate
  modified_base 16: mod_base = OTHER; note = 2'-deoxy-2'-fluoroguanosine-3'-phosphate
  modified_base 17: mod_base = OTHER; note = 2'-O-methyladenosine-3'-phosphate
  modified_base 18: mod_base = OTHER; note = 2'-O-methyluridine-3'-phosphate
  modified_base 19: mod_base = OTHER; note = 2'-O-methyluridine-3'-phosphate
  modified_base 20: mod_base = OTHER; note = 2'-O-methyladenosine-3'-phosphate
  modified_base 21: mod_base = OTHER; note = 2'-O-methylcytidine-3'-phosphate
  modified_base 22: mod_base = OTHER; note = 2'-O-methylcytidine-3'-phosphate
  modified_base 23: mod_base = OTHER; note = 2'-O-methylcytidine
tacaagaacaagcaagattaccc

SEQ ID NO: 5481 - RNA, 23 nt, synthetic construct
  source 1..23: mol_type = other RNA
  modified_base 1: mod_base = OTHER; note = 2'-O-methyluridine-3'-phosphate 5'-(E)-Vinylphosphonate
  modified_base 2: mod_base = OTHER; note = 2'-deoxy-2'-fluoroadenosine-3'-phosphate
  modified_base 3: mod_base = OTHER; note = 2'-O-methyladenosine-3'-phosphate
  modified_base 4: mod_base = OTHER; note = 2'-O-methylcytidine-3'-phosphate
  modified_base 5: mod_base = OTHER; note = 2'-O-methyladenosine-3'-phosphate
  modified_base 6: mod_base = OTHER; note = 2'-deoxy-2'-fluoroadenosine-3'-phosphate
  modified_base 7: mod_base = OTHER; note = 2'-O-methylguanosine-3'-phosphate
  modified_base 8: mod_base = OTHER; note = 2'-O-methyladenosine-3'-phosphate
  modified_base 9: mod_base = OTHER; note = 2'-O-methyladenosine-3'-phosphate
  modified_base 10: mod_base = OTHER; note = 2'-O-methylcytidine-3'-phosphate
  modified_base 11: mod_base = OTHER; note = 2'-O-methyladenosine-3'-phosphate
  modified_base 12: mod_base = OTHER; note = 2'-O-methyladenosine-3'-phosphate
  modified_base 13: mod_base = OTHER; note = 2'-O-methylguanosine-3'-phosphate
  modified_base 14: mod_base = OTHER; note = 2'-deoxy-2'-fluorocytidine-3'-phosphate
  modified_base 15: mod_base = OTHER; note = 2'-O-methyladenosine-3'-phosphate
  modified_base 16: mod_base = OTHER; note = 2'-deoxy-2'-fluoroadenosine-3'-phosphate
  modified_base 17: mod_base = OTHER; note = 2'-O-methylguanosine-3'-phosphate
  modified_base 18: mod_base = OTHER; note = 2'-O-methyladenosine-3'-phosphate
  modified_base 19: mod_base = OTHER; note = 2'-O-methyluridine-3'-phosphate
  modified_base 20: mod_base = OTHER; note = 2'-O-methyluridine-3'-phosphate
  modified_base 21: mod_base = OTHER; note = 2'-O-methyladenosine-3'-phosphate
  modified_base 22: mod_base = OTHER; note = 2'-O-methylcytidine-3'-phosphate
  modified_base 23: mod_base = OTHER; note = 2'-O-methylcytidine
taacaagaacaagcaagattacc

SEQ ID NO: 5482 - RNA, 23 nt, synthetic construct
  source 1..23: mol_type = other RNA
  modified_base 1: mod_base = OTHER; note = 2'-O-methyluridine-3'-phosphate 5'-(E)-Vinylphosphonate
  modified_base 2: mod_base = OTHER; note = 2'-deoxy-2'-fluorouridine-3'-phosphate
  modified_base 3: mod_base = OTHER; note = 2'-O-methyladenosine-3'-phosphate
  modified_base 4: mod_base = OTHER; note = 2'-O-methyladenosine-3'-phosphate
  modified_base 5: mod_base = OTHER; note = 2'-O-methylcytidine-3'-phosphate
  modified_base 6: mod_base = OTHER; note = 2'-deoxy-2'-fluoroadenosine-3'-phosphate
  modified_base 7: mod_base = OTHER; note = 2'-O-methyladenosine-3'-phosphate
  modified_base 8: mod_base = OTHER; note = 2'-O-methylguanosine-3'-phosphate
  modified_base 9: mod_base = OTHER; note = 2'-O-methyladenosine-3'-phosphate
  modified_base 10: mod_base = OTHER; note = 2'-O-methyladenosine-3'-phosphate
  modified_base 11: mod_base = OTHER; note = 2'-O-methylcytidine-3'-phosphate
  modified_base 12: mod_base = OTHER; note = 2'-O-methyladenosine-3'-phosphate
  modified_base 13: mod_base = OTHER; note = 2'-O-methyladenosine-3'-phosphate
  modified_base 14: mod_base = OTHER; note = 2'-deoxy-2'-fluoroguanosine-3'-phosphate
  modified_base 15: mod_base = OTHER; note = 2'-O-methylcytidine-3'-phosphate
  modified_base 16: mod_base = OTHER; note = 2'-deoxy-2'-fluoroadenosine-3'-phosphate
  modified_base 17: mod_base = OTHER; note = 2'-O-methyladenosine-3'-phosphate
  modified_base 18: mod_base = OTHER; note = 2'-O-methylguanosine-3'-phosphate
  modified_base 19: mod_base = OTHER; note = 2'-O-methyladenosine-3'-phosphate
  modified_base 20: mod_base = OTHER; note = 2'-O-methyluridine-3'-phosphate
  modified_base 21: mod_base = OTHER; note = 2'-O-methyluridine-3'-phosphate
  modified_base 22: mod_base = OTHER; note = 2'-O-methyladenosine-3'-phosphate
  modified_base 23: mod_base = OTHER; note = 2'-O-methylcytidine
ttaacaagaacaagcaagattac

SEQ ID NO: 5483 - RNA, 23 nt, synthetic construct
  source 1..23: mol_type = other RNA
  modified_base 1: mod_base = OTHER; note = 2'-O-methyluridine-3'-phosphate 5'-(E)-Vinylphosphonate
  modified_base 2: mod_base = OTHER; note = 2'-deoxy-2'-fluoroguanosine-3'-phosphate
  modified_base 3: mod_base = OTHER; note = 2'-O-methyluridine-3'-phosphate
  modified_base 4: mod_base = OTHER; note = 2'-O-methyladenosine-3'-phosphate
  modified_base 5: mod_base = OTHER; note = 2'-O-methyladenosine-3'-phosphate
  modified_base 6: mod_base = OTHER; note = 2'-deoxy-2'-fluorocytidine-3'-phosphate
  modified_base 7: mod_base = OTHER; note = 2'-O-methyladenosine-3'-phosphate
  modified_base 8: mod_base = OTHER; note = 2'-O-methyladenosine-3'-phosphate
  modified_base 9: mod_base = OTHER; note = 2'-O-methylguanosine-3'-phosphate
  modified_base 10: mod_base = OTHER; note = 2'-O-methyladenosine-3'-phosphate
  modified_base 11: mod_base = OTHER; note = 2'-O-methyladenosine-3'-phosphate
  modified_base 12: mod_base = OTHER; note = 2'-O-methylcytidine-3'-phosphate
  modified_base 13: mod_base = OTHER; note = 2'-O-methyladenosine-3'-phosphate
  modified_base 14: mod_base = OTHER; note = 2'-deoxy-2'-fluoroadenosine-3'-phosphate
  modified_base 15: mod_base = OTHER; note = 2'-O-methylguanosine-3'-phosphate
  modified_base 16: mod_base = OTHER; note = 2'-deoxy-2'-fluorocytidine-3'-phosphate
  modified_base 17: mod_base = OTHER; note = 2'-O-methyladenosine-3'-phosphate
  modified_base 18: mod_base = OTHER; note = 2'-O-methyladenosine-3'-phosphate
  modified_base 19: mod_base = OTHER; note = 2'-O-methylguanosine-3'-phosphate
  modified_base 20: mod_base = OTHER; note = 2'-O-methyladenosine-3'-phosphate
  modified_base 21: mod_base = OTHER; note = 2'-O-methyluridine-3'-phosphate
  modified_base 22: mod_base = OTHER; note = 2'-O-methyluridine-3'-phosphate
  modified_base 23: mod_base = OTHER; note = 2'-O-methyladenosine
tgtaacaagaacaagcaagatta

SEQ ID NO: 5484 - RNA, 23 nt, synthetic construct
  source 1..23: mol_type = other RNA
  modified_base 1: mod_base = OTHER; note = 2'-O-methyluridine-3'-phosphate 5'-(E)-Vinylphosphonate
  modified_base 2: mod_base = OTHER; note = 2'-deoxy-2'-fluoroadenosine-3'-phosphate
  modified_base 3: mod_base = OTHER; note = 2'-O-methylguanosine-3'-phosphate
  modified_base 4: mod_base = OTHER; note = 2'-O-methyluridine-3'-phosphate
  modified_base 5: mod_base = OTHER; note = 2'-O-methyladenosine-3'-phosphate
  modified_base 6: mod_base = OTHER; note = 2'-deoxy-2'-fluoroadenosine-3'-phosphate
  modified_base 7: mod_base = OTHER; note = 2'-O-methylcytidine-3'-phosphate
  modified_base 8: mod_base = OTHER; note = 2'-O-methyladenosine-3'-phosphate
  modified_base 9: mod_base = OTHER; note = 2'-O-methyladenosine-3'-phosphate
  modified_base 10: mod_base = OTHER; note = 2'-O-methylguanosine-3'-phosphate
  modified_base 11: mod_base = OTHER; note = 2'-O-methyladenosine-3'-phosphate
  modified_base 12: mod_base = OTHER; note = 2'-O-methyladenosine-3'-phosphate
  modified_base 13: mod_base = OTHER; note = 2'-O-methylcytidine-3'-phosphate
  modified_base 14: mod_base = OTHER; note = 2'-deoxy-2'-fluoroadenosine-3'-phosphate
  modified_base 15: mod_base = OTHER; note = 2'-O-methyladenosine-3'-phosphate
  modified_base 16: mod_base = OTHER; note = 2'-deoxy-2'-fluoroguanosine-3'-phosphate
  modified_base 17: mod_base = OTHER; note = 2'-O-methylcytidine-3'-phosphate
  modified_base 18: mod_base = OTHER; note = 2'-O-methyladenosine-3'-phosphate
  modified_base 19: mod_base = OTHER; note = 2'-O-methyladenosine-3'-phosphate
  modified_base 20: mod_base = OTHER; note = 2'-O-methylguanosine-3'-phosphate
  modified_base 21: mod_base = OTHER; note = 2'-O-methyladenosine-3'-phosphate
  modified_base 22: mod_base = OTHER; note = 2'-O-methyluridine-3'-phosphate
  modified_base 23: mod_base = OTHER; note = 2'-O-methyluridine
tagtaacaagaacaagcaagatt

SEQ ID NO: 5485 - RNA, 23 nt, synthetic construct
  source 1..23: mol_type = other RNA
  modified_base 1: mod_base = OTHER; note = 2'-O-methyluridine-3'-phosphate 5'-(E)-Vinylphosphonate
  modified_base 2: mod_base = OTHER; note = 2'-deoxy-2'-fluorouridine-3'-phosphate
  modified_base 3: mod_base = OTHER; note = 2'-O-methyladenosine-3'-phosphate
  modified_base 4: mod_base = OTHER; note = 2'-O-methylguanosine-3'-phosphate
  modified_base 5: mod_base = OTHER; note = 2'-O-methyluridine-3'-phosphate
  modified_base 6: mod_base = OTHER; note = 2'-deoxy-2'-fluoroadenosine-3'-phosphate
  modified_base 7: mod_base = OTHER; note = 2'-O-methyladenosine-3'-phosphate
  modified_base 8: mod_base = OTHER; note = 2'-O-methylcytidine-3'-phosphate
  modified_base 9: mod_base = OTHER; note = 2'-O-methyladenosine-3'-phosphate
  modified_base 10: mod_base = OTHER; note = 2'-O-methyladenosine-3'-phosphate
  modified_base 11: mod_base = OTHER; note = 2'-O-methylguanosine-3'-phosphate
  modified_base 12: mod_base = OTHER; note = 2'-O-methyladenosine-3'-phosphate
  modified_base 13: mod_base = OTHER; note = 2'-O-methyladenosine-3'-phosphate
  modified_base 14: mod_base = OTHER; note = 2'-deoxy-2'-fluorocytidine-3'-phosphate
  modified_base 15: mod_base = OTHER; note = 2'-O-methyladenosine-3'-phosphate
  modified_base 16: mod_base = OTHER; note = 2'-deoxy-2'-fluoroadenosine-3'-phosphate
  modified_base 17: mod_base = OTHER; note = 2'-O-methylguanosine-3'-phosphate
  modified_base 18: mod_base = OTHER; note = 2'-O-methylcytidine-3'-phosphate
  modified_base 19: mod_base = OTHER; note = 2'-O-methyladenosine-3'-phosphate
  modified_base 20: mod_base = OTHER; note = 2'-O-methyladenosine-3'-phosphate
  modified_base 21: mod_base = OTHER; note = 2'-O-methylguanosine-3'-phosphate
  modified_base 22: mod_base = OTHER; note = 2'-O-methyladenosine-3'-phosphate
  modified_base 23: mod_base = OTHER; note = 2'-O-methyluridine
ttagtaacaagaacaagcaagat

SEQ ID NO: 5486 - RNA, 23 nt, synthetic construct
  source 1..23: mol_type = other RNA
  modified_base 1: mod_base = OTHER; note = 2'-O-methyluridine-3'-phosphate 5'-(E)-Vinylphosphonate
  modified_base 2: mod_base = OTHER; note = 2'-deoxy-2'-fluorouridine-3'-phosphate
  modified_base 3: mod_base = OTHER; note = 2'-O-methyluridine-3'-phosphate
  modified_base 4: mod_base = OTHER; note = 2'-O-methyladenosine-3'-phosphate
  modified_base 5: mod_base = OTHER; note = 2'-O-methylguanosine-3'-phosphate
  modified_base 6: mod_base = OTHER; note = 2'-deoxy-2'-fluorouridine-3'-phosphate
  modified_base 7: mod_base = OTHER; note = 2'-O-methyladenosine-3'-phosphate
  modified_base 8: mod_base = OTHER; note = 2'-O-methyladenosine-3'-phosphate
  modified_base 9: mod_base = OTHER; note = 2'-O-methylcytidine-3'-phosphate
  modified_base 10: mod_base = OTHER; note = 2'-O-methyladenosine-3'-phosphate
  modified_base 11: mod_base = OTHER; note = 2'-O-methyladenosine-3'-phosphate
  modified_base 12: mod_base = OTHER; note = 2'-O-methylguanosine-3'-phosphate
  modified_base 13: mod_base = OTHER; note = 2'-O-methyladenosine-3'-phosphate
  modified_base 14: mod_base = OTHER; note = 2'-deoxy-2'-fluoroadenosine-3'-phosphate
  modified_base 15: mod_base = OTHER; note = 2'-O-methylcytidine-3'-phosphate
  modified_base 16: mod_base = OTHER; note = 2'-deoxy-2'-fluoroadenosine-3'-phosphate
  modified_base 17: mod_base = OTHER; note = 2'-O-methyladenosine-3'-phosphate
  modified_base 18: mod_base = OTHER; note = 2'-O-methylguanosine-3'-phosphate
  modified_base 19: mod_base = OTHER; note = 2'-O-methylcytidine-3'-phosphate
  modified_base 20: mod_base = OTHER; note = 2'-O-methyladenosine-3'-phosphate
  modified_base 21: mod_base = OTHER; note = 2'-O-methyladenosine-3'-phosphate
  modified_base 22: mod_base = OTHER; note = 2'-O-methylguanosine-3'-phosphate
  modified_base 23: mod_base = OTHER; note = 2'-O-methyladenosine
tttagtaacaagaacaagcaaga

SEQ ID NO: 5487 - RNA, 23 nt, synthetic construct
  source 1..23: mol_type = other RNA
  modified_base 1: mod_base = OTHER; note = 2'-O-methyluridine-3'-phosphate 5'-(E)-Vinylphosphonate
  modified_base 2: mod_base = OTHER; note = 2'-deoxy-2'-fluoroadenosine-3'-phosphate
  modified_base 3: mod_base = OTHER; note = 2'-O-methyluridine-3'-phosphate
  modified_base 4: mod_base = OTHER; note = 2'-O-methyluridine-3'-phosphate
  modified_base 5: mod_base = OTHER; note = 2'-O-methyladenosine-3'-phosphate
  modified_base 6: mod_base = OTHER; note = 2'-deoxy-2'-fluoroguanosine-3'-phosphate
  modified_base 7: mod_base = OTHER; note = 2'-O-methyluridine-3'-phosphate
  modified_base 8: mod_base = OTHER; note = 2'-O-methyladenosine-3'-phosphate
  modified_base 9: mod_base = OTHER; note = 2'-O-methyladenosine-3'-phosphate
  modified_base 10: mod_base = OTHER; note = 2'-O-methylcytidine-3'-phosphate
  modified_base 11: mod_base = OTHER; note = 2'-O-methyladenosine-3'-phosphate
  modified_base 12: mod_base = OTHER; note = 2'-O-methyladenosine-3'-phosphate
  modified_base 13: mod_base = OTHER; note = 2'-O-methylguanosine-3'-phosphate
  modified_base 14: mod_base = OTHER; note = 2'-deoxy-2'-fluoroadenosine-3'-phosphate
  modified_base 15: mod_base = OTHER; note = 2'-O-methyladenosine-3'-phosphate
  modified_base 16: mod_base = OTHER; note = 2'-deoxy-2'-fluorocytidine-3'-phosphate
  modified_base 17: mod_base = OTHER; note = 2'-O-methyladenosine-3'-phosphate
  modified_base 18: mod_base = OTHER; note = 2'-O-methyladenosine-3'-phosphate
  modified_base 19: mod_base = OTHER; note = 2'-O-methylguanosine-3'-phosphate
  modified_base 20: mod_base = OTHER; note = 2'-O-methylcytidine-3'-phosphate
  modified_base 21: mod_base = OTHER; note = 2'-O-methyladenosine-3'-phosphate
  modified_base 22: mod_base = OTHER; note = 2'-O-methyladenosine-3'-phosphate
  modified_base 23: mod_base = OTHER; note = 2'-O-methylguanosine
tattagtaacaagaacaagcaag

SEQ ID NO: 5488 - RNA, 23 nt, synthetic construct
  source 1..23: mol_type = other RNA
  modified_base 1: mod_base = OTHER; note = 2'-O-methyluridine-3'-phosphate 5'-(E)-Vinylphosphonate
  modified_base 2: mod_base = OTHER; note = 2'-deoxy-2'-fluoroadenosine-3'-phosphate
  modified_base 3: mod_base = OTHER; note = 2'-O-methyladenosine-3'-phosphate
  modified_base 4: mod_base = OTHER; note = 2'-O-methyluridine-3'-phosphate
  modified_base 5: mod_base = OTHER; note = 2'-O-methyluridine-3'-phosphate
  modified_base 6: mod_base = OTHER; note = 2'-deoxy-2'-fluoroadenosine-3'-phosphate
  modified_base 7: mod_base = OTHER; note = 2'-O-methylguanosine-3'-phosphate
  modified_base 8: mod_base = OTHER; note = 2'-O-methyluridine-3'-phosphate
  modified_base 9: mod_base = OTHER; note = 2'-O-methyladenosine-3'-phosphate
  modified_base 10: mod_base = OTHER; note = 2'-O-methyladenosine-3'-phosphate
  modified_base 11: mod_base = OTHER; note = 2'-O-methylcytidine-3'-phosphate
  modified_base 12: mod_base = OTHER; note = 2'-O-methyladenosine-3'-phosphate
  modified_base 13: mod_base = OTHER; note = 2'-O-methyladenosine-3'-phosphate
  modified_base 14: mod_base = OTHER; note = 2'-deoxy-2'-fluoroguanosine-3'-phosphate
  modified_base 15: mod_base = OTHER; note = 2'-O-methyladenosine-3'-phosphate
  modified_base 16: mod_base = OTHER; note = 2'-deoxy-2'-fluoroadenosine-3'-phosphate
  modified_base 17: mod_base = OTHER; note = 2'-O-methylcytidine-3'-phosphate
  modified_base 18: mod_base = OTHER; note = 2'-O-methyladenosine-3'-phosphate
  modified_base 19: mod_base = OTHER; note = 2'-O-methyladenosine-3'-phosphate
  modified_base 20: mod_base = OTHER; note = 2'-O-methylguanosine-3'-phosphate
  modified_base 21: mod_base = OTHER; note = 2'-O-methylcytidine-3'-phosphate
  modified_base 22: mod_base = OTHER; note = 2'-O-methyladenosine-3'-phosphate
  modified_base 23: mod_base = OTHER; note = 2'-O-methyladenosine
taattagtaacaagaacaagcaa

SEQ ID NO: 5489 - RNA, 23 nt, synthetic construct
  source 1..23: mol_type = other RNA
  modified_base 1: mod_base = OTHER; note = 2'-O-methyluridine-3'-phosphate 5'-(E)-Vinylphosphonate
  modified_base 2: mod_base = OTHER; note = 2'-deoxy-2'-fluoroadenosine-3'-phosphate
  modified_base 3: mod_base = OTHER; note = 2'-O-methyladenosine-3'-phosphate
  modified_base 4: mod_base = OTHER; note = 2'-O-methyladenosine-3'-phosphate
  modified_base 5: mod_base = OTHER; note = 2'-O-methyluridine-3'-phosphate
  modified_base 6: mod_base = OTHER; note = 2'-deoxy-2'-fluorouridine-3'-phosphate
  modified_base 7: mod_base = OTHER; note = 2'-O-methyladenosine-3'-phosphate
  modified_base 8: mod_base = OTHER; note = 2'-O-methylguanosine-3'-phosphate
  modified_base 9: mod_base = OTHER; note = 2'-O-methyluridine-3'-phosphate
  modified_base 10: mod_base = OTHER; note = 2'-O-methyladenosine-3'-phosphate
  modified_base 11: mod_base = OTHER; note = 2'-O-methyladenosine-3'-phosphate
  modified_base 12: mod_base = OTHER; note = 2'-O-methylcytidine-3'-phosphate
  modified_base 13: mod_base = OTHER; note = 2'-O-methyladenosine-3'-phosphate
  modified_base 14: mod_base = OTHER; note = 2'-deoxy-2'-fluoroadenosine-3'-phosphate
  modified_base 15: mod_base = OTHER; note = 2'-O-methylguanosine-3'-phosphate
  modified_base 16: mod_base = OTHER; note = 2'-deoxy-2'-fluoroadenosine-3'-phosphate
  modified_base 17: mod_base = OTHER; note = 2'-O-methyladenosine-3'-phosphate
  modified_base 18: mod_base = OTHER; note = 2'-O-methylcytidine-3'-phosphate
  modified_base 19: mod_base = OTHER; note = 2'-O-methyladenosine-3'-phosphate
  modified_base 20: mod_base = OTHER; note = 2'-O-methyladenosine-3'-phosphate
  modified_base 21: mod_base = OTHER; note = 2'-O-methylguanosine-3'-phosphate
  modified_base 22: mod_base = OTHER; note = 2'-O-methylcytidine-3'-phosphate
  modified_base 23: mod_base = OTHER; note = 2'-O-methyladenosine
taaattagtaacaagaacaagca

SEQ ID NO: 5490 - RNA, 23 nt, synthetic construct
  source 1..23: mol_type = other RNA
  modified_base 1: mod_base = OTHER; note = 2'-O-methyluridine-3'-phosphate 5'-(E)-Vinylphosphonate
  modified_base 2: mod_base = OTHER; note = 2'-deoxy-2'-fluoroguanosine-3'-phosphate
  modified_base 3: mod_base = OTHER; note = 2'-O-methyladenosine-3'-phosphate
  modified_base 4: mod_base = OTHER; note = 2'-O-methyladenosine-3'-phosphate
  modified_base 5: mod_base = OTHER; note = 2'-O-methyladenosine-3'-phosphate
  modified_base 6: mod_base = OTHER; note = 2'-deoxy-2'-fluorouridine-3'-phosphate
  modified_base 7: mod_base = OTHER; note = 2'-O-methyluridine-3'-phosphate
  modified_base 8: mod_base = OTHER; note = 2'-O-methyladenosine-3'-phosphate
  modified_base 9: mod_base = OTHER; note = 2'-O-methylguanosine-3'-phosphate
  modified_base 10: mod_base = OTHER; note = 2'-O-methyluridine-3'-phosphate
  modified_base 11: mod_base = OTHER; note = 2'-O-methyladenosine-3'-phosphate
  modified_base 12: mod_base = OTHER; note = 2'-O-methyladenosine-3'-phosphate
  modified_base 13: mod_base = OTHER; note = 2'-O-methylcytidine-3'-phosphate
  modified_base 14: mod_base = OTHER; note = 2'-deoxy-2'-fluoroadenosine-3'-phosphate
  modified_base 15: mod_base = OTHER; note = 2'-O-methyladenosine-3'-phosphate
  modified_base 16: mod_base = OTHER; note = 2'-deoxy-2'-fluoroguanosine-3'-phosphate
  modified_base 17: mod_base = OTHER; note = 2'-O-methyladenosine-3'-phosphate
  modified_base 18: mod_base = OTHER; note = 2'-O-methyladenosine-3'-phosphate
  modified_base 19: mod_base = OTHER; note = 2'-O-methylcytidine-3'-phosphate
  modified_base 20: mod_base = OTHER; note = 2'-O-methyladenosine-3'-phosphate
  modified_base 21: mod_base = OTHER; note = 2'-O-methyladenosine-3'-phosphate
  modified_base 22: mod_base = OTHER; note = 2'-O-methylguanosine-3'-phosphate
  modified_base 23: mod_base = OTHER; note = 2'-O-methylcytidine
tgaaattagtaacaagaacaagc

SEQ ID NO: 5491 - RNA, 23 nt, synthetic construct
  source 1..23: mol_type = other RNA
  modified_base 1: mod_base = OTHER; note = 2'-O-methyluridine-3'-phosphate 5'-(E)-Vinylphosphonate
  modified_base 2: mod_base = OTHER; note = 2'-deoxy-2'-fluorouridine-3'-phosphate
  modified_base 3: mod_base = OTHER; note = 2'-O-methyluridine-3'-phosphate
  modified_base 4: mod_base = OTHER; note = 2'-O-methylcytidine-3'-phosphate
  modified_base 5: mod_base = OTHER; note = 2'-O-methylguanosine-3'-phosphate
  modified_base 6: mod_base = OTHER; note = 2'-deoxy-2'-fluorouridine-3'-phosphate
  modified_base 7: mod_base = OTHER; note = 2'-O-methyluridine-3'-phosphate
  modified_base 8: mod_base = OTHER; note = 2'-O-methylcytidine-3'-phosphate
  modified_base 9: mod_base = OTHER; note = 2'-O-methyluridine-3'-phosphate
  modified_base 10: mod_base = OTHER; note = 2'-O-methyluridine-3'-phosphate
  modified_base 11: mod_base = OTHER; note = 2'-O-methyladenosine-3'-phosphate
  modified_base 12: mod_base = OTHER; note = 2'-O-methyluridine-3'-phosphate
  modified_base 13: mod_base = OTHER; note = 2'-O-methyladenosine-3'-phosphate
  modified_base 14: mod_base = OTHER; note = 2'-deoxy-2'-fluorouridine-3'-phosphate
  modified_base 15: mod_base = OTHER; note = 2'-O-methyladenosine-3'-phosphate
  modified_base 16: mod_base = OTHER; note = 2'-deoxy-2'-fluorouridine-3'-phosphate
  modified_base 17: mod_base = OTHER; note = 2'-O-methylguanosine-3'-phosphate
  modified_base 18: mod_base = OTHER; note = 2'-O-methylcytidine-3'-phosphate
  modified_base 19: mod_base = OTHER; note = 2'-O-methyladenosine-3'-phosphate
  modified_base 20: mod_base = OTHER; note = 2'-O-methylguanosine-3'-phosphate
  modified_base 21: mod_base = OTHER; note = 2'-O-methyladenosine-3'-phosphate
  modified_base 22: mod_base = OTHER; note = 2'-O-methyladenosine-3'-phosphate
  modified_base 23: mod_base = OTHER; note = 2'-O-methyladenosine
tttcgttcttatatatgcagaaa

SEQ ID NO: 5492 - RNA, 23 nt, synthetic construct
  source 1..23: mol_type = other RNA
  modified_base 1: mod_base = OTHER; note = 2'-O-methyluridine-3'-phosphate 5'-(E)-Vinylphosphonate
  modified_base 2: mod_base = OTHER; note = 2'-deoxy-2'-fluorouridine-3'-phosphate
  modified_base 3: mod_base = OTHER; note = 2'-O-methyluridine-3'-phosphate
  modified_base 4: mod_base = OTHER; note = 2'-O-methyluridine-3'-phosphate
  modified_base 5: mod_base = OTHER; note = 2'-O-methyladenosine-3'-phosphate
  modified_base 6: mod_base = OTHER; note = 2'-deoxy-2'-fluorouridine-3'-phosphate
  modified_base 7: mod_base = OTHER; note = 2'-O-methyluridine-3'-phosphate
  modified_base 8: mod_base = OTHER; note = 2'-O-methyluridine-3'-phosphate
  modified_base 9: mod_base = OTHER; note = 2'-O-methylguanosine-3'-phosphate
  modified_base 10: mod_base = OTHER; note = 2'-O-methyladenosine-3'-phosphate
  modified_base 11: mod_base = OTHER; note = 2'-O-methylguanosine-3'-phosphate
  modified_base 12: mod_base = OTHER; note = 2'-O-methylguanosine-3'-phosphate
  modified_base 13: mod_base = OTHER; note = 2'-O-methylcytidine-3'-phosphate
  modified_base 14: mod_base = OTHER; note = 2'-deoxy-2'-fluoroadenosine-3'-phosphate
  modified_base 15: mod_base = OTHER; note = 2'-O-methylcytidine-3'-phosphate
  modified_base 16: mod_base = OTHER; note = 2'-deoxy-2'-fluoroguanosine-3'-phosphate
  modified_base 17: mod_base = OTHER; note = 2'-O-methyluridine-3'-phosphate
  modified_base 18: mod_base = OTHER; note = 2'-O-methyladenosine-3'-phosphate
  modified_base 19: mod_base = OTHER; note = 2'-O-methylcytidine-3'-phosphate
  modified_base 20: mod_base = OTHER; note = 2'-O-methyladenosine-3'-phosphate
  modified_base 21: mod_base = OTHER; note = 2'-O-methyladenosine-3'-phosphate
  modified_base 22: mod_base = OTHER; note = 2'-O-methylcytidine-3'-phosphate
  modified_base 23: mod_base = OTHER; note = 2'-O-methylcytidine
ttttatttgaggcacgtacaacc

SEQ ID NO: 5493 - RNA, 23 nt, synthetic construct
  source 1..23: mol_type = other RNA
  modified_base 1: mod_base = OTHER; note = 2'-O-methyluridine-3'-phosphate 5'-(E)-Vinylphosphonate
  modified_base 2: mod_base = OTHER; note = 2'-deoxy-2'-fluoroadenosine-3'-phosphate
  modified_base 3: mod_base = OTHER; note = 2'-O-methyluridine-3'-phosphate
  modified_base 4: mod_base = OTHER; note = 2'-O-methyluridine-3'-phosphate
  modified_base 5: mod_base = OTHER; note = 2'-O-methylcytidine-3'-phosphate
  modified_base 6: mod_base = OTHER; note = 2'-deoxy-2'-fluorouridine-3'-phosphate
  modified_base 7: mod_base = OTHER; note = 2'-O-methyluridine-3'-phosphate
  modified_base 8: mod_base = OTHER; note = 2'-O-methylguanosine-3'-phosphate
  modified_base 9: mod_base = OTHER; note = 2'-O-methyluridine-3'-phosphate
  modified_base 10: mod_base = OTHER; note = 2'-O-methyluridine-3'-phosphate
  modified_base 11: mod_base = OTHER; note = 2'-O-methyluridine-3'-phosphate
  modified_base 12: mod_base = OTHER; note = 2'-O-methyladenosine-3'-phosphate
  modified_base 13: mod_base = OTHER; note = 2'-O-methyluridine-3'-phosphate
  modified_base 14: mod_base = OTHER; note = 2'-deoxy-2'-fluorouridine-3'-phosphate
  modified_base 15: mod_base = OTHER; note = 2'-O-methyluridine-3'-phosphate
  modified_base 16: mod_base = OTHER; note = 2'-deoxy-2'-fluoroguanosine-3'-phosphate
  modified_base 17: mod_base = OTHER; note = 2'-O-methyladenosine-3'-phosphate
  modified_base 18: mod_base = OTHER; note = 2'-O-methylguanosine-3'-phosphate
  modified_base 19: mod_base = OTHER; note = 2'-O-methylguanosine-3'-phosphate
  modified_base 20: mod_base = OTHER; note = 2'-O-methylcytidine-3'-phosphate
  modified_base 21: mod_base = OTHER; note = 2'-O-methyladenosine-3'-phosphate
  modified_base 22: mod_base = OTHER; note = 2'-O-methylcytidine-3'-phosphate
  modified_base 23: mod_base = OTHER; note = 2'-O-methylguanosine
tattcttgtttatttgaggcacg

SEQ ID NO: 5494 - RNA, 23 nt, synthetic construct
  source 1..23: mol_type = other RNA
  modified_base 1: mod_base = OTHER; note = 2'-O-methyluridine-3'-phosphate 5'-(E)-Vinylphosphonate
  modified_base 2: mod_base = OTHER; note = 2'-deoxy-2'-fluorocytidine-3'-phosphate
  modified_base 3: mod_base = OTHER; note = 2'-O-methyladenosine-3'-phosphate
  modified_base 4: mod_base = OTHER; note = 2'-O-methyluridine-3'-phosphate
  modified_base 5: mod_base = OTHER; note = 2'-O-methyluridine-3'-phosphate
  modified_base 6: mod_base = OTHER; note = 2'-deoxy-2'-fluorocytidine-3'-phosphate
  modified_base 7: mod_base = OTHER; note = 2'-O-methyluridine-3'-phosphate
  modified_base 8: mod_base = OTHER; note = 2'-O-methyluridine-3'-phosphate
  modified_base 9: mod_base = OTHER; note = 2'-O-methylguanosine-3'-phosphate
  modified_base 10: mod_base = OTHER; note = 2'-O-methyluridine-3'-phosphate
  modified_base 11: mod_base = OTHER; note = 2'-O-methyluridine-3'-phosphate
  modified_base 12: mod_base = OTHER; note = 2'-O-methyluridine-3'-phosphate
  modified_base 13: mod_base = OTHER; note = 2'-O-methyladenosine-3'-phosphate
  modified_base 14: mod_base = OTHER; note = 2'-deoxy-2'-fluorouridine-3'-phosphate
  modified_base 15: mod_base = OTHER; note = 2'-O-methyluridine-3'-phosphate
  modified_base 16: mod_base = OTHER; note = 2'-deoxy-2'-fluorouridine-3'-phosphate
  modified_base 17: mod_base = OTHER; note = 2'-O-methylguanosine-3'-phosphate
  modified_base 18: mod_base = OTHER; note = 2'-O-methyladenosine-3'-phosphate
  modified_base 19: mod_base = OTHER; note = 2'-O-methylguanosine-3'-phosphate
  modified_base 20: mod_base = OTHER; note = 2'-O-methylguanosine-3'-phosphate
  modified_base 21: mod_base = OTHER; note = 2'-O-methylcytidine-3'-phosphate
  modified_base 22: mod_base = OTHER; note = 2'-O-methyladenosine-3'-phosphate
  modified_base 23: mod_base = OTHER; note = 2'-O-methylcytidine
tcattcttgtttatttgaggcac

SEQ ID NO: 5495 - RNA, 23 nt, synthetic construct
  source 1..23: mol_type = other RNA
  modified_base 1: mod_base = OTHER; note = 2'-O-methyluridine-3'-phosphate 5'-(E)-Vinylphosphonate
  modified_base 2: mod_base = OTHER; note = 2'-deoxy-2'-fluorouridine-3'-phosphate
  modified_base 3: mod_base = OTHER; note = 2'-O-methylcytidine-3'-phosphate
  modified_base 4: mod_base = OTHER; note = 2'-O-methyladenosine-3'-phosphate
  modified_base 5: mod_base = OTHER; note = 2'-O-methyluridine-3'-phosphate
  modified_base 6: mod_base = OTHER; note = 2'-deoxy-2'-fluorouridine-3'-phosphate
  modified_base 7: mod_base = OTHER; note = 2'-O-methylcytidine-3'-phosphate
  modified_base 8: mod_base = OTHER; note = 2'-O-methyluridine-3'-phosphate
  modified_base 9: mod_base = OTHER; note = 2'-O-methyluridine-3'-phosphate
  modified_base 10: mod_base = OTHER; note = 2'-O-methylguanosine-3'-phosphate
  modified_base 11: mod_base = OTHER; note = 2'-O-methyluridine-3'-phosphate
  modified_base 12: mod_base = OTHER; note = 2'-O-methyluridine-3'-phosphate
  modified_base 13: mod_base = OTHER; note = 2'-O-methyluridine-3'-phosphate
  modified_base 14: mod_base = OTHER; note = 2'-deoxy-2'-fluoroadenosine-3'-phosphate
  modified_base 15: mod_base = OTHER; note = 2'-O-methyluridine-3'-phosphate
  modified_base 16: mod_base = OTHER; note = 2'-deoxy-2'-fluorouridine-3'-phosphate
  modified_base 17: mod_base = OTHER; note = 2'-O-methyluridine-3'-phosphate
  modified_base 18: mod_base = OTHER; note = 2'-O-methylguanosine-3'-phosphate
  modified_base 19: mod_base = OTHER; note = 2'-O-methyladenosine-3'-phosphate
  modified_base 20: mod_base = OTHER; note = 2'-O-methylguanosine-3'-phosphate
  modified_base 21: mod_base = OTHER; note = 2'-O-methylguanosine-3'-phosphate
  modified_base 22: mod_base = OTHER; note = 2'-O-methylcytidine-3'-phosphate
  modified_base 23: mod_base = OTHER; note = 2'-O-methyladenosine
ttcattcttgtttatttgaggca

SEQ ID NO: 5496 - RNA, 23 nt, synthetic construct
  source 1..23: mol_type = other RNA
  modified_base 1: mod_base = OTHER; note = 2'-O-methyluridine-3'-phosphate 5'-(E)-Vinylphosphonate
  modified_base 2: mod_base = OTHER; note = 2'-deoxy-2'-fluoroadenosine-3'-phosphate
  modified_base 3: mod_base = OTHER; note = 2'-O-methyluridine-3'-phosphate
  modified_base 4: mod_base = OTHER; note = 2'-O-methylcytidine-3'-phosphate
  modified_base 5: mod_base = OTHER; note = 2'-O-methyladenosine-3'-phosphate
  modified_base 6: mod_base = OTHER; note = 2'-deoxy-2'-fluorouridine-3'-phosphate
  modified_base 7: mod_base = OTHER; note = 2'-O-methyluridine-3'-phosphate
  modified_base 8: mod_base = OTHER; note = 2'-O-methylcytidine-3'-phosphate
  modified_base 9: mod_base = OTHER; note = 2'-O-methyluridine-3'-phosphate
  modified_base 10: mod_base = OTHER; note = 2'-O-methyluridine-3'-phosphate
  modified_base 11: mod_base = OTHER; note = 2'-O-methylguanosine-3'-phosphate
  modified_base 12: mod_base = OTHER; note = 2'-O-methyluridine-3'-phosphate
  modified_base 13: mod_base = OTHER; note = 2'-O-methyluridine-3'-phosphate
  modified_base 14: mod_base = OTHER; note = 2'-deoxy-2'-fluorouridine-3'-phosphate
  modified_base 15: mod_base = OTHER; note = 2'-O-methyladenosine-3'-phosphate
  modified_base 16: mod_base = OTHER; note = 2'-deoxy-2'-fluorouridine-3'-phosphate
  modified_base 17: mod_base = OTHER; note = 2'-O-methyluridine-3'-phosphate
  modified_base 18: mod_base = OTHER; note = 2'-O-methyluridine-3'-phosphate
  modified_base 19: mod_base = OTHER; note = 2'-O-methylguanosine-3'-phosphate
  modified_base 20: mod_base = OTHER; note = 2'-O-methyladenosine-3'-phosphate
  modified_base 21: mod_base = OTHER; note = 2'-O-methylguanosine-3'-phosphate
  modified_base 22: mod_base = OTHER; note = 2'-O-methylguanosine-3'-phosphate
  modified_base 23: mod_base = OTHER; note = 2'-O-methylcytidine
tatcattcttgtttatttgaggc

SEQ ID NO: 5497 - RNA, 23 nt, synthetic construct
  source 1..23: mol_type = other RNA
  modified_base 1: mod_base = OTHER; note = 2'-O-methyluridine-3'-phosphate 5'-(E)-Vinylphosphonate
  modified_base 2: mod_base = OTHER; note = 2'-deoxy-2'-fluorouridine-3'-phosphate
  modified_base 3: mod_base = OTHER; note = 2'-O-methyladenosine-3'-phosphate
  modified_base 4: mod_base = OTHER; note = 2'-O-methyluridine-3'-phosphate
  modified_base 5: mod_base = OTHER; note = 2'-O-methylcytidine-3'-phosphate
  modified_base 6: mod_base = OTHER; note = 2'-deoxy-2'-fluoroadenosine-3'-phosphate
  modified_base 7: mod_base = OTHER; note = 2'-O-methyluridine-3'-phosphate
  modified_base 8: mod_base = OTHER; note = 2'-O-methyluridine-3'-phosphate
  modified_base 9: mod_base = OTHER; note = 2'-O-methylcytidine-3'-phosphate
  modified_base 10: mod_base = OTHER; note = 2'-O-methyluridine-3'-phosphate
  modified_base 11: mod_base = OTHER; note = 2'-O-methyluridine-3'-phosphate
  modified_base 12: mod_base = OTHER; note = 2'-O-methylguanosine-3'-phosphate
  modified_base 13: mod_base = OTHER; note = 2'-O-methyluridine-3'-phosphate
  modified_base 14: mod_base = OTHER; note = 2'-deoxy-2'-fluorouridine-3'-phosphate
  modified_base 15: mod_base = OTHER; note = 2'-O-methyluridine-3'-phosphate
  modified_base 16: mod_base = OTHER; note = 2'-deoxy-2'-fluoroadenosine-3'-phosphate
  modified_base 17: mod_base = OTHER; note = 2'-O-methyluridine-3'-phosphate
  modified_base 18: mod_base = OTHER; note = 2'-O-methyluridine-3'-phosphate
  modified_base 19: mod_base = OTHER; note = 2'-O-methyluridine-3'-phosphate
  modified_base 20: mod_base = OTHER; note = 2'-O-methylguanosine-3'-phosphate
  modified_base 21: mod_base = OTHER; note = 2'-O-methyladenosine-3'-phosphate
  modified_base 22: mod_base = OTHER; note = 2'-O-methylguanosine-3'-phosphate
  modified_base 23: mod_base = OTHER; note = 2'-O-methylguanosine
ttatcattcttgtttatttgagg

SEQ ID NO: 5498 - RNA, 23 nt, synthetic construct
  source 1..23: mol_type = other RNA
  modified_base 1: mod_base = OTHER; note = 2'-O-methyluridine-3'-phosphate 5'-(E)-Vinylphosphonate
  modified_base 2: mod_base = OTHER; note = 2'-deoxy-2'-fluorocytidine-3'-phosphate
  modified_base 3: mod_base = OTHER; note = 2'-O-methyladenosine-3'-phosphate
  modified_base 4: mod_base = OTHER; note = 2'-O-methylguanosine-3'-phosphate
  modified_base 5: mod_base = OTHER; note = 2'-O-methylguanosine-3'-phosphate
  modified_base 6: mod_base = OTHER; note = 2'-deoxy-2'-fluoroadenosine-3'-phosphate
  modified_base 7: mod_base = OTHER; note = 2'-O-methyladenosine-3'-phosphate
  modified_base 8: mod_base = OTHER; note = 2'-O-methyladenosine-3'-phosphate
  modified_base 9: mod_base = OTHER; note = 2'-O-methyluridine-3'-phosphate
  modified_base 10: mod_base = OTHER; note = 2'-O-methyladenosine-3'-phosphate
  modified_base 11: mod_base = OTHER; note = 2'-O-methyluridine-3'-phosphate
  modified_base 12: mod_base = OTHER; note = 2'-O-methylcytidine-3'-phosphate
  modified_base 13: mod_base = OTHER; note = 2'-O-methyladenosine-3'-phosphate
  modified_base 14: mod_base = OTHER; note = 2'-deoxy-2'-fluorouridine-3'-phosphate
  modified_base 15: mod_base = OTHER; note = 2'-O-methyluridine-3'-phosphate
  modified_base 16: mod_base = OTHER; note = 2'-deoxy-2'-fluorocytidine-3'-phosphate
  modified_base 17: mod_base = OTHER; note = 2'-O-methyluridine-3'-phosphate
  modified_base 18: mod_base = OTHER; note = 2'-O-methyluridine-3'-phosphate
  modified_base 19: mod_base = OTHER; note = 2'-O-methylguanosine-3'-phosphate
  modified_base 20: mod_base = OTHER; note = 2'-O-methyluridine-3'-phosphate
  modified_base 21: mod_base = OTHER; note = 2'-O-methyluridine-3'-phosphate
  modified_base 22: mod_base = OTHER; note = 2'-O-methyluridine-3'-phosphate
  modified_base 23: mod_base = OTHER; note = 2'-O-methyladenosine
tcaggaaatatcattcttgttta

SEQ ID NO: 5499 - RNA, 23 nt, synthetic construct
  source 1..23: mol_type = other RNA
  modified_base 1: mod_base = OTHER; note = 2'-O-methyluridine-3'-phosphate 5'-(E)-Vinylphosphonate
  modified_base 2: mod_base = OTHER; note = 2'-deoxy-2'-fluoroadenosine-3'-phosphate
  modified_base 3: mod_base = OTHER; note = 2'-O-methylcytidine-3'-phosphate
  modified_base 4: mod_base = OTHER; note = 2'-O-methyladenosine-3'-phosphate
  modified_base 5: mod_base = OTHER; note = 2'-O-methylguanosine-3'-phosphate
  modified_base 6: mod_base = OTHER; note = 2'-deoxy-2'-fluoroguanosine-3'-phosphate
  modified_base 7: mod_base = OTHER; note = 2'-O-methyladenosine-3'-phosphate
  modified_base 8: mod_base = OTHER; note = 2'-O-methyladenosine-3'-phosphate
  modified_base 9: mod_base = OTHER; note = 2'-O-methyladenosine-3'-phosphate
  modified_base 10: mod_base = OTHER; note = 2'-O-methyluridine-3'-phosphate
  modified_base 11: mod_base = OTHER; note = 2'-O-methyladenosine-3'-phosphate
  modified_base 12: mod_base = OTHER; note = 2'-O-methyluridine-3'-phosphate
  modified_base 13: mod_base = OTHER; note = 2'-O-methylcytidine-3'-phosphate
  modified_base 14: mod_base = OTHER; note = 2'-deoxy-2'-fluoroadenosine-3'-phosphate
  modified_base 15: mod_base = OTHER; note = 2'-O-methyluridine-3'-phosphate
  modified_base 16: mod_base = OTHER; note = 2'-deoxy-2'-fluorouridine-3'-phosphate
  modified_base 17: mod_base = OTHER; note = 2'-O-methylcytidine-3'-phosphate
  modified_base 18: mod_base = OTHER; note = 2'-O-methyluridine-3'-phosphate
  modified_base 19: mod_base = OTHER; note = 2'-O-methyluridine-3'-phosphate
  modified_base 20: mod_base = OTHER; note = 2'-O-methylguanosine-3'-phosphate
  modified_base 21: mod_base = OTHER; note = 2'-O-methyluridine-3'-phosphate
  modified_base 22: mod_base = OTHER; note = 2'-O-methyluridine-3'-phosphate
  modified_base 23: mod_base = OTHER; note = 2'-O-methyluridine
tacaggaaatatcattcttgttt

SEQ ID NO: 5500 - RNA, 23 nt, synthetic construct
  source 1..23: mol_type = other RNA
  modified_base 1: mod_base = OTHER; note = 2'-O-methyluridine-3'-phosphate 5'-(E)-Vinylphosphonate
  modified_base 2: mod_base = OTHER; note = 2'-deoxy-2'-fluoroadenosine-3'-phosphate
  modified_base 3: mod_base = OTHER; note = 2'-O-methyladenosine-3'-phosphate
  modified_base 4: mod_base = OTHER; note = 2'-O-methylcytidine-3'-phosphate
  modified_base 5: mod_base = OTHER; note = 2'-O-methyladenosine-3'-phosphate
  modified_base 6: mod_base = OTHER; note = 2'-deoxy-2'-fluoroguanosine-3'-phosphate
  modified_base 7: mod_base = OTHER; note = 2'-O-methylguanosine-3'-phosphate
  modified_base 8: mod_base = OTHER; note = 2'-O-methyladenosine-3'-phosphate
  modified_base 9: mod_base = OTHER; note = 2'-O-methyladenosine-3'-phosphate
  modified_base 10: mod_base = OTHER; note = 2'-O-methyladenosine-3'-phosphate
  modified_base 11: mod_base = OTHER; note = 2'-O-methyluridine-3'-phosphate
  modified_base 12: mod_base = OTHER; note = 2'-O-methyladenosine-3'-phosphate
  modified_base 13: mod_base = OTHER; note = 2'-O-methyluridine-3'-phosphate
  modified_base 14: mod_base = OTHER; note = 2'-deoxy-2'-fluorocytidine-3'-phosphate
  modified_base 15: mod_base = OTHER; note = 2'-O-methyladenosine-3'-phosphate
  modified_base 16: mod_base = OTHER; note = 2'-deoxy-2'-fluorouridine-3'-phosphate
  modified_base 17: mod_base = OTHER; note = 2'-O-methyluridine-3'-phosphate
  modified_base 18: mod_base = OTHER; note = 2'-O-methylcytidine-3'-phosphate
  modified_base 19: mod_base = OTHER; note = 2'-O-methyluridine-3'-phosphate
  modified_base 20: mod_base = OTHER; note = 2'-O-methyluridine-3'-phosphate
  modified_base 21: mod_base = OTHER; note = 2'-O-methylguanosine-3'-phosphate
  modified_base 22: mod_base = OTHER; note = 2'-O-methyluridine-3'-phosphate
  modified_base 23: mod_base = OTHER; note = 2'-O-methyluridine
taacaggaaatatcattcttgtt

SEQ ID NO: 5501 - RNA, 23 nt, synthetic construct
  source 1..23: mol_type = other RNA
  modified_base 1: mod_base = OTHER; note = 2'-O-methyluridine-3'-phosphate 5'-(E)-Vinylphosphonate
  modified_base 2: mod_base = OTHER; note = 2'-deoxy-2'-fluoroadenosine-3'-phosphate
  modified_base 3: mod_base = OTHER; note = 2'-O-methyladenosine-3'-phosphate
  modified_base 4: mod_base = OTHER; note = 2'-O-methyladenosine-3'-phosphate
  modified_base 5: mod_base = OTHER; note = 2'-O-methylcytidine-3'-phosphate
  modified_base 6: mod_base = OTHER; note = 2'-deoxy-2'-fluoroadenosine-3'-phosphate
  modified_base 7: mod_base = OTHER; note = 2'-O-methylguanosine-3'-phosphate
  modified_base 8: mod_base = OTHER; note = 2'-O-methylguanosine-3'-phosphate
  modified_base 9: mod_base = OTHER; note = 2'-O-methyladenosine-3'-phosphate
  modified_base 10: mod_base = OTHER; note = 2'-O-methyladenosine-3'-phosphate
  modified_base 11: mod_base = OTHER; note = 2'-O-methyladenosine-3'-phosphate
  modified_base 12: mod_base = OTHER; note = 2'-O-methyluridine-3'-phosphate
  modified_base 13: mod_base = OTHER; note = 2'-O-methyladenosine-3'-phosphate
  modified_base 14: mod_base = OTHER; note = 2'-deoxy-2'-fluorouridine-3'-phosphate
  modified_base 15: mod_base = OTHER; note = 2'-O-methylcytidine-3'-phosphate
  modified_base 16: mod_base = OTHER; note = 2'-deoxy-2'-fluoroadenosine-3'-phosphate
  modified_base 17: mod_base = OTHER; note = 2'-O-methyluridine-3'-phosphate
  modified_base 18: mod_base = OTHER; note = 2'-O-methyluridine-3'-phosphate
  modified_base 19: mod_base = OTHER; note = 2'-O-methylcytidine-3'-phosphate
  modified_base 20: mod_base = OTHER; note = 2'-O-methyluridine-3'-phosphate
  modified_base 21: mod_base = OTHER; note = 2'-O-methyluridine-3'-phosphate
  modified_base 22: mod_base = OTHER; note = 2'-O-methylguanosine-3'-phosphate
  modified_base 23: mod_base = OTHER; note = 2'-O-methyluridine
taaacaggaaatatcattcttgt

SEQ ID NO: 5502 - RNA, 23 nt, synthetic construct
  source 1..23: mol_type = other RNA
  modified_base 1: mod_base = OTHER; note = 2'-O-methyluridine-3'-phosphate 5'-(E)-Vinylphosphonate
  modified_base 2: mod_base = OTHER; note = 2'-deoxy-2'-fluoroadenosine-3'-phosphate
  modified_base 3: mod_base = OTHER; note = 2'-O-methyladenosine-3'-phosphate
  modified_base 4: mod_base = OTHER; note = 2'-O-methyladenosine-3'-phosphate
  modified_base 5: mod_base = OTHER; note = 2'-O-methyladenosine-3'-phosphate
  modified_base 6: mod_base = OTHER; note = 2'-deoxy-2'-fluorocytidine-3'-phosphate
  modified_base 7: mod_base = OTHER; note = 2'-O-methyladenosine-3'-phosphate
  modified_base 8: mod_base = OTHER; note = 2'-O-methylguanosine-3'-phosphate
  modified_base 9: mod_base = OTHER; note = 2'-O-methylguanosine-3'-phosphate
  modified_base 10: mod_base = OTHER; note = 2'-O-methyladenosine-3'-phosphate
  modified_base 11: mod_base = OTHER; note = 2'-O-methyladenosine-3'-phosphate
  modified_base 12: mod_base = OTHER; note = 2'-O-methyladenosine-3'-phosphate
  modified_base 13: mod_base = OTHER; note = 2'-O-methyluridine-3'-phosphate
  modified_base 14: mod_base = OTHER; note = 2'-deoxy-2'-fluoroadenosine-3'-phosphate
  modified_base 15: mod_base = OTHER; note = 2'-O-methyluridine-3'-phosphate
  modified_base 16: mod_base = OTHER; note = 2'-deoxy-2'-fluorocytidine-3'-phosphate
  modified_base 17: mod_base = OTHER; note = 2'-O-methyladenosine-3'-phosphate
  modified_base 18: mod_base = OTHER; note = 2'-O-methyluridine-3'-phosphate
  modified_base 19: mod_base = OTHER; note = 2'-O-methyluridine-3'-phosphate
  modified_base 20: mod_base = OTHER; note = 2'-O-methylcytidine-3'-phosphate
  modified_base 21: mod_base = OTHER; note = 2'-O-methyluridine-3'-phosphate
  modified_base 22: mod_base = OTHER; note = 2'-O-methyluridine-3'-phosphate
  modified_base 23: mod_base = OTHER; note = 2'-O-methylguanosine
taaaacaggaaatatcattcttg

SEQ ID NO: 5503 - RNA, 23 nt, synthetic construct
  source 1..23: mol_type = other RNA
  modified_base 1: mod_base = OTHER; note = 2'-O-methyluridine-3'-phosphate 5'-(E)-Vinylphosphonate
  modified_base 2: mod_base = OTHER; note = 2'-deoxy-2'-fluorocytidine-3'-phosphate
  modified_base 3: mod_base = OTHER; note = 2'-O-methyladenosine-3'-phosphate
  modified_base 4: mod_base = OTHER; note = 2'-O-methyluridine-3'-phosphate
  modified_base 5: mod_base = OTHER; note = 2'-O-methyladenosine-3'-phosphate
  modified_base 6: mod_base = OTHER; note = 2'-deoxy-2'-fluorouridine-3'-phosphate
  modified_base 7: mod_base = OTHER; note = 2'-O-methyluridine-3'-phosphate
  modified_base 8: mod_base = OTHER; note = 2'-O-methyluridine-3'-phosphate
  modified_base 9: mod_base = OTHER; note = 2'-O-methyladenosine-3'-phosphate
  modified_base 10: mod_base = OTHER; note = 2'-O-methylcytidine-3'-phosphate
  modified_base 11: mod_base = OTHER; note = 2'-O-methylcytidine-3'-phosphate
  modified_base 12: mod_base = OTHER; note = 2'-O-methylcytidine-3'-phosphate
  modified_base 13: mod_base = OTHER; note = 2'-O-methyladenosine-3'-phosphate
  modified_base 14: mod_base = OTHER; note = 2'-deoxy-2'-fluoroadenosine-3'-phosphate
  modified_base 15: mod_base = OTHER; note = 2'-O-methylcytidine-3'-phosphate
  modified_base 16: mod_base = OTHER; note = 2'-deoxy-2'-fluoroadenosine-3'-phosphate
  modified_base 17: mod_base = OTHER; note = 2'-O-methyluridine-3'-phosphate
  modified_base 18: mod_base = OTHER; note = 2'-O-methyladenosine-3'-phosphate
  modified_base 19: mod_base = OTHER; note = 2'-O-methyladenosine-3'-phosphate
  modified_base 20: mod_base = OTHER; note = 2'-O-methylguanosine-3'-phosphate
  modified_base 21: mod_base = OTHER; note = 2'-O-methyluridine-3'-phosphate
  modified_base 22: mod_base = OTHER; note = 2'-O-methyladenosine-3'-phosphate
  modified_base 23: mod_base = OTHER; note = 2'-O-methyladenosine
tcatatttacccaacataagtaa

SEQ ID NO: 5504 - RNA, 23 nt, synthetic construct
  source 1..23: mol_type = other RNA
  modified_base 1: mod_base = OTHER; note = 2'-O-methyluridine-3'-phosphate 5'-(E)-Vinylphosphonate
  modified_base 2: mod_base = OTHER; note = 2'-deoxy-2'-fluoroguanosine-3'-phosphate
  modified_base 3: mod_base = OTHER; note = 2'-O-methylcytidine-3'-phosphate
  modified_base 4: mod_base = OTHER; note = 2'-O-methyladenosine-3'-phosphate
  modified_base 5: mod_base = OTHER; note = 2'-O-methyluridine-3'-phosphate
  modified_base 6: mod_base = OTHER; note = 2'-deoxy-2'-fluoroadenosine-3'-phosphate
  modified_base 7: mod_base = OTHER; note = 2'-O-methyluridine-3'-phosphate
  modified_base 8: mod_base = OTHER; note = 2'-O-methyluridine-3'-phosphate
  modified_base 9: mod_base = OTHER; note = 2'-O-methyluridine-3'-phosphate
  modified_base 10: mod_base = OTHER; note = 2'-O-methyladenosine-3'-phosphate
  modified_base 11: mod_base = OTHER; note = 2'-O-methylcytidine-3'-phosphate
  modified_base 12: mod_base = OTHER; note = 2'-O-methylcytidine-3'-phosphate
  modified_base 13: mod_base = OTHER; note = 2'-O-methylcytidine-3'-phosphate
  modified_base 14: mod_base = OTHER; note = 2'-deoxy-2'-fluoroadenosine-3'-phosphate
  modified_base 15: mod_base = OTHER; note = 2'-O-methyladenosine-3'-phosphate
  modified_base 16: mod_base = OTHER; note = 2'-deoxy-2'-fluorocytidine-3'-phosphate
  modified_base 17: mod_base = OTHER; note = 2'-O-methyladenosine-3'-phosphate
  modified_base 18: mod_base = OTHER; note = 2'-O-methyluridine-3'-phosphate
  modified_base 19: mod_base = OTHER; note = 2'-O-methyladenosine-3'-phosphate
  modified_base 20: mod_base = OTHER; note = 2'-O-methyladenosine-3'-phosphate
  modified_base 21: mod_base = OTHER; note = 2'-O-methylguanosine-3'-phosphate
  modified_base 22: mod_base = OTHER; note = 2'-O-methyluridine-3'-phosphate
  modified_base 23: mod_base = OTHER; note = 2'-O-methyladenosine
tgcatatttacccaacataagta

SEQ ID NO: 5505 - RNA, 23 nt, synthetic construct
  source 1..23: mol_type = other RNA
  modified_base 1: mod_base = OTHER; note = 2'-O-methyluridine-3'-phosphate 5'-(E)-Vinylphosphonate
  modified_base 2: mod_base = OTHER; note = 2'-deoxy-2'-fluoroadenosine-3'-phosphate
  modified_base 3: mod_base = OTHER; note = 2'-O-methylguanosine-3'-phosphate
  modified_base 4: mod_base = OTHER; note = 2'-O-methylcytidine-3'-phosphate
  modified_base 5: mod_base = OTHER; note = 2'-O-methyladenosine-3'-phosphate
  modified_base 6: mod_base = OTHER; note = 2'-deoxy-2'-fluorouridine-3'-phosphate
  modified_base 7: mod_base = OTHER; note = 2'-O-methyladenosine-3'-phosphate
  modified_base 8: mod_base = OTHER; note = 2'-O-methyluridine-3'-phosphate
  modified_base 9: mod_base = OTHER; note = 2'-O-methyluridine-3'-phosphate
  modified_base 10: mod_base = OTHER; note = 2'-O-methyluridine-3'-phosphate
  modified_base 11: mod_base = OTHER; note = 2'-O-methyladenosine-3'-phosphate
  modified_base 12: mod_base = OTHER; note = 2'-O-methylcytidine-3'-phosphate
  modified_base 13: mod_base = OTHER; note = 2'-O-methylcytidine-3'-phosphate
  modified_base 14: mod_base = OTHER; note = 2'-deoxy-2'-fluorocytidine-3'-phosphate
  modified_base 15: mod_base = OTHER; note = 2'-O-methyladenosine-3'-phosphate
  modified_base 16: mod_base = OTHER; note = 2'-deoxy-2'-fluoroadenosine-3'-phosphate
  modified_base 17: mod_base = OTHER; note = 2'-O-methylcytidine-3'-phosphate
  modified_base 18: mod_base = OTHER; note = 2'-O-methyladenosine-3'-phosphate
  modified_base 19: mod_base = OTHER; note = 2'-O-methyluridine-3'-phosphate
  modified_base 20: mod_base = OTHER; note = 2'-O-methyladenosine-3'-phosphate
  modified_base 21: mod_base = OTHER; note = 2'-O-methyladenosine-3'-phosphate
  modified_base 22: mod_base = OTHER; note = 2'-O-methylguanosine-3'-phosphate
  modified_base 23: mod_base = OTHER; note = 2'-O-methyluridine
tagcatatttacccaacataagt

SEQ ID NO: 5506 - RNA, 23 nt, synthetic construct
  source 1..23: mol_type = other RNA
  modified_base 1: mod_base = OTHER; note = 2'-O-methyluridine-3'-phosphate 5'-(E)-Vinylphosphonate
  modified_base 2: mod_base = OTHER; note = 2'-deoxy-2'-fluoroadenosine-3'-phosphate
  modified_base 3: mod_base = OTHER; note = 2'-O-methyladenosine-3'-phosphate
  modified_base 4: mod_base = OTHER; note = 2'-O-methylguanosine-3'-phosphate
  modified_base 5: mod_base = OTHER; note = 2'-O-methylcytidine-3'-phosphate
  modified_base 6: mod_base = OTHER; note = 2'-deoxy-2'-fluoroadenosine-3'-phosphate
  modified_base 7: mod_base = OTHER; note = 2'-O-methyluridine-3'-phosphate
  modified_base 8: mod_base = OTHER; note = 2'-O-methyladenosine-3'-phosphate
  modified_base 9: mod_base = OTHER; note = 2'-O-methyluridine-3'-phosphate
  modified_base 10: mod_base = OTHER; note = 2'-O-methyluridine-3'-phosphate
  modified_base 11: mod_base = OTHER; note = 2'-O-methyluridine-3'-phosphate
  modified_base 12: mod_base = OTHER; note = 2'-O-methyladenosine-3'-phosphate
  modified_base 13: mod_base = OTHER; note = 2'-O-methylcytidine-3'-phosphate
  modified_base 14: mod_base = OTHER; note = 2'-deoxy-2'-fluorocytidine-3'-phosphate
  modified_base 15: mod_base = OTHER; note = 2'-O-methylcytidine-3'-phosphate
  modified_base 16: mod_base = OTHER; note = 2'-deoxy-2'-fluoroadenosine-3'-phosphate
  modified_base 17: mod_base = OTHER; note = 2'-O-methyladenosine-3'-phosphate
  modified_base 18: mod_base = OTHER; note = 2'-O-methylcytidine-3'-phosphate
  modified_base 19: mod_base = OTHER; note = 2'-O-methyladenosine-3'-phosphate
  modified_base 20: mod_base = OTHER; note = 2'-O-methyluridine-3'-phosphate
  modified_base 21: mod_base = OTHER; note = 2'-O-methyladenosine-3'-phosphate
  modified_base 22: mod_base = OTHER; note = 2'-O-methyladenosine-3'-phosphate
  modified_base 23: mod_base = OTHER; note = 2'-O-methylguanosine
taagcatatttacccaacataag

SEQ ID NO: 5507 - RNA, 23 nt, synthetic construct
  source 1..23: mol_type = other RNA
  modified_base 1: mod_base = OTHER; note = 2'-O-methyluridine-3'-phosphate 5'-(E)-Vinylphosphonate
  modified_base 2: mod_base = OTHER; note = 2'-deoxy-2'-fluorouridine-3'-phosphate
  modified_base 3: mod_base = OTHER; note = 2'-O-methyladenosine-3'-phosphate
  modified_base 4: mod_base = OTHER; note = 2'-O-methyladenosine-3'-phosphate
  modified_base 5: mod_base = OTHER; note = 2'-O-methylguanosine-3'-phosphate
  modified_base 6: mod_base = OTHER; note = 2'-deoxy-2'-fluorocytidine-3'-phosphate
  modified_base 7: mod_base = OTHER; note = 2'-O-methyladenosine-3'-phosphate
  modified_base 8: mod_base = OTHER; note = 2'-O-methyluridine-3'-phosphate
  modified_base 9: mod_base = OTHER; note = 2'-O-methyladenosine-3'-phosphate
  modified_base 10: mod_base = OTHER; note = 2'-O-methyluridine-3'-phosphate
  modified_base 11: mod_base = OTHER; note = 2'-O-methyluridine-3'-phosphate
  modified_base 12: mod_base = OTHER; note = 2'-O-methyluridine-3'-phosphate
  modified_base 13: mod_base = OTHER; note = 2'-O-methyladenosine-3'-phosphate
  modified_base 14: mod_base = OTHER; note = 2'-deoxy-2'-fluorocytidine-3'-phosphate
  modified_base 15: mod_base = OTHER; note = 2'-O-methylcytidine-3'-phosphate
  modified_base 16: mod_base = OTHER; note = 2'-deoxy-2'-fluorocytidine-3'-phosphate
  modified_base 17: mod_base = OTHER; note = 2'-O-methyladenosine-3'-phosphate
  modified_base 18: mod_base = OTHER; note = 2'-O-methyladenosine-3'-phosphate
  modified_base 19: mod_base = OTHER; note = 2'-O-methylcytidine-3'-phosphate
  modified_base 20: mod_base = OTHER; note = 2'-O-methyladenosine-3'-phosphate
  modified_base 21: mod_base = OTHER; note = 2'-O-methyluridine-3'-phosphate
  modified_base 22: mod_base = OTHER; note = 2'-O-methyladenosine-3'-phosphate
  modified_base 23: mod_base = OTHER; note = 2'-O-methyladenosine
ttaagcatatttacccaacataa

SEQ ID NO: 5508 - RNA, 23 nt, synthetic construct
  source 1..23: mol_type = other RNA
  modified_base 1: mod_base = OTHER; note = 2'-O-methyluridine-3'-phosphate 5'-(E)-Vinylphosphonate
  modified_base 2: mod_base = OTHER; note = 2'-deoxy-2'-fluoroadenosine-3'-phosphate
  modified_base 3: mod_base = OTHER; note = 2'-O-methyluridine-3'-phosphate
  modified_base 4: mod_base = OTHER; note = 2'-O-methyladenosine-3'-phosphate
  modified_base 5: mod_base = OTHER; note = 2'-O-methyladenosine-3'-phosphate
  modified_base 6: mod_base = OTHER; note = 2'-deoxy-2'-fluoroguanosine-3'-phosphate
  modified_base 7: mod_base = OTHER; note = 2'-O-methylcytidine-3'-phosphate
  modified_base 8: mod_base = OTHER; note = 2'-O-methyladenosine-3'-phosphate
  modified_base 9: mod_base = OTHER; note = 2'-O-methyluridine-3'-phosphate
  modified_base 10: mod_base = OTHER; note = 2'-O-methyladenosine-3'-phosphate
  modified_base 11: mod_base = OTHER; note = 2'-O-methyluridine-3'-phosphate
  modified_base 12: mod_base = OTHER; note = 2'-O-methyluridine-3'-phosphate
  modified_base 13: mod_base = OTHER; note = 2'-O-methyluridine-3'-phosphate
  modified_base 14: mod_base = OTHER; note = 2'-deoxy-2'-fluoroadenosine-3'-phosphate
  modified_base 15: mod_base = OTHER; note = 2'-O-methylcytidine-3'-phosphate
  modified_base 16: mod_base = OTHER; note = 2'-deoxy-2'-fluorocytidine-3'-phosphate
  modified_base 17: mod_base = OTHER; note = 2'-O-methylcytidine-3'-phosphate
  modified_base 18: mod_base = OTHER; note = 2'-O-methyladenosine-3'-phosphate
  modified_base 19: mod_base = OTHER; note = 2'-O-methyladenosine-3'-phosphate
  modified_base 20: mod_base = OTHER; note = 2'-O-methylcytidine-3'-phosphate
  modified_base 21: mod_base = OTHER; note = 2'-O-methyladenosine-3'-phosphate
  modified_base 22: mod_base = OTHER; note = 2'-O-methyluridine-3'-phosphate
  modified_base 23: mod_base = OTHER; note = 2'-O-methyladenosine
tataagcatatttacccaacata

SEQ ID NO: 5509 - RNA, 23 nt, synthetic construct
  source 1..23: mol_type = other RNA
  modified_base 1: mod_base = OTHER; note = 2'-O-methyluridine-3'-phosphate 5'-(E)-Vinylphosphonate
  modified_base 2: mod_base = OTHER; note = 2'-deoxy-2'-fluoroadenosine-3'-phosphate
  modified_base 3: mod_base = OTHER; note = 2'-O-methyladenosine-3'-phosphate
  modified_base 4: mod_base = OTHER; note = 2'-O-methyluridine-3'-phosphate
  modified_base 5: mod_base = OTHER; note = 2'-O-methyladenosine-3'-phosphate
  modified_base 6: mod_base = OTHER; note = 2'-deoxy-2'-fluoroadenosine-3'-phosphate
  modified_base 7: mod_base = OTHER; note = 2'-O-methylguanosine-3'-phosphate
  modified_base 8: mod_base = OTHER; note = 2'-O-methylcytidine-3'-phosphate
  modified_base 9: mod_base = OTHER; note = 2'-O-methyladenosine-3'-phosphate
  modified_base 10: mod_base = OTHER; note = 2'-O-methyluridine-3'-phosphate
  modified_base 11: mod_base = OTHER; note = 2'-O-methyladenosine-3'-phosphate
  modified_base 12: mod_base = OTHER; note = 2'-O-methyluridine-3'-phosphate
  modified_base 13: mod_base = OTHER; note = 2'-O-methyluridine-3'-phosphate
  modified_base 14: mod_base = OTHER; note = 2'-deoxy-2'-fluorouridine-3'-phosphate
  modified_base 15: mod_base = OTHER; note = 2'-O-methyladenosine-3'-phosphate
  modified_base 16: mod_base = OTHER; note = 2'-deoxy-2'-fluorocytidine-3'-phosphate
  modified_base 17: mod_base = OTHER; note = 2'-O-methylcytidine-3'-phosphate
  modified_base 18: mod_base = OTHER; note = 2'-O-methylcytidine-3'-phosphate
  modified_base 19: mod_base = OTHER; note = 2'-O-methyladenosine-3'-phosphate
  modified_base 20: mod_base = OTHER; note = 2'-O-methyladenosine-3'-phosphate
  modified_base 21: mod_base = OTHER; note = 2'-O-methylcytidine-3'-phosphate
  modified_base 22: mod_base = OTHER; note = 2'-O-methyladenosine-3'-phosphate
  modified_base 23: mod_base = OTHER; note = 2'-O-methyluridine
taataagcatatttacccaacat

SEQ ID NO: 5510 - RNA, 23 nt, synthetic construct
  source 1..23: mol_type = other RNA
  modified_base 1: mod_base = OTHER; note = 2'-O-methyluridine-3'-phosphate 5'-(E)-Vinylphosphonate
  modified_base 2: mod_base = OTHER; note = 2'-deoxy-2'-fluorocytidine-3'-phosphate
  modified_base 3: mod_base = OTHER; note = 2'-O-methyladenosine-3'-phosphate
  modified_base 4: mod_base = OTHER; note = 2'-O-methylguanosine-3'-phosphate
  modified_base 5: mod_base = OTHER; note = 2'-O-methyladenosine-3'-phosphate
  modified_base 6: mod_base = OTHER; note = 2'-deoxy-2'-fluoroguanosine-3'-phosphate
  modified_base 7: mod_base = OTHER; note = 2'-O-methyluridine-3'-phosphate
  modified_base 8: mod_base = OTHER; note = 2'-O-methylguanosine-3'-phosphate
  modified_base 9: mod_base = OTHER; note = 2'-O-methyladenosine-3'-phosphate
  modified_base 10: mod_base = OTHER; note = 2'-O-methyladenosine-3'-phosphate
  modified_base 11: mod_base = OTHER; note = 2'-O-methyladenosine-3'-phosphate
  modified_base 12: mod_base = OTHER; note = 2'-O-methylguanosine-3'-phosphate
  modified_base 13: mod_base = OTHER; note = 2'-O-methyluridine-3'-phosphate
  modified_base 14: mod_base = OTHER; note = 2'-deoxy-2'-fluorouridine-3'-phosphate
  modified_base 15: mod_base = OTHER; note = 2'-O-methylguanosine-3'-phosphate
  modified_base 16: mod_base = OTHER; note = 2'-deoxy-2'-fluoroadenosine-3'-phosphate
  modified_base 17: mod_base = OTHER; note = 2'-O-methyladenosine-3'-phosphate
  modified_base 18: mod_base = OTHER; note = 2'-O-methylcytidine-3'-phosphate
  modified_base 19: mod_base = OTHER; note = 2'-O-methylcytidine-3'-phosphate
  modified_base 20: mod_base = OTHER; note = 2'-O-methyladenosine-3'-phosphate
  modified_base 21: mod_base = OTHER; note = 2'-O-methyladenosine-3'-phosphate
  modified_base 22: mod_base = OTHER; note = 2'-O-methyluridine-3'-phosphate
  modified_base 23: mod_base = OTHER; note = 2'-O-methyladenosine
tcagagtgaaagttgaaccaata

SEQ ID NO: 5511 - RNA, 23 nt, synthetic construct
  source 1..23: mol_type = other RNA
  modified_base 1: mod_base = OTHER; note = 2'-O-methyluridine-3'-phosphate 5'-(E)-Vinylphosphonate
  modified_base 2: mod_base = OTHER; note = 2'-deoxy-2'-fluoroadenosine-3'-phosphate
  modified_base 3: mod_base = OTHER; note = 2'-O-methyluridine-3'-phosphate
  modified_base 4: mod_base = OTHER; note = 2'-O-methyluridine-3'-phosphate
  modified_base 5: mod_base = OTHER; note = 2'-O-methyluridine-3'-phosphate
  modified_base 6: mod_base = OTHER; note = 2'-deoxy-2'-fluorocytidine-3'-phosphate
  modified_base 7: mod_base = OTHER; note = 2'-O-methyluridine-3'-phosphate
  modified_base 8: mod_base = OTHER; note = 2'-O-methyluridine-3'-phosphate
  modified_base 9: mod_base = OTHER; note = 2'-O-methylcytidine-3'-phosphate
  modified_base 10: mod_base = OTHER; note = 2'-O-methyladenosine-3'-phosphate
  modified_base 11: mod_base = OTHER; note = 2'-O-methylguanosine-3'-phosphate
  modified_base 12: mod_base = OTHER; note = 2'-O-methyladenosine-3'-phosphate
  modified_base 13: mod_base = OTHER; note = 2'-O-methylguanosine-3'-phosphate
  modified_base 14: mod_base = OTHER; note = 2'-deoxy-2'-fluorouridine-3'-phosphate
  modified_base 15: mod_base = OTHER; note = 2'-O-methylguanosine-3'-phosphate
  modified_base 16: mod_base = OTHER; note = 2'-deoxy-2'-fluoroadenosine-3'-phosphate
  modified_base 17: mod_base = OTHER; note = 2'-O-methyladenosine-3'-phosphate
  modified_base 18: mod_base = OTHER; note = 2'-O-methyladenosine-3'-phosphate
  modified_base 19: mod_base = OTHER; note = 2'-O-methylguanosine-3'-phosphate
  modified_base 20: mod_base = OTHER; note = 2'-O-methyluridine-3'-phosphate
  modified_base 21: mod_base = OTHER; note = 2'-O-methyluridine-3'-phosphate
  modified_base 22: mod_base = OTHER; note = 2'-O-methylguanosine-3'-phosphate
  modified_base 23: mod_base = OTHER; note = 2'-O-methyladenosine
tatttcttcagagtgaaagttga

SEQ ID NO: 5512 - RNA, 23 nt, synthetic construct
  source 1..23: mol_type = other RNA
  modified_base 1: mod_base = OTHER; note = 2'-O-methyluridine-3'-phosphate 5'-(E)-Vinylphosphonate
  modified_base 2: mod_base = OTHER; note = 2'-deoxy-2'-fluoroadenosine-3'-phosphate
  modified_base 3: mod_base = OTHER; note = 2'-O-methylcytidine-3'-phosphate
  modified_base 4: mod_base = OTHER; note = 2'-O-methyladenosine-3'-phosphate
  modified_base 5: mod_base = OTHER; note = 2'-O-methyluridine-3'-phosphate
  modified_base 6: mod_base = OTHER; note = 2'-deoxy-2'-fluoroadenosine-3'-phosphate
  modified_base 7: mod_base = OTHER; note = 2'-O-methylcytidine-3'-phosphate
  modified_base 8: mod_base = OTHER; note = 2'-O-methylguanosine-3'-phosphate
  modified_base 9: mod_base = OTHER; note = 2'-O-methylguanosine-3'-phosphate
  modified_base 10: mod_base = OTHER; note = 2'-O-methyladenosine-3'-phosphate
  modified_base 11: mod_base = OTHER; note = 2'-O-methyluridine-3'-phosphate
  modified_base 12: mod_base = OTHER; note = 2'-O-methyluridine-3'-phosphate
  modified_base 13: mod_base = OTHER; note = 2'-O-methyluridine-3'-phosphate
  modified_base 14: mod_base = OTHER; note = 2'-deoxy-2'-fluorocytidine-3'-phosphate
  modified_base 15: mod_base = OTHER; note = 2'-O-methyluridine-3'-phosphate
  modified_base 16: mod_base = OTHER; note = 2'-deoxy-2'-fluorouridine-3'-phosphate
  modified_base 17: mod_base = OTHER; note = 2'-O-methylcytidine-3'-phosphate
  modified_base 18: mod_base = OTHER; note = 2'-O-methyladenosine-3'-phosphate
  modified_base 19: mod_base = OTHER; note = 2'-O-methylguanosine-3'-phosphate
  modified_base 20: mod_base = OTHER; note = 2'-O-methyladenosine-3'-phosphate
  modified_base 21: mod_base = OTHER; note = 2'-O-methylguanosine-3'-phosphate
  modified_base 22: mod_base = OTHER; note = 2'-O-methyluridine-3'-phosphate
  modified_base 23: mod_base = OTHER; note = 2'-O-methylguanosine
tacatacggatttcttcagagtg

SEQ ID NO: 5513 - RNA, 23 nt, synthetic construct
  source 1..23: mol_type = other RNA
  modified_base 1: mod_base = OTHER; note = 2'-O-methyluridine-3'-phosphate 5'-(E)-Vinylphosphonate
  modified_base 2: mod_base = OTHER; note = 2'-deoxy-2'-fluorouridine-3'-phosphate
  modified_base 3: mod_base = OTHER; note = 2'-O-methyladenosine-3'-phosphate
  modified_base 4: mod_base = OTHER; note = 2'-O-methyladenosine-3'-phosphate
  modified_base 5: mod_base = OTHER; note = 2'-O-methylcytidine-3'-phosphate
  modified_base 6: mod_base = OTHER; note = 2'-deoxy-2'-fluoroadenosine-3'-phosphate
  modified_base 7: mod_base = OTHER; note = 2'-O-methyluridine-3'-phosphate
  modified_base 8: mod_base = OTHER; note = 2'-O-methyladenosine-3'-phosphate
  modified_base 9: mod_base = OTHER; note = 2'-O-methylcytidine-3'-phosphate
  modified_base 10: mod_base = OTHER; note = 2'-O-methylguanosine-3'-phosphate
  modified_base 11: mod_base = OTHER; note = 2'-O-methylguanosine-3'-phosphate
  modified_base 12: mod_base = OTHER; note = 2'-O-methyladenosine-3'-phosphate
  modified_base 13: mod_base = OTHER; note = 2'-O-methyluridine-3'-phosphate
  modified_base 14: mod_base = OTHER; note = 2'-deoxy-2'-fluorouridine-3'-phosphate
  modified_base 15: mod_base = OTHER; note = 2'-O-methyluridine-3'-phosphate
  modified_base 16: mod_base = OTHER; note = 2'-deoxy-2'-fluorocytidine-3'-phosphate
  modified_base 17: mod_base = OTHER; note = 2'-O-methyluridine-3'-phosphate
  modified_base 18: mod_base = OTHER; note = 2'-O-methyluridine-3'-phosphate
  modified_base 19: mod_base = OTHER; note = 2'-O-methylcytidine-3'-phosphate
  modified_base 20: mod_base = OTHER; note = 2'-O-methyladenosine-3'-phosphate
  modified_base 21: mod_base = OTHER; note = 2'-O-methylguanosine-3'-phosphate
  modified_base 22: mod_base = OTHER; note = 2'-O-methyladenosine-3'-phosphate
  modified_base 23: mod_base = OTHER; note = 2'-O-methylguanosine
ttaacatacggatttcttcagag

SEQ ID NO: 5514 - RNA, 23 nt, synthetic construct
  source 1..23: mol_type = other RNA
  modified_base 1: mod_base = OTHER; note = 2'-O-methyluridine-3'-phosphate 5'-(E)-Vinylphosphonate
  modified_base 2: mod_base = OTHER; note = 2'-deoxy-2'-fluoroguanosine-3'-phosphate
  modified_base 3: mod_base = OTHER; note = 2'-O-methyladenosine-3'-phosphate
  modified_base 4: mod_base = OTHER; note = 2'-O-methylguanosine-3'-phosphate
  modified_base 5: mod_base = OTHER; note = 2'-O-methyluridine-3'-phosphate
  modified_base 6: mod_base = OTHER; note = 2'-deoxy-2'-fluorocytidine-3'-phosphate
  modified_base 7: mod_base = OTHER; note = 2'-O-methyladenosine-3'-phosphate
  modified_base 8: mod_base = OTHER; note = 2'-O-methyluridine-3'-phosphate
  modified_base 9: mod_base = OTHER; note = 2'-O-methyladenosine-3'-phosphate
  modified_base 10: mod_base = OTHER; note = 2'-O-methylguanosine-3'-phosphate
  modified_base 11: mod_base = OTHER; note = 2'-O-methyluridine-3'-phosphate
  modified_base 12: mod_base = OTHER; note = 2'-O-methyluridine-3'-phosphate
  modified_base 13: mod_base = OTHER; note = 2'-O-methyladenosine-3'-phosphate
  modified_base 14: mod_base = OTHER; note = 2'-deoxy-2'-fluoroadenosine-3'-phosphate
  modified_base 15: mod_base = OTHER; note = 2'-O-methyladenosine-3'-phosphate
  modified_base 16: mod_base = OTHER; note = 2'-deoxy-2'-fluorocytidine-3'-phosphate
  modified_base 17: mod_base = OTHER; note = 2'-O-methyladenosine-3'-phosphate
  modified_base 18: mod_base = OTHER; note = 2'-O-methyladenosine-3'-phosphate
  modified_base 19: mod_base = OTHER; note = 2'-O-methylcytidine-3'-phosphate
  modified_base 20: mod_base = OTHER; note = 2'-O-methyladenosine-3'-phosphate
  modified_base 21: mod_base = OTHER; note = 2'-O-methylcytidine-3'-phosphate
  modified_base 22: mod_base = OTHER; note = 2'-O-methyladenosine-3'-phosphate
  modified_base 23: mod_base = OTHER; note = 2'-O-methyladenosine
tgagtcatagttaaacaacacaa

SEQ ID NO: 5515 - RNA, 23 nt, synthetic construct
  source 1..23: mol_type = other RNA
  modified_base 1: mod_base = OTHER; note = 2'-O-methyluridine-3'-phosphate 5'-(E)-Vinylphosphonate
  modified_base 2: mod_base = OTHER; note = 2'-deoxy-2'-fluoroguanosine-3'-phosphate
  modified_base 3: mod_base = OTHER; note = 2'-O-methyladenosine-3'-phosphate
  modified_base 4: mod_base = OTHER; note = 2'-O-methylcytidine-3'-phosphate
  modified_base 5: mod_base = OTHER; note = 2'-O-methyluridine-3'-phosphate
  modified_base 6: mod_base = OTHER; note = 2'-deoxy-2'-fluoroadenosine-3'-phosphate
  modified_base 7: mod_base = OTHER; note = 2'-O-methylcytidine-3'-phosphate
  modified_base 8: mod_base = OTHER; note = 2'-O-methyluridine-3'-phosphate
  modified_base 9: mod_base = OTHER; note = 2'-O-methylcytidine-3'-phosphate
  modified_base 10: mod_base = OTHER; note = 2'-O-methyladenosine-3'-phosphate
  modified_base 11: mod_base = OTHER; note = 2'-O-methylguanosine-3'-phosphate
  modified_base 12: mod_base = OTHER; note = 2'-O-methyluridine-3'-phosphate
  modified_base 13: mod_base = OTHER; note = 2'-O-methyluridine-3'-phosphate
  modified_base 14: mod_base = OTHER; note = 2'-deoxy-2'-fluoroadenosine-3'-phosphate
  modified_base 15: mod_base = OTHER; note = 2'-O-methylguanosine-3'-phosphate
  modified_base 16: mod_base = OTHER; note = 2'-deoxy-2'-fluoroguanosine-3'-phosphate
  modified_base 17: mod_base = OTHER; note = 2'-O-methyladenosine-3'-phosphate
  modified_base 18: mod_base = OTHER; note = 2'-O-methylguanosine-3'-phosphate
  modified_base 19: mod_base = OTHER; note = 2'-O-methyluridine-3'-phosphate
  modified_base 20: mod_base = OTHER; note = 2'-O-methylcytidine-3'-phosphate
  modified_base 21: mod_base = OTHER; note = 2'-O-methyladenosine-3'-phosphate
  modified_base 22: mod_base = OTHER; note = 2'-O-methyluridine-3'-phosphate
  modified_base 23: mod_base = OTHER; note = 2'-O-methyladenosine
tgactactcagttaggagtcata

SEQ ID NO: 5516 - RNA, 23 nt, synthetic construct
  source 1..23: mol_type = other RNA
  modified_base 1: mod_base = OTHER; note = 2'-O-methyluridine-3'-phosphate 5'-(E)-Vinylphosphonate
  modified_base 2: mod_base = OTHER; note = 2'-deoxy-2'-fluoroadenosine-3'-phosphate
  modified_base 3: mod_base = OTHER; note = 2'-O-methylguanosine-3'-phosphate
  modified_base 4: mod_base = OTHER; note = 2'-O-methyladenosine-3'-phosphate
  modified_base 5: mod_base = OTHER; note = 2'-O-methylcytidine-3'-phosphate
  modified_base 6: mod_base = OTHER; note = 2'-deoxy-2'-fluorouridine-3'-phosphate
  modified_base 7: mod_base = OTHER; note = 2'-O-methyladenosine-3'-phosphate
  modified_base 8: mod_base = OTHER; note = 2'-O-methylcytidine-3'-phosphate
  modified_base 9: mod_base = OTHER; note = 2'-O-methyluridine-3'-phosphate
  modified_base 10: mod_base = OTHER; note = 2'-O-methylcytidine-3'-phosphate
  modified_base 11: mod_base = OTHER; note = 2'-O-methyladenosine-3'-phosphate
  modified_base 12: mod_base = OTHER; note = 2'-O-methylguanosine-3'-phosphate
  modified_base 13: mod_base = OTHER; note = 2'-O-methyluridine-3'-phosphate
  modified_base 14: mod_base = OTHER; note = 2'-deoxy-2'-fluorouridine-3'-phosphate
  modified_base 15: mod_base = OTHER; note = 2'-O-methyladenosine-3'-phosphate
  modified_base 16: mod_base = OTHER; note = 2'-deoxy-2'-fluoroguanosine-3'-phosphate
  modified_base 17: mod_base = OTHER; note = 2'-O-methylguanosine-3'-phosphate
  modified_base 18: mod_base = OTHER; note = 2'-O-methyladenosine-3'-phosphate
  modified_base 19: mod_base = OTHER; note = 2'-O-methylguanosine-3'-phosphate
  modified_base 20: mod_base = OTHER; note = 2'-O-methyluridine-3'-phosphate
  modified_base 21: mod_base = OTHER; note = 2'-O-methylcytidine-3'-phosphate
  modified_base 22: mod_base = OTHER; note = 2'-O-methyladenosine-3'-phosphate
  modified_base 23: mod_base = OTHER; note = 2'-O-methyluridine
tagactactcagttaggagtcat

SEQ ID NO: 5517 - RNA, 23 nt, synthetic construct
  source 1..23: mol_type = other RNA
  modified_base 1: mod_base = OTHER; note = 2'-O-methyluridine-3'-phosphate 5'-(E)-Vinylphosphonate
  modified_base 2: mod_base = OTHER; note = 2'-deoxy-2'-fluoroadenosine-3'-phosphate
  modified_base 3: mod_base = OTHER; note = 2'-O-methyladenosine-3'-phosphate
  modified_base 4: mod_base = OTHER; note = 2'-O-methylguanosine-3'-phosphate
  modified_base 5: mod_base = OTHER; note = 2'-O-methyladenosine-3'-phosphate
  modified_base 6: mod_base = OTHER; note = 2'-deoxy-2'-fluorocytidine-3'-phosphate
  modified_base 7: mod_base = OTHER; note = 2'-O-methyluridine-3'-phosphate
  modified_base 8: mod_base = OTHER; note = 2'-O-methyladenosine-3'-phosphate
  modified_base 9: mod_base = OTHER; note = 2'-O-methylcytidine-3'-phosphate
  modified_base 10: mod_base = OTHER; note = 2'-O-methyluridine-3'-phosphate
  modified_base 11: mod_base = OTHER; note = 2'-O-methylcytidine-3'-phosphate
  modified_base 12: mod_base = OTHER; note = 2'-O-methyladenosine-3'-phosphate
  modified_base 13: mod_base = OTHER; note = 2'-O-methylguanosine-3'-phosphate
  modified_base 14: mod_base = OTHER; note = 2'-deoxy-2'-fluorouridine-3'-phosphate
  modified_base 15: mod_base = OTHER; note = 2'-O-methyluridine-3'-phosphate
  modified_base 16: mod_base = OTHER; note = 2'-deoxy-2'-fluoroadenosine-3'-phosphate
  modified_base 17: mod_base = OTHER; note = 2'-O-methylguanosine-3'-phosphate
  modified_base 18: mod_base = OTHER; note = 2'-O-methylguanosine-3'-phosphate
  modified_base 19: mod_base = OTHER; note = 2'-O-methyladenosine-3'-phosphate
  modified_base 20: mod_base = OTHER; note = 2'-O-methylguanosine-3'-phosphate
  modified_base 21: mod_base = OTHER; note = 2'-O-methyluridine-3'-phosphate
  modified_base 22: mod_base = OTHER; note = 2'-O-methylcytidine-3'-phosphate
  modified_base 23: mod_base = OTHER; note = 2'-O-methyladenosine
taagactactcagttaggagtca

SEQ ID NO: 5518 - RNA, 23 nt, synthetic construct
  source 1..23: mol_type = other RNA
  modified_base 1: mod_base = OTHER; note = 2'-O-methyluridine-3'-phosphate 5'-(E)-Vinylphosphonate
  modified_base 2: mod_base = OTHER; note = 2'-deoxy-2'-fluorouridine-3'-phosphate
  modified_base 3: mod_base = OTHER; note = 2'-O-methyladenosine-3'-phosphate
  modified_base 4: mod_base = OTHER; note = 2'-O-methyladenosine-3'-phosphate
  modified_base 5: mod_base = OTHER; note = 2'-O-methylguanosine-3'-phosphate
  modified_base 6: mod_base = OTHER; note = 2'-deoxy-2'-fluoroadenosine-3'-phosphate
  modified_base 7: mod_base = OTHER; note = 2'-O-methylcytidine-3'-phosphate
  modified_base 8: mod_base = OTHER; note = 2'-O-methyluridine-3'-phosphate
  modified_base 9: mod_base = OTHER; note = 2'-O-methyladenosine-3'-phosphate
  modified_base 10: mod_base = OTHER; note = 2'-O-methylcytidine-3'-phosphate
  modified_base 11: mod_base = OTHER; note = 2'-O-methyluridine-3'-phosphate
  modified_base 12: mod_base = OTHER; note = 2'-O-methylcytidine-3'-phosphate
  modified_base 13: mod_base = OTHER; note = 2'-O-methyladenosine-3'-phosphate
  modified_base 14: mod_base = OTHER; note = 2'-deoxy-2'-fluoroguanosine-3'-phosphate
  modified_base 15: mod_base = OTHER; note = 2'-O-methyluridine-3'-phosphate
  modified_base 16: mod_base = OTHER; note = 2'-deoxy-2'-fluorouridine-3'-phosphate
  modified_base 17: mod_base = OTHER; note = 2'-O-methyladenosine-3'-phosphate
  modified_base 18: mod_base = OTHER; note = 2'-O-methylguanosine-3'-phosphate
  modified_base 19: mod_base = OTHER; note = 2'-O-methylguanosine-3'-phosphate
  modified_base 20: mod_base = OTHER; note = 2'-O-methyladenosine-3'-phosphate
  modified_base 21: mod_base = OTHER; note = 2'-O-methylguanosine-3'-phosphate
  modified_base 22: mod_base = OTHER; note = 2'-O-methyluridine-3'-phosphate
  modified_base 23: mod_base = OTHER; note = 2'-O-methylcytidine
ttaagactactcagttaggagtc

SEQ ID NO: 5519 - RNA, 23 nt, synthetic construct
  source 1..23: mol_type = other RNA
  modified_base 1: mod_base = OTHER; note = 2'-O-methyluridine-3'-phosphate 5'-(E)-Vinylphosphonate
  modified_base 2: mod_base = OTHER; note = 2'-deoxy-2'-fluoroadenosine-3'-phosphate
  modified_base 3: mod_base = OTHER; note = 2'-O-methyluridine-3'-phosphate
  modified_base 4: mod_base = OTHER; note = 2'-O-methyladenosine-3'-phosphate
  modified_base 5: mod_base = OTHER; note = 2'-O-methyladenosine-3'-phosphate
  modified_base 6: mod_base = OTHER; note = 2'-deoxy-2'-fluoroguanosine-3'-phosphate
  modified_base 7: mod_base = OTHER; note = 2'-O-methyladenosine-3'-phosphate
  modified_base 8: mod_base = OTHER; note = 2'-O-methylcytidine-3'-phosphate
  modified_base 9: mod_base = OTHER; note = 2'-O-methyluridine-3'-phosphate
  modified_base 10: mod_base = OTHER; note = 2'-O-methyladenosine-3'-phosphate
  modified_base 11: mod_base = OTHER; note = 2'-O-methylcytidine-3'-phosphate
  modified_base 12: mod_base = OTHER; note = 2'-O-methyluridine-3'-phosphate
  modified_base 13: mod_base = OTHER; note = 2'-O-methylcytidine-3'-phosphate
  modified_base 14: mod_base = OTHER; note = 2'-deoxy-2'-fluoroadenosine-3'-phosphate
  modified_base 15: mod_base = OTHER; note = 2'-O-methylguanosine-3'-phosphate
  modified_base 16: mod_base = OTHER; note = 2'-deoxy-2'-fluorouridine-3'-phosphate
  modified_base 17: mod_base = OTHER; note = 2'-O-methyluridine-3'-phosphate
  modified_base 18: mod_base = OTHER; note = 2'-O-methyladenosine-3'-phosphate
  modified_base 19: mod_base = OTHER; note = 2'-O-methylguanosine-3'-phosphate
  modified_base 20: mod_base = OTHER; note = 2'-O-methylguanosine-3'-phosphate
  modified_base 21: mod_base = OTHER; note = 2'-O-methyladenosine-3'-phosphate
  modified_base 22: mod_base = OTHER; note = 2'-O-methylguanosine-3'-phosphate
  modified_base 23: mod_base = OTHER; note = 2'-O-methyluridine
tataagactactcagttaggagt

SEQ ID NO: 5520 - RNA, 23 nt, synthetic construct
  source 1..23: mol_type = other RNA
  modified_base 1: mod_base = OTHER; note = 2'-O-methyluridine-3'-phosphate 5'-(E)-Vinylphosphonate
  modified_base 2: mod_base = OTHER; note = 2'-deoxy-2'-fluorouridine-3'-phosphate
  modified_base 3: mod_base = OTHER; note = 2'-O-methyladenosine-3'-phosphate
  modified_base 4: mod_base = OTHER; note = 2'-O-methyluridine-3'-phosphate
  modified_base 5: mod_base = OTHER; note = 2'-O-methyladenosine-3'-phosphate
  modified_base 6: mod_base = OTHER; note = 2'-deoxy-2'-fluoroadenosine-3'-phosphate
  modified_base 7: mod_base = OTHER; note = 2'-O-methylguanosine-3'-phosphate
  modified_base 8: mod_base = OTHER; note = 2'-O-methyladenosine-3'-phosphate
  modified_base 9: mod_base = OTHER; note = 2'-O-methylcytidine-3'-phosphate
  modified_base 10: mod_base = OTHER; note = 2'-O-methyluridine-3'-phosphate
  modified_base 11: mod_base = OTHER; note = 2'-O-methyladenosine-3'-phosphate
  modified_base 12: mod_base = OTHER; note = 2'-O-methylcytidine-3'-phosphate
  modified_base 13: mod_base = OTHER; note = 2'-O-methyluridine-3'-phosphate
  modified_base 14: mod_base = OTHER; note = 2'-deoxy-2'-fluorocytidine-3'-phosphate
  modified_base 15: mod_base = OTHER; note = 2'-O-methyladenosine-3'-phosphate
  modified_base 16: mod_base = OTHER; note = 2'-deoxy-2'-fluoroguanosine-3'-phosphate
  modified_base 17: mod_base = OTHER; note = 2'-O-methyluridine-3'-phosphate
  modified_base 18: mod_base = OTHER; note = 2'-O-methyluridine-3'-phosphate
  modified_base 19: mod_base = OTHER; note = 2'-O-methyladenosine-3'-phosphate
  modified_base 20: mod_base = OTHER; note = 2'-O-methylguanosine-3'-phosphate
  modified_base 21: mod_base = OTHER; note = 2'-O-methylguanosine-3'-phosphate
  modified_base 22: mod_base = OTHER; note = 2'-O-methyladenosine-3'-phosphate
  modified_base 23: mod_base = OTHER; note = 2'-O-methylguanosine
ttataagactactcagttaggag

SEQ ID NO: 5521 - RNA, 23 nt, synthetic construct
  source 1..23: mol_type = other RNA
  modified_base 1: mod_base = OTHER; note = 2'-O-methyluridine-3'-phosphate 5'-(E)-Vinylphosphonate
  modified_base 2: mod_base = OTHER; note = 2'-deoxy-2'-fluoroadenosine-3'-phosphate
  modified_base 3: mod_base = OTHER; note = 2'-O-methyluridine-3'-phosphate
  modified_base 4: mod_base = OTHER; note = 2'-O-methyladenosine-3'-phosphate
  modified_base 5: mod_base = OTHER; note = 2'-O-methyluridine-3'-phosphate
  modified_base 6: mod_base = OTHER; note = 2'-deoxy-2'-fluoroadenosine-3'-phosphate
  modified_base 7: mod_base = OTHER; note = 2'-O-methyladenosine-3'-phosphate
  modified_base 8: mod_base = OTHER; note = 2'-O-methylguanosine-3'-phosphate
  modified_base 9: mod_base = OTHER; note = 2'-O-methyladenosine-3'-phosphate
  modified_base 10: mod_base = OTHER; note = 2'-O-methylcytidine-3'-phosphate
  modified_base 11: mod_base = OTHER; note = 2'-O-methyluridine-3'-phosphate
  modified_base 12: mod_base = OTHER; note = 2'-O-methyladenosine-3'-phosphate
  modified_base 13: mod_base = OTHER; note = 2'-O-methylcytidine-3'-phosphate
  modified_base 14: mod_base = OTHER; note = 2'-deoxy-2'-fluorouridine-3'-phosphate
  modified_base 15: mod_base = OTHER; note = 2'-O-methylcytidine-3'-phosphate
  modified_base 16: mod_base = OTHER; note = 2'-deoxy-2'-fluoroadenosine-3'-phosphate
  modified_base 17: mod_base = OTHER; note = 2'-O-methylguanosine-3'-phosphate
  modified_base 18: mod_base = OTHER; note = 2'-O-methyluridine-3'-phosphate
  modified_base 19: mod_base = OTHER; note = 2'-O-methyluridine-3'-phosphate
  modified_base 20: mod_base = OTHER; note = 2'-O-methyladenosine-3'-phosphate
  modified_base 21: mod_base = OTHER; note = 2'-O-methylguanosine-3'-phosphate
  modified_base 22: mod_base = OTHER; note = 2'-O-methylguanosine-3'-phosphate
  modified_base 23: mod_base = OTHER; note = 2'-O-methyladenosine
tatataagactactcagttagga

SEQ ID NO: 5522 - RNA, 23 nt, synthetic construct
  source 1..23: mol_type = other RNA
  modified_base 1: mod_base = OTHER; note = 2'-O-methyluridine-3'-phosphate 5'-(E)-Vinylphosphonate
  modified_base 2: mod_base = OTHER; note = 2'-deoxy-2'-fluoroadenosine-3'-phosphate
  modified_base 3: mod_base = OTHER; note = 2'-O-methyladenosine-3'-phosphate
  modified_base 4: mod_base = OTHER; note = 2'-O-methyluridine-3'-phosphate
  modified_base 5: mod_base = OTHER; note = 2'-O-methyladenosine-3'-phosphate
  modified_base 6: mod_base = OTHER; note = 2'-deoxy-2'-fluorouridine-3'-phosphate
  modified_base 7: mod_base = OTHER; note = 2'-O-methyladenosine-3'-phosphate
  modified_base 8: mod_base = OTHER; note = 2'-O-methyladenosine-3'-phosphate
  modified_base 9: mod_base = OTHER; note = 2'-O-methylguanosine-3'-phosphate
  modified_base 10: mod_base = OTHER; note = 2'-O-methyladenosine-3'-phosphate
  modified_base 11: mod_base = OTHER; note = 2'-O-methylcytidine-3'-phosphate
  modified_base 12: mod_base = OTHER; note = 2'-O-methyluridine-3'-phosphate
  modified_base 13: mod_base = OTHER; note = 2'-O-methyladenosine-3'-phosphate
  modified_base 14: mod_base = OTHER; note = 2'-deoxy-2'-fluorocytidine-3'-phosphate
  modified_base 15: mod_base = OTHER; note = 2'-O-methyluridine-3'-phosphate
  modified_base 16: mod_base = OTHER; note = 2'-deoxy-2'-fluorocytidine-3'-phosphate
  modified_base 17: mod_base = OTHER; note = 2'-O-methyladenosine-3'-phosphate
  modified_base 18: mod_base = OTHER; note = 2'-O-methylguanosine-3'-phosphate
  modified_base 19: mod_base = OTHER; note = 2'-O-methyluridine-3'-phosphate
  modified_base 20: mod_base = OTHER; note = 2'-O-methyluridine-3'-phosphate
  modified_base 21: mod_base = OTHER; note = 2'-O-methyladenosine-3'-phosphate
  modified_base 22: mod_base = OTHER; note = 2'-O-methylguanosine-3'-phosphate
  modified_base 23: mod_base = OTHER; note = 2'-O-methylguanosine
taatataagactactcagttagg

SEQ ID NO: 5523 - RNA, 23 nt, synthetic construct
  source 1..23: mol_type = other RNA
  modified_base 1: mod_base = OTHER; note = 2'-O-methyluridine-3'-phosphate 5'-(E)-Vinylphosphonate
  modified_base 2: mod_base = OTHER; note = 2'-deoxy-2'-fluoroadenosine-3'-phosphate
  modified_base 3: mod_base = OTHER; note = 2'-O-methyladenosine-3'-phosphate
  modified_base 4: mod_base = OTHER; note = 2'-O-methyladenosine-3'-phosphate
  modified_base 5: mod_base = OTHER; note = 2'-O-methyluridine-3'-phosphate
  modified_base 6: mod_base = OTHER; note = 2'-deoxy-2'-fluoroadenosine-3'-phosphate
  modified_base 7: mod_base = OTHER; note = 2'-O-methyluridine-3'-phosphate
  modified_base 8: mod_base = OTHER; note = 2'-O-methyladenosine-3'-phosphate
  modified_base 9: mod_base = OTHER; note = 2'-O-methyladenosine-3'-phosphate
  modified_base 10: mod_base = OTHER; note = 2'-O-methylguanosine-3'-phosphate
  modified_base 11: mod_base = OTHER; note = 2'-O-methyladenosine-3'-phosphate
  modified_base 12: mod_base = OTHER; note = 2'-O-methylcytidine-3'-phosphate
  modified_base 13: mod_base = OTHER; note = 2'-O-methyluridine-3'-phosphate
  modified_base 14: mod_base = OTHER; note = 2'-deoxy-2'-fluoroadenosine-3'-phosphate
  modified_base 15: mod_base = OTHER; note = 2'-O-methylcytidine-3'-phosphate
  modified_base 16: mod_base = OTHER; note = 2'-deoxy-2'-fluorouridine-3'-phosphate
  modified_base 17: mod_base = OTHER; note = 2'-O-methylcytidine-3'-phosphate
  modified_base 18: mod_base = OTHER; note = 2'-O-methyladenosine-3'-phosphate
  modified_base 19: mod_base = OTHER; note = 2'-O-methylguanosine-3'-phosphate
  modified_base 20: mod_base = OTHER; note = 2'-O-methyluridine-3'-phosphate
  modified_base 21: mod_base = OTHER; note = 2'-O-methyluridine-3'-phosphate
  modified_base 22: mod_base = OTHER; note = 2'-O-methyladenosine-3'-phosphate
  modified_base 23: mod_base = OTHER; note = 2'-O-methylguanosine
taaatataagactactcagttag

SEQ ID NO: 5524 - RNA, 23 nt, synthetic construct
  source 1..23: mol_type = other RNA
  modified_base 1: mod_base = OTHER; note = 2'-O-methyluridine-3'-phosphate 5'-(E)-Vinylphosphonate
  modified_base 2: mod_base = OTHER; note = 2'-deoxy-2'-fluoroguanosine-3'-phosphate
  modified_base 3: mod_base = OTHER; note = 2'-O-methyladenosine-3'-phosphate
  modified_base 4: mod_base = OTHER; note = 2'-O-methyladenosine-3'-phosphate
  modified_base 5: mod_base = OTHER; note = 2'-O-methyladenosine-3'-phosphate
  modified_base 6: mod_base = OTHER; note = 2'-deoxy-2'-fluorouridine-3'-phosphate
  modified_base 7: mod_base = OTHER; note = 2'-O-methyladenosine-3'-phosphate
  modified_base 8: mod_base = OTHER; note = 2'-O-methyluridine-3'-phosphate
  modified_base 9: mod_base = OTHER; note = 2'-O-methyladenosine-3'-phosphate
  modified_base 10: mod_base = OTHER; note = 2'-O-methyladenosine-3'-phosphate
  modified_base 11: mod_base = OTHER; note = 2'-O-methylguanosine-3'-phosphate
  modified_base 12: mod_base = OTHER; note = 2'-O-methyladenosine-3'-phosphate
  modified_base 13: mod_base = OTHER; note = 2'-O-methylcytidine-3'-phosphate
  modified_base 14: mod_base = OTHER; note = 2'-deoxy-2'-fluorouridine-3'-phosphate
  modified_base 15: mod_base = OTHER; note = 2'-O-methyladenosine-3'-phosphate
  modified_base 16: mod_base = OTHER; note = 2'-deoxy-2'-fluorocytidine-3'-phosphate
  modified_base 17: mod_base = OTHER; note = 2'-O-methyluridine-3'-phosphate
  modified_base 18: mod_base = OTHER; note = 2'-O-methylcytidine-3'-phosphate
  modified_base 19: mod_base = OTHER; note = 2'-O-methyladenosine-3'-phosphate
  modified_base 20: mod_base = OTHER; note = 2'-O-methylguanosine-3'-phosphate
  modified_base 21: mod_base = OTHER; note = 2'-O-methyluridine-3'-phosphate
  modified_base 22: mod_base = OTHER; note = 2'-O-methyluridine-3'-phosphate
  modified_base 23: mod_base = OTHER; note = 2'-O-methyladenosine
tgaaatataagactactcagtta

SEQ ID NO: 5525 - RNA, 23 nt, synthetic construct
  source 1..23: mol_type = other RNA
  modified_base 1: mod_base = OTHER; note = 2'-O-methyluridine-3'-phosphate 5'-(E)-Vinylphosphonate
  modified_base 2: mod_base = OTHER; note = 2'-deoxy-2'-fluorouridine-3'-phosphate
  modified_base 3: mod_base = OTHER; note = 2'-O-methylguanosine-3'-phosphate
  modified_base 4: mod_base = OTHER; note = 2'-O-methyladenosine-3'-phosphate
  modified_base 5: mod_base = OTHER; note = 2'-O-methyladenosine-3'-phosphate
  modified_base 6: mod_base = OTHER; note = 2'-deoxy-2'-fluoroadenosine-3'-phosphate
  modified_base 7: mod_base = OTHER; note = 2'-O-methyluridine-3'-phosphate
  modified_base 8: mod_base = OTHER; note = 2'-O-methyladenosine-3'-phosphate
  modified_base 9: mod_base = OTHER; note = 2'-O-methyluridine-3'-phosphate
  modified_base 10: mod_base = OTHER; note = 2'-O-methyladenosine-3'-phosphate
  modified_base 11: mod_base = OTHER; note = 2'-O-methyladenosine-3'-phosphate
  modified_base 12: mod_base = OTHER; note = 2'-O-methylguanosine-3'-phosphate
  modified_base 13: mod_base = OTHER; note = 2'-O-methyladenosine-3'-phosphate
  modified_base 14: mod_base = OTHER; note = 2'-deoxy-2'-fluorocytidine-3'-phosphate
  modified_base 15: mod_base = OTHER; note = 2'-O-methyluridine-3'-phosphate
  modified_base 16: mod_base = OTHER; note = 2'-deoxy-2'-fluoroadenosine-3'-phosphate
  modified_base 17: mod_base = OTHER; note = 2'-O-methylcytidine-3'-phosphate
  modified_base 18: mod_base = OTHER; note = 2'-O-methyluridine-3'-phosphate
  modified_base 19: mod_base = OTHER; note = 2'-O-methylcytidine-3'-phosphate
  modified_base 20: mod_base = OTHER; note = 2'-O-methyladenosine-3'-phosphate
  modified_base 21: mod_base = OTHER; note = 2'-O-methylguanosine-3'-phosphate
  modified_base 22: mod_base = OTHER; note = 2'-O-methyluridine-3'-phosphate
  modified_base 23: mod_base = OTHER; note = 2'-O-methyluridine
ttgaaatataagactactcagtt

SEQ ID NO: 5526 - RNA, 23 nt, synthetic construct
  source 1..23: mol_type = other RNA
  modified_base 1: mod_base = OTHER; note = 2'-O-methyluridine-3'-phosphate 5'-(E)-Vinylphosphonate
  modified_base 2: mod_base = OTHER; note = 2'-deoxy-2'-fluorouridine-3'-phosphate
  modified_base 3: mod_base = OTHER; note = 2'-O-methyluridine-3'-phosphate
  modified_base 4: mod_base = OTHER; note = 2'-O-methylguanosine-3'-phosphate
  modified_base 5: mod_base = OTHER; note = 2'-O-methyladenosine-3'-phosphate
  modified_base 6: mod_base = OTHER; note = 2'-deoxy-2'-fluoroadenosine-3'-phosphate
  modified_base 7: mod_base = OTHER; note = 2'-O-methyladenosine-3'-phosphate
  modified_base 8: mod_base = OTHER; note = 2'-O-methyluridine-3'-phosphate
  modified_base 9: mod_base = OTHER; note = 2'-O-methyladenosine-3'-phosphate
  modified_base 10: mod_base = OTHER; note = 2'-O-methyluridine-3'-phosphate
  modified_base 11: mod_base = OTHER; note = 2'-O-methyladenosine-3'-phosphate
  modified_base 12: mod_base = OTHER; note = 2'-O-methyladenosine-3'-phosphate
  modified_base 13: mod_base = OTHER; note = 2'-O-methylguanosine-3'-phosphate
  modified_base 14: mod_base = OTHER; note = 2'-deoxy-2'-fluoroadenosine-3'-phosphate
  modified_base 15: mod_base = OTHER; note = 2'-O-methylcytidine-3'-phosphate
  modified_base 16: mod_base = OTHER; note = 2'-deoxy-2'-fluorouridine-3'-phosphate
  modified_base 17: mod_base = OTHER; note = 2'-O-methyladenosine-3'-phosphate
  modified_base 18: mod_base = OTHER; note = 2'-O-methylcytidine-3'-phosphate
  modified_base 19: mod_base = OTHER; note = 2'-O-methyluridine-3'-phosphate
  modified_base 20: mod_base = OTHER; note = 2'-O-methylcytidine-3'-phosphate
  modified_base 21: mod_base = OTHER; note = 2'-O-methyladenosine-3'-phosphate
  modified_base 22: mod_base = OTHER; note = 2'-O-methylguanosine-3'-phosphate
  modified_base 23: mod_base = OTHER; note = 2'-O-methyluridine
tttgaaatataagactactcagt

SEQ ID NO: 5527 - RNA, 23 nt, synthetic construct
  source 1..23: mol_type = other RNA
  modified_base 1: mod_base = OTHER; note = 2'-O-methyluridine-3'-phosphate 5'-(E)-Vinylphosphonate
  modified_base 2: mod_base = OTHER; note = 2'-deoxy-2'-fluoroadenosine-3'-phosphate
  modified_base 3: mod_base = OTHER; note = 2'-O-methyluridine-3'-phosphate
  modified_base 4: mod_base = OTHER; note = 2'-O-methyluridine-3'-phosphate
  modified_base 5: mod_base = OTHER; note = 2'-O-methylguanosine-3'-phosphate
  modified_base 6: mod_base = OTHER; note = 2'-deoxy-2'-fluoroadenosine-3'-phosphate
  modified_base 7: mod_base = OTHER; note = 2'-O-methyladenosine-3'-phosphate
  modified_base 8: mod_base = OTHER; note = 2'-O-methyladenosine-3'-phosphate
  modified_base 9: mod_base = OTHER; note = 2'-O-methyluridine-3'-phosphate
  modified_base 10: mod_base = OTHER; note = 2'-O-methyladenosine-3'-phosphate
  modified_base 11: mod_base = OTHER; note = 2'-O-methyluridine-3'-phosphate
  modified_base 12: mod_base = OTHER; note = 2'-O-methyladenosine-3'-phosphate
  modified_base 13: mod_base = OTHER; note = 2'-O-methyladenosine-3'-phosphate
  modified_base 14: mod_base = OTHER; note = 2'-deoxy-2'-fluoroguanosine-3'-phosphate
  modified_base 15: mod_base = OTHER; note = 2'-O-methyladenosine-3'-phosphate
  modified_base 16: mod_base = OTHER; note = 2'-deoxy-2'-fluorocytidine-3'-phosphate
  modified_base 17: mod_base = OTHER; note = 2'-O-methyluridine-3'-phosphate
  modified_base 18: mod_base = OTHER; note = 2'-O-methyladenosine-3'-phosphate
  modified_base 19: mod_base = OTHER; note = 2'-O-methylcytidine-3'-phosphate
  modified_base 20: mod_base = OTHER; note = 2'-O-methyluridine-3'-phosphate
  modified_base 21: mod_base = OTHER; note = 2'-O-methylcytidine-3'-phosphate
  modified_base 22: mod_base = OTHER; note = 2'-O-methyladenosine-3'-phosphate
  modified_base 23: mod_base = OTHER; note = 2'-O-methylguanosine
tattgaaatataagactactcag

SEQ ID NO: 5528 - RNA, 23 nt, synthetic construct
  source 1..23: mol_type = other RNA
  modified_base 1: mod_base = OTHER; note = 2'-O-methyluridine-3'-phosphate 5'-(E)-Vinylphosphonate
  modified_base 2: mod_base = OTHER; note = 2'-deoxy-2'-fluorouridine-3'-phosphate
  modified_base 3: mod_base = OTHER; note = 2'-O-methylcytidine-3'-phosphate
  modified_base 4: mod_base = OTHER; note = 2'-O-methylcytidine-3'-phosphate
  modified_base 5: mod_base = OTHER; note = 2'-O-methyluridine-3'-phosphate
  modified_base 6: mod_base = OTHER; note = 2'-deoxy-2'-fluoroguanosine-3'-phosphate
  modified_base 7: mod_base = OTHER; note = 2'-O-methyluridine-3'-phosphate
  modified_base 8: mod_base = OTHER; note = 2'-O-methyluridine-3'-phosphate
  modified_base 9: mod_base = OTHER; note = 2'-O-methyladenosine-3'-phosphate
  modified_base 10: mod_base = OTHER; note = 2'-O-methyladenosine-3'-phosphate
  modified_base 11: mod_base = OTHER; note = 2'-O-methylguanosine-3'-phosphate
  modified_base 12: mod_base = OTHER; note = 2'-O-methyladenosine-3'-phosphate
  modified_base 13: mod_base = OTHER; note = 2'-O-methylguanosine-3'-phosphate
  modified_base 14: mod_base = OTHER; note = 2'-deoxy-2'-fluorouridine-3'-phosphate
  modified_base 15: mod_base = OTHER; note = 2'-O-methyladenosine-3'-phosphate
  modified_base 16: mod_base = OTHER; note = 2'-deoxy-2'-fluoroadenosine-3'-phosphate
  modified_base 17: mod_base = OTHER; note = 2'-O-methyladenosine-3'-phosphate
  modified_base 18: mod_base = OTHER; note = 2'-O-methylguanosine-3'-phosphate
  modified_base 19: mod_base = OTHER; note = 2'-O-methylguanosine-3'-phosphate
  modified_base 20: mod_base = OTHER; note = 2'-O-methyladenosine-3'-phosphate
  modified_base 21: mod_base = OTHER; note = 2'-O-methyladenosine-3'-phosphate
  modified_base 22: mod_base = OTHER; note = 2'-O-methyladenosine-3'-phosphate
  modified_base 23: mod_base = OTHER; note = 2'-O-methyluridine
ttcctgttaagagtaaaggaaat

SEQ ID NO: 5529 - RNA, 23 nt, synthetic construct
  source 1..23: mol_type = other RNA
  modified_base 1: mod_base = OTHER; note = 2'-O-methyluridine-3'-phosphate 5'-(E)-Vinylphosphonate
  modified_base 2: mod_base = OTHER; note = 2'-deoxy-2'-fluoroadenosine-3'-phosphate
  modified_base 3: mod_base = OTHER; note = 2'-O-methyluridine-3'-phosphate
  modified_base 4: mod_base = OTHER; note = 2'-O-methylcytidine-3'-phosphate
  modified_base 5: mod_base = OTHER; note = 2'-O-methylcytidine-3'-phosphate
  modified_base 6: mod_base = OTHER; note = 2'-deoxy-2'-fluorouridine-3'-phosphate
  modified_base 7: mod_base = OTHER; note = 2'-O-methylguanosine-3'-phosphate
  modified_base 8: mod_base = OTHER; note = 2'-O-methyluridine-3'-phosphate
  modified_base 9: mod_base = OTHER; note = 2'-O-methyluridine-3'-phosphate
  modified_base 10: mod_base = OTHER; note = 2'-O-methyladenosine-3'-phosphate
  modified_base 11: mod_base = OTHER; note = 2'-O-methyladenosine-3'-phosphate
  modified_base 12: mod_base = OTHER; note = 2'-O-methylguanosine-3'-phosphate
  modified_base 13: mod_base = OTHER; note = 2'-O-methyladenosine-3'-phosphate
  modified_base 14: mod_base = OTHER; note = 2'-deoxy-2'-fluoroguanosine-3'-phosphate
  modified_base 15: mod_base = OTHER; note = 2'-O-methyluridine-3'-phosphate
  modified_base 16: mod_base = OTHER; note = 2'-deoxy-2'-fluoroadenosine-3'-phosphate
  modified_base 17: mod_base = OTHER; note = 2'-O-methyladenosine-3'-phosphate
  modified_base 18: mod_base = OTHER; note = 2'-O-methyladenosine-3'-phosphate
  modified_base 19: mod_base = OTHER; note = 2'-O-methylguanosine-3'-phosphate
  modified_base 20: mod_base = OTHER; note = 2'-O-methylguanosine-3'-phosphate
  modified_base 21: mod_base = OTHER; note = 2'-O-methyladenosine-3'-phosphate
  modified_base 22: mod_base = OTHER; note = 2'-O-methyladenosine-3'-phosphate
  modified_base 23: mod_base = OTHER; note = 2'-O-methyladenosine
tatcctgttaagagtaaaggaaa

SEQ ID NO: 5530 - RNA, 23 nt, synthetic construct
  source 1..23: mol_type = other RNA
  modified_base 1: mod_base = OTHER; note = 2'-O-methyluridine-3'-phosphate 5'-(E)-Vinylphosphonate
  modified_base 2: mod_base = OTHER; note = 2'-deoxy-2'-fluoroadenosine-3'-phosphate
  modified_base 3: mod_base = OTHER; note = 2'-O-methyladenosine-3'-phosphate
  modified_base 4: mod_base = OTHER; note = 2'-O-methyluridine-3'-phosphate
  modified_base 5: mod_base = OTHER; note = 2'-O-methylcytidine-3'-phosphate
  modified_base 6: mod_base = OTHER; note = 2'-deoxy-2'-fluorocytidine-3'-phosphate
  modified_base 7: mod_base = OTHER; note = 2'-O-methyluridine-3'-phosphate
  modified_base 8: mod_base = OTHER; note = 2'-O-methylguanosine-3'-phosphate
  modified_base 9: mod_base = OTHER; note = 2'-O-methyluridine-3'-phosphate
  modified_base 10: mod_base = OTHER; note = 2'-O-methyluridine-3'-phosphate
  modified_base 11: mod_base = OTHER; note = 2'-O-methyladenosine-3'-phosphate
  modified_base 12: mod_base = OTHER; note = 2'-O-methyladenosine-3'-phosphate
  modified_base 13: mod_base = OTHER; note = 2'-O-methylguanosine-3'-phosphate
  modified_base 14: mod_base = OTHER; note = 2'-deoxy-2'-fluoroadenosine-3'-phosphate
  modified_base 15: mod_base = OTHER; note = 2'-O-methylguanosine-3'-phosphate
  modified_base 16: mod_base = OTHER; note = 2'-deoxy-2'-fluorouridine-3'-phosphate
  modified_base 17: mod_base = OTHER; note = 2'-O-methyladenosine-3'-phosphate
  modified_base 18: mod_base = OTHER; note = 2'-O-methyladenosine-3'-phosphate
  modified_base 19: mod_base = OTHER; note = 2'-O-methyladenosine-3'-phosphate
  modified_base 20: mod_base = OTHER; note = 2'-O-methylguanosine-3'-phosphate
  modified_base 21: mod_base = OTHER; note = 2'-O-methylguanosine-3'-phosphate
  modified_base 22: mod_base = OTHER; note = 2'-O-methyladenosine-3'-phosphate
  modified_base 23: mod_base = OTHER; note = 2'-O-methyladenosine
taatcctgttaagagtaaaggaa

SEQ ID NO: 5531 - RNA, 23 nt, synthetic construct
  source 1..23: mol_type = other RNA
  modified_base 1: mod_base = OTHER; note = 2'-O-methyluridine-3'-phosphate 5'-(E)-Vinylphosphonate
  modified_base 2: mod_base = OTHER; note = 2'-deoxy-2'-fluorouridine-3'-phosphate
  modified_base 3: mod_base = OTHER; note = 2'-O-methyladenosine-3'-phosphate
  modified_base 4: mod_base = OTHER; note = 2'-O-methyladenosine-3'-phosphate
  modified_base 5: mod_base = OTHER; note = 2'-O-methyluridine-3'-phosphate
  modified_base 6: mod_base = OTHER; note = 2'-deoxy-2'-fluorocytidine-3'-phosphate
  modified_base 7: mod_base = OTHER; note = 2'-O-methylcytidine-3'-phosphate
  modified_base 8: mod_base = OTHER; note = 2'-O-methyluridine-3'-phosphate
  modified_base 9: mod_base = OTHER; note = 2'-O-methylguanosine-3'-phosphate
  modified_base 10: mod_base = OTHER; note = 2'-O-methyluridine-3'-phosphate
  modified_base 11: mod_base = OTHER; note = 2'-O-methyluridine-3'-phosphate
  modified_base 12: mod_base = OTHER; note = 2'-O-methyladenosine-3'-phosphate
  modified_base 13: mod_base = OTHER; note = 2'-O-methyladenosine-3'-phosphate
  modified_base 14: mod_base = OTHER; note = 2'-deoxy-2'-fluoroguanosine-3'-phosphate
  modified_base 15: mod_base = OTHER; note = 2'-O-methyladenosine-3'-phosphate
  modified_base 16: mod_base = OTHER; note = 2'-deoxy-2'-fluoroguanosine-3'-phosphate
  modified_base 17: mod_base = OTHER; note = 2'-O-methyluridine-3'-phosphate
  modified_base 18: mod_base = OTHER; note = 2'-O-methyladenosine-3'-phosphate
  modified_base 19: mod_base = OTHER; note = 2'-O-methyladenosine-3'-phosphate
  modified_base 20: mod_base = OTHER; note = 2'-O-methyladenosine-3'-phosphate
  modified_base 21: mod_base = OTHER; note = 2'-O-methylguanosine-3'-phosphate
  modified_base 22: mod_base = OTHER; note = 2'-O-methylguanosine-3'-phosphate
  modified_base 23: mod_base = OTHER; note = 2'-O-methyladenosine
ttaatcctgttaagagtaaagga

SEQ ID NO: 5532 - RNA, 23 nt, synthetic construct
  source 1..23: mol_type = other RNA
  modified_base 1: mod_base = OTHER; note = 2'-O-methyluridine-3'-phosphate 5'-(E)-Vinylphosphonate
  modified_base 2: mod_base = OTHER; note = 2'-deoxy-2'-fluoroadenosine-3'-phosphate
  modified_base 3: mod_base = OTHER; note = 2'-O-methyluridine-3'-phosphate
  modified_base 4: mod_base = OTHER; note = 2'-O-methyladenosine-3'-phosphate
  modified_base 5: mod_base = OTHER; note = 2'-O-methyladenosine-3'-phosphate
  modified_base 6: mod_base = OTHER; note = 2'-deoxy-2'-fluorouridine-3'-phosphate
  modified_base 7: mod_base = OTHER; note = 2'-O-methylcytidine-3'-phosphate
  modified_base 8: mod_base = OTHER; note = 2'-O-methylcytidine-3'-phosphate
  modified_base 9: mod_base = OTHER; note = 2'-O-methyluridine-3'-phosphate
  modified_base 10: mod_base = OTHER; note = 2'-O-methylguanosine-3'-phosphate
  modified_base 11: mod_base = OTHER; note = 2'-O-methyluridine-3'-phosphate
  modified_base 12: mod_base = OTHER; note = 2'-O-methyluridine-3'-phosphate
  modified_base 13: mod_base = OTHER; note = 2'-O-methyladenosine-3'-phosphate
  modified_base 14: mod_base = OTHER; note = 2'-deoxy-2'-fluoroadenosine-3'-phosphate
  modified_base 15: mod_base = OTHER; note = 2'-O-methylguanosine-3'-phosphate
  modified_base 16: mod_base = OTHER; note = 2'-deoxy-2'-fluoroadenosine-3'-phosphate
  modified_base 17: mod_base = OTHER; note = 2'-O-methylguanosine-3'-phosphate
  modified_base 18: mod_base = OTHER; note = 2'-O-methyluridine-3'-phosphate
  modified_base 19: mod_base = OTHER; note = 2'-O-methyladenosine-3'-phosphate
  modified_base 20: mod_base = OTHER; note = 2'-O-methyladenosine-3'-phosphate
  modified_base 21: mod_base = OTHER; note = 2'-O-methyladenosine-3'-phosphate
  modified_base 22: mod_base = OTHER; note = 2'-O-methylguanosine-3'-phosphate
  modified_base 23: mod_base = OTHER; note = 2'-O-methylguanosine
tataatcctgttaagagtaaagg

SEQ ID NO: 5533 - RNA, 23 nt, synthetic construct
  source 1..23: mol_type = other RNA
  modified_base 1: mod_base = OTHER; note = 2'-O-methyluridine-3'-phosphate 5'-(E)-Vinylphosphonate
  modified_base 2: mod_base = OTHER; note = 2'-deoxy-2'-fluorouridine-3'-phosphate
  modified_base 3: mod_base = OTHER; note = 2'-O-methyladenosine-3'-phosphate
  modified_base 4: mod_base = OTHER; note = 2'-O-methyluridine-3'-phosphate
  modified_base 5: mod_base = OTHER; note = 2'-O-methyladenosine-3'-phosphate
  modified_base 6: mod_base = OTHER; note = 2'-deoxy-2'-fluoroadenosine-3'-phosphate
  modified_base 7: mod_base = OTHER; note = 2'-O-methyluridine-3'-phosphate
  modified_base 8: mod_base = OTHER; note = 2'-O-methylcytidine-3'-phosphate
  modified_base 9: mod_base = OTHER; note = 2'-O-methylcytidine-3'-phosphate
  modified_base 10: mod_base = OTHER; note = 2'-O-methyluridine-3'-phosphate
  modified_base 11: mod_base = OTHER; note = 2'-O-methylguanosine-3'-phosphate
  modified_base 12: mod_base = OTHER; note = 2'-O-methyluridine-3'-phosphate
  modified_base 13: mod_base = OTHER; note = 2'-O-methyluridine-3'-phosphate
  modified_base 14: mod_base = OTHER; note = 2'-deoxy-2'-fluoroadenosine-3'-phosphate
  modified_base 15: mod_base = OTHER; note = 2'-O-methyladenosine-3'-phosphate
  modified_base 16: mod_base = OTHER; note = 2'-deoxy-2'-fluoroguanosine-3'-phosphate
  modified_base 17: mod_base = OTHER; note = 2'-O-methyladenosine-3'-phosphate
  modified_base 18: mod_base = OTHER; note = 2'-O-methylguanosine-3'-phosphate
  modified_base 19: mod_base = OTHER; note = 2'-O-methyluridine-3'-phosphate
  modified_base 20: mod_base = OTHER; note = 2'-O-methyladenosine-3'-phosphate
  modified_base 21: mod_base = OTHER; note = 2'-O-methyladenosine-3'-phosphate
  modified_base 22: mod_base = OTHER; note = 2'-O-methyladenosine-3'-phosphate
  modified_base 23: mod_base = OTHER; note = 2'-O-methylguanosine
ttataatcctgttaagagtaaag

SEQ ID NO: 5534 - RNA, 23 nt, synthetic construct
  source 1..23: mol_type = other RNA
  modified_base 1: mod_base = OTHER; note = 2'-O-methyluridine-3'-phosphate 5'-(E)-Vinylphosphonate
  modified_base 2: mod_base = OTHER; note = 2'-deoxy-2'-fluorocytidine-3'-phosphate
  modified_base 3: mod_base = OTHER; note = 2'-O-methyluridine-3'-phosphate
  modified_base 4: mod_base = OTHER; note = 2'-O-methyladenosine-3'-phosphate
  modified_base 5: mod_base = OTHER; note = 2'-O-methyluridine-3'-phosphate
  modified_base 6: mod_base = OTHER; note = 2'-deoxy-2'-fluoroadenosine-3'-phosphate
  modified_base 7: mod_base = OTHER; note = 2'-O-methyluridine-3'-phosphate
  modified_base 8: mod_base = OTHER; note = 2'-O-methyladenosine-3'-phosphate
  modified_base 9: mod_base = OTHER; note = 2'-O-methyluridine-3'-phosphate
  modified_base 10: mod_base = OTHER; note = 2'-O-methyladenosine-3'-phosphate
  modified_base 11: mod_base = OTHER; note = 2'-O-methyladenosine-3'-phosphate
  modified_base 12: mod_base = OTHER; note = 2'-O-methyluridine-3'-phosphate
  modified_base 13: mod_base = OTHER; note = 2'-O-methylcytidine-3'-phosphate
  modified_base 14: mod_base = OTHER; note = 2'-deoxy-2'-fluorocytidine-3'-phosphate
  modified_base 15: mod_base = OTHER; note = 2'-O-methyluridine-3'-phosphate
  modified_base 16: mod_base = OTHER; note = 2'-deoxy-2'-fluoroguanosine-3'-phosphate
  modified_base 17: mod_base = OTHER; note = 2'-O-methyluridine-3'-phosphate
  modified_base 18: mod_base = OTHER; note = 2'-O-methyluridine-3'-phosphate
  modified_base 19: mod_base = OTHER; note = 2'-O-methyladenosine-3'-phosphate
  modified_base 20: mod_base = OTHER; note = 2'-O-methyladenosine-3'-phosphate
  modified_base 21: mod_base = OTHER; note = 2'-O-methylguanosine-3'-phosphate
  modified_base 22: mod_base = OTHER; note = 2'-O-methyladenosine-3'-phosphate
  modified_base 23: mod_base = OTHER; note = 2'-O-methylguanosine
tctatatataatcctgttaagag

SEQ ID NO: 5535 - RNA, 23 nt, synthetic construct
  source 1..23: mol_type = other RNA
  modified_base 1: mod_base = OTHER; note = 2'-O-methyluridine-3'-phosphate 5'-(E)-Vinylphosphonate
  modified_base 2: mod_base = OTHER; note = 2'-deoxy-2'-fluorocytidine-3'-phosphate
  modified_base 3: mod_base = OTHER; note = 2'-O-methyladenosine-3'-phosphate
  modified_base 4: mod_base = OTHER; note = 2'-O-methyluridine-3'-phosphate
  modified_base 5: mod_base = OTHER; note = 2'-O-methylguanosine-3'-phosphate
  modified_base 6: mod_base = OTHER; note = 2'-deoxy-2'-fluorouridine-3'-phosphate
  modified_base 7: mod_base = OTHER; note = 2'-O-methyluridine-3'-phosphate
  modified_base 8: mod_base = OTHER; note = 2'-O-methylcytidine-3'-phosphate
  modified_base 9: mod_base = OTHER; note = 2'-O-methyluridine-3'-phosphate
  modified_base 10: mod_base = OTHER; note = 2'-O-methyladenosine-3'-phosphate
  modified_base 11: mod_base = OTHER; note = 2'-O-methyluridine-3'-phosphate
  modified_base 12: mod_base = OTHER; note = 2'-O-methyladenosine-3'-phosphate
  modified_base 13: mod_base = OTHER; note = 2'-O-methyluridine-3'-phosphate
  modified_base 14: mod_base = OTHER; note = 2'-deoxy-2'-fluoroadenosine-3'-phosphate
  modified_base 15: mod_base = OTHER; note = 2'-O-methyluridine-3'-phosphate
  modified_base 16: mod_base = OTHER; note = 2'-deoxy-2'-fluoroadenosine-3'-phosphate
  modified_base 17: mod_base = OTHER; note = 2'-O-methyladenosine-3'-phosphate
  modified_base 18: mod_base = OTHER; note = 2'-O-methyluridine-3'-phosphate
  modified_base 19: mod_base = OTHER; note = 2'-O-methylcytidine-3'-phosphate
  modified_base 20: mod_base = OTHER; note = 2'-O-methylcytidine-3'-phosphate
  modified_base 21: mod_base = OTHER; note = 2'-O-methyluridine-3'-phosphate
  modified_base 22: mod_base = OTHER; note = 2'-O-methylguanosine-3'-phosphate
  modified_base 23: mod_base = OTHER; note = 2'-O-methyluridine
tcatgttctatatataatcctgt

SEQ ID NO: 5536 - RNA, 23 nt, synthetic construct
  source 1..23: mol_type = other RNA
  modified_base 1: mod_base = OTHER; note = 2'-O-methyluridine-3'-phosphate 5'-(E)-Vinylphosphonate
  modified_base 2: mod_base = OTHER; note = 2'-deoxy-2'-fluorouridine-3'-phosphate
  modified_base 3: mod_base = OTHER; note = 2'-O-methyladenosine-3'-phosphate
  modified_base 4: mod_base = OTHER; note = 2'-O-methyluridine-3'-phosphate
  modified_base 5: mod_base = OTHER; note = 2'-O-methyluridine-3'-phosphate
  modified_base 6: mod_base = OTHER; note = 2'-deoxy-2'-fluorouridine-3'-phosphate
  modified_base 7: mod_base = OTHER; note = 2'-O-methyluridine-3'-phosphate
  modified_base 8: mod_base = OTHER; note = 2'-O-methyluridine-3'-phosphate
  modified_base 9: mod_base = OTHER; note = 2'-O-methylguanosine-3'-phosphate
  modified_base 10: mod_base = OTHER; note = 2'-O-methyluridine-3'-phosphate
  modified_base 11: mod_base = OTHER; note = 2'-O-methyladenosine-3'-phosphate
  modified_base 12: mod_base = OTHER; note = 2'-O-methyladenosine-3'-phosphate
  modified_base 13: mod_base = OTHER; note = 2'-O-methylguanosine-3'-phosphate
  modified_base 14: mod_base = OTHER; note = 2'-deoxy-2'-fluorouridine-3'-phosphate
  modified_base 15: mod_base = OTHER; note = 2'-O-methylguanosine-3'-phosphate
  modified_base 16: mod_base = OTHER; note = 2'-deoxy-2'-fluoroadenosine-3'-phosphate
  modified_base 17: mod_base = OTHER; note = 2'-O-methylguanosine-3'-phosphate
  modified_base 18: mod_base = OTHER; note = 2'-O-methylcytidine-3'-phosphate
  modified_base 19: mod_base = OTHER; note = 2'-O-methyladenosine-3'-phosphate
  modified_base 20: mod_base = OTHER; note = 2'-O-methyluridine-3'-phosphate
  modified_base 21: mod_base = OTHER; note = 2'-O-methylguanosine-3'-phosphate
  modified_base 22: mod_base = OTHER; note = 2'-O-methyluridine-3'-phosphate
  modified_base 23: mod_base = OTHER; note = 2'-O-methyluridine
ttatttttgtaagtgagcatgtt

SEQ ID NO: 5537 - RNA, 23 nt, synthetic construct
  source 1..23: mol_type = other RNA
  modified_base 1: mod_base = OTHER; note = 2'-O-methyluridine-3'-phosphate 5'-(E)-Vinylphosphonate
  modified_base 2: mod_base = OTHER; note = 2'-deoxy-2'-fluoroadenosine-3'-phosphate
  modified_base 3: mod_base = OTHER; note = 2'-O-methyluridine-3'-phosphate
  modified_base 4: mod_base = OTHER; note = 2'-O-methylcytidine-3'-phosphate
  modified_base 5: mod_base = OTHER; note = 2'-O-methyladenosine-3'-phosphate
  modified_base 6: mod_base = OTHER; note = 2'-deoxy-2'-fluorouridine-3'-phosphate
  modified_base 7: mod_base = OTHER; note = 2'-O-methylcytidine-3'-phosphate
  modified_base 8: mod_base = OTHER; note = 2'-O-methylcytidine-3'-phosphate
  modified_base 9: mod_base = OTHER; note = 2'-O-methyluridine-3'-phosphate
  modified_base 10: mod_base = OTHER; note = 2'-O-methyladenosine-3'-phosphate
  modified_base 11: mod_base = OTHER; note = 2'-O-methyluridine-3'-phosphate
  modified_base 12: mod_base = OTHER; note = 2'-O-methyluridine-3'-phosphate
  modified_base 13: mod_base = OTHER; note = 2'-O-methyluridine-3'-phosphate
  modified_base 14: mod_base = OTHER; note = 2'-deoxy-2'-fluorouridine-3'-phosphate
  modified_base 15: mod_base = OTHER; note = 2'-O-methyluridine-3'-phosphate
  modified_base 16: mod_base = OTHER; note = 2'-deoxy-2'-fluoroguanosine-3'-phosphate
  modified_base 17: mod_base = OTHER; note = 2'-O-methyluridine-3'-phosphate
  modified_base 18: mod_base = OTHER; note = 2'-O-methyladenosine-3'-phosphate
  modified_base 19: mod_base = OTHER; note = 2'-O-methyladenosine-3'-phosphate
  modified_base 20: mod_base = OTHER; note = 2'-O-methylguanosine-3'-phosphate
  modified_base 21: mod_base = OTHER; note = 2'-O-methyluridine-3'-phosphate
  modified_base 22: mod_base = OTHER; note = 2'-O-methylguanosine-3'-phosphate
  modified_base 23: mod_base = OTHER; note = 2'-O-methyladenosine
tatcatcctatttttgtaagtga

SEQ ID NO: 5538 - RNA, 23 nt, synthetic construct
  source 1..23: mol_type = other RNA
  modified_base 1: mod_base = OTHER; note = 2'-O-methyluridine-3'-phosphate 5'-(E)-Vinylphosphonate
  modified_base 2: mod_base = OTHER; note = 2'-deoxy-2'-fluoroadenosine-3'-phosphate
  modified_base 3: mod_base = OTHER; note = 2'-O-methyluridine-3'-phosphate
  modified_base 4: mod_base = OTHER; note = 2'-O-methyladenosine-3'-phosphate
  modified_base 5: mod_base = OTHER; note = 2'-O-methylcytidine-3'-phosphate
  modified_base 6: mod_base = OTHER; note = 2'-deoxy-2'-fluoroadenosine-3'-phosphate
  modified_base 7: mod_base = OTHER; note = 2'-O-methyladenosine-3'-phosphate
  modified_base 8: mod_base = OTHER; note = 2'-O-methylguanosine-3'-phosphate
  modified_base 9: mod_base = OTHER; note = 2'-O-methyladenosine-3'-phosphate
  modified_base 10: mod_base = OTHER; note = 2'-O-methyladenosine-3'-phosphate
  modified_base 11: mod_base = OTHER; note = 2'-O-methylguanosine-3'-phosphate
  modified_base 12: mod_base = OTHER; note = 2'-O-methylcytidine-3'-phosphate
  modified_base 13: mod_base = OTHER; note = 2'-O-methylcytidine-3'-phosphate
  modified_base 14: mod_base = OTHER; note = 2'-deoxy-2'-fluorouridine-3'-phosphate
  modified_base 15: mod_base = OTHER; note = 2'-O-methylguanosine-3'-phosphate
  modified_base 16: mod_base = OTHER; note = 2'-deoxy-2'-fluorocytidine-3'-phosphate
  modified_base 17: mod_base = OTHER; note = 2'-O-methylcytidine-3'-phosphate
  modified_base 18: mod_base = OTHER; note = 2'-O-methyluridine-3'-phosphate
  modified_base 19: mod_base = OTHER; note = 2'-O-methyluridine-3'-phosphate
  modified_base 20: mod_base = OTHER; note = 2'-O-methyladenosine-3'-phosphate
  modified_base 21: mod_base = OTHER; note = 2'-O-methyluridine-3'-phosphate
  modified_base 22: mod_base = OTHER; note = 2'-O-methylguanosine-3'-phosphate
  modified_base 23: mod_base = OTHER; note = 2'-O-methylcytidine
tatacaagaagcctgccttatgc

SEQ ID NO: 5539 - RNA, 23 nt, synthetic construct
  source 1..23: mol_type = other RNA
  modified_base 1: mod_base = OTHER; note = 2'-O-methyluridine-3'-phosphate 5'-(E)-Vinylphosphonate
  modified_base 2: mod_base = OTHER; note = 2'-deoxy-2'-fluoroadenosine-3'-phosphate
  modified_base 3: mod_base = OTHER; note = 2'-O-methyladenosine-3'-phosphate
  modified_base 4: mod_base = OTHER; note = 2'-O-methylguanosine-3'-phosphate
  modified_base 5: mod_base = OTHER; note = 2'-O-methyluridine-3'-phosphate
  modified_base 6: mod_base = OTHER; note = 2'-deoxy-2'-fluoroadenosine-3'-phosphate
  modified_base 7: mod_base = OTHER; note = 2'-O-methyluridine-3'-phosphate
  modified_base 8: mod_base = OTHER; note = 2'-O-methyladenosine-3'-phosphate
  modified_base 9: mod_base = OTHER; note = 2'-O-methyluridine-3'-phosphate
  modified_base 10: mod_base = OTHER; note = 2'-O-methyladenosine-3'-phosphate
  modified_base 11: mod_base = OTHER; note = 2'-O-methylcytidine-3'-phosphate
  modified_base 12: mod_base = OTHER; note = 2'-O-methyladenosine-3'-phosphate
  modified_base 13: mod_base = OTHER; note = 2'-O-methyladenosine-3'-phosphate
  modified_base 14: mod_base = OTHER; note = 2'-deoxy-2'-fluoroguanosine-3'-phosphate
  modified_base 15: mod_base = OTHER; note = 2'-O-methyladenosine-3'-phosphate
  modified_base 16: mod_base = OTHER; note = 2'-deoxy-2'-fluoroadenosine-3'-phosphate
  modified_base 17: mod_base = OTHER; note = 2'-O-methylguanosine-3'-phosphate
  modified_base 18: mod_base = OTHER; note = 2'-O-methylcytidine-3'-phosphate
  modified_base 19: mod_base = OTHER; note = 2'-O-methylcytidine-3'-phosphate
  modified_base 20: mod_base = OTHER; note = 2'-O-methyluridine-3'-phosphate
  modified_base 21: mod_base = OTHER; note = 2'-O-methylguanosine-3'-phosphate
  modified_base 22: mod_base = OTHER; note = 2'-O-methylcytidine-3'-phosphate
  modified_base 23: mod_base = OTHER; note = 2'-O-methylcytidine
taagtatatacaagaagcctgcc

SEQ ID NO: 5540 - RNA, 23 nt, synthetic construct
  source 1..23: mol_type = other RNA
  modified_base 1: mod_base = OTHER; note = 2'-O-methyluridine-3'-phosphate 5'-(E)-Vinylphosphonate
  modified_base 2: mod_base = OTHER; note = 2'-deoxy-2'-fluorouridine-3'-phosphate
  modified_base 3: mod_base = OTHER; note = 2'-O-methyluridine-3'-phosphate
  modified_base 4: mod_base = OTHER; note = 2'-O-methyluridine-3'-phosphate
  modified_base 5: mod_base = OTHER; note = 2'-O-methylguanosine-3'-phosphate
  modified_base 6: mod_base = OTHER; note = 2'-deoxy-2'-fluoroadenosine-3'-phosphate
  modified_base 7: mod_base = OTHER; note = 2'-O-methylcytidine-3'-phosphate
  modified_base 8: mod_base = OTHER; note = 2'-O-methyladenosine-3'-phosphate
  modified_base 9: mod_base = OTHER; note = 2'-O-methylguanosine-3'-phosphate
  modified_base 10: mod_base = OTHER; note = 2'-O-methylcytidine-3'-phosphate
  modified_base 11: mod_base = OTHER; note = 2'-O-methyladenosine-3'-phosphate
  modified_base 12: mod_base = OTHER; note = 2'-O-methyluridine-3'-phosphate
  modified_base 13: mod_base = OTHER; note = 2'-O-methyladenosine-3'-phosphate
  modified_base 14: mod_base = OTHER; note = 2'-deoxy-2'-fluoroadenosine-3'-phosphate
  modified_base 15: mod_base = OTHER; note = 2'-O-methylguanosine-3'-phosphate
  modified_base 16: mod_base = OTHER; note = 2'-deoxy-2'-fluorouridine-3'-phosphate
  modified_base 17: mod_base = OTHER; note = 2'-O-methyladenosine-3'-phosphate
  modified_base 18: mod_base = OTHER; note = 2'-O-methyluridine-3'-phosphate
  modified_base 19: mod_base = OTHER; note = 2'-O-methyladenosine-3'-phosphate
  modified_base 20: mod_base = OTHER; note = 2'-O-methyluridine-3'-phosphate
  modified_base 21: mod_base = OTHER; note = 2'-O-methyladenosine-3'-phosphate
  modified_base 22: mod_base = OTHER; note = 2'-O-methylcytidine-3'-phosphate
  modified_base 23: mod_base = OTHER; note = 2'-O-methyladenosine
ttttgacagcataagtatataca

SEQ ID NO: 5541 - RNA, 23 nt, synthetic construct
  source 1..23: mol_type = other RNA
  modified_base 1: mod_base = OTHER; note = 2'-O-methyluridine-3'-phosphate 5'-(E)-Vinylphosphonate
  modified_base 2: mod_base = OTHER; note = 2'-deoxy-2'-fluoroadenosine-3'-phosphate
  modified_base 3: mod_base = OTHER; note = 2'-O-methyluridine-3'-phosphate
  modified_base 4: mod_base = OTHER; note = 2'-O-methyluridine-3'-phosphate
  modified_base 5: mod_base = OTHER; note = 2'-O-methyluridine-3'-phosphate
  modified_base 6: mod_base = OTHER; note = 2'-deoxy-2'-fluoroguanosine-3'-phosphate
  modified_base 7: mod_base = OTHER; note = 2'-O-methyladenosine-3'-phosphate
  modified_base 8: mod_base = OTHER; note = 2'-O-methylcytidine-3'-phosphate
  modified_base 9: mod_base = OTHER; note = 2'-O-methyladenosine-3'-phosphate
  modified_base 10: mod_base = OTHER; note = 2'-O-methylguanosine-3'-phosphate
  modified_base 11: mod_base = OTHER; note = 2'-O-methylcytidine-3'-phosphate
  modified_base 12: mod_base = OTHER; note = 2'-O-methyladenosine-3'-phosphate
  modified_base 13: mod_base = OTHER; note = 2'-O-methyluridine-3'-phosphate
  modified_base 14: mod_base = OTHER; note = 2'-deoxy-2'-fluoroadenosine-3'-phosphate
  modified_base 15: mod_base = OTHER; note = 2'-O-methyladenosine-3'-phosphate
  modified_base 16: mod_base = OTHER; note = 2'-deoxy-2'-fluoroguanosine-3'-phosphate
  modified_base 17: mod_base = OTHER; note = 2'-O-methyluridine-3'-phosphate
  modified_base 18: mod_base = OTHER; note = 2'-O-methyladenosine-3'-phosphate
  modified_base 19: mod_base = OTHER; note = 2'-O-methyluridine-3'-phosphate
  modified_base 20: mod_base = OTHER; note = 2'-O-methyladenosine-3'-phosphate
  modified_base 21: mod_base = OTHER; note = 2'-O-methyluridine-3'-phosphate
  modified_base 22: mod_base = OTHER; note = 2'-O-methyladenosine-3'-phosphate
  modified_base 23: mod_base = OTHER; note = 2'-O-methylcytidine
tatttgacagcataagtatatac

SEQ ID NO: 5542 - RNA, 23 nt, synthetic construct
  source 1..23: mol_type = other RNA
  modified_base 1: mod_base = OTHER; note = 2'-O-methyluridine-3'-phosphate 5'-(E)-Vinylphosphonate
  modified_base 2: mod_base = OTHER; note = 2'-deoxy-2'-fluorocytidine-3'-phosphate
  modified_base 3: mod_base = OTHER; note = 2'-O-methyladenosine-3'-phosphate
  modified_base 4: mod_base = OTHER; note = 2'-O-methyluridine-3'-phosphate
  modified_base 5: mod_base = OTHER; note = 2'-O-methyluridine-3'-phosphate
  modified_base 6: mod_base = OTHER; note = 2'-deoxy-2'-fluorouridine-3'-phosphate
  modified_base 7: mod_base = OTHER; note = 2'-O-methylguanosine-3'-phosphate
  modified_base 8: mod_base = OTHER; note = 2'-O-methyladenosine-3'-phosphate
  modified_base 9: mod_base = OTHER; note = 2'-O-methylcytidine-3'-phosphate
  modified_base 10: mod_base = OTHER; note = 2'-O-methyladenosine-3'-phosphate
  modified_base 11: mod_base = OTHER; note = 2'-O-methylguanosine-3'-phosphate
  modified_base 12: mod_base = OTHER; note = 2'-O-methylcytidine-3'-phosphate
  modified_base 13: mod_base = OTHER; note = 2'-O-methyladenosine-3'-phosphate
  modified_base 14: mod_base = OTHER; note = 2'-deoxy-2'-fluorouridine-3'-phosphate
  modified_base 15: mod_base = OTHER; note = 2'-O-methyladenosine-3'-phosphate
  modified_base 16: mod_base = OTHER; note = 2'-deoxy-2'-fluoroadenosine-3'-phosphate
  modified_base 17: mod_base = OTHER; note = 2'-O-methylguanosine-3'-phosphate
  modified_base 18: mod_base = OTHER; note = 2'-O-methyluridine-3'-phosphate
  modified_base 19: mod_base = OTHER; note = 2'-O-methyladenosine-3'-phosphate
  modified_base 20: mod_base = OTHER; note = 2'-O-methyluridine-3'-phosphate
  modified_base 21: mod_base = OTHER; note = 2'-O-methyladenosine-3'-phosphate
  modified_base 22: mod_base = OTHER; note = 2'-O-methyluridine-3'-phosphate
  modified_base 23: mod_base = OTHER; note = 2'-O-methyladenosine
tcatttgacagcataagtatata

SEQ ID NO: 5543 - RNA, 23 nt, synthetic construct
  source 1..23: mol_type = other RNA
  modified_base 1: mod_base = OTHER; note = 2'-O-methyluridine-3'-phosphate 5'-(E)-Vinylphosphonate
  modified_base 2: mod_base = OTHER; note = 2'-deoxy-2'-fluoroadenosine-3'-phosphate
  modified_base 3: mod_base = OTHER; note = 2'-O-methylcytidine-3'-phosphate
  modified_base 4: mod_base = OTHER; note = 2'-O-methyladenosine-3'-phosphate
  modified_base 5: mod_base = OTHER; note = 2'-O-methyluridine-3'-phosphate
  modified_base 6: mod_base = OTHER; note = 2'-deoxy-2'-fluorouridine-3'-phosphate
  modified_base 7: mod_base = OTHER; note = 2'-O-methyluridine-3'-phosphate
  modified_base 8: mod_base = OTHER; note = 2'-O-methylguanosine-3'-phosphate
  modified_base 9: mod_base = OTHER; note = 2'-O-methyladenosine-3'-phosphate
  modified_base 10: mod_base = OTHER; note = 2'-O-methylcytidine-3'-phosphate
  modified_base 11: mod_base = OTHER; note = 2'-O-methyladenosine-3'-phosphate
  modified_base 12: mod_base = OTHER; note = 2'-O-methylguanosine-3'-phosphate
  modified_base 13: mod_base = OTHER; note = 2'-O-methylcytidine-3'-phosphate
  modified_base 14: mod_base = OTHER; note = 2'-deoxy-2'-fluoroadenosine-3'-phosphate
  modified_base 15: mod_base = OTHER; note = 2'-O-methyluridine-3'-phosphate
  modified_base 16: mod_base = OTHER; note = 2'-deoxy-2'-fluoroadenosine-3'-phosphate
  modified_base 17: mod_base = OTHER; note = 2'-O-methyladenosine-3'-phosphate
  modified_base 18: mod_base = OTHER; note = 2'-O-methylguanosine-3'-phosphate
  modified_base 19: mod_base = OTHER; note = 2'-O-methyluridine-3'-phosphate
  modified_base 20: mod_base = OTHER; note = 2'-O-methyladenosine-3'-phosphate
  modified_base 21: mod_base = OTHER; note = 2'-O-methyluridine-3'-phosphate
  modified_base 22: mod_base = OTHER; note = 2'-O-methyladenosine-3'-phosphate
  modified_base 23: mod_base = OTHER; note = 2'-O-methyluridine
tacatttgacagcataagtatat

SEQ ID NO: 5544 - RNA, 23 nt, synthetic construct
  source 1..23: mol_type = other RNA
  modified_base 1: mod_base = OTHER; note = 2'-O-methyluridine-3'-phosphate 5'-(E)-Vinylphosphonate
  modified_base 2: mod_base = OTHER; note = 2'-deoxy-2'-fluoroadenosine-3'-phosphate
  modified_base 3: mod_base = OTHER; note = 2'-O-methyladenosine-3'-phosphate
  modified_base 4: mod_base = OTHER; note = 2'-O-methylcytidine-3'-phosphate
  modified_base 5: mod_base = OTHER; note = 2'-O-methyladenosine-3'-phosphate
  modified_base 6: mod_base = OTHER; note = 2'-deoxy-2'-fluorouridine-3'-phosphate
  modified_base 7: mod_base = OTHER; note = 2'-O-methyluridine-3'-phosphate
  modified_base 8: mod_base = OTHER; note = 2'-O-methyluridine-3'-phosphate
  modified_base 9: mod_base = OTHER; note = 2'-O-methylguanosine-3'-phosphate
  modified_base 10: mod_base = OTHER; note = 2'-O-methyladenosine-3'-phosphate
  modified_base 11: mod_base = OTHER; note = 2'-O-methylcytidine-3'-phosphate
  modified_base 12: mod_base = OTHER; note = 2'-O-methyladenosine-3'-phosphate
  modified_base 13: mod_base = OTHER; note = 2'-O-methylguanosine-3'-phosphate
  modified_base 14: mod_base = OTHER; note = 2'-deoxy-2'-fluorocytidine-3'-phosphate
  modified_base 15: mod_base = OTHER; note = 2'-O-methyladenosine-3'-phosphate
  modified_base 16: mod_base = OTHER; note = 2'-deoxy-2'-fluorouridine-3'-phosphate
  modified_base 17: mod_base = OTHER; note = 2'-O-methyladenosine-3'-phosphate
  modified_base 18: mod_base = OTHER; note = 2'-O-methyladenosine-3'-phosphate
  modified_base 19: mod_base = OTHER; note = 2'-O-methylguanosine-3'-phosphate
  modified_base 20: mod_base = OTHER; note = 2'-O-methyluridine-3'-phosphate
  modified_base 21: mod_base = OTHER; note = 2'-O-methyladenosine-3'-phosphate
  modified_base 22: mod_base = OTHER; note = 2'-O-methyluridine-3'-phosphate
  modified_base 23: mod_base = OTHER; note = 2'-O-methyladenosine
taacatttgacagcataagtata

SEQ ID NO: 5545 - RNA, 23 nt, synthetic construct
  source 1..23: mol_type = other RNA
  modified_base 1: mod_base = OTHER; note = 2'-O-methyluridine-3'-phosphate 5'-(E)-Vinylphosphonate
  modified_base 2: mod_base = OTHER; note = 2'-deoxy-2'-fluorouridine-3'-phosphate
  modified_base 3: mod_base = OTHER; note = 2'-O-methyladenosine-3'-phosphate
  modified_base 4: mod_base = OTHER; note = 2'-O-methyladenosine-3'-phosphate
  modified_base 5: mod_base = OTHER; note = 2'-O-methylcytidine-3'-phosphate
  modified_base 6: mod_base = OTHER; note = 2'-deoxy-2'-fluoroadenosine-3'-phosphate
  modified_base 7: mod_base = OTHER; note = 2'-O-methyluridine-3'-phosphate
  modified_base 8: mod_base = OTHER; note = 2'-O-methyluridine-3'-phosphate
  modified_base 9: mod_base = OTHER; note = 2'-O-methyluridine-3'-phosphate
  modified_base 10: mod_base = OTHER; note = 2'-O-methylguanosine-3'-phosphate
  modified_base 11: mod_base = OTHER; note = 2'-O-methyladenosine-3'-phosphate
  modified_base 12: mod_base = OTHER; note = 2'-O-methylcytidine-3'-phosphate
  modified_base 13: mod_base = OTHER; note = 2'-O-methyladenosine-3'-phosphate
  modified_base 14: mod_base = OTHER; note = 2'-deoxy-2'-fluoroguanosine-3'-phosphate
  modified_base 15: mod_base = OTHER; note = 2'-O-methylcytidine-3'-phosphate
  modified_base 16: mod_base = OTHER; note = 2'-deoxy-2'-fluoroadenosine-3'-phosphate
  modified_base 17: mod_base = OTHER; note = 2'-O-methyluridine-3'-phosphate
  modified_base 18: mod_base = OTHER; note = 2'-O-methyladenosine-3'-phosphate
  modified_base 19: mod_base = OTHER; note = 2'-O-methyladenosine-3'-phosphate
  modified_base 20: mod_base = OTHER; note = 2'-O-methylguanosine-3'-phosphate
  modified_base 21: mod_base = OTHER; note = 2'-O-methyluridine-3'-phosphate
  modified_base 22: mod_base = OTHER; note = 2'-O-methyladenosine-3'-phosphate
  modified_base 23: mod_base = OTHER; note = 2'-O-methyluridine
ttaacatttgacagcataagtat

SEQ ID NO: 5546 - RNA, 23 nt, synthetic construct
  source 1..23: mol_type = other RNA
  modified_base 1: mod_base = OTHER; note = 2'-O-methyluridine-3'-phosphate 5'-(E)-Vinylphosphonate
  modified_base 2: mod_base = OTHER; note = 2'-deoxy-2'-fluoroadenosine-3'-phosphate
  modified_base 3: mod_base = OTHER; note = 2'-O-methyluridine-3'-phosphate
  modified_base 4: mod_base = OTHER; note = 2'-O-methyladenosine-3'-phosphate
  modified_base 5: mod_base = OTHER; note = 2'-O-methyladenosine-3'-phosphate
  modified_base 6: mod_base = OTHER; note = 2'-deoxy-2'-fluorocytidine-3'-phosphate
  modified_base 7: mod_base = OTHER; note = 2'-O-methyladenosine-3'-phosphate
  modified_base 8: mod_base = OTHER; note = 2'-O-methyluridine-3'-phosphate
  modified_base 9: mod_base = OTHER; note = 2'-O-methyluridine-3'-phosphate
  modified_base 10: mod_base = OTHER; note = 2'-O-methyluridine-3'-phosphate
  modified_base 11: mod_base = OTHER; note = 2'-O-methylguanosine-3'-phosphate
  modified_base 12: mod_base = OTHER; note = 2'-O-methyladenosine-3'-phosphate
  modified_base 13: mod_base = OTHER; note = 2'-O-methylcytidine-3'-phosphate
  modified_base 14: mod_base = OTHER; note = 2'-deoxy-2'-fluoroadenosine-3'-phosphate
  modified_base 15: mod_base = OTHER; note = 2'-O-methylguanosine-3'-phosphate
  modified_base 16: mod_base = OTHER; note = 2'-deoxy-2'-fluorocytidine-3'-phosphate
  modified_base 17: mod_base = OTHER; note = 2'-O-methyladenosine-3'-phosphate
  modified_base 18: mod_base = OTHER; note = 2'-O-methyluridine-3'-phosphate
  modified_base 19: mod_base = OTHER; note = 2'-O-methyladenosine-3'-phosphate
  modified_base 20: mod_base = OTHER; note = 2'-O-methyladenosine-3'-phosphate
  modified_base 21: mod_base = OTHER; note = 2'-O-methylguanosine-3'-phosphate
  modified_base 22: mod_base = OTHER; note = 2'-O-methyluridine-3'-phosphate
  modified_base 23: mod_base = OTHER; note = 2'-O-methyladenosine
tataacatttgacagcataagta

SEQ ID NO: 5547 - RNA, 23 nt, synthetic construct
  source 1..23: mol_type = other RNA
  modified_base 1: mod_base = OTHER; note = 2'-O-methyluridine-3'-phosphate 5'-(E)-Vinylphosphonate
  modified_base 2: mod_base = OTHER; note = 2'-deoxy-2'-fluorouridine-3'-phosphate
  modified_base 3: mod_base = OTHER; note = 2'-O-methyladenosine-3'-phosphate
  modified_base 4: mod_base = OTHER; note = 2'-O-methyluridine-3'-phosphate
  modified_base 5: mod_base = OTHER; note = 2'-O-methyladenosine-3'-phosphate
  modified_base 6: mod_base = OTHER; note = 2'-deoxy-2'-fluoroadenosine-3'-phosphate
  modified_base 7: mod_base = OTHER; note = 2'-O-methylcytidine-3'-phosphate
  modified_base 8: mod_base = OTHER; note = 2'-O-methyladenosine-3'-phosphate
  modified_base 9: mod_base = OTHER; note = 2'-O-methyluridine-3'-phosphate
  modified_base 10: mod_base = OTHER; note = 2'-O-methyluridine-3'-phosphate
  modified_base 11: mod_base = OTHER; note = 2'-O-methyluridine-3'-phosphate
  modified_base 12: mod_base = OTHER; note = 2'-O-methylguanosine-3'-phosphate
  modified_base 13: mod_base = OTHER; note = 2'-O-methyladenosine-3'-phosphate
  modified_base 14: mod_base = OTHER; note = 2'-deoxy-2'-fluorocytidine-3'-phosphate
  modified_base 15: mod_base = OTHER; note = 2'-O-methyladenosine-3'-phosphate
  modified_base 16: mod_base = OTHER; note = 2'-deoxy-2'-fluoroguanosine-3'-phosphate
  modified_base 17: mod_base = OTHER; note = 2'-O-methylcytidine-3'-phosphate
  modified_base 18: mod_base = OTHER; note = 2'-O-methyladenosine-3'-phosphate
  modified_base 19: mod_base = OTHER; note = 2'-O-methyluridine-3'-phosphate
  modified_base 20: mod_base = OTHER; note = 2'-O-methyladenosine-3'-phosphate
  modified_base 21: mod_base = OTHER; note = 2'-O-methyladenosine-3'-phosphate
  modified_base 22: mod_base = OTHER; note = 2'-O-methylguanosine-3'-phosphate
  modified_base 23: mod_base = OTHER; note = 2'-O-methyluridine
ttataacatttgacagcataagt

SEQ ID NO: 5548 - RNA, 23 nt, synthetic construct
  source 1..23: mol_type = other RNA
  modified_base 1: mod_base = OTHER; note = 2'-O-methyluridine-3'-phosphate 5'-(E)-Vinylphosphonate
  modified_base 2: mod_base = OTHER; note = 2'-deoxy-2'-fluoroadenosine-3'-phosphate
  modified_base 3: mod_base = OTHER; note = 2'-O-methyluridine-3'-phosphate
  modified_base 4: mod_base = OTHER; note = 2'-O-methyladenosine-3'-phosphate
  modified_base 5: mod_base = OTHER; note = 2'-O-methyluridine-3'-phosphate
  modified_base 6: mod_base = OTHER; note = 2'-deoxy-2'-fluoroadenosine-3'-phosphate
  modified_base 7: mod_base = OTHER; note = 2'-O-methyladenosine-3'-phosphate
  modified_base 8: mod_base = OTHER; note = 2'-O-methylcytidine-3'-phosphate
  modified_base 9: mod_base = OTHER; note = 2'-O-methyladenosine-3'-phosphate
  modified_base 10: mod_base = OTHER; note = 2'-O-methyluridine-3'-phosphate
  modified_base 11: mod_base = OTHER; note = 2'-O-methyluridine-3'-phosphate
  modified_base 12: mod_base = OTHER; note = 2'-O-methyluridine-3'-phosphate
  modified_base 13: mod_base = OTHER; note = 2'-O-methylguanosine-3'-phosphate
  modified_base 14: mod_base = OTHER; note = 2'-deoxy-2'-fluoroadenosine-3'-phosphate
  modified_base 15: mod_base = OTHER; note = 2'-O-methylcytidine-3'-phosphate
  modified_base 16: mod_base = OTHER; note = 2'-deoxy-2'-fluoroadenosine-3'-phosphate
  modified_base 17: mod_base = OTHER; note = 2'-O-methylguanosine-3'-phosphate
  modified_base 18: mod_base = OTHER; note = 2'-O-methylcytidine-3'-phosphate
  modified_base 19: mod_base = OTHER; note = 2'-O-methyladenosine-3'-phosphate
  modified_base 20: mod_base = OTHER; note = 2'-O-methyluridine-3'-phosphate
  modified_base 21: mod_base = OTHER; note = 2'-O-methyladenosine-3'-phosphate
  modified_base 22: mod_base = OTHER; note = 2'-O-methyladenosine-3'-phosphate
  modified_base 23: mod_base = OTHER; note = 2'-O-methylguanosine
tatataacatttgacagcataag

SEQ ID NO: 5549 - RNA, 23 nt, synthetic construct
  source 1..23: mol_type = other RNA
  modified_base 1: mod_base = OTHER; note = 2'-O-methyluridine-3'-phosphate 5'-(E)-Vinylphosphonate
  modified_base 2: mod_base = OTHER; note = 2'-deoxy-2'-fluorocytidine-3'-phosphate
  modified_base 3: mod_base = OTHER; note = 2'-O-methyladenosine-3'-phosphate
  modified_base 4: mod_base = OTHER; note = 2'-O-methyladenosine-3'-phosphate
  modified_base 5: mod_base = OTHER; note = 2'-O-methyluridine-3'-phosphate
  modified_base 6: mod_base = OTHER; note = 2'-deoxy-2'-fluoroadenosine-3'-phosphate
  modified_base 7: mod_base = OTHER; note = 2'-O-methyluridine-3'-phosphate
  modified_base 8: mod_base = OTHER; note = 2'-O-methyladenosine-3'-phosphate
  modified_base 9: mod_base = OTHER; note = 2'-O-methyladenosine-3'-phosphate
  modified_base 10: mod_base = OTHER; note = 2'-O-methylcytidine-3'-phosphate
  modified_base 11: mod_base = OTHER; note = 2'-O-methyladenosine-3'-phosphate
  modified_base 12: mod_base = OTHER; note = 2'-O-methyluridine-3'-phosphate
  modified_base 13: mod_base = OTHER; note = 2'-O-methyluridine-3'-phosphate
  modified_base 14: mod_base = OTHER; note = 2'-deoxy-2'-fluorouridine-3'-phosphate
  modified_base 15: mod_base = OTHER; note = 2'-O-methylguanosine-3'-phosphate
  modified_base 16: mod_base = OTHER; note = 2'-deoxy-2'-fluoroadenosine-3'-phosphate
  modified_base 17: mod_base = OTHER; note = 2'-O-methylcytidine-3'-phosphate
  modified_base 18: mod_base = OTHER; note = 2'-O-methyladenosine-3'-phosphate
  modified_base 19: mod_base = OTHER; note = 2'-O-methylguanosine-3'-phosphate
  modified_base 20: mod_base = OTHER; note = 2'-O-methylcytidine-3'-phosphate
  modified_base 21: mod_base = OTHER; note = 2'-O-methyladenosine-3'-phosphate
  modified_base 22: mod_base = OTHER; note = 2'-O-methyluridine-3'-phosphate
  modified_base 23: mod_base = OTHER; note = 2'-O-methyladenosine
tcaatataacatttgacagcata

SEQ ID NO: 5550 - RNA, 23 nt, synthetic construct
  source 1..23: mol_type = other RNA
  modified_base 1: mod_base = OTHER; note = 2'-O-methyluridine-3'-phosphate 5'-(E)-Vinylphosphonate
  modified_base 2: mod_base = OTHER; note = 2'-deoxy-2'-fluoroadenosine-3'-phosphate
  modified_base 3: mod_base = OTHER; note = 2'-O-methylcytidine-3'-phosphate
  modified_base 4: mod_base = OTHER; note = 2'-O-methyladenosine-3'-phosphate
  modified_base 5: mod_base = OTHER; note = 2'-O-methyladenosine-3'-phosphate
  modified_base 6: mod_base = OTHER; note = 2'-deoxy-2'-fluorouridine-3'-phosphate
  modified_base 7: mod_base = OTHER; note = 2'-O-methyladenosine-3'-phosphate
  modified_base 8: mod_base = OTHER; note = 2'-O-methyluridine-3'-phosphate
  modified_base 9: mod_base = OTHER; note = 2'-O-methyladenosine-3'-phosphate
  modified_base 10: mod_base = OTHER; note = 2'-O-methyladenosine-3'-phosphate
  modified_base 11: mod_base = OTHER; note = 2'-O-methylcytidine-3'-phosphate
  modified_base 12: mod_base = OTHER; note = 2'-O-methyladenosine-3'-phosphate
  modified_base 13: mod_base = OTHER; note = 2'-O-methyluridine-3'-phosphate
  modified_base 14: mod_base = OTHER; note = 2'-deoxy-2'-fluorouridine-3'-phosphate
  modified_base 15: mod_base = OTHER; note = 2'-O-methyluridine-3'-phosphate
  modified_base 16: mod_base = OTHER; note = 2'-deoxy-2'-fluoroguanosine-3'-phosphate
  modified_base 17: mod_base = OTHER; note = 2'-O-methyladenosine-3'-phosphate
  modified_base 18: mod_base = OTHER; note = 2'-O-methylcytidine-3'-phosphate
  modified_base 19: mod_base = OTHER; note = 2'-O-methyladenosine-3'-phosphate
  modified_base 20: mod_base = OTHER; note = 2'-O-methylguanosine-3'-phosphate
  modified_base 21: mod_base = OTHER; note = 2'-O-methylcytidine-3'-phosphate
  modified_base 22: mod_base = OTHER; note = 2'-O-methyladenosine-3'-phosphate
  modified_base 23: mod_base = OTHER; note = 2'-O-methyluridine
tacaatataacatttgacagcat

SEQ ID NO: 5551 - RNA, 23 nt, synthetic construct
  source 1..23: mol_type = other RNA
  modified_base 1: mod_base = OTHER; note = 2'-O-methyluridine-3'-phosphate 5'-(E)-Vinylphosphonate
  modified_base 2: mod_base = OTHER; note = 2'-deoxy-2'-fluoroadenosine-3'-phosphate
  modified_base 3: mod_base = OTHER; note = 2'-O-methyladenosine-3'-phosphate
  modified_base 4: mod_base = OTHER; note = 2'-O-methylcytidine-3'-phosphate
  modified_base 5: mod_base = OTHER; note = 2'-O-methyladenosine-3'-phosphate
  modified_base 6: mod_base = OTHER; note = 2'-deoxy-2'-fluoroadenosine-3'-phosphate
  modified_base 7: mod_base = OTHER; note = 2'-O-methyluridine-3'-phosphate
  modified_base 8: mod_base = OTHER; note = 2'-O-methyladenosine-3'-phosphate
  modified_base 9: mod_base = OTHER; note = 2'-O-methyluridine-3'-phosphate
  modified_base 10: mod_base = OTHER; note = 2'-O-methyladenosine-3'-phosphate
  modified_base 11: mod_base = OTHER; note = 2'-O-methyladenosine-3'-phosphate
  modified_base 12: mod_base = OTHER; note = 2'-O-methylcytidine-3'-phosphate
  modified_base 13: mod_base = OTHER; note = 2'-O-methyladenosine-3'-phosphate
  modified_base 14: mod_base = OTHER; note = 2'-deoxy-2'-fluorouridine-3'-phosphate
  modified_base 15: mod_base = OTHER; note = 2'-O-methyluridine-3'-phosphate
  modified_base 16: mod_base = OTHER; note = 2'-deoxy-2'-fluorouridine-3'-phosphate
  modified_base 17: mod_base = OTHER; note = 2'-O-methylguanosine-3'-phosphate
  modified_base 18: mod_base = OTHER; note = 2'-O-methyladenosine-3'-phosphate
  modified_base 19: mod_base = OTHER; note = 2'-O-methylcytidine-3'-phosphate
  modified_base 20: mod_base = OTHER; note = 2'-O-methyladenosine-3'-phosphate
  modified_base 21: mod_base = OTHER; note = 2'-O-methylguanosine-3'-phosphate
  modified_base 22: mod_base = OTHER; note = 2'-O-methylcytidine-3'-phosphate
  modified_base 23: mod_base = OTHER; note = 2'-O-methyladenosine
taacaatataacatttgacagca

SEQ ID NO: 5552 - RNA, 23 nt, synthetic construct
  source 1..23: mol_type = other RNA
  modified_base 1: mod_base = OTHER; note = 2'-O-methyluridine-3'-phosphate 5'-(E)-Vinylphosphonate
  modified_base 2: mod_base = OTHER; note = 2'-deoxy-2'-fluoroadenosine-3'-phosphate
  modified_base 3: mod_base = OTHER; note = 2'-O-methyladenosine-3'-phosphate
  modified_base 4: mod_base = OTHER; note = 2'-O-methyladenosine-3'-phosphate
  modified_base 5: mod_base = OTHER; note = 2'-O-methylcytidine-3'-phosphate
  modified_base 6: mod_base = OTHER; note = 2'-deoxy-2'-fluoroadenosine-3'-phosphate
  modified_base 7: mod_base = OTHER; note = 2'-O-methyladenosine-3'-phosphate
  modified_base 8: mod_base = OTHER; note = 2'-O-methyluridine-3'-phosphate
  modified_base 9: mod_base = OTHER; note = 2'-O-methyladenosine-3'-phosphate
  modified_base 10: mod_base = OTHER; note = 2'-O-methyluridine-3'-phosphate
  modified_base 11: mod_base = OTHER; note = 2'-O-methyladenosine-3'-phosphate
  modified_base 12: mod_base = OTHER; note = 2'-O-methyladenosine-3'-phosphate
  modified_base 13: mod_base = OTHER; note = 2'-O-methylcytidine-3'-phosphate
  modified_base 14: mod_base = OTHER; note = 2'-deoxy-2'-fluoroadenosine-3'-phosphate
  modified_base 15: mod_base = OTHER; note = 2'-O-methyluridine-3'-phosphate
  modified_base 16: mod_base = OTHER; note = 2'-deoxy-2'-fluorouridine-3'-phosphate
  modified_base 17: mod_base = OTHER; note = 2'-O-methyluridine-3'-phosphate
  modified_base 18: mod_base = OTHER; note = 2'-O-methylguanosine-3'-phosphate
  modified_base 19: mod_base = OTHER; note = 2'-O-methyladenosine-3'-phosphate
  modified_base 20: mod_base = OTHER; note = 2'-O-methylcytidine-3'-phosphate
  modified_base 21: mod_base = OTHER; note = 2'-O-methyladenosine-3'-phosphate
  modified_base 22: mod_base = OTHER; note = 2'-O-methylguanosine-3'-phosphate
  modified_base 23: mod_base = OTHER; note = 2'-O-methylcytidine
taaacaatataacatttgacagc

SEQ ID NO: 5553 - RNA, 23 nt, synthetic construct
  source 1..23: mol_type = other RNA
  modified_base 1: mod_base = OTHER; note = 2'-O-methyluridine-3'-phosphate 5'-(E)-Vinylphosphonate
  modified_base 2: mod_base = OTHER; note = 2'-deoxy-2'-fluoroadenosine-3'-phosphate
  modified_base 3: mod_base = OTHER; note = 2'-O-methylcytidine-3'-phosphate
  modified_base 4: mod_base = OTHER; note = 2'-O-methyladenosine-3'-phosphate
  modified_base 5: mod_base = OTHER; note = 2'-O-methylcytidine-3'-phosphate
  modified_base 6: mod_base = OTHER; note = 2'-deoxy-2'-fluorouridine-3'-phosphate
  modified_base 7: mod_base = OTHER; note = 2'-O-methylguanosine-3'-phosphate
  modified_base 8: mod_base = OTHER; note = 2'-O-methyladenosine-3'-phosphate
  modified_base 9: mod_base = OTHER; note = 2'-O-methyluridine-3'-phosphate
  modified_base 10: mod_base = OTHER; note = 2'-O-methyladenosine-3'-phosphate
  modified_base 11: mod_base = OTHER; note = 2'-O-methylcytidine-3'-phosphate
  modified_base 12: mod_base = OTHER; note = 2'-O-methyluridine-3'-phosphate
  modified_base 13: mod_base = OTHER; note = 2'-O-methylcytidine-3'-phosphate
  modified_base 14: mod_base = OTHER; note = 2'-deoxy-2'-fluorouridine-3'-phosphate
  modified_base 15: mod_base = OTHER; note = 2'-O-methylguanosine-3'-phosphate
  modified_base 16: mod_base = OTHER; note = 2'-deoxy-2'-fluoroadenosine-3'-phosphate
  modified_base 17: mod_base = OTHER; note = 2'-O-methyladenosine-3'-phosphate
  modified_base 18: mod_base = OTHER; note = 2'-O-methylcytidine-3'-phosphate
  modified_base 19: mod_base = OTHER; note = 2'-O-methyladenosine-3'-phosphate
  modified_base 20: mod_base = OTHER; note = 2'-O-methyluridine-3'-phosphate
  modified_base 21: mod_base = OTHER; note = 2'-O-methyladenosine-3'-phosphate
  modified_base 22: mod_base = OTHER; note = 2'-O-methyladenosine-3'-phosphate
  modified_base 23: mod_base = OTHER; note = 2'-O-methylcytidine
tacactgatactctgaacataac

SEQ ID NO: 5554 - RNA, 23 nt, synthetic construct
  source 1..23: mol_type = other RNA
  modified_base 1: mod_base = OTHER; note = 2'-O-methyluridine-3'-phosphate 5'-(E)-Vinylphosphonate
  modified_base 2: mod_base = OTHER; note = 2'-deoxy-2'-fluoroadenosine-3'-phosphate
  modified_base 3: mod_base = OTHER; note = 2'-O-methyladenosine-3'-phosphate
  modified_base 4: mod_base = OTHER; note = 2'-O-methylcytidine-3'-phosphate
  modified_base 5: mod_base = OTHER; note = 2'-O-methyladenosine-3'-phosphate
  modified_base 6: mod_base = OTHER; note = 2'-deoxy-2'-fluorocytidine-3'-phosphate
  modified_base 7: mod_base = OTHER; note = 2'-O-methyluridine-3'-phosphate
  modified_base 8: mod_base = OTHER; note = 2'-O-methylguanosine-3'-phosphate
  modified_base 9: mod_base = OTHER; note = 2'-O-methyladenosine-3'-phosphate
  modified_base 10: mod_base = OTHER; note = 2'-O-methyluridine-3'-phosphate
  modified_base 11: mod_base = OTHER; note = 2'-O-methyladenosine-3'-phosphate
  modified_base 12: mod_base = OTHER; note = 2'-O-methylcytidine-3'-phosphate
  modified_base 13: mod_base = OTHER; note = 2'-O-methyluridine-3'-phosphate
  modified_base 14: mod_base = OTHER; note = 2'-deoxy-2'-fluorocytidine-3'-phosphate
  modified_base 15: mod_base = OTHER; note = 2'-O-methyluridine-3'-phosphate
  modified_base 16: mod_base = OTHER; note = 2'-deoxy-2'-fluoroguanosine-3'-phosphate
  modified_base 17: mod_base = OTHER; note = 2'-O-methyladenosine-3'-phosphate
  modified_base 18: mod_base = OTHER; note = 2'-O-methyladenosine-3'-phosphate
  modified_base 19: mod_base = OTHER; note = 2'-O-methylcytidine-3'-phosphate
  modified_base 20: mod_base = OTHER; note = 2'-O-methyladenosine-3'-phosphate
  modified_base 21: mod_base = OTHER; note = 2'-O-methyluridine-3'-phosphate
  modified_base 22: mod_base = OTHER; note = 2'-O-methyladenosine-3'-phosphate
  modified_base 23: mod_base = OTHER; note = 2'-O-methyladenosine
taacactgatactctgaacataa

SEQ ID NO: 5555 - RNA, 23 nt, synthetic construct
  source 1..23: mol_type = other RNA
  modified_base 1: mod_base = OTHER; note = 2'-O-methyluridine-3'-phosphate 5'-(E)-Vinylphosphonate
  modified_base 2: mod_base = OTHER; note = 2'-deoxy-2'-fluoroguanosine-3'-phosphate
  modified_base 3: mod_base = OTHER; note = 2'-O-methyladenosine-3'-phosphate
  modified_base 4: mod_base = OTHER; note = 2'-O-methyladenosine-3'-phosphate
  modified_base 5: mod_base = OTHER; note = 2'-O-methylcytidine-3'-phosphate
  modified_base 6: mod_base = OTHER; note = 2'-deoxy-2'-fluoroadenosine-3'-phosphate
  modified_base 7: mod_base = OTHER; note = 2'-O-methylcytidine-3'-phosphate
  modified_base 8: mod_base = OTHER; note = 2'-O-methyluridine-3'-phosphate
  modified_base 9: mod_base = OTHER; note = 2'-O-methylguanosine-3'-phosphate
  modified_base 10: mod_base = OTHER; note = 2'-O-methyladenosine-3'-phosphate
  modified_base 11: mod_base = OTHER; note = 2'-O-methyluridine-3'-phosphate
  modified_base 12: mod_base = OTHER; note = 2'-O-methyladenosine-3'-phosphate
  modified_base 13: mod_base = OTHER; note = 2'-O-methylcytidine-3'-phosphate
  modified_base 14: mod_base = OTHER; note = 2'-deoxy-2'-fluorouridine-3'-phosphate
  modified_base 15: mod_base = OTHER; note = 2'-O-methylcytidine-3'-phosphate
  modified_base 16: mod_base = OTHER; note = 2'-deoxy-2'-fluorouridine-3'-phosphate
  modified_base 17: mod_base = OTHER; note = 2'-O-methylguanosine-3'-phosphate
  modified_base 18: mod_base = OTHER; note = 2'-O-methyladenosine-3'-phosphate
  modified_base 19: mod_base = OTHER; note = 2'-O-methyladenosine-3'-phosphate
  modified_base 20: mod_base = OTHER; note = 2'-O-methylcytidine-3'-phosphate
  modified_base 21: mod_base = OTHER; note = 2'-O-methyladenosine-3'-phosphate
  modified_base 22: mod_base = OTHER; note = 2'-O-methyluridine-3'-phosphate
  modified_base 23: mod_base = OTHER; note = 2'-O-methyladenosine
tgaacactgatactctgaacata

SEQ ID NO: 5556 - RNA, 23 nt, synthetic construct
  source 1..23: mol_type = other RNA
  modified_base 1: mod_base = OTHER; note = 2'-O-methyluridine-3'-phosphate 5'-(E)-Vinylphosphonate
  modified_base 2: mod_base = OTHER; note = 2'-deoxy-2'-fluoroadenosine-3'-phosphate
  modified_base 3: mod_base = OTHER; note = 2'-O-methylguanosine-3'-phosphate
  modified_base 4: mod_base = OTHER; note = 2'-O-methyladenosine-3'-phosphate
  modified_base 5: mod_base = OTHER; note = 2'-O-methyladenosine-3'-phosphate
  modified_base 6: mod_base = OTHER; note = 2'-deoxy-2'-fluorocytidine-3'-phosphate
  modified_base 7: mod_base = OTHER; note = 2'-O-methyladenosine-3'-phosphate
  modified_base 8: mod_base = OTHER; note = 2'-O-methylcytidine-3'-phosphate
  modified_base 9: mod_base = OTHER; note = 2'-O-methyluridine-3'-phosphate
  modified_base 10: mod_base = OTHER; note = 2'-O-methylguanosine-3'-phosphate
  modified_base 11: mod_base = OTHER; note = 2'-O-methyladenosine-3'-phosphate
  modified_base 12: mod_base = OTHER; note = 2'-O-methyluridine-3'-phosphate
  modified_base 13: mod_base = OTHER; note = 2'-O-methyladenosine-3'-phosphate
  modified_base 14: mod_base = OTHER; note = 2'-deoxy-2'-fluorocytidine-3'-phosphate
  modified_base 15: mod_base = OTHER; note = 2'-O-methyluridine-3'-phosphate
  modified_base 16: mod_base = OTHER; note = 2'-deoxy-2'-fluorocytidine-3'-phosphate
  modified_base 17: mod_base = OTHER; note = 2'-O-methyluridine-3'-phosphate
  modified_base 18: mod_base = OTHER; note = 2'-O-methylguanosine-3'-phosphate
  modified_base 19: mod_base = OTHER; note = 2'-O-methyladenosine-3'-phosphate
  modified_base 20: mod_base = OTHER; note = 2'-O-methyladenosine-3'-phosphate
  modified_base 21: mod_base = OTHER; note = 2'-O-methylcytidine-3'-phosphate
  modified_base 22: mod_base = OTHER; note = 2'-O-methyladenosine-3'-phosphate
  modified_base 23: mod_base = OTHER; note = 2'-O-methyluridine
tagaacactgatactctgaacat

SEQ ID NO: 5557 - RNA, 23 nt, synthetic construct
  source 1..23: mol_type = other RNA
  modified_base 1: mod_base = OTHER; note = 2'-O-methyluridine-3'-phosphate 5'-(E)-Vinylphosphonate
  modified_base 2: mod_base = OTHER; note = 2'-deoxy-2'-fluoroadenosine-3'-phosphate
  modified_base 3: mod_base = OTHER; note = 2'-O-methyladenosine-3'-phosphate
  modified_base 4: mod_base = OTHER; note = 2'-O-methylguanosine-3'-phosphate
  modified_base 5: mod_base = OTHER; note = 2'-O-methyladenosine-3'-phosphate
  modified_base 6: mod_base = OTHER; note = 2'-deoxy-2'-fluoroadenosine-3'-phosphate
  modified_base 7: mod_base = OTHER; note = 2'-O-methylcytidine-3'-phosphate
  modified_base 8: mod_base = OTHER; note = 2'-O-methyladenosine-3'-phosphate
  modified_base 9: mod_base = OTHER; note = 2'-O-methylcytidine-3'-phosphate
  modified_base 10: mod_base = OTHER; note = 2'-O-methyluridine-3'-phosphate
  modified_base 11: mod_base = OTHER; note = 2'-O-methylguanosine-3'-phosphate
  modified_base 12: mod_base = OTHER; note = 2'-O-methyladenosine-3'-phosphate
  modified_base 13: mod_base = OTHER; note = 2'-O-methyluridine-3'-phosphate
  modified_base 14: mod_base = OTHER; note = 2'-deoxy-2'-fluoroadenosine-3'-phosphate
  modified_base 15: mod_base = OTHER; note = 2'-O-methylcytidine-3'-phosphate
  modified_base 16: mod_base = OTHER; note = 2'-deoxy-2'-fluorouridine-3'-phosphate
  modified_base 17: mod_base = OTHER; note = 2'-O-methylcytidine-3'-phosphate
  modified_base 18: mod_base = OTHER; note = 2'-O-methyluridine-3'-phosphate
  modified_base 19: mod_base = OTHER; note = 2'-O-methylguanosine-3'-phosphate
  modified_base 20: mod_base = OTHER; note = 2'-O-methyladenosine-3'-phosphate
  modified_base 21: mod_base = OTHER; note = 2'-O-methyladenosine-3'-phosphate
  modified_base 22: mod_base = OTHER; note = 2'-O-methylcytidine-3'-phosphate
  modified_base 23: mod_base = OTHER; note = 2'-O-methyladenosine
taagaacactgatactctgaaca

SEQ ID NO: 5558 - RNA, 23 nt, synthetic construct
  source 1..23: mol_type = other RNA
  modified_base 1: mod_base = OTHER; note = 2'-O-methyluridine-3'-phosphate 5'-(E)-Vinylphosphonate
  modified_base 2: mod_base = OTHER; note = 2'-deoxy-2'-fluoroadenosine-3'-phosphate
  modified_base 3: mod_base = OTHER; note = 2'-O-methyladenosine-3'-phosphate
  modified_base 4: mod_base = OTHER; note = 2'-O-methyladenosine-3'-phosphate
  modified_base 5: mod_base = OTHER; note = 2'-O-methylguanosine-3'-phosphate
  modified_base 6: mod_base = OTHER; note = 2'-deoxy-2'-fluoroadenosine-3'-phosphate
  modified_base 7: mod_base = OTHER; note = 2'-O-methyladenosine-3'-phosphate
  modified_base 8: mod_base = OTHER; note = 2'-O-methylcytidine-3'-phosphate
  modified_base 9: mod_base = OTHER; note = 2'-O-methyladenosine-3'-phosphate
  modified_base 10: mod_base = OTHER; note = 2'-O-methylcytidine-3'-phosphate
  modified_base 11: mod_base = OTHER; note = 2'-O-methyluridine-3'-phosphate
  modified_base 12: mod_base = OTHER; note = 2'-O-methylguanosine-3'-phosphate
  modified_base 13: mod_base = OTHER; note = 2'-O-methyladenosine-3'-phosphate
  modified_base 14: mod_base = OTHER; note = 2'-deoxy-2'-fluorouridine-3'-phosphate
  modified_base 15: mod_base = OTHER; note = 2'-O-methyladenosine-3'-phosphate
  modified_base 16: mod_base = OTHER; note = 2'-deoxy-2'-fluorocytidine-3'-phosphate
  modified_base 17: mod_base = OTHER; note = 2'-O-methyluridine-3'-phosphate
  modified_base 18: mod_base = OTHER; note = 2'-O-methylcytidine-3'-phosphate
  modified_base 19: mod_base = OTHER; note = 2'-O-methyluridine-3'-phosphate
  modified_base 20: mod_base = OTHER; note = 2'-O-methylguanosine-3'-phosphate
  modified_base 21: mod_base = OTHER; note = 2'-O-methyladenosine-3'-phosphate
  modified_base 22: mod_base = OTHER; note = 2'-O-methyladenosine-3'-phosphate
  modified_base 23: mod_base = OTHER; note = 2'-O-methylcytidine
taaagaacactgatactctgaac

SEQ ID NO: 5559 - RNA, 23 nt, synthetic construct
  source 1..23: mol_type = other RNA
  modified_base 1: mod_base = OTHER; note = 2'-O-methyluridine-3'-phosphate 5'-(E)-Vinylphosphonate
  modified_base 2: mod_base = OTHER; note = 2'-deoxy-2'-fluorouridine-3'-phosphate
  modified_base 3: mod_base = OTHER; note = 2'-O-methyladenosine-3'-phosphate
  modified_base 4: mod_base = OTHER; note = 2'-O-methyladenosine-3'-phosphate
  modified_base 5: mod_base = OTHER; note = 2'-O-methyladenosine-3'-phosphate
  modified_base 6: mod_base = OTHER; note = 2'-deoxy-2'-fluoroguanosine-3'-phosphate
  modified_base 7: mod_base = OTHER; note = 2'-O-methyladenosine-3'-phosphate
  modified_base 8: mod_base = OTHER; note = 2'-O-methyladenosine-3'-phosphate
  modified_base 9: mod_base = OTHER; note = 2'-O-methylcytidine-3'-phosphate
  modified_base 10: mod_base = OTHER; note = 2'-O-methyladenosine-3'-phosphate
  modified_base 11: mod_base = OTHER; note = 2'-O-methylcytidine-3'-phosphate
  modified_base 12: mod_base = OTHER; note = 2'-O-methyluridine-3'-phosphate
  modified_base 13: mod_base = OTHER; note = 2'-O-methylguanosine-3'-phosphate
  modified_base 14: mod_base = OTHER; note = 2'-deoxy-2'-fluoroadenosine-3'-phosphate
  modified_base 15: mod_base = OTHER; note = 2'-O-methyluridine-3'-phosphate
  modified_base 16: mod_base = OTHER; note = 2'-deoxy-2'-fluoroadenosine-3'-phosphate
  modified_base 17: mod_base = OTHER; note = 2'-O-methylcytidine-3'-phosphate
  modified_base 18: mod_base = OTHER; note = 2'-O-methyluridine-3'-phosphate
  modified_base 19: mod_base = OTHER; note = 2'-O-methylcytidine-3'-phosphate
  modified_base 20: mod_base = OTHER; note = 2'-O-methyluridine-3'-phosphate
  modified_base 21: mod_base = OTHER; note = 2'-O-methylguanosine-3'-phosphate
  modified_base 22: mod_base = OTHER; note = 2'-O-methyladenosine-3'-phosphate
  modified_base 23: mod_base = OTHER; note = 2'-O-methyladenosine
ttaaagaacactgatactctgaa

SEQ ID NO: 5560 - RNA, 23 nt, synthetic construct
  source 1..23: mol_type = other RNA
  modified_base 1: mod_base = OTHER; note = 2'-O-methyluridine-3'-phosphate 5'-(E)-Vinylphosphonate
  modified_base 2: mod_base = OTHER; note = 2'-deoxy-2'-fluoroguanosine-3'-phosphate
  modified_base 3: mod_base = OTHER; note = 2'-O-methyluridine-3'-phosphate
  modified_base 4: mod_base = OTHER; note = 2'-O-methyladenosine-3'-phosphate
  modified_base 5: mod_base = OTHER; note = 2'-O-methyladenosine-3'-phosphate
  modified_base 6: mod_base = OTHER; note = 2'-deoxy-2'-fluoroadenosine-3'-phosphate
  modified_base 7: mod_base = OTHER; note = 2'-O-methylguanosine-3'-phosphate
  modified_base 8: mod_base = OTHER; note = 2'-O-methyladenosine-3'-phosphate
  modified_base 9: mod_base = OTHER; note = 2'-O-methyladenosine-3'-phosphate
  modified_base 10: mod_base = OTHER; note = 2'-O-methylcytidine-3'-phosphate
  modified_base 11: mod_base = OTHER; note = 2'-O-methyladenosine-3'-phosphate
  modified_base 12: mod_base = OTHER; note = 2'-O-methylcytidine-3'-phosphate
  modified_base 13: mod_base = OTHER; note = 2'-O-methyluridine-3'-phosphate
  modified_base 14: mod_base = OTHER; note = 2'-deoxy-2'-fluoroguanosine-3'-phosphate
  modified_base 15: mod_base = OTHER; note = 2'-O-methyladenosine-3'-phosphate
  modified_base 16: mod_base = OTHER; note = 2'-deoxy-2'-fluorouridine-3'-phosphate
  modified_base 17: mod_base = OTHER; note = 2'-O-methyladenosine-3'-phosphate
  modified_base 18: mod_base = OTHER; note = 2'-O-methylcytidine-3'-phosphate
  modified_base 19: mod_base = OTHER; note = 2'-O-methyluridine-3'-phosphate
  modified_base 20: mod_base = OTHER; note = 2'-O-methylcytidine-3'-phosphate
  modified_base 21: mod_base = OTHER; note = 2'-O-methyluridine-3'-phosphate
  modified_base 22: mod_base = OTHER; note = 2'-O-methylguanosine-3'-phosphate
  modified_base 23: mod_base = OTHER; note = 2'-O-methyladenosine
tgtaaagaacactgatactctga

SEQ ID NO: 5561 - RNA, 23 nt, synthetic construct
  source 1..23: mol_type = other RNA
  modified_base 1: mod_base = OTHER; note = 2'-O-methyluridine-3'-phosphate 5'-(E)-Vinylphosphonate
  modified_base 2: mod_base = OTHER; note = 2'-deoxy-2'-fluoroadenosine-3'-phosphate
  modified_base 3: mod_base = OTHER; note = 2'-O-methylguanosine-3'-phosphate
  modified_base 4: mod_base = OTHER; note = 2'-O-methyluridine-3'-phosphate
  modified_base 5: mod_base = OTHER; note = 2'-O-methyladenosine-3'-phosphate
  modified_base 6: mod_base = OTHER; note = 2'-deoxy-2'-fluoroadenosine-3'-phosphate
  modified_base 7: mod_base = OTHER; note = 2'-O-methyladenosine-3'-phosphate
  modified_base 8: mod_base = OTHER; note = 2'-O-methylguanosine-3'-phosphate
  modified_base 9: mod_base = OTHER; note = 2'-O-methyladenosine-3'-phosphate
  modified_base 10: mod_base = OTHER; note = 2'-O-methyladenosine-3'-phosphate
  modified_base 11: mod_base = OTHER; note = 2'-O-methylcytidine-3'-phosphate
  modified_base 12: mod_base = OTHER; note = 2'-O-methyladenosine-3'-phosphate
  modified_base 13: mod_base = OTHER; note = 2'-O-methylcytidine-3'-phosphate
  modified_base 14: mod_base = OTHER; note = 2'-deoxy-2'-fluorouridine-3'-phosphate
  modified_base 15: mod_base = OTHER; note = 2'-O-methylguanosine-3'-phosphate
  modified_base 16: mod_base = OTHER; note = 2'-deoxy-2'-fluoroadenosine-3'-phosphate
  modified_base 17: mod_base = OTHER; note = 2'-O-methyluridine-3'-phosphate
  modified_base 18: mod_base = OTHER; note = 2'-O-methyladenosine-3'-phosphate
  modified_base 19: mod_base = OTHER; note = 2'-O-methylcytidine-3'-phosphate
  modified_base 20: mod_base = OTHER; note = 2'-O-methyluridine-3'-phosphate
  modified_base 21: mod_base = OTHER; note = 2'-O-methylcytidine-3'-phosphate
  modified_base 22: mod_base = OTHER; note = 2'-O-methyluridine-3'-phosphate
  modified_base 23: mod_base = OTHER; note = 2'-O-methylguanosine
tagtaaagaacactgatactctg

SEQ ID NO: 5562 - RNA, 23 nt, synthetic construct
  source 1..23: mol_type = other RNA
  modified_base 1: mod_base = OTHER; note = 2'-O-methyluridine-3'-phosphate 5'-(E)-Vinylphosphonate
  modified_base 2: mod_base = OTHER; note = 2'-deoxy-2'-fluoroguanosine-3'-phosphate
  modified_base 3: mod_base = OTHER; note = 2'-O-methyladenosine-3'-phosphate
  modified_base 4: mod_base = OTHER; note = 2'-O-methylguanosine-3'-phosphate
  modified_base 5: mod_base = OTHER; note = 2'-O-methyluridine-3'-phosphate
  modified_base 6: mod_base = OTHER; note = 2'-deoxy-2'-fluoroadenosine-3'-phosphate
  modified_base 7: mod_base = OTHER; note = 2'-O-methyladenosine-3'-phosphate
  modified_base 8: mod_base = OTHER; note = 2'-O-methyladenosine-3'-phosphate
  modified_base 9: mod_base = OTHER; note = 2'-O-methylguanosine-3'-phosphate
  modified_base 10: mod_base = OTHER; note = 2'-O-methyladenosine-3'-phosphate
  modified_base 11: mod_base = OTHER; note = 2'-O-methyladenosine-3'-phosphate
  modified_base 12: mod_base = OTHER; note = 2'-O-methylcytidine-3'-phosphate
  modified_base 13: mod_base = OTHER; note = 2'-O-methyladenosine-3'-phosphate
  modified_base 14: mod_base = OTHER; note = 2'-deoxy-2'-fluorocytidine-3'-phosphate
  modified_base 15: mod_base = OTHER; note = 2'-O-methyluridine-3'-phosphate
  modified_base 16: mod_base = OTHER; note = 2'-deoxy-2'-fluoroguanosine-3'-phosphate
  modified_base 17: mod_base = OTHER; note = 2'-O-methyladenosine-3'-phosphate
  modified_base 18: mod_base = OTHER; note = 2'-O-methyluridine-3'-phosphate
  modified_base 19: mod_base = OTHER; note = 2'-O-methyladenosine-3'-phosphate
  modified_base 20: mod_base = OTHER; note = 2'-O-methylcytidine-3'-phosphate
  modified_base 21: mod_base = OTHER; note = 2'-O-methyluridine-3'-phosphate
  modified_base 22: mod_base = OTHER; note = 2'-O-methylcytidine-3'-phosphate
  modified_base 23: mod_base = OTHER; note = 2'-O-methyluridine
tgagtaaagaacactgatactct

SEQ ID NO: 5563 - RNA, 23 nt, synthetic construct
  source 1..23: mol_type = other RNA
  modified_base 1: mod_base = OTHER; note = 2'-O-methyluridine-3'-phosphate 5'-(E)-Vinylphosphonate
  modified_base 2: mod_base = OTHER; note = 2'-deoxy-2'-fluoroguanosine-3'-phosphate
  modified_base 3: mod_base = OTHER; note = 2'-O-methylguanosine-3'-phosphate
  modified_base 4: mod_base = OTHER; note = 2'-O-methyladenosine-3'-phosphate
  modified_base 5: mod_base = OTHER; note = 2'-O-methylguanosine-3'-phosphate
  modified_base 6: mod_base = OTHER; note = 2'-deoxy-2'-fluorouridine-3'-phosphate
  modified_base 7: mod_base = OTHER; note = 2'-O-methyladenosine-3'-phosphate
  modified_base 8: mod_base = OTHER; note = 2'-O-methyladenosine-3'-phosphate
  modified_base 9: mod_base = OTHER; note = 2'-O-methyladenosine-3'-phosphate
  modified_base 10: mod_base = OTHER; note = 2'-O-methylguanosine-3'-phosphate
  modified_base 11: mod_base = OTHER; note = 2'-O-methyladenosine-3'-phosphate
  modified_base 12: mod_base = OTHER; note = 2'-O-methyladenosine-3'-phosphate
  modified_base 13: mod_base = OTHER; note = 2'-O-methylcytidine-3'-phosphate
  modified_base 14: mod_base = OTHER; note = 2'-deoxy-2'-fluoroadenosine-3'-phosphate
  modified_base 15: mod_base = OTHER; note = 2'-O-methylcytidine-3'-phosphate
  modified_base 16: mod_base = OTHER; note = 2'-deoxy-2'-fluorouridine-3'-phosphate
  modified_base 17: mod_base = OTHER; note = 2'-O-methylguanosine-3'-phosphate
  modified_base 18: mod_base = OTHER; note = 2'-O-methyladenosine-3'-phosphate
  modified_base 19: mod_base = OTHER; note = 2'-O-methyluridine-3'-phosphate
  modified_base 20: mod_base = OTHER; note = 2'-O-methyladenosine-3'-phosphate
  modified_base 21: mod_base = OTHER; note = 2'-O-methylcytidine-3'-phosphate
  modified_base 22: mod_base = OTHER; note = 2'-O-methyluridine-3'-phosphate
  modified_base 23: mod_base = OTHER; note = 2'-O-methylcytidine
tggagtaaagaacactgatactc

SEQ ID NO: 5564 - RNA, 23 nt, synthetic construct
  source 1..23: mol_type = other RNA
  modified_base 1: mod_base = OTHER; note = 2'-O-methyluridine-3'-phosphate 5'-(E)-Vinylphosphonate
  modified_base 2: mod_base = OTHER; note = 2'-deoxy-2'-fluoroadenosine-3'-phosphate
  modified_base 3: mod_base = OTHER; note = 2'-O-methyluridine-3'-phosphate
  modified_base 4: mod_base = OTHER; note = 2'-O-methyladenosine-3'-phosphate
  modified_base 5: mod_base = OTHER; note = 2'-O-methyluridine-3'-phosphate
  modified_base 6: mod_base = OTHER; note = 2'-deoxy-2'-fluorocytidine-3'-phosphate
  modified_base 7: mod_base = OTHER; note = 2'-O-methyluridine-3'-phosphate
  modified_base 8: mod_base = OTHER; note = 2'-O-methylguanosine-3'-phosphate
  modified_base 9: mod_base = OTHER; note = 2'-O-methyluridine-3'-phosphate
  modified_base 10: mod_base = OTHER; note = 2'-O-methyladenosine-3'-phosphate
  modified_base 11: mod_base = OTHER; note = 2'-O-methyladenosine-3'-phosphate
  modified_base 12: mod_base = OTHER; note = 2'-O-methylguanosine-3'-phosphate
  modified_base 13: mod_base = OTHER; note = 2'-O-methylguanosine-3'-phosphate
  modified_base 14: mod_base = OTHER; note = 2'-deoxy-2'-fluoroadenosine-3'-phosphate
  modified_base 15: mod_base = OTHER; note = 2'-O-methylguanosine-3'-phosphate
  modified_base 16: mod_base = OTHER; note = 2'-deoxy-2'-fluorouridine-3'-phosphate
  modified_base 17: mod_base = OTHER; note = 2'-O-methyladenosine-3'-phosphate
  modified_base 18: mod_base = OTHER; note = 2'-O-methyladenosine-3'-phosphate
  modified_base 19: mod_base = OTHER; note = 2'-O-methyladenosine-3'-phosphate
  modified_base 20: mod_base = OTHER; note = 2'-O-methylguanosine-3'-phosphate
  modified_base 21: mod_base = OTHER; note = 2'-O-methyladenosine-3'-phosphate
  modified_base 22: mod_base = OTHER; note = 2'-O-methyladenosine-3'-phosphate
  modified_base 23: mod_base = OTHER; note = 2'-O-methylcytidine
tatatctgtaaggagtaaagaac

SEQ ID NO: 5565 - RNA, 23 nt, synthetic construct
  source 1..23: mol_type = other RNA
  modified_base 1: mod_base = OTHER; note = 2'-O-methyluridine-3'-phosphate 5'-(E)-Vinylphosphonate
  modified_base 2: mod_base = OTHER; note = 2'-deoxy-2'-fluoroadenosine-3'-phosphate
  modified_base 3: mod_base = OTHER; note = 2'-O-methyladenosine-3'-phosphate
  modified_base 4: mod_base = OTHER; note = 2'-O-methyladenosine-3'-phosphate
  modified_base 5: mod_base = OTHER; note = 2'-O-methyladenosine-3'-phosphate
  modified_base 6: mod_base = OTHER; note = 2'-deoxy-2'-fluorouridine-3'-phosphate
  modified_base 7: mod_base = OTHER; note = 2'-O-methyladenosine-3'-phosphate
  modified_base 8: mod_base = OTHER; note = 2'-O-methyluridine-3'-phosphate
  modified_base 9: mod_base = OTHER; note = 2'-O-methylcytidine-3'-phosphate
  modified_base 10: mod_base = OTHER; note = 2'-O-methyluridine-3'-phosphate
  modified_base 11: mod_base = OTHER; note = 2'-O-methylguanosine-3'-phosphate
  modified_base 12: mod_base = OTHER; note = 2'-O-methyluridine-3'-phosphate
  modified_base 13: mod_base = OTHER; note = 2'-O-methyladenosine-3'-phosphate
  modified_base 14: mod_base = OTHER; note = 2'-deoxy-2'-fluoroadenosine-3'-phosphate
  modified_base 15: mod_base = OTHER; note = 2'-O-methylguanosine-3'-phosphate
  modified_base 16: mod_base = OTHER; note = 2'-deoxy-2'-fluoroguanosine-3'-phosphate
  modified_base 17: mod_base = OTHER; note = 2'-O-methyladenosine-3'-phosphate
  modified_base 18: mod_base = OTHER; note = 2'-O-methylguanosine-3'-phosphate
  modified_base 19: mod_base = OTHER; note = 2'-O-methyluridine-3'-phosphate
  modified_base 20: mod_base = OTHER; note = 2'-O-methyladenosine-3'-phosphate
  modified_base 21: mod_base = OTHER; note = 2'-O-methyladenosine-3'-phosphate
  modified_base 22: mod_base = OTHER; note = 2'-O-methyladenosine-3'-phosphate
  modified_base 23: mod_base = OTHER; note = 2'-O-methylguanosine
taaaatatctgtaaggagtaaag

SEQ ID NO: 5566 - RNA, 23 nt, synthetic construct
  source 1..23: mol_type = other RNA
  modified_base 1: mod_base = OTHER; note = 2'-O-methyluridine-3'-phosphate 5'-(E)-Vinylphosphonate
  modified_base 2: mod_base = OTHER; note = 2'-deoxy-2'-fluoroadenosine-3'-phosphate
  modified_base 3: mod_base = OTHER; note = 2'-O-methylguanosine-3'-phosphate
  modified_base 4: mod_base = OTHER; note = 2'-O-methyladenosine-3'-phosphate
  modified_base 5: mod_base = OTHER; note = 2'-O-methyladenosine-3'-phosphate
  modified_base 6: mod_base = OTHER; note = 2'-deoxy-2'-fluoroadenosine-3'-phosphate
  modified_base 7: mod_base = OTHER; note = 2'-O-methylguanosine-3'-phosphate
  modified_base 8: mod_base = OTHER; note = 2'-O-methyluridine-3'-phosphate
  modified_base 9: mod_base = OTHER; note = 2'-O-methylguanosine-3'-phosphate
  modified_base 10: mod_base = OTHER; note = 2'-O-methyladenosine-3'-phosphate
  modified_base 11: mod_base = OTHER; note = 2'-O-methyluridine-3'-phosphate
  modified_base 12: mod_base = OTHER; note = 2'-O-methylguanosine-3'-phosphate
  modified_base 13: mod_base = OTHER; note = 2'-O-methylcytidine-3'-phosphate
  modified_base 14: mod_base = OTHER; note = 2'-deoxy-2'-fluorouridine-3'-phosphate
  modified_base 15: mod_base = OTHER; note = 2'-O-methylguanosine-3'-phosphate
  modified_base 16: mod_base = OTHER; note = 2'-deoxy-2'-fluorocytidine-3'-phosphate
  modified_base 17: mod_base = OTHER; note = 2'-O-methyladenosine-3'-phosphate
  modified_base 18: mod_base = OTHER; note = 2'-O-methyluridine-3'-phosphate
  modified_base 19: mod_base = OTHER; note = 2'-O-methyluridine-3'-phosphate
  modified_base 20: mod_base = OTHER; note = 2'-O-methyluridine-3'-phosphate
  modified_base 21: mod_base = OTHER; note = 2'-O-methyladenosine-3'-phosphate
  modified_base 22: mod_base = OTHER; note = 2'-O-methyladenosine-3'-phosphate
  modified_base 23: mod_base = OTHER; note = 2'-O-methyladenosine
tagaaagtgatgctgcatttaaa

SEQ ID NO: 5567 - RNA, 23 nt, synthetic construct
  source 1..23: mol_type = other RNA
  modified_base 1: mod_base = OTHER; note = 2'-O-methyluridine-3'-phosphate 5'-(E)-Vinylphosphonate
  modified_base 2: mod_base = OTHER; note = 2'-deoxy-2'-fluorouridine-3'-phosphate
  modified_base 3: mod_base = OTHER; note = 2'-O-methyluridine-3'-phosphate
  modified_base 4: mod_base = OTHER; note = 2'-O-methyladenosine-3'-phosphate
  modified_base 5: mod_base = OTHER; note = 2'-O-methyluridine-3'-phosphate
  modified_base 6: mod_base = OTHER; note = 2'-deoxy-2'-fluorouridine-3'-phosphate
  modified_base 7: mod_base = OTHER; note = 2'-O-methyluridine-3'-phosphate
  modified_base 8: mod_base = OTHER; note = 2'-O-methyluridine-3'-phosphate
  modified_base 9: mod_base = OTHER; note = 2'-O-methylcytidine-3'-phosphate
  modified_base 10: mod_base = OTHER; note = 2'-O-methyladenosine-3'-phosphate
  modified_base 11: mod_base = OTHER; note = 2'-O-methylguanosine-3'-phosphate
  modified_base 12: mod_base = OTHER; note = 2'-O-methyladenosine-3'-phosphate
  modified_base 13: mod_base = OTHER; note = 2'-O-methyladenosine-3'-phosphate
  modified_base 14: mod_base = OTHER; note = 2'-deoxy-2'-fluoroadenosine-3'-phosphate
  modified_base 15: mod_base = OTHER; note = 2'-O-methylguanosine-3'-phosphate
  modified_base 16: mod_base = OTHER; note = 2'-deoxy-2'-fluorouridine-3'-phosphate
  modified_base 17: mod_base = OTHER; note = 2'-O-methylguanosine-3'-phosphate
  modified_base 18: mod_base = OTHER; note = 2'-O-methyladenosine-3'-phosphate
  modified_base 19: mod_base = OTHER; note = 2'-O-methyluridine-3'-phosphate
  modified_base 20: mod_base = OTHER; note = 2'-O-methylguanosine-3'-phosphate
  modified_base 21: mod_base = OTHER; note = 2'-O-methylcytidine-3'-phosphate
  modified_base 22: mod_base = OTHER; note = 2'-O-methyluridine-3'-phosphate
  modified_base 23: mod_base = OTHER; note = 2'-O-methylguanosine
tttattttcagaaagtgatgctg

SEQ ID NO: 5568 - RNA, 23 nt, synthetic construct
  source 1..23: mol_type = other RNA
  modified_base 1: mod_base = OTHER; note = 2'-O-methyluridine-3'-phosphate 5'-(E)-Vinylphosphonate
  modified_base 2: mod_base = OTHER; note = 2'-deoxy-2'-fluoroguanosine-3'-phosphate
  modified_base 3: mod_base = OTHER; note = 2'-O-methyladenosine-3'-phosphate
  modified_base 4: mod_base = OTHER; note = 2'-O-methylcytidine-3'-phosphate
  modified_base 5: mod_base = OTHER; note = 2'-O-methyladenosine-3'-phosphate
  modified_base 6: mod_base = OTHER; note = 2'-deoxy-2'-fluoroadenosine-3'-phosphate
  modified_base 7: mod_base = OTHER; note = 2'-O-methylcytidine-3'-phosphate
  modified_base 8: mod_base = OTHER; note = 2'-O-methyladenosine-3'-phosphate
  modified_base 9: mod_base = OTHER; note = 2'-O-methyladenosine-3'-phosphate
  modified_base 10: mod_base = OTHER; note = 2'-O-methyladenosine-3'-phosphate
  modified_base 11: mod_base = OTHER; note = 2'-O-methyluridine-3'-phosphate
  modified_base 12: mod_base = OTHER; note = 2'-O-methyladenosine-3'-phosphate
  modified_base 13: mod_base = OTHER; note = 2'-O-methyladenosine-3'-phosphate
  modified_base 14: mod_base = OTHER; note = 2'-deoxy-2'-fluorouridine-3'-phosphate
  modified_base 15: mod_base = OTHER; note = 2'-O-methylguanosine-3'-phosphate
  modified_base 16: mod_base = OTHER; note = 2'-deoxy-2'-fluorouridine-3'-phosphate
  modified_base 17: mod_base = OTHER; note = 2'-O-methyluridine-3'-phosphate
  modified_base 18: mod_base = OTHER; note = 2'-O-methyluridine-3'-phosphate
  modified_base 19: mod_base = OTHER; note = 2'-O-methylcytidine-3'-phosphate
  modified_base 20: mod_base = OTHER; note = 2'-O-methyluridine-3'-phosphate
  modified_base 21: mod_base = OTHER; note = 2'-O-methylcytidine-3'-phosphate
  modified_base 22: mod_base = OTHER; note = 2'-O-methyluridine-3'-phosphate
  modified_base 23: mod_base = OTHER; note = 2'-O-methyluridine
tgacaacaaataatgtttctctt

SEQ ID NO: 5569 - RNA, 23 nt, synthetic construct
  source 1..23: mol_type = other RNA
  modified_base 1: mod_base = OTHER; note = 2'-O-methyluridine-3'-phosphate 5'-(E)-Vinylphosphonate
  modified_base 2: mod_base = OTHER; note = 2'-deoxy-2'-fluoroadenosine-3'-phosphate
  modified_base 3: mod_base = OTHER; note = 2'-O-methyluridine-3'-phosphate
  modified_base 4: mod_base = OTHER; note = 2'-O-methylguanosine-3'-phosphate
  modified_base 5: mod_base = OTHER; note = 2'-O-methylcytidine-3'-phosphate
  modified_base 6: mod_base = OTHER; note = 2'-deoxy-2'-fluorouridine-3'-phosphate
  modified_base 7: mod_base = OTHER; note = 2'-O-methylguanosine-3'-phosphate
  modified_base 8: mod_base = OTHER; note = 2'-O-methyladenosine-3'-phosphate
  modified_base 9: mod_base = OTHER; note = 2'-O-methyladenosine-3'-phosphate
  modified_base 10: mod_base = OTHER; note = 2'-O-methyladenosine-3'-phosphate
  modified_base 11: mod_base = OTHER; note = 2'-O-methyluridine-3'-phosphate
  modified_base 12: mod_base = OTHER; note = 2'-O-methyladenosine-3'-phosphate
  modified_base 13: mod_base = OTHER; note = 2'-O-methylcytidine-3'-phosphate
  modified_base 14: mod_base = OTHER; note = 2'-deoxy-2'-fluorouridine-3'-phosphate
  modified_base 15: mod_base = OTHER; note = 2'-O-methylguanosine-3'-phosphate
  modified_base 16: mod_base = OTHER; note = 2'-deoxy-2'-fluoroadenosine-3'-phosphate
  modified_base 17: mod_base = OTHER; note = 2'-O-methylcytidine-3'-phosphate
  modified_base 18: mod_base = OTHER; note = 2'-O-methyladenosine-3'-phosphate
  modified_base 19: mod_base = OTHER; note = 2'-O-methyladenosine-3'-phosphate
  modified_base 20: mod_base = OTHER; note = 2'-O-methylcytidine-3'-phosphate
  modified_base 21: mod_base = OTHER; note = 2'-O-methyladenosine-3'-phosphate
  modified_base 22: mod_base = OTHER; note = 2'-O-methyladenosine-3'-phosphate
  modified_base 23: mod_base = OTHER; note = 2'-O-methyladenosine
tatgctgaaatactgacaacaaa

SEQ ID NO: 5570 - RNA, 23 nt, synthetic construct
  source 1..23: mol_type = other RNA
  modified_base 1: mod_base = OTHER; note = 2'-O-methyluridine-3'-phosphate 5'-(E)-Vinylphosphonate
  modified_base 2: mod_base = OTHER; note = 2'-deoxy-2'-fluoroadenosine-3'-phosphate
  modified_base 3: mod_base = OTHER; note = 2'-O-methylcytidine-3'-phosphate
  modified_base 4: mod_base = OTHER; note = 2'-O-methyladenosine-3'-phosphate
  modified_base 5: mod_base = OTHER; note = 2'-O-methyladenosine-3'-phosphate
  modified_base 6: mod_base = OTHER; note = 2'-deoxy-2'-fluoroguanosine-3'-phosphate
  modified_base 7: mod_base = OTHER; note = 2'-O-methyluridine-3'-phosphate
  modified_base 8: mod_base = OTHER; note = 2'-O-methyluridine-3'-phosphate
  modified_base 9: mod_base = OTHER; note = 2'-O-methylcytidine-3'-phosphate
  modified_base 10: mod_base = OTHER; note = 2'-O-methyladenosine-3'-phosphate
  modified_base 11: mod_base = OTHER; note = 2'-O-methyluridine-3'-phosphate
  modified_base 12: mod_base = OTHER; note = 2'-O-methylguanosine-3'-phosphate
  modified_base 13: mod_base = OTHER; note = 2'-O-methylcytidine-3'-phosphate
  modified_base 14: mod_base = OTHER; note = 2'-deoxy-2'-fluorouridine-3'-phosphate
  modified_base 15: mod_base = OTHER; note = 2'-O-methylguanosine-3'-phosphate
  modified_base 16: mod_base = OTHER; note = 2'-deoxy-2'-fluoroadenosine-3'-phosphate
  modified_base 17: mod_base = OTHER; note = 2'-O-methyladenosine-3'-phosphate
  modified_base 18: mod_base = OTHER; note = 2'-O-methyladenosine-3'-phosphate
  modified_base 19: mod_base = OTHER; note = 2'-O-methyluridine-3'-phosphate
  modified_base 20: mod_base = OTHER; note = 2'-O-methyladenosine-3'-phosphate
  modified_base 21: mod_base = OTHER; note = 2'-O-methylcytidine-3'-phosphate
  modified_base 22: mod_base = OTHER; note = 2'-O-methyluridine-3'-phosphate
  modified_base 23: mod_base = OTHER; note = 2'-O-methylguanosine
tacaagttcatgctgaaatactg

SEQ ID NO: 5571 - RNA, 23 nt, synthetic construct
  source 1..23: mol_type = other RNA
  modified_base 1: mod_base = OTHER; note = 2'-O-methyluridine-3'-phosphate 5'-(E)-Vinylphosphonate
  modified_base 2: mod_base = OTHER; note = 2'-deoxy-2'-fluoroadenosine-3'-phosphate
  modified_base 3: mod_base = OTHER; note = 2'-O-methylguanosine-3'-phosphate
  modified_base 4: mod_base = OTHER; note = 2'-O-methyladenosine-3'-phosphate
  modified_base 5: mod_base = OTHER; note = 2'-O-methyladenosine-3'-phosphate
  modified_base 6: mod_base = OTHER; note = 2'-deoxy-2'-fluorouridine-3'-phosphate
  modified_base 7: mod_base = OTHER; note = 2'-O-methylcytidine-3'-phosphate
  modified_base 8: mod_base = OTHER; note = 2'-O-methyluridine-3'-phosphate
  modified_base 9: mod_base = OTHER; note = 2'-O-methylguanosine-3'-phosphate
  modified_base 10: mod_base = OTHER; note = 2'-O-methyluridine-3'-phosphate
  modified_base 11: mod_base = OTHER; note = 2'-O-methyladenosine-3'-phosphate
  modified_base 12: mod_base = OTHER; note = 2'-O-methylcytidine-3'-phosphate
  modified_base 13: mod_base = OTHER; note = 2'-O-methylcytidine-3'-phosphate
  modified_base 14: mod_base = OTHER; note = 2'-deoxy-2'-fluoroadenosine-3'-phosphate
  modified_base 15: mod_base = OTHER; note = 2'-O-methyladenosine-3'-phosphate
  modified_base 16: mod_base = OTHER; note = 2'-deoxy-2'-fluorouridine-3'-phosphate
  modified_base 17: mod_base = OTHER; note = 2'-O-methyluridine-3'-phosphate
  modified_base 18: mod_base = OTHER; note = 2'-O-methyladenosine-3'-phosphate
  modified_base 19: mod_base = OTHER; note = 2'-O-methylcytidine-3'-phosphate
  modified_base 20: mod_base = OTHER; note = 2'-O-methyladenosine-3'-phosphate
  modified_base 21: mod_base = OTHER; note = 2'-O-methyladenosine-3'-phosphate
  modified_base 22: mod_base = OTHER; note = 2'-O-methyladenosine-3'-phosphate
  modified_base 23: mod_base = OTHER; note = 2'-O-methylcytidine
tagaatctgtaccaattacaaac

SEQ ID NO: 5572 - RNA, 23 nt, synthetic construct
  source 1..23: mol_type = other RNA
  modified_base 1: mod_base = OTHER; note = 2'-O-methyluridine-3'-phosphate 5'-(E)-Vinylphosphonate
  modified_base 2: mod_base = OTHER; note = 2'-deoxy-2'-fluorocytidine-3'-phosphate
  modified_base 3: mod_base = OTHER; note = 2'-O-methyladenosine-3'-phosphate
  modified_base 4: mod_base = OTHER; note = 2'-O-methylguanosine-3'-phosphate
  modified_base 5: mod_base = OTHER; note = 2'-O-methyladenosine-3'-phosphate
  modified_base 6: mod_base = OTHER; note = 2'-deoxy-2'-fluoroadenosine-3'-phosphate
  modified_base 7: mod_base = OTHER; note = 2'-O-methyluridine-3'-phosphate
  modified_base 8: mod_base = OTHER; note = 2'-O-methylcytidine-3'-phosphate
  modified_base 9: mod_base = OTHER; note = 2'-O-methyluridine-3'-phosphate
  modified_base 10: mod_base = OTHER; note = 2'-O-methylguanosine-3'-phosphate
  modified_base 11: mod_base = OTHER; note = 2'-O-methyluridine-3'-phosphate
  modified_base 12: mod_base = OTHER; note = 2'-O-methyladenosine-3'-phosphate
  modified_base 13: mod_base = OTHER; note = 2'-O-methylcytidine-3'-phosphate
  modified_base 14: mod_base = OTHER; note = 2'-deoxy-2'-fluorocytidine-3'-phosphate
  modified_base 15: mod_base = OTHER; note = 2'-O-methyladenosine-3'-phosphate
  modified_base 16: mod_base = OTHER; note = 2'-deoxy-2'-fluoroadenosine-3'-phosphate
  modified_base 17: mod_base = OTHER; note = 2'-O-methyluridine-3'-phosphate
  modified_base 18: mod_base = OTHER; note = 2'-O-methyluridine-3'-phosphate
  modified_base 19: mod_base = OTHER; note = 2'-O-methyladenosine-3'-phosphate
  modified_base 20: mod_base = OTHER; note = 2'-O-methylcytidine-3'-phosphate
  modified_base 21: mod_base = OTHER; note = 2'-O-methyladenosine-3'-phosphate
  modified_base 22: mod_base = OTHER; note = 2'-O-methyladenosine-3'-phosphate
  modified_base 23: mod_base = OTHER; note = 2'-O-methyladenosine
tcagaatctgtaccaattacaaa

SEQ ID NO: 5573 - RNA, 23 nt, synthetic construct
  source 1..23: mol_type = other RNA
  modified_base 1: mod_base = OTHER; note = 2'-O-methyluridine-3'-phosphate 5'-(E)-Vinylphosphonate
  modified_base 2: mod_base = OTHER; note = 2'-deoxy-2'-fluoroadenosine-3'-phosphate
  modified_base 3: mod_base = OTHER; note = 2'-O-methylcytidine-3'-phosphate
  modified_base 4: mod_base = OTHER; note = 2'-O-methyladenosine-3'-phosphate
  modified_base 5: mod_base = OTHER; note = 2'-O-methylguanosine-3'-phosphate
  modified_base 6: mod_base = OTHER; note = 2'-deoxy-2'-fluoroadenosine-3'-phosphate
  modified_base 7: mod_base = OTHER; note = 2'-O-methyladenosine-3'-phosphate
  modified_base 8: mod_base = OTHER; note = 2'-O-methyluridine-3'-phosphate
  modified_base 9: mod_base = OTHER; note = 2'-O-methylcytidine-3'-phosphate
  modified_base 10: mod_base = OTHER; note = 2'-O-methyluridine-3'-phosphate
  modified_base 11: mod_base = OTHER; note = 2'-O-methylguanosine-3'-phosphate
  modified_base 12: mod_base = OTHER; note = 2'-O-methyluridine-3'-phosphate
  modified_base 13: mod_base = OTHER; note = 2'-O-methyladenosine-3'-phosphate
  modified_base 14: mod_base = OTHER; note = 2'-deoxy-2'-fluorocytidine-3'-phosphate
  modified_base 15: mod_base = OTHER; note = 2'-O-methylcytidine-3'-phosphate
  modified_base 16: mod_base = OTHER; note = 2'-deoxy-2'-fluoroadenosine-3'-phosphate
  modified_base 17: mod_base = OTHER; note = 2'-O-methyladenosine-3'-phosphate
  modified_base 18: mod_base = OTHER; note = 2'-O-methyluridine-3'-phosphate
  modified_base 19: mod_base = OTHER; note = 2'-O-methyluridine-3'-phosphate
  modified_base 20: mod_base = OTHER; note = 2'-O-methyladenosine-3'-phosphate
  modified_base 21: mod_base = OTHER; note = 2'-O-methylcytidine-3'-phosphate
  modified_base 22: mod_base = OTHER; note = 2'-O-methyladenosine-3'-phosphate
  modified_base 23: mod_base = OTHER; note = 2'-O-methyladenosine
tacagaatctgtaccaattacaa

SEQ ID NO: 5574 - RNA, 23 nt, synthetic construct
  source 1..23: mol_type = other RNA
  modified_base 1: mod_base = OTHER; note = 2'-O-methyluridine-3'-phosphate 5'-(E)-Vinylphosphonate
  modified_base 2: mod_base = OTHER; note = 2'-deoxy-2'-fluoroadenosine-3'-phosphate
  modified_base 3: mod_base = OTHER; note = 2'-O-methyladenosine-3'-phosphate
  modified_base 4: mod_base = OTHER; note = 2'-O-methylcytidine-3'-phosphate
  modified_base 5: mod_base = OTHER; note = 2'-O-methyladenosine-3'-phosphate
  modified_base 6: mod_base = OTHER; note = 2'-deoxy-2'-fluoroguanosine-3'-phosphate
  modified_base 7: mod_base = OTHER; note = 2'-O-methyladenosine-3'-phosphate
  modified_base 8: mod_base = OTHER; note = 2'-O-methyladenosine-3'-phosphate
  modified_base 9: mod_base = OTHER; note = 2'-O-methyluridine-3'-phosphate
  modified_base 10: mod_base = OTHER; note = 2'-O-methylcytidine-3'-phosphate
  modified_base 11: mod_base = OTHER; note = 2'-O-methyluridine-3'-phosphate
  modified_base 12: mod_base = OTHER; note = 2'-O-methylguanosine-3'-phosphate
  modified_base 13: mod_base = OTHER; note = 2'-O-methyluridine-3'-phosphate
  modified_base 14: mod_base = OTHER; note = 2'-deoxy-2'-fluoroadenosine-3'-phosphate
  modified_base 15: mod_base = OTHER; note = 2'-O-methylcytidine-3'-phosphate
  modified_base 16: mod_base = OTHER; note = 2'-deoxy-2'-fluorocytidine-3'-phosphate
  modified_base 17: mod_base = OTHER; note = 2'-O-methyladenosine-3'-phosphate
  modified_base 18: mod_base = OTHER; note = 2'-O-methyladenosine-3'-phosphate
  modified_base 19: mod_base = OTHER; note = 2'-O-methyluridine-3'-phosphate
  modified_base 20: mod_base = OTHER; note = 2'-O-methyluridine-3'-phosphate
  modified_base 21: mod_base = OTHER; note = 2'-O-methyladenosine-3'-phosphate
  modified_base 22: mod_base = OTHER; note = 2'-O-methylcytidine-3'-phosphate
  modified_base 23: mod_base = OTHER; note = 2'-O-methyladenosine
taacagaatctgtaccaattaca

SEQ ID NO: 5575 - RNA, 23 nt, synthetic construct
  source 1..23: mol_type = other RNA
  modified_base 1: mod_base = OTHER; note = 2'-O-methyluridine-3'-phosphate 5'-(E)-Vinylphosphonate
  modified_base 2: mod_base = OTHER; note = 2'-deoxy-2'-fluorocytidine-3'-phosphate
  modified_base 3: mod_base = OTHER; note = 2'-O-methyladenosine-3'-phosphate
  modified_base 4: mod_base = OTHER; note = 2'-O-methyladenosine-3'-phosphate
  modified_base 5: mod_base = OTHER; note = 2'-O-methylcytidine-3'-phosphate
  modified_base 6: mod_base = OTHER; note = 2'-deoxy-2'-fluoroadenosine-3'-phosphate
  modified_base 7: mod_base = OTHER; note = 2'-O-methylguanosine-3'-phosphate
  modified_base 8: mod_base = OTHER; note = 2'-O-methyladenosine-3'-phosphate
  modified_base 9: mod_base = OTHER; note = 2'-O-methyladenosine-3'-phosphate
  modified_base 10: mod_base = OTHER; note = 2'-O-methyluridine-3'-phosphate
  modified_base 11: mod_base = OTHER; note = 2'-O-methylcytidine-3'-phosphate
  modified_base 12: mod_base = OTHER; note = 2'-O-methyluridine-3'-phosphate
  modified_base 13: mod_base = OTHER; note = 2'-O-methylguanosine-3'-phosphate
  modified_base 14: mod_base = OTHER; note = 2'-deoxy-2'-fluorouridine-3'-phosphate
  modified_base 15: mod_base = OTHER; note = 2'-O-methyladenosine-3'-phosphate
  modified_base 16: mod_base = OTHER; note = 2'-deoxy-2'-fluorocytidine-3'-phosphate
  modified_base 17: mod_base = OTHER; note = 2'-O-methylcytidine-3'-phosphate
  modified_base 18: mod_base = OTHER; note = 2'-O-methyladenosine-3'-phosphate
  modified_base 19: mod_base = OTHER; note = 2'-O-methyladenosine-3'-phosphate
  modified_base 20: mod_base = OTHER; note = 2'-O-methyluridine-3'-phosphate
  modified_base 21: mod_base = OTHER; note = 2'-O-methyluridine-3'-phosphate
  modified_base 22: mod_base = OTHER; note = 2'-O-methyladenosine-3'-phosphate
  modified_base 23: mod_base = OTHER; note = 2'-O-methylcytidine
tcaacagaatctgtaccaattac

SEQ ID NO: 5576 - RNA, 23 nt, synthetic construct
  source 1..23: mol_type = other RNA
  modified_base 1: mod_base = OTHER; note = 2'-O-methyluridine-3'-phosphate 5'-(E)-Vinylphosphonate
  modified_base 2: mod_base = OTHER; note = 2'-deoxy-2'-fluoroadenosine-3'-phosphate
  modified_base 3: mod_base = OTHER; note = 2'-O-methylcytidine-3'-phosphate
  modified_base 4: mod_base = OTHER; note = 2'-O-methyladenosine-3'-phosphate
  modified_base 5: mod_base = OTHER; note = 2'-O-methyladenosine-3'-phosphate
  modified_base 6: mod_base = OTHER; note = 2'-deoxy-2'-fluorocytidine-3'-phosphate
  modified_base 7: mod_base = OTHER; note = 2'-O-methyladenosine-3'-phosphate
  modified_base 8: mod_base = OTHER; note = 2'-O-methylguanosine-3'-phosphate
  modified_base 9: mod_base = OTHER; note = 2'-O-methyladenosine-3'-phosphate
  modified_base 10: mod_base = OTHER; note = 2'-O-methyladenosine-3'-phosphate
  modified_base 11: mod_base = OTHER; note = 2'-O-methyluridine-3'-phosphate
  modified_base 12: mod_base = OTHER; note = 2'-O-methylcytidine-3'-phosphate
  modified_base 13: mod_base = OTHER; note = 2'-O-methyluridine-3'-phosphate
  modified_base 14: mod_base = OTHER; note = 2'-deoxy-2'-fluoroguanosine-3'-phosphate
  modified_base 15: mod_base = OTHER; note = 2'-O-methyluridine-3'-phosphate
  modified_base 16: mod_base = OTHER; note = 2'-deoxy-2'-fluoroadenosine-3'-phosphate
  modified_base 17: mod_base = OTHER; note = 2'-O-methylcytidine-3'-phosphate
  modified_base 18: mod_base = OTHER; note = 2'-O-methylcytidine-3'-phosphate
  modified_base 19: mod_base = OTHER; note = 2'-O-methyladenosine-3'-phosphate
  modified_base 20: mod_base = OTHER; note = 2'-O-methyladenosine-3'-phosphate
  modified_base 21: mod_base = OTHER; note = 2'-O-methyluridine-3'-phosphate
  modified_base 22: mod_base = OTHER; note = 2'-O-methyluridine-3'-phosphate
  modified_base 23: mod_base = OTHER; note = 2'-O-methyladenosine
tacaacagaatctgtaccaatta

SEQ ID NO: 5577 - RNA, 23 nt, synthetic construct
  source 1..23: mol_type = other RNA
  modified_base 1: mod_base = OTHER; note = 2'-O-methyluridine-3'-phosphate 5'-(E)-Vinylphosphonate
  modified_base 2: mod_base = OTHER; note = 2'-deoxy-2'-fluorouridine-3'-phosphate
  modified_base 3: mod_base = OTHER; note = 2'-O-methyladenosine-3'-phosphate
  modified_base 4: mod_base = OTHER; note = 2'-O-methylcytidine-3'-phosphate
  modified_base 5: mod_base = OTHER; note = 2'-O-methyladenosine-3'-phosphate
  modified_base 6: mod_base = OTHER; note = 2'-deoxy-2'-fluoroadenosine-3'-phosphate
  modified_base 7: mod_base = OTHER; note = 2'-O-methylcytidine-3'-phosphate
  modified_base 8: mod_base = OTHER; note = 2'-O-methyladenosine-3'-phosphate
  modified_base 9: mod_base = OTHER; note = 2'-O-methylguanosine-3'-phosphate
  modified_base 10: mod_base = OTHER; note = 2'-O-methyladenosine-3'-phosphate
  modified_base 11: mod_base = OTHER; note = 2'-O-methyladenosine-3'-phosphate
  modified_base 12: mod_base = OTHER; note = 2'-O-methyluridine-3'-phosphate
  modified_base 13: mod_base = OTHER; note = 2'-O-methylcytidine-3'-phosphate
  modified_base 14: mod_base = OTHER; note = 2'-deoxy-2'-fluorouridine-3'-phosphate
  modified_base 15: mod_base = OTHER; note = 2'-O-methylguanosine-3'-phosphate
  modified_base 16: mod_base = OTHER; note = 2'-deoxy-2'-fluorouridine-3'-phosphate
  modified_base 17: mod_base = OTHER; note = 2'-O-methyladenosine-3'-phosphate
  modified_base 18: mod_base = OTHER; note = 2'-O-methylcytidine-3'-phosphate
  modified_base 19: mod_base = OTHER; note = 2'-O-methylcytidine-3'-phosphate
  modified_base 20: mod_base = OTHER; note = 2'-O-methyladenosine-3'-phosphate
  modified_base 21: mod_base = OTHER; note = 2'-O-methyladenosine-3'-phosphate
  modified_base 22: mod_base = OTHER; note = 2'-O-methyluridine-3'-phosphate
  modified_base 23: mod_base = OTHER; note = 2'-O-methyluridine
ttacaacagaatctgtaccaatt

SEQ ID NO: 5578 - RNA, 23 nt, synthetic construct
  source 1..23: mol_type = other RNA
  modified_base 1: mod_base = OTHER; note = 2'-O-methyluridine-3'-phosphate 5'-(E)-Vinylphosphonate
  modified_base 2: mod_base = OTHER; note = 2'-deoxy-2'-fluoroadenosine-3'-phosphate
  modified_base 3: mod_base = OTHER; note = 2'-O-methyluridine-3'-phosphate
  modified_base 4: mod_base = OTHER; note = 2'-O-methyladenosine-3'-phosphate
  modified_base 5: mod_base = OTHER; note = 2'-O-methylcytidine-3'-phosphate
  modified_base 6: mod_base = OTHER; note = 2'-deoxy-2'-fluoroadenosine-3'-phosphate
  modified_base 7: mod_base = OTHER; note = 2'-O-methyladenosine-3'-phosphate
  modified_base 8: mod_base = OTHER; note = 2'-O-methylcytidine-3'-phosphate
  modified_base 9: mod_base = OTHER; note = 2'-O-methyladenosine-3'-phosphate
  modified_base 10: mod_base = OTHER; note = 2'-O-methylguanosine-3'-phosphate
  modified_base 11: mod_base = OTHER; note = 2'-O-methyladenosine-3'-phosphate
  modified_base 12: mod_base = OTHER; note = 2'-O-methyladenosine-3'-phosphate
  modified_base 13: mod_base = OTHER; note = 2'-O-methyluridine-3'-phosphate
  modified_base 14: mod_base = OTHER; note = 2'-deoxy-2'-fluorocytidine-3'-phosphate
  modified_base 15: mod_base = OTHER; note = 2'-O-methyluridine-3'-phosphate
  modified_base 16: mod_base = OTHER; note = 2'-deoxy-2'-fluoroguanosine-3'-phosphate
  modified_base 17: mod_base = OTHER; note = 2'-O-methyluridine-3'-phosphate
  modified_base 18: mod_base = OTHER; note = 2'-O-methyladenosine-3'-phosphate
  modified_base 19: mod_base = OTHER; note = 2'-O-methylcytidine-3'-phosphate
  modified_base 20: mod_base = OTHER; note = 2'-O-methylcytidine-3'-phosphate
  modified_base 21: mod_base = OTHER; note = 2'-O-methyladenosine-3'-phosphate
  modified_base 22: mod_base = OTHER; note = 2'-O-methyladenosine-3'-phosphate
  modified_base 23: mod_base = OTHER; note = 2'-O-methyluridine
tatacaacagaatctgtaccaat

SEQ ID NO: 5579 - RNA, 23 nt, synthetic construct
  source 1..23: mol_type = other RNA
  modified_base 1: mod_base = OTHER; note = 2'-O-methyluridine-3'-phosphate 5'-(E)-Vinylphosphonate
  modified_base 2: mod_base = OTHER; note = 2'-deoxy-2'-fluorocytidine-3'-phosphate
  modified_base 3: mod_base = OTHER; note = 2'-O-methyladenosine-3'-phosphate
  modified_base 4: mod_base = OTHER; note = 2'-O-methyluridine-3'-phosphate
  modified_base 5: mod_base = OTHER; note = 2'-O-methyladenosine-3'-phosphate
  modified_base 6: mod_base = OTHER; note = 2'-deoxy-2'-fluorocytidine-3'-phosphate
  modified_base 7: mod_base = OTHER; note = 2'-O-methyladenosine-3'-phosphate
  modified_base 8: mod_base = OTHER; note = 2'-O-methyladenosine-3'-phosphate
  modified_base 9: mod_base = OTHER; note = 2'-O-methylcytidine-3'-phosphate
  modified_base 10: mod_base = OTHER; note = 2'-O-methyladenosine-3'-phosphate
  modified_base 11: mod_base = OTHER; note = 2'-O-methylguanosine-3'-phosphate
  modified_base 12: mod_base = OTHER; note = 2'-O-methyladenosine-3'-phosphate
  modified_base 13: mod_base = OTHER; note = 2'-O-methyladenosine-3'-phosphate
  modified_base 14: mod_base = OTHER; note = 2'-deoxy-2'-fluorouridine-3'-phosphate
  modified_base 15: mod_base = OTHER; note = 2'-O-methylcytidine-3'-phosphate
  modified_base 16: mod_base = OTHER; note = 2'-deoxy-2'-fluorouridine-3'-phosphate
  modified_base 17: mod_base = OTHER; note = 2'-O-methylguanosine-3'-phosphate
  modified_base 18: mod_base = OTHER; note = 2'-O-methyluridine-3'-phosphate
  modified_base 19: mod_base = OTHER; note = 2'-O-methyladenosine-3'-phosphate
  modified_base 20: mod_base = OTHER; note = 2'-O-methylcytidine-3'-phosphate
  modified_base 21: mod_base = OTHER; note = 2'-O-methylcytidine-3'-phosphate
  modified_base 22: mod_base = OTHER; note = 2'-O-methyladenosine-3'-phosphate
  modified_base 23: mod_base = OTHER; note = 2'-O-methyladenosine
tcatacaacagaatctgtaccaa

SEQ ID NO: 5580 - RNA, 23 nt, synthetic construct
  source 1..23: mol_type = other RNA
  modified_base 1: mod_base = OTHER; note = 2'-O-methyluridine-3'-phosphate 5'-(E)-Vinylphosphonate
  modified_base 2: mod_base = OTHER; note = 2'-deoxy-2'-fluoroguanosine-3'-phosphate
  modified_base 3: mod_base = OTHER; note = 2'-O-methylcytidine-3'-phosphate
  modified_base 4: mod_base = OTHER; note = 2'-O-methyladenosine-3'-phosphate
  modified_base 5: mod_base = OTHER; note = 2'-O-methyluridine-3'-phosphate
  modified_base 6: mod_base = OTHER; note = 2'-deoxy-2'-fluoroadenosine-3'-phosphate
  modified_base 7: mod_base = OTHER; note = 2'-O-methylcytidine-3'-phosphate
  modified_base 8: mod_base = OTHER; note = 2'-O-methyladenosine-3'-phosphate
  modified_base 9: mod_base = OTHER; note = 2'-O-methyladenosine-3'-phosphate
  modified_base 10: mod_base = OTHER; note = 2'-O-methylcytidine-3'-phosphate
  modified_base 11: mod_base = OTHER; note = 2'-O-methyladenosine-3'-phosphate
  modified_base 12: mod_base = OTHER; note = 2'-O-methylguanosine-3'-phosphate
  modified_base 13: mod_base = OTHER; note = 2'-O-methyladenosine-3'-phosphate
  modified_base 14: mod_base = OTHER; note = 2'-deoxy-2'-fluoroadenosine-3'-phosphate
  modified_base 15: mod_base = OTHER; note = 2'-O-methyluridine-3'-phosphate
  modified_base 16: mod_base = OTHER; note = 2'-deoxy-2'-fluorocytidine-3'-phosphate
  modified_base 17: mod_base = OTHER; note = 2'-O-methyluridine-3'-phosphate
  modified_base 18: mod_base = OTHER; note = 2'-O-methylguanosine-3'-phosphate
  modified_base 19: mod_base = OTHER; note = 2'-O-methyluridine-3'-phosphate
  modified_base 20: mod_base = OTHER; note = 2'-O-methyladenosine-3'-phosphate
  modified_base 21: mod_base = OTHER; note = 2'-O-methylcytidine-3'-phosphate
  modified_base 22: mod_base = OTHER; note = 2'-O-methylcytidine-3'-phosphate
  modified_base 23: mod_base = OTHER; note = 2'-O-methyladenosine
tgcatacaacagaatctgtacca

SEQ ID NO: 5581 - RNA, 23 nt, synthetic construct
  source 1..23: mol_type = other RNA
  modified_base 1: mod_base = OTHER; note = 2'-O-methyluridine-3'-phosphate 5'-(E)-Vinylphosphonate
  modified_base 2: mod_base = OTHER; note = 2'-deoxy-2'-fluoroadenosine-3'-phosphate
  modified_base 3: mod_base = OTHER; note = 2'-O-methylguanosine-3'-phosphate
  modified_base 4: mod_base = OTHER; note = 2'-O-methylcytidine-3'-phosphate
  modified_base 5: mod_base = OTHER; note = 2'-O-methyladenosine-3'-phosphate
  modified_base 6: mod_base = OTHER; note = 2'-deoxy-2'-fluorouridine-3'-phosphate
  modified_base 7: mod_base = OTHER; note = 2'-O-methyladenosine-3'-phosphate
  modified_base 8: mod_base = OTHER; note = 2'-O-methylcytidine-3'-phosphate
  modified_base 9: mod_base = OTHER; note = 2'-O-methyladenosine-3'-phosphate
  modified_base 10: mod_base = OTHER; note = 2'-O-methyladenosine-3'-phosphate
  modified_base 11: mod_base = OTHER; note = 2'-O-methylcytidine-3'-phosphate
  modified_base 12: mod_base = OTHER; note = 2'-O-methyladenosine-3'-phosphate
  modified_base 13: mod_base = OTHER; note = 2'-O-methylguanosine-3'-phosphate
  modified_base 14: mod_base = OTHER; note = 2'-deoxy-2'-fluoroadenosine-3'-phosphate
  modified_base 15: mod_base = OTHER; note = 2'-O-methyladenosine-3'-phosphate
  modified_base 16: mod_base = OTHER; note = 2'-deoxy-2'-fluorouridine-3'-phosphate
  modified_base 17: mod_base = OTHER; note = 2'-O-methylcytidine-3'-phosphate
  modified_base 18: mod_base = OTHER; note = 2'-O-methyluridine-3'-phosphate
  modified_base 19: mod_base = OTHER; note = 2'-O-methylguanosine-3'-phosphate
  modified_base 20: mod_base = OTHER; note = 2'-O-methyluridine-3'-phosphate
  modified_base 21: mod_base = OTHER; note = 2'-O-methyladenosine-3'-phosphate
  modified_base 22: mod_base = OTHER; note = 2'-O-methylcytidine-3'-phosphate
  modified_base 23: mod_base = OTHER; note = 2'-O-methylcytidine
tagcatacaacagaatctgtacc

SEQ ID NO: 5582 - RNA, 23 nt, synthetic construct
  source 1..23: mol_type = other RNA
  modified_base 1: mod_base = OTHER; note = 2'-O-methyluridine-3'-phosphate 5'-(E)-Vinylphosphonate
  modified_base 2: mod_base = OTHER; note = 2'-deoxy-2'-fluoroadenosine-3'-phosphate
  modified_base 3: mod_base = OTHER; note = 2'-O-methyladenosine-3'-phosphate
  modified_base 4: mod_base = OTHER; note = 2'-O-methylguanosine-3'-phosphate
  modified_base 5: mod_base = OTHER; note = 2'-O-methylcytidine-3'-phosphate
  modified_base 6: mod_base = OTHER; note = 2'-deoxy-2'-fluoroadenosine-3'-phosphate
  modified_base 7: mod_base = OTHER; note = 2'-O-methyluridine-3'-phosphate
  modified_base 8: mod_base = OTHER; note = 2'-O-methyladenosine-3'-phosphate
  modified_base 9: mod_base = OTHER; note = 2'-O-methylcytidine-3'-phosphate
  modified_base 10: mod_base = OTHER; note = 2'-O-methyladenosine-3'-phosphate
  modified_base 11: mod_base = OTHER; note = 2'-O-methyladenosine-3'-phosphate
  modified_base 12: mod_base = OTHER; note = 2'-O-methylcytidine-3'-phosphate
  modified_base 13: mod_base = OTHER; note = 2'-O-methyladenosine-3'-phosphate
  modified_base 14: mod_base = OTHER; note = 2'-deoxy-2'-fluoroguanosine-3'-phosphate
  modified_base 15: mod_base = OTHER; note = 2'-O-methyladenosine-3'-phosphate
  modified_base 16: mod_base = OTHER; note = 2'-deoxy-2'-fluoroadenosine-3'-phosphate
  modified_base 17: mod_base = OTHER; note = 2'-O-methyluridine-3'-phosphate
  modified_base 18: mod_base = OTHER; note = 2'-O-methylcytidine-3'-phosphate
  modified_base 19: mod_base = OTHER; note = 2'-O-methyluridine-3'-phosphate
  modified_base 20: mod_base = OTHER; note = 2'-O-methylguanosine-3'-phosphate
  modified_base 21: mod_base = OTHER; note = 2'-O-methyluridine-3'-phosphate
  modified_base 22: mod_base = OTHER; note = 2'-O-methyladenosine-3'-phosphate
  modified_base 23: mod_base = OTHER; note = 2'-O-methylcytidine
taagcatacaacagaatctgtac

SEQ ID NO: 5583 - RNA, 23 nt, synthetic construct
  source 1..23: mol_type = other RNA
  modified_base 1: mod_base = OTHER; note = 2'-O-methyluridine-3'-phosphate 5'-(E)-Vinylphosphonate
  modified_base 2: mod_base = OTHER; note = 2'-deoxy-2'-fluoroadenosine-3'-phosphate
  modified_base 3: mod_base = OTHER; note = 2'-O-methyladenosine-3'-phosphate
  modified_base 4: mod_base = OTHER; note = 2'-O-methyladenosine-3'-phosphate
  modified_base 5: mod_base = OTHER; note = 2'-O-methylguanosine-3'-phosphate
  modified_base 6: mod_base = OTHER; note = 2'-deoxy-2'-fluorocytidine-3'-phosphate
  modified_base 7: mod_base = OTHER; note = 2'-O-methyladenosine-3'-phosphate
  modified_base 8: mod_base = OTHER; note = 2'-O-methyluridine-3'-phosphate
  modified_base 9: mod_base = OTHER; note = 2'-O-methyladenosine-3'-phosphate
  modified_base 10: mod_base = OTHER; note = 2'-O-methylcytidine-3'-phosphate
  modified_base 11: mod_base = OTHER; note = 2'-O-methyladenosine-3'-phosphate
  modified_base 12: mod_base = OTHER; note = 2'-O-methyladenosine-3'-phosphate
  modified_base 13: mod_base = OTHER; note = 2'-O-methylcytidine-3'-phosphate
  modified_base 14: mod_base = OTHER; note = 2'-deoxy-2'-fluoroadenosine-3'-phosphate
  modified_base 15: mod_base = OTHER; note = 2'-O-methylguanosine-3'-phosphate
  modified_base 16: mod_base = OTHER; note = 2'-deoxy-2'-fluoroadenosine-3'-phosphate
  modified_base 17: mod_base = OTHER; note = 2'-O-methyladenosine-3'-phosphate
  modified_base 18: mod_base = OTHER; note = 2'-O-methyluridine-3'-phosphate
  modified_base 19: mod_base = OTHER; note = 2'-O-methylcytidine-3'-phosphate
  modified_base 20: mod_base = OTHER; note = 2'-O-methyluridine-3'-phosphate
  modified_base 21: mod_base = OTHER; note = 2'-O-methylguanosine-3'-phosphate
  modified_base 22: mod_base = OTHER; note = 2'-O-methyluridine-3'-phosphate
  modified_base 23: mod_base = OTHER; note = 2'-O-methyladenosine
taaagcatacaacagaatctgta

SEQ ID NO: 5584 - RNA, 23 nt, synthetic construct
  source 1..23: mol_type = other RNA
  modified_base 1: mod_base = OTHER; note = 2'-O-methyluridine-3'-phosphate 5'-(E)-Vinylphosphonate
  modified_base 2: mod_base = OTHER; note = 2'-deoxy-2'-fluoroguanosine-3'-phosphate
  modified_base 3: mod_base = OTHER; note = 2'-O-methyladenosine-3'-phosphate
  modified_base 4: mod_base = OTHER; note = 2'-O-methyladenosine-3'-phosphate
  modified_base 5: mod_base = OTHER; note = 2'-O-methyladenosine-3'-phosphate
  modified_base 6: mod_base = OTHER; note = 2'-deoxy-2'-fluoroguanosine-3'-phosphate
  modified_base 7: mod_base = OTHER; note = 2'-O-methylcytidine-3'-phosphate
  modified_base 8: mod_base = OTHER; note = 2'-O-methyladenosine-3'-phosphate
  modified_base 9: mod_base = OTHER; note = 2'-O-methyluridine-3'-phosphate
  modified_base 10: mod_base = OTHER; note = 2'-O-methyladenosine-3'-phosphate
  modified_base 11: mod_base = OTHER; note = 2'-O-methylcytidine-3'-phosphate
  modified_base 12: mod_base = OTHER; note = 2'-O-methyladenosine-3'-phosphate
  modified_base 13: mod_base = OTHER; note = 2'-O-methyladenosine-3'-phosphate
  modified_base 14: mod_base = OTHER; note = 2'-deoxy-2'-fluorocytidine-3'-phosphate
  modified_base 15: mod_base = OTHER; note = 2'-O-methyladenosine-3'-phosphate
  modified_base 16: mod_base = OTHER; note = 2'-deoxy-2'-fluoroguanosine-3'-phosphate
  modified_base 17: mod_base = OTHER; note = 2'-O-methyladenosine-3'-phosphate
  modified_base 18: mod_base = OTHER; note = 2'-O-methyladenosine-3'-phosphate
  modified_base 19: mod_base = OTHER; note = 2'-O-methyluridine-3'-phosphate
  modified_base 20: mod_base = OTHER; note = 2'-O-methylcytidine-3'-phosphate
  modified_base 21: mod_base = OTHER; note = 2'-O-methyluridine-3'-phosphate
  modified_base 22: mod_base = OTHER; note = 2'-O-methylguanosine-3'-phosphate
  modified_base 23: mod_base = OTHER; note = 2'-O-methyluridine
tgaaagcatacaacagaatctgt

SEQ ID NO: 5585 - RNA, 23 nt, synthetic construct
  source 1..23: mol_type = other RNA
  modified_base 1: mod_base = OTHER; note = 2'-O-methyluridine-3'-phosphate 5'-(E)-Vinylphosphonate
  modified_base 2: mod_base = OTHER; note = 2'-deoxy-2'-fluoroadenosine-3'-phosphate
  modified_base 3: mod_base = OTHER; note = 2'-O-methylguanosine-3'-phosphate
  modified_base 4: mod_base = OTHER; note = 2'-O-methyladenosine-3'-phosphate
  modified_base 5: mod_base = OTHER; note = 2'-O-methyladenosine-3'-phosphate
  modified_base 6: mod_base = OTHER; note = 2'-deoxy-2'-fluoroadenosine-3'-phosphate
  modified_base 7: mod_base = OTHER; note = 2'-O-methylguanosine-3'-phosphate
  modified_base 8: mod_base = OTHER; note = 2'-O-methylcytidine-3'-phosphate
  modified_base 9: mod_base = OTHER; note = 2'-O-methyladenosine-3'-phosphate
  modified_base 10: mod_base = OTHER; note = 2'-O-methyluridine-3'-phosphate
  modified_base 11: mod_base = OTHER; note = 2'-O-methyladenosine-3'-phosphate
  modified_base 12: mod_base = OTHER; note = 2'-O-methylcytidine-3'-phosphate
  modified_base 13: mod_base = OTHER; note = 2'-O-methyladenosine-3'-phosphate
  modified_base 14: mod_base = OTHER; note = 2'-deoxy-2'-fluoroadenosine-3'-phosphate
  modified_base 15: mod_base = OTHER; note = 2'-O-methylcytidine-3'-phosphate
  modified_base 16: mod_base = OTHER; note = 2'-deoxy-2'-fluoroadenosine-3'-phosphate
  modified_base 17: mod_base = OTHER; note = 2'-O-methylguanosine-3'-phosphate
  modified_base 18: mod_base = OTHER; note = 2'-O-methyladenosine-3'-phosphate
  modified_base 19: mod_base = OTHER; note = 2'-O-methyladenosine-3'-phosphate
  modified_base 20: mod_base = OTHER; note = 2'-O-methyluridine-3'-phosphate
  modified_base 21: mod_base = OTHER; note = 2'-O-methylcytidine-3'-phosphate
  modified_base 22: mod_base = OTHER; note = 2'-O-methyluridine-3'-phosphate
  modified_base 23: mod_base = OTHER; note = 2'-O-methylguanosine
tagaaagcatacaacagaatctg

SEQ ID NO: 5586 - RNA, 23 nt, synthetic construct
  source 1..23: mol_type = other RNA
  modified_base 1: mod_base = OTHER; note = 2'-O-methyluridine-3'-phosphate 5'-(E)-Vinylphosphonate
  modified_base 2: mod_base = OTHER; note = 2'-deoxy-2'-fluoroadenosine-3'-phosphate
  modified_base 3: mod_base = OTHER; note = 2'-O-methyluridine-3'-phosphate
  modified_base 4: mod_base = OTHER; note = 2'-O-methyluridine-3'-phosphate
  modified_base 5: mod_base = OTHER; note = 2'-O-methylcytidine-3'-phosphate
  modified_base 6: mod_base = OTHER; note = 2'-deoxy-2'-fluorouridine-3'-phosphate
  modified_base 7: mod_base = OTHER; note = 2'-O-methyladenosine-3'-phosphate
  modified_base 8: mod_base = OTHER; note = 2'-O-methylguanosine-3'-phosphate
  modified_base 9: mod_base = OTHER; note = 2'-O-methyladenosine-3'-phosphate
  modified_base 10: mod_base = OTHER; note = 2'-O-methyluridine-3'-phosphate
  modified_base 11: mod_base = OTHER; note = 2'-O-methylguanosine-3'-phosphate
  modified_base 12: mod_base = OTHER; note = 2'-O-methyluridine-3'-phosphate
  modified_base 13: mod_base = OTHER; note = 2'-O-methylguanosine-3'-phosphate
  modified_base 14: mod_base = OTHER; note = 2'-deoxy-2'-fluoroadenosine-3'-phosphate
  modified_base 15: mod_base = OTHER; note = 2'-O-methylcytidine-3'-phosphate
  modified_base 16: mod_base = OTHER; note = 2'-deoxy-2'-fluoroadenosine-3'-phosphate
  modified_base 17: mod_base = OTHER; note = 2'-O-methyluridine-3'-phosphate
  modified_base 18: mod_base = OTHER; note = 2'-O-methylguanosine-3'-phosphate
  modified_base 19: mod_base = OTHER; note = 2'-O-methylcytidine-3'-phosphate
  modified_base 20: mod_base = OTHER; note = 2'-O-methylcytidine-3'-phosphate
  modified_base 21: mod_base = OTHER; note = 2'-O-methyladenosine-3'-phosphate
  modified_base 22: mod_base = OTHER; note = 2'-O-methyladenosine-3'-phosphate
  modified_base 23: mod_base = OTHER; note = 2'-O-methyladenosine
tattctagatgtgacatgccaaa

SEQ ID NO: 5587 - RNA, 23 nt, synthetic construct
  source 1..23: mol_type = other RNA
  modified_base 1: mod_base = OTHER; note = 2'-O-methyluridine-3'-phosphate 5'-(E)-Vinylphosphonate
  modified_base 2: mod_base = OTHER; note = 2'-deoxy-2'-fluoroadenosine-3'-phosphate
  modified_base 3: mod_base = OTHER; note = 2'-O-methyladenosine-3'-phosphate
  modified_base 4: mod_base = OTHER; note = 2'-O-methyluridine-3'-phosphate
  modified_base 5: mod_base = OTHER; note = 2'-O-methyluridine-3'-phosphate
  modified_base 6: mod_base = OTHER; note = 2'-deoxy-2'-fluorocytidine-3'-phosphate
  modified_base 7: mod_base = OTHER; note = 2'-O-methyluridine-3'-phosphate
  modified_base 8: mod_base = OTHER; note = 2'-O-methyladenosine-3'-phosphate
  modified_base 9: mod_base = OTHER; note = 2'-O-methylguanosine-3'-phosphate
  modified_base 10: mod_base = OTHER; note = 2'-O-methyladenosine-3'-phosphate
  modified_base 11: mod_base = OTHER; note = 2'-O-methyluridine-3'-phosphate
  modified_base 12: mod_base = OTHER; note = 2'-O-methylguanosine-3'-phosphate
  modified_base 13: mod_base = OTHER; note = 2'-O-methyluridine-3'-phosphate
  modified_base 14: mod_base = OTHER; note = 2'-deoxy-2'-fluoroguanosine-3'-phosphate
  modified_base 15: mod_base = OTHER; note = 2'-O-methyladenosine-3'-phosphate
  modified_base 16: mod_base = OTHER; note = 2'-deoxy-2'-fluorocytidine-3'-phosphate
  modified_base 17: mod_base = OTHER; note = 2'-O-methyladenosine-3'-phosphate
  modified_base 18: mod_base = OTHER; note = 2'-O-methyluridine-3'-phosphate
  modified_base 19: mod_base = OTHER; note = 2'-O-methylguanosine-3'-phosphate
  modified_base 20: mod_base = OTHER; note = 2'-O-methylcytidine-3'-phosphate
  modified_base 21: mod_base = OTHER; note = 2'-O-methylcytidine-3'-phosphate
  modified_base 22: mod_base = OTHER; note = 2'-O-methyladenosine-3'-phosphate
  modified_base 23: mod_base = OTHER; note = 2'-O-methyladenosine
taattctagatgtgacatgccaa

SEQ ID NO: 5588 - RNA, 23 nt, synthetic construct
  source 1..23: mol_type = other RNA
  modified_base 1: mod_base = OTHER; note = 2'-O-methyluridine-3'-phosphate 5'-(E)-Vinylphosphonate
  modified_base 2: mod_base = OTHER; note = 2'-deoxy-2'-fluoroguanosine-3'-phosphate
  modified_base 3: mod_base = OTHER; note = 2'-O-methyladenosine-3'-phosphate
  modified_base 4: mod_base = OTHER; note = 2'-O-methyladenosine-3'-phosphate
  modified_base 5: mod_base = OTHER; note = 2'-O-methyluridine-3'-phosphate
  modified_base 6: mod_base = OTHER; note = 2'-deoxy-2'-fluorouridine-3'-phosphate
  modified_base 7: mod_base = OTHER; note = 2'-O-methylcytidine-3'-phosphate
  modified_base 8: mod_base = OTHER; note = 2'-O-methyluridine-3'-phosphate
  modified_base 9: mod_base = OTHER; note = 2'-O-methyladenosine-3'-phosphate
  modified_base 10: mod_base = OTHER; note = 2'-O-methylguanosine-3'-phosphate
  modified_base 11: mod_base = OTHER; note = 2'-O-methyladenosine-3'-phosphate
  modified_base 12: mod_base = OTHER; note = 2'-O-methyluridine-3'-phosphate
  modified_base 13: mod_base = OTHER; note = 2'-O-methylguanosine-3'-phosphate
  modified_base 14: mod_base = OTHER; note = 2'-deoxy-2'-fluorouridine-3'-phosphate
  modified_base 15: mod_base = OTHER; note = 2'-O-methylguanosine-3'-phosphate
  modified_base 16: mod_base = OTHER; note = 2'-deoxy-2'-fluoroadenosine-3'-phosphate
  modified_base 17: mod_base = OTHER; note = 2'-O-methylcytidine-3'-phosphate
  modified_base 18: mod_base = OTHER; note = 2'-O-methyladenosine-3'-phosphate
  modified_base 19: mod_base = OTHER; note = 2'-O-methyluridine-3'-phosphate
  modified_base 20: mod_base = OTHER; note = 2'-O-methylguanosine-3'-phosphate
  modified_base 21: mod_base = OTHER; note = 2'-O-methylcytidine-3'-phosphate
  modified_base 22: mod_base = OTHER; note = 2'-O-methylcytidine-3'-phosphate
  modified_base 23: mod_base = OTHER; note = 2'-O-methyladenosine
tgaattctagatgtgacatgcca

SEQ ID NO: 5589 - RNA, 23 nt, synthetic construct
  source 1..23: mol_type = other RNA
  modified_base 1: mod_base = OTHER; note = 2'-O-methyluridine-3'-phosphate 5'-(E)-Vinylphosphonate
  modified_base 2: mod_base = OTHER; note = 2'-deoxy-2'-fluoroadenosine-3'-phosphate
  modified_base 3: mod_base = OTHER; note = 2'-O-methylguanosine-3'-phosphate
  modified_base 4: mod_base = OTHER; note = 2'-O-methyladenosine-3'-phosphate
  modified_base 5: mod_base = OTHER; note = 2'-O-methyladenosine-3'-phosphate
  modified_base 6: mod_base = OTHER; note = 2'-deoxy-2'-fluorouridine-3'-phosphate
  modified_base 7: mod_base = OTHER; note = 2'-O-methyluridine-3'-phosphate
  modified_base 8: mod_base = OTHER; note = 2'-O-methylcytidine-3'-phosphate
  modified_base 9: mod_base = OTHER; note = 2'-O-methyluridine-3'-phosphate
  modified_base 10: mod_base = OTHER; note = 2'-O-methyladenosine-3'-phosphate
  modified_base 11: mod_base = OTHER; note = 2'-O-methylguanosine-3'-phosphate
  modified_base 12: mod_base = OTHER; note = 2'-O-methyladenosine-3'-phosphate
  modified_base 13: mod_base = OTHER; note = 2'-O-methyluridine-3'-phosphate
  modified_base 14: mod_base = OTHER; note = 2'-deoxy-2'-fluoroguanosine-3'-phosphate
  modified_base 15: mod_base = OTHER; note = 2'-O-methyluridine-3'-phosphate
  modified_base 16: mod_base = OTHER; note = 2'-deoxy-2'-fluoroguanosine-3'-phosphate
  modified_base 17: mod_base = OTHER; note = 2'-O-methyladenosine-3'-phosphate
  modified_base 18: mod_base = OTHER; note = 2'-O-methylcytidine-3'-phosphate
  modified_base 19: mod_base = OTHER; note = 2'-O-methyladenosine-3'-phosphate
  modified_base 20: mod_base = OTHER; note = 2'-O-methyluridine-3'-phosphate
  modified_base 21: mod_base = OTHER; note = 2'-O-methylguanosine-3'-phosphate
  modified_base 22: mod_base = OTHER; note = 2'-O-methylcytidine-3'-phosphate
  modified_base 23: mod_base = OTHER; note = 2'-O-methylcytidine
tagaattctagatgtgacatgcc

SEQ ID NO: 5590 - RNA, 23 nt, synthetic construct
  source 1..23: mol_type = other RNA
  modified_base 1: mod_base = OTHER; note = 2'-O-methyluridine-3'-phosphate 5'-(E)-Vinylphosphonate
  modified_base 2: mod_base = OTHER; note = 2'-deoxy-2'-fluoroadenosine-3'-phosphate
  modified_base 3: mod_base = OTHER; note = 2'-O-methyladenosine-3'-phosphate
  modified_base 4: mod_base = OTHER; note = 2'-O-methylguanosine-3'-phosphate
  modified_base 5: mod_base = OTHER; note = 2'-O-methyladenosine-3'-phosphate
  modified_base 6: mod_base = OTHER; note = 2'-deoxy-2'-fluoroadenosine-3'-phosphate
  modified_base 7: mod_base = OTHER; note = 2'-O-methyluridine-3'-phosphate
  modified_base 8: mod_base = OTHER; note = 2'-O-methyluridine-3'-phosphate
  modified_base 9: mod_base = OTHER; note = 2'-O-methylcytidine-3'-phosphate
  modified_base 10: mod_base = OTHER; note = 2'-O-methyluridine-3'-phosphate
  modified_base 11: mod_base = OTHER; note = 2'-O-methyladenosine-3'-phosphate
  modified_base 12: mod_base = OTHER; note = 2'-O-methylguanosine-3'-phosphate
  modified_base 13: mod_base = OTHER; note = 2'-O-methyladenosine-3'-phosphate
  modified_base 14: mod_base = OTHER; note = 2'-deoxy-2'-fluorouridine-3'-phosphate
  modified_base 15: mod_base = OTHER; note = 2'-O-methylguanosine-3'-phosphate
  modified_base 16: mod_base = OTHER; note = 2'-deoxy-2'-fluorouridine-3'-phosphate
  modified_base 17: mod_base = OTHER; note = 2'-O-methylguanosine-3'-phosphate
  modified_base 18: mod_base = OTHER; note = 2'-O-methyladenosine-3'-phosphate
  modified_base 19: mod_base = OTHER; note = 2'-O-methylcytidine-3'-phosphate
  modified_base 20: mod_base = OTHER; note = 2'-O-methyladenosine-3'-phosphate
  modified_base 21: mod_base = OTHER; note = 2'-O-methyluridine-3'-phosphate
  modified_base 22: mod_base = OTHER; note = 2'-O-methylguanosine-3'-phosphate
  modified_base 23: mod_base = OTHER; note = 2'-O-methylcytidine
taagaattctagatgtgacatgc

SEQ ID NO: 5591 - RNA, 23 nt, synthetic construct
  source 1..23: mol_type = other RNA
  modified_base 1: mod_base = OTHER; note = 2'-O-methyluridine-3'-phosphate 5'-(E)-Vinylphosphonate
  modified_base 2: mod_base = OTHER; note = 2'-deoxy-2'-fluorouridine-3'-phosphate
  modified_base 3: mod_base = OTHER; note = 2'-O-methyladenosine-3'-phosphate
  modified_base 4: mod_base = OTHER; note = 2'-O-methyladenosine-3'-phosphate
  modified_base 5: mod_base = OTHER; note = 2'-O-methylguanosine-3'-phosphate
  modified_base 6: mod_base = OTHER; note = 2'-deoxy-2'-fluoroadenosine-3'-phosphate
  modified_base 7: mod_base = OTHER; note = 2'-O-methyladenosine-3'-phosphate
  modified_base 8: mod_base = OTHER; note = 2'-O-methyluridine-3'-phosphate
  modified_base 9: mod_base = OTHER; note = 2'-O-methyluridine-3'-phosphate
  modified_base 10: mod_base = OTHER; note = 2'-O-methylcytidine-3'-phosphate
  modified_base 11: mod_base = OTHER; note = 2'-O-methyluridine-3'-phosphate
  modified_base 12: mod_base = OTHER; note = 2'-O-methyladenosine-3'-phosphate
  modified_base 13: mod_base = OTHER; note = 2'-O-methylguanosine-3'-phosphate
  modified_base 14: mod_base = OTHER; note = 2'-deoxy-2'-fluoroadenosine-3'-phosphate
  modified_base 15: mod_base = OTHER; note = 2'-O-methyluridine-3'-phosphate
  modified_base 16: mod_base = OTHER; note = 2'-deoxy-2'-fluoroguanosine-3'-phosphate
  modified_base 17: mod_base = OTHER; note = 2'-O-methyluridine-3'-phosphate
  modified_base 18: mod_base = OTHER; note = 2'-O-methylguanosine-3'-phosphate
  modified_base 19: mod_base = OTHER; note = 2'-O-methyladenosine-3'-phosphate
  modified_base 20: mod_base = OTHER; note = 2'-O-methylcytidine-3'-phosphate
  modified_base 21: mod_base = OTHER; note = 2'-O-methyladenosine-3'-phosphate
  modified_base 22: mod_base = OTHER; note = 2'-O-methyluridine-3'-phosphate
  modified_base 23: mod_base = OTHER; note = 2'-O-methylguanosine
ttaagaattctagatgtgacatg

SEQ ID NO: 5592 - RNA, 23 nt, synthetic construct
  source 1..23: mol_type = other RNA
  modified_base 1: mod_base = OTHER; note = 2'-O-methyluridine-3'-phosphate 5'-(E)-Vinylphosphonate
  modified_base 2: mod_base = OTHER; note = 2'-deoxy-2'-fluorouridine-3'-phosphate
  modified_base 3: mod_base = OTHER; note = 2'-O-methyluridine-3'-phosphate
  modified_base 4: mod_base = OTHER; note = 2'-O-methyladenosine-3'-phosphate
  modified_base 5: mod_base = OTHER; note = 2'-O-methyladenosine-3'-phosphate
  modified_base 6: mod_base = OTHER; note = 2'-deoxy-2'-fluoroguanosine-3'-phosphate
  modified_base 7: mod_base = OTHER; note = 2'-O-methyladenosine-3'-phosphate
  modified_base 8: mod_base = OTHER; note = 2'-O-methyladenosine-3'-phosphate
  modified_base 9: mod_base = OTHER; note = 2'-O-methyluridine-3'-phosphate
  modified_base 10: mod_base = OTHER; note = 2'-O-methyluridine-3'-phosphate
  modified_base 11: mod_base = OTHER; note = 2'-O-methylcytidine-3'-phosphate
  modified_base 12: mod_base = OTHER; note = 2'-O-methyluridine-3'-phosphate
  modified_base 13: mod_base = OTHER; note = 2'-O-methyladenosine-3'-phosphate
  modified_base 14: mod_base = OTHER; note = 2'-deoxy-2'-fluoroguanosine-3'-phosphate
  modified_base 15: mod_base = OTHER; note = 2'-O-methyladenosine-3'-phosphate
  modified_base 16: mod_base = OTHER; note = 2'-deoxy-2'-fluorouridine-3'-phosphate
  modified_base 17: mod_base = OTHER; note = 2'-O-methylguanosine-3'-phosphate
  modified_base 18: mod_base = OTHER; note = 2'-O-methyluridine-3'-phosphate
  modified_base 19: mod_base = OTHER; note = 2'-O-methylguanosine-3'-phosphate
  modified_base 20: mod_base = OTHER; note = 2'-O-methyladenosine-3'-phosphate
  modified_base 21: mod_base = OTHER; note = 2'-O-methylcytidine-3'-phosphate
  modified_base 22: mod_base = OTHER; note = 2'-O-methyladenosine-3'-phosphate
  modified_base 23: mod_base = OTHER; note = 2'-O-methyluridine
tttaagaattctagatgtgacat

SEQ ID NO: 5593 - RNA, 23 nt, synthetic construct
  source 1..23: mol_type = other RNA
  modified_base 1: mod_base = OTHER; note = 2'-O-methyluridine-3'-phosphate 5'-(E)-Vinylphosphonate
  modified_base 2: mod_base = OTHER; note = 2'-deoxy-2'-fluoroadenosine-3'-phosphate
  modified_base 3: mod_base = OTHER; note = 2'-O-methyluridine-3'-phosphate
  modified_base 4: mod_base = OTHER; note = 2'-O-methyluridine-3'-phosphate
  modified_base 5: mod_base = OTHER; note = 2'-O-methyladenosine-3'-phosphate
  modified_base 6: mod_base = OTHER; note = 2'-deoxy-2'-fluoroadenosine-3'-phosphate
  modified_base 7: mod_base = OTHER; note = 2'-O-methylguanosine-3'-phosphate
  modified_base 8: mod_base = OTHER; note = 2'-O-methyladenosine-3'-phosphate
  modified_base 9: mod_base = OTHER; note = 2'-O-methyladenosine-3'-phosphate
  modified_base 10: mod_base = OTHER; note = 2'-O-methyluridine-3'-phosphate
  modified_base 11: mod_base = OTHER; note = 2'-O-methyluridine-3'-phosphate
  modified_base 12: mod_base = OTHER; note = 2'-O-methylcytidine-3'-phosphate
  modified_base 13: mod_base = OTHER; note = 2'-O-methyluridine-3'-phosphate
  modified_base 14: mod_base = OTHER; note = 2'-deoxy-2'-fluoroadenosine-3'-phosphate
  modified_base 15: mod_base = OTHER; note = 2'-O-methylguanosine-3'-phosphate
  modified_base 16: mod_base = OTHER; note = 2'-deoxy-2'-fluoroadenosine-3'-phosphate
  modified_base 17: mod_base = OTHER; note = 2'-O-methyluridine-3'-phosphate
  modified_base 18: mod_base = OTHER; note = 2'-O-methylguanosine-3'-phosphate
  modified_base 19: mod_base = OTHER; note = 2'-O-methyluridine-3'-phosphate
  modified_base 20: mod_base = OTHER; note = 2'-O-methylguanosine-3'-phosphate
  modified_base 21: mod_base = OTHER; note = 2'-O-methyladenosine-3'-phosphate
  modified_base 22: mod_base = OTHER; note = 2'-O-methylcytidine-3'-phosphate
  modified_base 23: mod_base = OTHER; note = 2'-O-methyladenosine
tattaagaattctagatgtgaca

SEQ ID NO: 5594 - RNA, 23 nt, synthetic construct
  source 1..23: mol_type = other RNA
  modified_base 1: mod_base = OTHER; note = 2'-O-methyluridine-3'-phosphate 5'-(E)-Vinylphosphonate
  modified_base 2: mod_base = OTHER; note = 2'-deoxy-2'-fluoroadenosine-3'-phosphate
  modified_base 3: mod_base = OTHER; note = 2'-O-methyladenosine-3'-phosphate
  modified_base 4: mod_base = OTHER; note = 2'-O-methyluridine-3'-phosphate
  modified_base 5: mod_base = OTHER; note = 2'-O-methyluridine-3'-phosphate
  modified_base 6: mod_base = OTHER; note = 2'-deoxy-2'-fluoroadenosine-3'-phosphate
  modified_base 7: mod_base = OTHER; note = 2'-O-methyladenosine-3'-phosphate
  modified_base 8: mod_base = OTHER; note = 2'-O-methylguanosine-3'-phosphate
  modified_base 9: mod_base = OTHER; note = 2'-O-methyladenosine-3'-phosphate
  modified_base 10: mod_base = OTHER; note = 2'-O-methyladenosine-3'-phosphate
  modified_base 11: mod_base = OTHER; note = 2'-O-methyluridine-3'-phosphate
  modified_base 12: mod_base = OTHER; note = 2'-O-methyluridine-3'-phosphate
  modified_base 13: mod_base = OTHER; note = 2'-O-methylcytidine-3'-phosphate
  modified_base 14: mod_base = OTHER; note = 2'-deoxy-2'-fluorouridine-3'-phosphate
  modified_base 15: mod_base = OTHER; note = 2'-O-methyladenosine-3'-phosphate
  modified_base 16: mod_base = OTHER; note = 2'-deoxy-2'-fluoroguanosine-3'-phosphate
  modified_base 17: mod_base = OTHER; note = 2'-O-methyladenosine-3'-phosphate
  modified_base 18: mod_base = OTHER; note = 2'-O-methyluridine-3'-phosphate
  modified_base 19: mod_base = OTHER; note = 2'-O-methylguanosine-3'-phosphate
  modified_base 20: mod_base = OTHER; note = 2'-O-methyluridine-3'-phosphate
  modified_base 21: mod_base = OTHER; note = 2'-O-methylguanosine-3'-phosphate
  modified_base 22: mod_base = OTHER; note = 2'-O-methyladenosine-3'-phosphate
  modified_base 23: mod_base = OTHER; note = 2'-O-methylcytidine
taattaagaattctagatgtgac

SEQ ID NO: 5595 - RNA, 23 nt, synthetic construct
  source 1..23: mol_type = other RNA
  modified_base 1: mod_base = OTHER; note = 2'-O-methyluridine-3'-phosphate 5'-(E)-Vinylphosphonate
  modified_base 2: mod_base = OTHER; note = 2'-deoxy-2'-fluorouridine-3'-phosphate
  modified_base 3: mod_base = OTHER; note = 2'-O-methyluridine-3'-phosphate
  modified_base 4: mod_base = OTHER; note = 2'-O-methylcytidine-3'-phosphate
  modified_base 5: mod_base = OTHER; note = 2'-O-methyladenosine-3'-phosphate
  modified_base 6: mod_base = OTHER; note = 2'-deoxy-2'-fluorocytidine-3'-phosphate
  modified_base 7: mod_base = OTHER; note = 2'-O-methyluridine-3'-phosphate
  modified_base 8: mod_base = OTHER; note = 2'-O-methyluridine-3'-phosphate
  modified_base 9: mod_base = OTHER; note = 2'-O-methyladenosine-3'-phosphate
  modified_base 10: mod_base = OTHER; note = 2'-O-methyladenosine-3'-phosphate
  modified_base 11: mod_base = OTHER; note = 2'-O-methylcytidine-3'-phosphate
  modified_base 12: mod_base = OTHER; note = 2'-O-methyluridine-3'-phosphate
  modified_base 13: mod_base = OTHER; note = 2'-O-methylcytidine-3'-phosphate
  modified_base 14: mod_base = OTHER; note = 2'-deoxy-2'-fluorouridine-3'-phosphate
  modified_base 15: mod_base = OTHER; note = 2'-O-methylcytidine-3'-phosphate
  modified_base 16: mod_base = OTHER; note = 2'-deoxy-2'-fluoroadenosine-3'-phosphate
  modified_base 17: mod_base = OTHER; note = 2'-O-methyladenosine-3'-phosphate
  modified_base 18: mod_base = OTHER; note = 2'-O-methylguanosine-3'-phosphate
  modified_base 19: mod_base = OTHER; note = 2'-O-methyluridine-3'-phosphate
  modified_base 20: mod_base = OTHER; note = 2'-O-methylcytidine-3'-phosphate
  modified_base 21: mod_base = OTHER; note = 2'-O-methyladenosine-3'-phosphate
  modified_base 22: mod_base = OTHER; note = 2'-O-methylguanosine-3'-phosphate
  modified_base 23: mod_base = OTHER; note = 2'-O-methyladenosine
tttcacttaactctcaagtcaga

SEQ ID NO: 5596 - RNA, 23 nt, synthetic construct
  source 1..23: mol_type = other RNA
  modified_base 1: mod_base = OTHER; note = 2'-O-methyluridine-3'-phosphate 5'-(E)-Vinylphosphonate
  modified_base 2: mod_base = OTHER; note = 2'-deoxy-2'-fluoroadenosine-3'-phosphate
  modified_base 3: mod_base = OTHER; note = 2'-O-methyluridine-3'-phosphate
  modified_base 4: mod_base = OTHER; note = 2'-O-methylguanosine-3'-phosphate
  modified_base 5: mod_base = OTHER; note = 2'-O-methyluridine-3'-phosphate
  modified_base 6: mod_base = OTHER; note = 2'-deoxy-2'-fluorouridine-3'-phosphate
  modified_base 7: mod_base = OTHER; note = 2'-O-methyluridine-3'-phosphate
  modified_base 8: mod_base = OTHER; note = 2'-O-methylcytidine-3'-phosphate
  modified_base 9: mod_base = OTHER; note = 2'-O-methyladenosine-3'-phosphate
  modified_base 10: mod_base = OTHER; note = 2'-O-methylcytidine-3'-phosphate
  modified_base 11: mod_base = OTHER; note = 2'-O-methyluridine-3'-phosphate
  modified_base 12: mod_base = OTHER; note = 2'-O-methyluridine-3'-phosphate
  modified_base 13: mod_base = OTHER; note = 2'-O-methyladenosine-3'-phosphate
  modified_base 14: mod_base = OTHER; note = 2'-deoxy-2'-fluoroadenosine-3'-phosphate
  modified_base 15: mod_base = OTHER; note = 2'-O-methylcytidine-3'-phosphate
  modified_base 16: mod_base = OTHER; note = 2'-deoxy-2'-fluorouridine-3'-phosphate
  modified_base 17: mod_base = OTHER; note = 2'-O-methylcytidine-3'-phosphate
  modified_base 18: mod_base = OTHER; note = 2'-O-methyluridine-3'-phosphate
  modified_base 19: mod_base = OTHER; note = 2'-O-methylcytidine-3'-phosphate
  modified_base 20: mod_base = OTHER; note = 2'-O-methyladenosine-3'-phosphate
  modified_base 21: mod_base = OTHER; note = 2'-O-methyladenosine-3'-phosphate
  modified_base 22: mod_base = OTHER; note = 2'-O-methylguanosine-3'-phosphate
  modified_base 23: mod_base = OTHER; note = 2'-O-methyluridine
tatgtttcacttaactctcaagt

SEQ ID NO: 5597 - RNA, 23 nt, synthetic construct
  source 1..23: mol_type = other RNA
  modified_base 1: mod_base = OTHER; note = 2'-O-methyluridine-3'-phosphate 5'-(E)-Vinylphosphonate
  modified_base 2: mod_base = OTHER; note = 2'-deoxy-2'-fluoroadenosine-3'-phosphate
  modified_base 3: mod_base = OTHER; note = 2'-O-methyladenosine-3'-phosphate
  modified_base 4: mod_base = OTHER; note = 2'-O-methylguanosine-3'-phosphate
  modified_base 5: mod_base = OTHER; note = 2'-O-methyladenosine-3'-phosphate
  modified_base 6: mod_base = OTHER; note = 2'-deoxy-2'-fluorouridine-3'-phosphate
  modified_base 7: mod_base = OTHER; note = 2'-O-methylguanosine-3'-phosphate
  modified_base 8: mod_base = OTHER; note = 2'-O-methyladenosine-3'-phosphate
  modified_base 9: mod_base = OTHER; note = 2'-O-methyladenosine-3'-phosphate
  modified_base 10: mod_base = OTHER; note = 2'-O-methyladenosine-3'-phosphate
  modified_base 11: mod_base = OTHER; note = 2'-O-methyladenosine-3'-phosphate
  modified_base 12: mod_base = OTHER; note = 2'-O-methylguanosine-3'-phosphate
  modified_base 13: mod_base = OTHER; note = 2'-O-methylcytidine-3'-phosphate
  modified_base 14: mod_base = OTHER; note = 2'-deoxy-2'-fluoroadenosine-3'-phosphate
  modified_base 15: mod_base = OTHER; note = 2'-O-methyladenosine-3'-phosphate
  modified_base 16: mod_base = OTHER; note = 2'-deoxy-2'-fluoroguanosine-3'-phosphate
  modified_base 17: mod_base = OTHER; note = 2'-O-methyluridine-3'-phosphate
  modified_base 18: mod_base = OTHER; note = 2'-O-methylguanosine-3'-phosphate
  modified_base 19: mod_base = OTHER; note = 2'-O-methylcytidine-3'-phosphate
  modified_base 20: mod_base = OTHER; note = 2'-O-methyluridine-3'-phosphate
  modified_base 21: mod_base = OTHER; note = 2'-O-methyladenosine-3'-phosphate
  modified_base 22: mod_base = OTHER; note = 2'-O-methyluridine-3'-phosphate
  modified_base 23: mod_base = OTHER; note = 2'-O-methylguanosine
taagatgaaaagcaagtgctatg

SEQ ID NO: 5598 - RNA, 23 nt, synthetic construct
  source 1..23: mol_type = other RNA
  modified_base 1: mod_base = OTHER; note = 2'-O-methyluridine-3'-phosphate 5'-(E)-Vinylphosphonate
  modified_base 2: mod_base = OTHER; note = 2'-deoxy-2'-fluorocytidine-3'-phosphate
  modified_base 3: mod_base = OTHER; note = 2'-O-methyladenosine-3'-phosphate
  modified_base 4: mod_base = OTHER; note = 2'-O-methyluridine-3'-phosphate
  modified_base 5: mod_base = OTHER; note = 2'-O-methylguanosine-3'-phosphate
  modified_base 6: mod_base = OTHER; note = 2'-deoxy-2'-fluoroguanosine-3'-phosphate
  modified_base 7: mod_base = OTHER; note = 2'-O-methyladenosine-3'-phosphate
  modified_base 8: mod_base = OTHER; note = 2'-O-methyladenosine-3'-phosphate
  modified_base 9: mod_base = OTHER; note = 2'-O-methyladenosine-3'-phosphate
  modified_base 10: mod_base = OTHER; note = 2'-O-methyluridine-3'-phosphate
  modified_base 11: mod_base = OTHER; note = 2'-O-methyluridine-3'-phosphate
  modified_base 12: mod_base = OTHER; note = 2'-O-methyluridine-3'-phosphate
  modified_base 13: mod_base = OTHER; note = 2'-O-methyladenosine-3'-phosphate
  modified_base 14: mod_base = OTHER; note = 2'-deoxy-2'-fluoroadenosine-3'-phosphate
  modified_base 15: mod_base = OTHER; note = 2'-O-methyladenosine-3'-phosphate
  modified_base 16: mod_base = OTHER; note = 2'-deoxy-2'-fluoroadenosine-3'-phosphate
  modified_base 17: mod_base = OTHER; note = 2'-O-methyluridine-3'-phosphate
  modified_base 18: mod_base = OTHER; note = 2'-O-methylguanosine-3'-phosphate
  modified_base 19: mod_base = OTHER; note = 2'-O-methylcytidine-3'-phosphate
  modified_base 20: mod_base = OTHER; note = 2'-O-methyladenosine-3'-phosphate
  modified_base 21: mod_base = OTHER; note = 2'-O-methyladenosine-3'-phosphate
  modified_base 22: mod_base = OTHER; note = 2'-O-methyladenosine-3'-phosphate
  modified_base 23: mod_base = OTHER; note = 2'-O-methylguanosine
tcatggaaatttaaaatgcaaag

SEQ ID NO: 5599 - RNA, 23 nt, synthetic construct
  source 1..23: mol_type = other RNA
  modified_base 1: mod_base = OTHER; note = 2'-O-methyluridine-3'-phosphate 5'-(E)-Vinylphosphonate
  modified_base 2: mod_base = OTHER; note = 2'-deoxy-2'-fluorocytidine-3'-phosphate
  modified_base 3: mod_base = OTHER; note = 2'-O-methyladenosine-3'-phosphate
  modified_base 4: mod_base = OTHER; note = 2'-O-methyladenosine-3'-phosphate
  modified_base 5: mod_base = OTHER; note = 2'-O-methyluridine-3'-phosphate
  modified_base 6: mod_base = OTHER; note = 2'-deoxy-2'-fluorocytidine-3'-phosphate
  modified_base 7: mod_base = OTHER; note = 2'-O-methyladenosine-3'-phosphate
  modified_base 8: mod_base = OTHER; note = 2'-O-methyluridine-3'-phosphate
  modified_base 9: mod_base = OTHER; note = 2'-O-methylguanosine-3'-phosphate
  modified_base 10: mod_base = OTHER; note = 2'-O-methylguanosine-3'-phosphate
  modified_base 11: mod_base = OTHER; note = 2'-O-methyladenosine-3'-phosphate
  modified_base 12: mod_base = OTHER; note = 2'-O-methyladenosine-3'-phosphate
  modified_base 13: mod_base = OTHER; note = 2'-O-methyladenosine-3'-phosphate
  modified_base 14: mod_base = OTHER; note = 2'-deoxy-2'-fluorouridine-3'-phosphate
  modified_base 15: mod_base = OTHER; note = 2'-O-methyluridine-3'-phosphate
  modified_base 16: mod_base = OTHER; note = 2'-deoxy-2'-fluorouridine-3'-phosphate
  modified_base 17: mod_base = OTHER; note = 2'-O-methyladenosine-3'-phosphate
  modified_base 18: mod_base = OTHER; note = 2'-O-methyladenosine-3'-phosphate
  modified_base 19: mod_base = OTHER; note = 2'-O-methyladenosine-3'-phosphate
  modified_base 20: mod_base = OTHER; note = 2'-O-methyladenosine-3'-phosphate
  modified_base 21: mod_base = OTHER; note = 2'-O-methyluridine-3'-phosphate
  modified_base 22: mod_base = OTHER; note = 2'-O-methylguanosine-3'-phosphate
  modified_base 23: mod_base = OTHER; note = 2'-O-methylcytidine
tcaatcatggaaatttaaaatgc

SEQ ID NO: 5600 - RNA, 23 nt, synthetic construct
  source 1..23: mol_type = other RNA
  modified_base 1: mod_base = OTHER; note = 2'-O-methyluridine-3'-phosphate 5'-(E)-Vinylphosphonate
  modified_base 2: mod_base = OTHER; note = 2'-deoxy-2'-fluorouridine-3'-phosphate
  modified_base 3: mod_base = OTHER; note = 2'-O-methyluridine-3'-phosphate
  modified_base 4: mod_base = OTHER; note = 2'-O-methyluridine-3'-phosphate
  modified_base 5: mod_base = OTHER; note = 2'-O-methyluridine-3'-phosphate
  modified_base 6: mod_base = OTHER; note = 2'-deoxy-2'-fluorouridine-3'-phosphate
  modified_base 7: mod_base = OTHER; note = 2'-O-methylcytidine-3'-phosphate
  modified_base 8: mod_base = OTHER; note = 2'-O-methyladenosine-3'-phosphate
  modified_base 9: mod_base = OTHER; note = 2'-O-methylguanosine-3'-phosphate
  modified_base 10: mod_base = OTHER; note = 2'-O-methyladenosine-3'-phosphate
  modified_base 11: mod_base = OTHER; note = 2'-O-methyluridine-3'-phosphate
  modified_base 12: mod_base = OTHER; note = 2'-O-methyladenosine-3'-phosphate
  modified_base 13: mod_base = OTHER; note = 2'-O-methylcytidine-3'-phosphate
  modified_base 14: mod_base = OTHER; note = 2'-deoxy-2'-fluorouridine-3'-phosphate
  modified_base 15: mod_base = OTHER; note = 2'-O-methylguanosine-3'-phosphate
  modified_base 16: mod_base = OTHER; note = 2'-deoxy-2'-fluorocytidine-3'-phosphate
  modified_base 17: mod_base = OTHER; note = 2'-O-methyladenosine-3'-phosphate
  modified_base 18: mod_base = OTHER; note = 2'-O-methyladenosine-3'-phosphate
  modified_base 19: mod_base = OTHER; note = 2'-O-methylcytidine-3'-phosphate
  modified_base 20: mod_base = OTHER; note = 2'-O-methylcytidine-3'-phosphate
  modified_base 21: mod_base = OTHER; note = 2'-O-methyladenosine-3'-phosphate
  modified_base 22: mod_base = OTHER; note = 2'-O-methylguanosine-3'-phosphate
  modified_base 23: mod_base = OTHER; note = 2'-O-methylguanosine
ttttttcagatactgcaaccagg

SEQ ID NO: 5601 - RNA, 23 nt, synthetic construct
  source 1..23: mol_type = other RNA
  modified_base 1: mod_base = OTHER; note = 2'-O-methyluridine-3'-phosphate 5'-(E)-Vinylphosphonate
  modified_base 2: mod_base = OTHER; note = 2'-deoxy-2'-fluorouridine-3'-phosphate
  modified_base 3: mod_base = OTHER; note = 2'-O-methyluridine-3'-phosphate
  modified_base 4: mod_base = OTHER; note = 2'-O-methyluridine-3'-phosphate
  modified_base 5: mod_base = OTHER; note = 2'-O-methyluridine-3'-phosphate
  modified_base 6: mod_base = OTHER; note = 2'-deoxy-2'-fluorouridine-3'-phosphate
  modified_base 7: mod_base = OTHER; note = 2'-O-methyluridine-3'-phosphate
  modified_base 8: mod_base = OTHER; note = 2'-O-methylcytidine-3'-phosphate
  modified_base 9: mod_base = OTHER; note = 2'-O-methyladenosine-3'-phosphate
  modified_base 10: mod_base = OTHER; note = 2'-O-methylguanosine-3'-phosphate
  modified_base 11: mod_base = OTHER; note = 2'-O-methyladenosine-3'-phosphate
  modified_base 12: mod_base = OTHER; note = 2'-O-methyluridine-3'-phosphate
  modified_base 13: mod_base = OTHER; note = 2'-O-methyladenosine-3'-phosphate
  modified_base 14: mod_base = OTHER; note = 2'-deoxy-2'-fluorocytidine-3'-phosphate
  modified_base 15: mod_base = OTHER; note = 2'-O-methyluridine-3'-phosphate
  modified_base 16: mod_base = OTHER; note = 2'-deoxy-2'-fluoroguanosine-3'-phosphate
  modified_base 17: mod_base = OTHER; note = 2'-O-methylcytidine-3'-phosphate
  modified_base 18: mod_base = OTHER; note = 2'-O-methyladenosine-3'-phosphate
  modified_base 19: mod_base = OTHER; note = 2'-O-methyladenosine-3'-phosphate
  modified_base 20: mod_base = OTHER; note = 2'-O-methylcytidine-3'-phosphate
  modified_base 21: mod_base = OTHER; note = 2'-O-methylcytidine-3'-phosphate
  modified_base 22: mod_base = OTHER; note = 2'-O-methyladenosine-3'-phosphate
  modified_base 23: mod_base = OTHER; note = 2'-O-methylguanosine
tttttttcagatactgcaaccag

SEQ ID NO: 5602 - RNA, 23 nt, synthetic construct
  source 1..23: mol_type = other RNA
  modified_base 1: mod_base = OTHER; note = 2'-O-methyluridine-3'-phosphate 5'-(E)-Vinylphosphonate
  modified_base 2: mod_base = OTHER; note = 2'-deoxy-2'-fluoroadenosine-3'-phosphate
  modified_base 3: mod_base = OTHER; note = 2'-O-methyluridine-3'-phosphate
  modified_base 4: mod_base = OTHER; note = 2'-O-methyluridine-3'-phosphate
  modified_base 5: mod_base = OTHER; note = 2'-O-methyluridine-3'-phosphate
  modified_base 6: mod_base = OTHER; note = 2'-deoxy-2'-fluorouridine-3'-phosphate
  modified_base 7: mod_base = OTHER; note = 2'-O-methyluridine-3'-phosphate
  modified_base 8: mod_base = OTHER; note = 2'-O-methyluridine-3'-phosphate
  modified_base 9: mod_base = OTHER; note = 2'-O-methylcytidine-3'-phosphate
  modified_base 10: mod_base = OTHER; note = 2'-O-methyladenosine-3'-phosphate
  modified_base 11: mod_base = OTHER; note = 2'-O-methylguanosine-3'-phosphate
  modified_base 12: mod_base = OTHER; note = 2'-O-methyladenosine-3'-phosphate
  modified_base 13: mod_base = OTHER; note = 2'-O-methyluridine-3'-phosphate
  modified_base 14: mod_base = OTHER; note = 2'-deoxy-2'-fluoroadenosine-3'-phosphate
  modified_base 15: mod_base = OTHER; note = 2'-O-methylcytidine-3'-phosphate
  modified_base 16: mod_base = OTHER; note = 2'-deoxy-2'-fluorouridine-3'-phosphate
  modified_base 17: mod_base = OTHER; note = 2'-O-methylguanosine-3'-phosphate
  modified_base 18: mod_base = OTHER; note = 2'-O-methylcytidine-3'-phosphate
  modified_base 19: mod_base = OTHER; note = 2'-O-methyladenosine-3'-phosphate
  modified_base 20: mod_base = OTHER; note = 2'-O-methyladenosine-3'-phosphate
  modified_base 21: mod_base = OTHER; note = 2'-O-methylcytidine-3'-phosphate
  modified_base 22: mod_base = OTHER; note = 2'-O-methylcytidine-3'-phosphate
  modified_base 23: mod_base = OTHER; note = 2'-O-methyladenosine
tattttttcagatactgcaacca

SEQ ID NO: 5603 - RNA, 23 nt, synthetic construct
  source 1..23: mol_type = other RNA
  modified_base 1: mod_base = OTHER; note = 2'-O-methyluridine-3'-phosphate 5'-(E)-Vinylphosphonate
  modified_base 2: mod_base = OTHER; note = 2'-deoxy-2'-fluoroadenosine-3'-phosphate
  modified_base 3: mod_base = OTHER; note = 2'-O-methyladenosine-3'-phosphate
  modified_base 4: mod_base = OTHER; note = 2'-O-methyluridine-3'-phosphate
  modified_base 5: mod_base = OTHER; note = 2'-O-methyluridine-3'-phosphate
  modified_base 6: mod_base = OTHER; note = 2'-deoxy-2'-fluorouridine-3'-phosphate
  modified_base 7: mod_base = OTHER; note = 2'-O-methyluridine-3'-phosphate
  modified_base 8: mod_base = OTHER; note = 2'-O-methyluridine-3'-phosphate
  modified_base 9: mod_base = OTHER; note = 2'-O-methyluridine-3'-phosphate
  modified_base 10: mod_base = OTHER; note = 2'-O-methylcytidine-3'-phosphate
  modified_base 11: mod_base = OTHER; note = 2'-O-methyladenosine-3'-phosphate
  modified_base 12: mod_base = OTHER; note = 2'-O-methylguanosine-3'-phosphate
  modified_base 13: mod_base = OTHER; note = 2'-O-methyladenosine-3'-phosphate
  modified_base 14: mod_base = OTHER; note = 2'-deoxy-2'-fluorouridine-3'-phosphate
  modified_base 15: mod_base = OTHER; note = 2'-O-methyladenosine-3'-phosphate
  modified_base 16: mod_base = OTHER; note = 2'-deoxy-2'-fluorocytidine-3'-phosphate
  modified_base 17: mod_base = OTHER; note = 2'-O-methyluridine-3'-phosphate
  modified_base 18: mod_base = OTHER; note = 2'-O-methylguanosine-3'-phosphate
  modified_base 19: mod_base = OTHER; note = 2'-O-methylcytidine-3'-phosphate
  modified_base 20: mod_base = OTHER; note = 2'-O-methyladenosine-3'-phosphate
  modified_base 21: mod_base = OTHER; note = 2'-O-methyladenosine-3'-phosphate
  modified_base 22: mod_base = OTHER; note = 2'-O-methylcytidine-3'-phosphate
  modified_base 23: mod_base = OTHER; note = 2'-O-methylcytidine
taattttttcagatactgcaacc

SEQ ID NO: 5604 - RNA, 23 nt, synthetic construct
  source 1..23: mol_type = other RNA
  modified_base 1: mod_base = OTHER; note = 2'-O-methyluridine-3'-phosphate 5'-(E)-Vinylphosphonate
  modified_base 2: mod_base = OTHER; note = 2'-deoxy-2'-fluorouridine-3'-phosphate
  modified_base 3: mod_base = OTHER; note = 2'-O-methyladenosine-3'-phosphate
  modified_base 4: mod_base = OTHER; note = 2'-O-methyladenosine-3'-phosphate
  modified_base 5: mod_base = OTHER; note = 2'-O-methyluridine-3'-phosphate
  modified_base 6: mod_base = OTHER; note = 2'-deoxy-2'-fluorouridine-3'-phosphate
  modified_base 7: mod_base = OTHER; note = 2'-O-methyluridine-3'-phosphate
  modified_base 8: mod_base = OTHER; note = 2'-O-methyluridine-3'-phosphate
  modified_base 9: mod_base = OTHER; note = 2'-O-methyluridine-3'-phosphate
  modified_base 10: mod_base = OTHER; note = 2'-O-methyluridine-3'-phosphate
  modified_base 11: mod_base = OTHER; note = 2'-O-methylcytidine-3'-phosphate
  modified_base 12: mod_base = OTHER; note = 2'-O-methyladenosine-3'-phosphate
  modified_base 13: mod_base = OTHER; note = 2'-O-methylguanosine-3'-phosphate
  modified_base 14: mod_base = OTHER; note = 2'-deoxy-2'-fluoroadenosine-3'-phosphate
  modified_base 15: mod_base = OTHER; note = 2'-O-methyluridine-3'-phosphate
  modified_base 16: mod_base = OTHER; note = 2'-deoxy-2'-fluoroadenosine-3'-phosphate
  modified_base 17: mod_base = OTHER; note = 2'-O-methylcytidine-3'-phosphate
  modified_base 18: mod_base = OTHER; note = 2'-O-methyluridine-3'-phosphate
  modified_base 19: mod_base = OTHER; note = 2'-O-methylguanosine-3'-phosphate
  modified_base 20: mod_base = OTHER; note = 2'-O-methylcytidine-3'-phosphate
  modified_base 21: mod_base = OTHER; note = 2'-O-methyladenosine-3'-phosphate
  modified_base 22: mod_base = OTHER; note = 2'-O-methyladenosine-3'-phosphate
  modified_base 23: mod_base = OTHER; note = 2'-O-methylcytidine
ttaattttttcagatactgcaac

SEQ ID NO: 5605 - RNA, 23 nt, synthetic construct
  source 1..23: mol_type = other RNA
  modified_base 1: mod_base = OTHER; note = 2'-O-methyluridine-3'-phosphate 5'-(E)-Vinylphosphonate
  modified_base 2: mod_base = OTHER; note = 2'-deoxy-2'-fluoroguanosine-3'-phosphate
  modified_base 3: mod_base = OTHER; note = 2'-O-methyladenosine-3'-phosphate
  modified_base 4: mod_base = OTHER; note = 2'-O-methyladenosine-3'-phosphate
  modified_base 5: mod_base = OTHER; note = 2'-O-methylcytidine-3'-phosphate
  modified_base 6: mod_base = OTHER; note = 2'-deoxy-2'-fluorouridine-3'-phosphate
  modified_base 7: mod_base = OTHER; note = 2'-O-methyluridine-3'-phosphate
  modified_base 8: mod_base = OTHER; note = 2'-O-methylcytidine-3'-phosphate
  modified_base 9: mod_base = OTHER; note = 2'-O-methyluridine-3'-phosphate
  modified_base 10: mod_base = OTHER; note = 2'-O-methyladenosine-3'-phosphate
  modified_base 11: mod_base = OTHER; note = 2'-O-methyladenosine-3'-phosphate
  modified_base 12: mod_base = OTHER; note = 2'-O-methylcytidine-3'-phosphate
  modified_base 13: mod_base = OTHER; note = 2'-O-methylcytidine-3'-phosphate
  modified_base 14: mod_base = OTHER; note = 2'-deoxy-2'-fluorouridine-3'-phosphate
  modified_base 15: mod_base = OTHER; note = 2'-O-methyladenosine-3'-phosphate
  modified_base 16: mod_base = OTHER; note = 2'-deoxy-2'-fluoroadenosine-3'-phosphate
  modified_base 17: mod_base = OTHER; note = 2'-O-methyluridine-3'-phosphate
  modified_base 18: mod_base = OTHER; note = 2'-O-methylguanosine-3'-phosphate
  modified_base 19: mod_base = OTHER; note = 2'-O-methyladenosine-3'-phosphate
  modified_base 20: mod_base = OTHER; note = 2'-O-methyladenosine-3'-phosphate
  modified_base 21: mod_base = OTHER; note = 2'-O-methyluridine-3'-phosphate
  modified_base 22: mod_base = OTHER; note = 2'-O-methylcytidine-3'-phosphate
  modified_base 23: mod_base = OTHER; note = 2'-O-methyluridine
tgaacttctaacctaatgaatct

SEQ ID NO: 5606 - RNA, 23 nt, synthetic construct
  source 1..23: mol_type = other RNA
  modified_base 1: mod_base = OTHER; note = 2'-O-methyluridine-3'-phosphate 5'-(E)-Vinylphosphonate
  modified_base 2: mod_base = OTHER; note = 2'-deoxy-2'-fluoroadenosine-3'-phosphate
  modified_base 3: mod_base = OTHER; note = 2'-O-methyladenosine-3'-phosphate
  modified_base 4: mod_base = OTHER; note = 2'-O-methyladenosine-3'-phosphate
  modified_base 5: mod_base = OTHER; note = 2'-O-methyluridine-3'-phosphate
  modified_base 6: mod_base = OTHER; note = 2'-deoxy-2'-fluorouridine-3'-phosphate
  modified_base 7: mod_base = OTHER; note = 2'-O-methyladenosine-3'-phosphate
  modified_base 8: mod_base = OTHER; note = 2'-O-methyluridine-3'-phosphate
  modified_base 9: mod_base = OTHER; note = 2'-O-methyluridine-3'-phosphate
  modified_base 10: mod_base = OTHER; note = 2'-O-methylcytidine-3'-phosphate
  modified_base 11: mod_base = OTHER; note = 2'-O-methyluridine-3'-phosphate
  modified_base 12: mod_base = OTHER; note = 2'-O-methylguanosine-3'-phosphate
  modified_base 13: mod_base = OTHER; note = 2'-O-methylguanosine-3'-phosphate
  modified_base 14: mod_base = OTHER; note = 2'-deoxy-2'-fluoroadenosine-3'-phosphate
  modified_base 15: mod_base = OTHER; note = 2'-O-methyladenosine-3'-phosphate
  modified_base 16: mod_base = OTHER; note = 2'-deoxy-2'-fluorocytidine-3'-phosphate
  modified_base 17: mod_base = OTHER; note = 2'-O-methyluridine-3'-phosphate
  modified_base 18: mod_base = OTHER; note = 2'-O-methyluridine-3'-phosphate
  modified_base 19: mod_base = OTHER; note = 2'-O-methylcytidine-3'-phosphate
  modified_base 20: mod_base = OTHER; note = 2'-O-methyluridine-3'-phosphate
  modified_base 21: mod_base = OTHER; note = 2'-O-methyladenosine-3'-phosphate
  modified_base 22: mod_base = OTHER; note = 2'-O-methyladenosine-3'-phosphate
  modified_base 23: mod_base = OTHER; note = 2'-O-methylcytidine
taaattattctggaacttctaac

SEQ ID NO: 5607 - RNA, 23 nt, synthetic construct
  source 1..23: mol_type = other RNA
  modified_base 1: mod_base = OTHER; note = 2'-O-methyluridine-3'-phosphate 5'-(E)-Vinylphosphonate
  modified_base 2: mod_base = OTHER; note = 2'-deoxy-2'-fluoroguanosine-3'-phosphate
  modified_base 3: mod_base = OTHER; note = 2'-O-methyluridine-3'-phosphate
  modified_base 4: mod_base = OTHER; note = 2'-O-methyladenosine-3'-phosphate
  modified_base 5: mod_base = OTHER; note = 2'-O-methyladenosine-3'-phosphate
  modified_base 6: mod_base = OTHER; note = 2'-deoxy-2'-fluorouridine-3'-phosphate
  modified_base 7: mod_base = OTHER; note = 2'-O-methyluridine-3'-phosphate
  modified_base 8: mod_base = OTHER; note = 2'-O-methylcytidine-3'-phosphate
  modified_base 9: mod_base = OTHER; note = 2'-O-methyluridine-3'-phosphate
  modified_base 10: mod_base = OTHER; note = 2'-O-methyladenosine-3'-phosphate
  modified_base 11: mod_base = OTHER; note = 2'-O-methylcytidine-3'-phosphate
  modified_base 12: mod_base = OTHER; note = 2'-O-methyladenosine-3'-phosphate
  modified_base 13: mod_base = OTHER; note = 2'-O-methyladenosine-3'-phosphate
  modified_base 14: mod_base = OTHER; note = 2'-deoxy-2'-fluorouridine-3'-phosphate
  modified_base 15: mod_base = OTHER; note = 2'-O-methyladenosine-3'-phosphate
  modified_base 16: mod_base = OTHER; note = 2'-deoxy-2'-fluoroguanosine-3'-phosphate
  modified_base 17: mod_base = OTHER; note = 2'-O-methyluridine-3'-phosphate
  modified_base 18: mod_base = OTHER; note = 2'-O-methyladenosine-3'-phosphate
  modified_base 19: mod_base = OTHER; note = 2'-O-methylguanosine-3'-phosphate
  modified_base 20: mod_base = OTHER; note = 2'-O-methylguanosine-3'-phosphate
  modified_base 21: mod_base = OTHER; note = 2'-O-methyluridine-3'-phosphate
  modified_base 22: mod_base = OTHER; note = 2'-O-methylguanosine-3'-phosphate
  modified_base 23: mod_base = OTHER; note = 2'-O-methyluridine
tgtaattctacaatagtaggtgt

SEQ ID NO: 5608 - RNA, 23 nt, synthetic construct
  source 1..23: mol_type = other RNA
  modified_base 1: mod_base = OTHER; note = 2'-O-methyluridine-3'-phosphate 5'-(E)-Vinylphosphonate
  modified_base 2: mod_base = OTHER; note = 2'-deoxy-2'-fluoroguanosine-3'-phosphate
  modified_base 3: mod_base = OTHER; note = 2'-O-methylguanosine-3'-phosphate
  modified_base 4: mod_base = OTHER; note = 2'-O-methyladenosine-3'-phosphate
  modified_base 5: mod_base = OTHER; note = 2'-O-methylguanosine-3'-phosphate
  modified_base 6: mod_base = OTHER; note = 2'-deoxy-2'-fluorouridine-3'-phosphate
  modified_base 7: mod_base = OTHER; note = 2'-O-methyladenosine-3'-phosphate
  modified_base 8: mod_base = OTHER; note = 2'-O-methylguanosine-3'-phosphate
  modified_base 9: mod_base = OTHER; note = 2'-O-methyluridine-3'-phosphate
  modified_base 10: mod_base = OTHER; note = 2'-O-methyluridine-3'-phosphate
  modified_base 11: mod_base = OTHER; note = 2'-O-methyluridine-3'-phosphate
  modified_base 12: mod_base = OTHER; note = 2'-O-methyluridine-3'-phosphate
  modified_base 13: mod_base = OTHER; note = 2'-O-methylguanosine-3'-phosphate
  modified_base 14: mod_base = OTHER; note = 2'-deoxy-2'-fluorouridine-3'-phosphate
  modified_base 15: mod_base = OTHER; note = 2'-O-methyluridine-3'-phosphate
  modified_base 16: mod_base = OTHER; note = 2'-deoxy-2'-fluorouridine-3'-phosphate
  modified_base 17: mod_base = OTHER; note = 2'-O-methyluridine-3'-phosphate
  modified_base 18: mod_base = OTHER; note = 2'-O-methylguanosine-3'-phosphate
  modified_base 19: mod_base = OTHER; note = 2'-O-methyluridine-3'-phosphate
  modified_base 20: mod_base = OTHER; note = 2'-O-methyluridine-3'-phosphate
  modified_base 21: mod_base = OTHER; note = 2'-O-methyluridine-3'-phosphate
  modified_base 22: mod_base = OTHER; note = 2'-O-methyluridine-3'-phosphate
  modified_base 23: mod_base = OTHER; note = 2'-O-methyladenosine
tggagtagttttgttttgtttta

SEQ ID NO: 5609 - RNA, 23 nt, synthetic construct
  source 1..23: mol_type = other RNA
  modified_base 1: mod_base = OTHER; note = 2'-O-methyluridine-3'-phosphate 5'-(E)-Vinylphosphonate
  modified_base 2: mod_base = OTHER; note = 2'-deoxy-2'-fluorouridine-3'-phosphate
  modified_base 3: mod_base = OTHER; note = 2'-O-methyladenosine-3'-phosphate
  modified_base 4: mod_base = OTHER; note = 2'-O-methylguanosine-3'-phosphate
  modified_base 5: mod_base = OTHER; note = 2'-O-methylguanosine-3'-phosphate
  modified_base 6: mod_base = OTHER; note = 2'-deoxy-2'-fluoroadenosine-3'-phosphate
  modified_base 7: mod_base = OTHER; note = 2'-O-methylguanosine-3'-phosphate
  modified_base 8: mod_base = OTHER; note = 2'-O-methyluridine-3'-phosphate
  modified_base 9: mod_base = OTHER; note = 2'-O-methyladenosine-3'-phosphate
  modified_base 10: mod_base = OTHER; note = 2'-O-methylguanosine-3'-phosphate
  modified_base 11: mod_base = OTHER; note = 2'-O-methyluridine-3'-phosphate
  modified_base 12: mod_base = OTHER; note = 2'-O-methyluridine-3'-phosphate
  modified_base 13: mod_base = OTHER; note = 2'-O-methyluridine-3'-phosphate
  modified_base 14: mod_base = OTHER; note = 2'-deoxy-2'-fluorouridine-3'-phosphate
  modified_base 15: mod_base = OTHER; note = 2'-O-methylguanosine-3'-phosphate
  modified_base 16: mod_base = OTHER; note = 2'-deoxy-2'-fluorouridine-3'-phosphate
  modified_base 17: mod_base = OTHER; note = 2'-O-methyluridine-3'-phosphate
  modified_base 18: mod_base = OTHER; note = 2'-O-methyluridine-3'-phosphate
  modified_base 19: mod_base = OTHER; note = 2'-O-methyluridine-3'-phosphate
  modified_base 20: mod_base = OTHER; note = 2'-O-methylguanosine-3'-phosphate
  modified_base 21: mod_base = OTHER; note = 2'-O-methyluridine-3'-phosphate
  modified_base 22: mod_base = OTHER; note = 2'-O-methyluridine-3'-phosphate
  modified_base 23: mod_base = OTHER; note = 2'-O-methyluridine
ttaggagtagttttgttttgttt

SEQ ID NO: 5610 - RNA, 23 nt, synthetic construct
  source 1..23: mol_type = other RNA
  modified_base 1: mod_base = OTHER; note = 2'-O-methyluridine-3'-phosphate 5'-(E)-Vinylphosphonate
  modified_base 2: mod_base = OTHER; note = 2'-deoxy-2'-fluoroadenosine-3'-phosphate
  modified_base 3: mod_base = OTHER; note = 2'-O-methyluridine-3'-phosphate
  modified_base 4: mod_base = OTHER; note = 2'-O-methyladenosine-3'-phosphate
  modified_base 5: mod_base = OTHER; note = 2'-O-methylguanosine-3'-phosphate
  modified_base 6: mod_base = OTHER; note = 2'-deoxy-2'-fluoroguanosine-3'-phosphate
  modified_base 7: mod_base = OTHER; note = 2'-O-methyladenosine-3'-phosphate
  modified_base 8: mod_base = OTHER; note = 2'-O-methylguanosine-3'-phosphate
  modified_base 9: mod_base = OTHER; note = 2'-O-methyluridine-3'-phosphate
  modified_base 10: mod_base = OTHER; note = 2'-O-methyladenosine-3'-phosphate
  modified_base 11: mod_base = OTHER; note = 2'-O-methylguanosine-3'-phosphate
  modified_base 12: mod_base = OTHER; note = 2'-O-methyluridine-3'-phosphate
  modified_base 13: mod_base = OTHER; note = 2'-O-methyluridine-3'-phosphate
  modified_base 14: mod_base = OTHER; note = 2'-deoxy-2'-fluorouridine-3'-phosphate
  modified_base 15: mod_base = OTHER; note = 2'-O-methyluridine-3'-phosphate
  modified_base 16: mod_base = OTHER; note = 2'-deoxy-2'-fluoroguanosine-3'-phosphate
  modified_base 17: mod_base = OTHER; note = 2'-O-methyluridine-3'-phosphate
  modified_base 18: mod_base = OTHER; note = 2'-O-methyluridine-3'-phosphate
  modified_base 19: mod_base = OTHER; note = 2'-O-methyluridine-3'-phosphate
  modified_base 20: mod_base = OTHER; note = 2'-O-methyluridine-3'-phosphate
  modified_base 21: mod_base = OTHER; note = 2'-O-methylguanosine-3'-phosphate
  modified_base 22: mod_base = OTHER; note = 2'-O-methyluridine-3'-phosphate
  modified_base 23: mod_base = OTHER; note = 2'-O-methyluridine
tataggagtagttttgttttgtt

SEQ ID NO: 5611 - RNA, 23 nt, synthetic construct
  source 1..23: mol_type = other RNA
  modified_base 1: mod_base = OTHER; note = 2'-O-methyluridine-3'-phosphate 5'-(E)-Vinylphosphonate
  modified_base 2: mod_base = OTHER; note = 2'-deoxy-2'-fluoroadenosine-3'-phosphate
  modified_base 3: mod_base = OTHER; note = 2'-O-methyladenosine-3'-phosphate
  modified_base 4: mod_base = OTHER; note = 2'-O-methyluridine-3'-phosphate
  modified_base 5: mod_base = OTHER; note = 2'-O-methyladenosine-3'-phosphate
  modified_base 6: mod_base = OTHER; note = 2'-deoxy-2'-fluoroguanosine-3'-phosphate
  modified_base 7: mod_base = OTHER; note = 2'-O-methylguanosine-3'-phosphate
  modified_base 8: mod_base = OTHER; note = 2'-O-methyladenosine-3'-phosphate
  modified_base 9: mod_base = OTHER; note = 2'-O-methylguanosine-3'-phosphate
  modified_base 10: mod_base = OTHER; note = 2'-O-methyluridine-3'-phosphate
  modified_base 11: mod_base = OTHER; note = 2'-O-methyladenosine-3'-phosphate
  modified_base 12: mod_base = OTHER; note = 2'-O-methylguanosine-3'-phosphate
  modified_base 13: mod_base = OTHER; note = 2'-O-methyluridine-3'-phosphate
  modified_base 14: mod_base = OTHER; note = 2'-deoxy-2'-fluorouridine-3'-phosphate
  modified_base 15: mod_base = OTHER; note = 2'-O-methyluridine-3'-phosphate
  modified_base 16: mod_base = OTHER; note = 2'-deoxy-2'-fluorouridine-3'-phosphate
  modified_base 17: mod_base = OTHER; note = 2'-O-methylguanosine-3'-phosphate
  modified_base 18: mod_base = OTHER; note = 2'-O-methyluridine-3'-phosphate
  modified_base 19: mod_base = OTHER; note = 2'-O-methyluridine-3'-phosphate
  modified_base 20: mod_base = OTHER; note = 2'-O-methyluridine-3'-phosphate
  modified_base 21: mod_base = OTHER; note = 2'-O-methyluridine-3'-phosphate
  modified_base 22: mod_base = OTHER; note = 2'-O-methylguanosine-3'-phosphate
  modified_base 23: mod_base = OTHER; note = 2'-O-methyluridine
taataggagtagttttgttttgt

SEQ ID NO: 5612 - RNA, 23 nt, synthetic construct
  source 1..23: mol_type = other RNA
  modified_base 1: mod_base = OTHER; note = 2'-O-methyluridine-3'-phosphate 5'-(E)-Vinylphosphonate
  modified_base 2: mod_base = OTHER; note = 2'-deoxy-2'-fluoroadenosine-3'-phosphate
  modified_base 3: mod_base = OTHER; note = 2'-O-methyladenosine-3'-phosphate
  modified_base 4: mod_base = OTHER; note = 2'-O-methyladenosine-3'-phosphate
  modified_base 5: mod_base = OTHER; note = 2'-O-methyluridine-3'-phosphate
  modified_base 6: mod_base = OTHER; note = 2'-deoxy-2'-fluoroadenosine-3'-phosphate
  modified_base 7: mod_base = OTHER; note = 2'-O-methylguanosine-3'-phosphate
  modified_base 8: mod_base = OTHER; note = 2'-O-methylguanosine-3'-phosphate
  modified_base 9: mod_base = OTHER; note = 2'-O-methyladenosine-3'-phosphate
  modified_base 10: mod_base = OTHER; note = 2'-O-methylguanosine-3'-phosphate
  modified_base 11: mod_base = OTHER; note = 2'-O-methyluridine-3'-phosphate
  modified_base 12: mod_base = OTHER; note = 2'-O-methyladenosine-3'-phosphate
  modified_base 13: mod_base = OTHER; note = 2'-O-methylguanosine-3'-phosphate
  modified_base 14: mod_base = OTHER; note = 2'-deoxy-2'-fluorouridine-3'-phosphate
  modified_base 15: mod_base = OTHER; note = 2'-O-methyluridine-3'-phosphate
  modified_base 16: mod_base = OTHER; note = 2'-deoxy-2'-fluorouridine-3'-phosphate
  modified_base 17: mod_base = OTHER; note = 2'-O-methyluridine-3'-phosphate
  modified_base 18: mod_base = OTHER; note = 2'-O-methylguanosine-3'-phosphate
  modified_base 19: mod_base = OTHER; note = 2'-O-methyluridine-3'-phosphate
  modified_base 20: mod_base = OTHER; note = 2'-O-methyluridine-3'-phosphate
  modified_base 21: mod_base = OTHER; note = 2'-O-methyluridine-3'-phosphate
  modified_base 22: mod_base = OTHER; note = 2'-O-methyluridine-3'-phosphate
  modified_base 23: mod_base = OTHER; note = 2'-O-methylguanosine
taaataggagtagttttgttttg

SEQ ID NO: 5613 - RNA, 23 nt, synthetic construct
  source 1..23: mol_type = other RNA
  modified_base 1: mod_base = OTHER; note = 2'-O-methyluridine-3'-phosphate 5'-(E)-Vinylphosphonate
  modified_base 2: mod_base = OTHER; note = 2'-deoxy-2'-fluoroguanosine-3'-phosphate
  modified_base 3: mod_base = OTHER; note = 2'-O-methyladenosine-3'-phosphate
  modified_base 4: mod_base = OTHER; note = 2'-O-methyladenosine-3'-phosphate
  modified_base 5: mod_base = OTHER; note = 2'-O-methyladenosine-3'-phosphate
  modified_base 6: mod_base = OTHER; note = 2'-deoxy-2'-fluoroadenosine-3'-phosphate
  modified_base 7: mod_base = OTHER; note = 2'-O-methyluridine-3'-phosphate
  modified_base 8: mod_base = OTHER; note = 2'-O-methyladenosine-3'-phosphate
  modified_base 9: mod_base = OTHER; note = 2'-O-methylguanosine-3'-phosphate
  modified_base 10: mod_base = OTHER; note = 2'-O-methylguanosine-3'-phosphate
  modified_base 11: mod_base = OTHER; note = 2'-O-methyladenosine-3'-phosphate
  modified_base 12: mod_base = OTHER; note = 2'-O-methylguanosine-3'-phosphate
  modified_base 13: mod_base = OTHER; note = 2'-O-methyluridine-3'-phosphate
  modified_base 14: mod_base = OTHER; note = 2'-deoxy-2'-fluoroadenosine-3'-phosphate
  modified_base 15: mod_base = OTHER; note = 2'-O-methylguanosine-3'-phosphate
  modified_base 16: mod_base = OTHER; note = 2'-deoxy-2'-fluorouridine-3'-phosphate
  modified_base 17: mod_base = OTHER; note = 2'-O-methyluridine-3'-phosphate
  modified_base 18: mod_base = OTHER; note = 2'-O-methyluridine-3'-phosphate
  modified_base 19: mod_base = OTHER; note = 2'-O-methyluridine-3'-phosphate
  modified_base 20: mod_base = OTHER; note = 2'-O-methylguanosine-3'-phosphate
  modified_base 21: mod_base = OTHER; note = 2'-O-methyluridine-3'-phosphate
  modified_base 22: mod_base = OTHER; note = 2'-O-methyluridine-3'-phosphate
  modified_base 23: mod_base = OTHER; note = 2'-O-methyluridine
tgaaaataggagtagttttgttt

SEQ ID NO: 5614 - RNA, 23 nt, synthetic construct
  source 1..23: mol_type = other RNA
  modified_base 1: mod_base = OTHER; note = 2'-O-methyluridine-3'-phosphate 5'-(E)-Vinylphosphonate
  modified_base 2: mod_base = OTHER; note = 2'-deoxy-2'-fluoroguanosine-3'-phosphate
  modified_base 3: mod_base = OTHER; note = 2'-O-methylguanosine-3'-phosphate
  modified_base 4: mod_base = OTHER; note = 2'-O-methyladenosine-3'-phosphate
  modified_base 5: mod_base = OTHER; note = 2'-O-methyladenosine-3'-phosphate
  modified_base 6: mod_base = OTHER; note = 2'-deoxy-2'-fluoroadenosine-3'-phosphate
  modified_base 7: mod_base = OTHER; note = 2'-O-methyladenosine-3'-phosphate
  modified_base 8: mod_base = OTHER; note = 2'-O-methyluridine-3'-phosphate
  modified_base 9: mod_base = OTHER; note = 2'-O-methyladenosine-3'-phosphate
  modified_base 10: mod_base = OTHER; note = 2'-O-methylguanosine-3'-phosphate
  modified_base 11: mod_base = OTHER; note = 2'-O-methylguanosine-3'-phosphate
  modified_base 12: mod_base = OTHER; note = 2'-O-methyladenosine-3'-phosphate
  modified_base 13: mod_base = OTHER; note = 2'-O-methylguanosine-3'-phosphate
  modified_base 14: mod_base = OTHER; note = 2'-deoxy-2'-fluorouridine-3'-phosphate
  modified_base 15: mod_base = OTHER; note = 2'-O-methyladenosine-3'-phosphate
  modified_base 16: mod_base = OTHER; note = 2'-deoxy-2'-fluoroguanosine-3'-phosphate
  modified_base 17: mod_base = OTHER; note = 2'-O-methyluridine-3'-phosphate
  modified_base 18: mod_base = OTHER; note = 2'-O-methyluridine-3'-phosphate
  modified_base 19: mod_base = OTHER; note = 2'-O-methyluridine-3'-phosphate
  modified_base 20: mod_base = OTHER; note = 2'-O-methyluridine-3'-phosphate
  modified_base 21: mod_base = OTHER; note = 2'-O-methylguanosine-3'-phosphate
  modified_base 22: mod_base = OTHER; note = 2'-O-methyluridine-3'-phosphate
  modified_base 23: mod_base = OTHER; note = 2'-O-methyluridine
tggaaaataggagtagttttgtt

SEQ ID NO: 5615 - RNA, 23 nt, synthetic construct
  source 1..23: mol_type = other RNA
  modified_base 1: mod_base = OTHER; note = 2'-O-methyluridine-3'-phosphate 5'-(E)-Vinylphosphonate
  modified_base 2: mod_base = OTHER; note = 2'-deoxy-2'-fluoroadenosine-3'-phosphate
  modified_base 3: mod_base = OTHER; note = 2'-O-methylguanosine-3'-phosphate
  modified_base 4: mod_base = OTHER; note = 2'-O-methylguanosine-3'-phosphate
  modified_base 5: mod_base = OTHER; note = 2'-O-methyladenosine-3'-phosphate
  modified_base 6: mod_base = OTHER; note = 2'-deoxy-2'-fluoroadenosine-3'-phosphate
  modified_base 7: mod_base = OTHER; note = 2'-O-methyladenosine-3'-phosphate
  modified_base 8: mod_base = OTHER; note = 2'-O-methyladenosine-3'-phosphate
  modified_base 9: mod_base = OTHER; note = 2'-O-methyluridine-3'-phosphate
  modified_base 10: mod_base = OTHER; note = 2'-O-methyladenosine-3'-phosphate
  modified_base 11: mod_base = OTHER; note = 2'-O-methylguanosine-3'-phosphate
  modified_base 12: mod_base = OTHER; note = 2'-O-methylguanosine-3'-phosphate
  modified_base 13: mod_base = OTHER; note = 2'-O-methyladenosine-3'-phosphate
  modified_base 14: mod_base = OTHER; note = 2'-deoxy-2'-fluoroguanosine-3'-phosphate
  modified_base 15: mod_base = OTHER; note = 2'-O-methyluridine-3'-phosphate
  modified_base 16: mod_base = OTHER; note = 2'-deoxy-2'-fluoroadenosine-3'-phosphate
  modified_base 17: mod_base = OTHER; note = 2'-O-methylguanosine-3'-phosphate
  modified_base 18: mod_base = OTHER; note = 2'-O-methyluridine-3'-phosphate
  modified_base 19: mod_base = OTHER; note = 2'-O-methyluridine-3'-phosphate
  modified_base 20: mod_base = OTHER; note = 2'-O-methyluridine-3'-phosphate
  modified_base 21: mod_base = OTHER; note = 2'-O-methyluridine-3'-phosphate
  modified_base 22: mod_base = OTHER; note = 2'-O-methylguanosine-3'-phosphate
  modified_base 23: mod_base = OTHER; note = 2'-O-methyluridine
taggaaaataggagtagttttgt

SEQ ID NO: 5616 - RNA, 23 nt, synthetic construct
  source 1..23: mol_type = other RNA
  modified_base 1: mod_base = OTHER; note = 2'-O-methyluridine-3'-phosphate 5'-(E)-Vinylphosphonate
  modified_base 2: mod_base = OTHER; note = 2'-deoxy-2'-fluorouridine-3'-phosphate
  modified_base 3: mod_base = OTHER; note = 2'-O-methylguanosine-3'-phosphate
  modified_base 4: mod_base = OTHER; note = 2'-O-methylguanosine-3'-phosphate
  modified_base 5: mod_base = OTHER; note = 2'-O-methylcytidine-3'-phosphate
  modified_base 6: mod_base = OTHER; note = 2'-deoxy-2'-fluoroadenosine-3'-phosphate
  modified_base 7: mod_base = OTHER; note = 2'-O-methyladenosine-3'-phosphate
  modified_base 8: mod_base = OTHER; note = 2'-O-methyladenosine-3'-phosphate
  modified_base 9: mod_base = OTHER; note = 2'-O-methyladenosine-3'-phosphate
  modified_base 10: mod_base = OTHER; note = 2'-O-methyluridine-3'-phosphate
  modified_base 11: mod_base = OTHER; note = 2'-O-methyluridine-3'-phosphate
  modified_base 12: mod_base = OTHER; note = 2'-O-methylcytidine-3'-phosphate
  modified_base 13: mod_base = OTHER; note = 2'-O-methylcytidine-3'-phosphate
  modified_base 14: mod_base = OTHER; note = 2'-deoxy-2'-fluoroadenosine-3'-phosphate
  modified_base 15: mod_base = OTHER; note = 2'-O-methylguanosine-3'-phosphate
  modified_base 16: mod_base = OTHER; note = 2'-deoxy-2'-fluoroguanosine-3'-phosphate
  modified_base 17: mod_base = OTHER; note = 2'-O-methyladenosine-3'-phosphate
  modified_base 18: mod_base = OTHER; note = 2'-O-methyladenosine-3'-phosphate
  modified_base 19: mod_base = OTHER; note = 2'-O-methyladenosine-3'-phosphate
  modified_base 20: mod_base = OTHER; note = 2'-O-methyladenosine-3'-phosphate
  modified_base 21: mod_base = OTHER; note = 2'-O-methyluridine-3'-phosphate
  modified_base 22: mod_base = OTHER; note = 2'-O-methyladenosine-3'-phosphate
  modified_base 23: mod_base = OTHER; note = 2'-O-methylguanosine
ttggcaaaattccaggaaaatag

SEQ ID NO: 5617 - RNA, 23 nt, synthetic construct
  source 1..23: mol_type = other RNA
  modified_base 1: mod_base = OTHER; note = 2'-O-methyluridine-3'-phosphate 5'-(E)-Vinylphosphonate
  modified_base 2: mod_base = OTHER; note = 2'-deoxy-2'-fluorouridine-3'-phosphate
  modified_base 3: mod_base = OTHER; note = 2'-O-methyluridine-3'-phosphate
  modified_base 4: mod_base = OTHER; note = 2'-O-methyluridine-3'-phosphate
  modified_base 5: mod_base = OTHER; note = 2'-O-methylguanosine-3'-phosphate
  modified_base 6: mod_base = OTHER; note = 2'-deoxy-2'-fluorouridine-3'-phosphate
  modified_base 7: mod_base = OTHER; note = 2'-O-methyladenosine-3'-phosphate
  modified_base 8: mod_base = OTHER; note = 2'-O-methyluridine-3'-phosphate
  modified_base 9: mod_base = OTHER; note = 2'-O-methyladenosine-3'-phosphate
  modified_base 10: mod_base = OTHER; note = 2'-O-methyladenosine-3'-phosphate
  modified_base 11: mod_base = OTHER; note = 2'-O-methyluridine-3'-phosphate
  modified_base 12: mod_base = OTHER; note = 2'-O-methylguanosine-3'-phosphate
  modified_base 13: mod_base = OTHER; note = 2'-O-methylguanosine-3'-phosphate
  modified_base 14: mod_base = OTHER; note = 2'-deoxy-2'-fluorocytidine-3'-phosphate
  modified_base 15: mod_base = OTHER; note = 2'-O-methyladenosine-3'-phosphate
  modified_base 16: mod_base = OTHER; note = 2'-deoxy-2'-fluoroadenosine-3'-phosphate
  modified_base 17: mod_base = OTHER; note = 2'-O-methyladenosine-3'-phosphate
  modified_base 18: mod_base = OTHER; note = 2'-O-methylcytidine-3'-phosphate
  modified_base 19: mod_base = OTHER; note = 2'-O-methyladenosine-3'-phosphate
  modified_base 20: mod_base = OTHER; note = 2'-O-methyluridine-3'-phosphate
  modified_base 21: mod_base = OTHER; note = 2'-O-methylcytidine-3'-phosphate
  modified_base 22: mod_base = OTHER; note = 2'-O-methyladenosine-3'-phosphate
  modified_base 23: mod_base = OTHER; note = 2'-O-methylguanosine
ttttgtataatggcaaacatcag

SEQ ID NO: 5618 - RNA, 23 nt, synthetic construct
  source 1..23: mol_type = other RNA
  modified_base 1: mod_base = OTHER; note = 2'-O-methyluridine-3'-phosphate 5'-(E)-Vinylphosphonate
  modified_base 2: mod_base = OTHER; note = 2'-deoxy-2'-fluoroadenosine-3'-phosphate
  modified_base 3: mod_base = OTHER; note = 2'-O-methylguanosine-3'-phosphate
  modified_base 4: mod_base = OTHER; note = 2'-O-methyluridine-3'-phosphate
  modified_base 5: mod_base = OTHER; note = 2'-O-methyluridine-3'-phosphate
  modified_base 6: mod_base = OTHER; note = 2'-deoxy-2'-fluoroguanosine-3'-phosphate
  modified_base 7: mod_base = OTHER; note = 2'-O-methyluridine-3'-phosphate
  modified_base 8: mod_base = OTHER; note = 2'-O-methyluridine-3'-phosphate
  modified_base 9: mod_base = OTHER; note = 2'-O-methyluridine-3'-phosphate
  modified_base 10: mod_base = OTHER; note = 2'-O-methyladenosine-3'-phosphate
  modified_base 11: mod_base = OTHER; note = 2'-O-methylcytidine-3'-phosphate
  modified_base 12: mod_base = OTHER; note = 2'-O-methyluridine-3'-phosphate
  modified_base 13: mod_base = OTHER; note = 2'-O-methylcytidine-3'-phosphate
  modified_base 14: mod_base = OTHER; note = 2'-deoxy-2'-fluoroadenosine-3'-phosphate
  modified_base 15: mod_base = OTHER; note = 2'-O-methyladenosine-3'-phosphate
  modified_base 16: mod_base = OTHER; note = 2'-deoxy-2'-fluoroadenosine-3'-phosphate
  modified_base 17: mod_base = OTHER; note = 2'-O-methylcytidine-3'-phosphate
  modified_base 18: mod_base = OTHER; note = 2'-O-methyluridine-3'-phosphate
  modified_base 19: mod_base = OTHER; note = 2'-O-methyluridine-3'-phosphate
  modified_base 20: mod_base = OTHER; note = 2'-O-methyluridine-3'-phosphate
  modified_base 21: mod_base = OTHER; note = 2'-O-methylguanosine-3'-phosphate
  modified_base 22: mod_base = OTHER; note = 2'-O-methyluridine-3'-phosphate
  modified_base 23: mod_base = OTHER; note = 2'-O-methyladenosine
tagttgtttactcaaactttgta

SEQ ID NO: 5619 - RNA, 23 nt, synthetic construct
  source 1..23: mol_type = other RNA
  modified_base 1: mod_base = OTHER; note = 2'-O-methyluridine-3'-phosphate 5'-(E)-Vinylphosphonate
  modified_base 2: mod_base = OTHER; note = 2'-deoxy-2'-fluoroadenosine-3'-phosphate
  modified_base 3: mod_base = OTHER; note = 2'-O-methyladenosine-3'-phosphate
  modified_base 4: mod_base = OTHER; note = 2'-O-methylguanosine-3'-phosphate
  modified_base 5: mod_base = OTHER; note = 2'-O-methyluridine-3'-phosphate
  modified_base 6: mod_base = OTHER; note = 2'-deoxy-2'-fluorouridine-3'-phosphate
  modified_base 7: mod_base = OTHER; note = 2'-O-methylguanosine-3'-phosphate
  modified_base 8: mod_base = OTHER; note = 2'-O-methyluridine-3'-phosphate
  modified_base 9: mod_base = OTHER; note = 2'-O-methyluridine-3'-phosphate
  modified_base 10: mod_base = OTHER; note = 2'-O-methyluridine-3'-phosphate
  modified_base 11: mod_base = OTHER; note = 2'-O-methyladenosine-3'-phosphate
  modified_base 12: mod_base = OTHER; note = 2'-O-methylcytidine-3'-phosphate
  modified_base 13: mod_base = OTHER; note = 2'-O-methyluridine-3'-phosphate
  modified_base 14: mod_base = OTHER; note = 2'-deoxy-2'-fluorocytidine-3'-phosphate
  modified_base 15: mod_base = OTHER; note = 2'-O-methyladenosine-3'-phosphate
  modified_base 16: mod_base = OTHER; note = 2'-deoxy-2'-fluoroadenosine-3'-phosphate
  modified_base 17: mod_base = OTHER; note = 2'-O-methyladenosine-3'-phosphate
  modified_base 18: mod_base = OTHER; note = 2'-O-methylcytidine-3'-phosphate
  modified_base 19: mod_base = OTHER; note = 2'-O-methyluridine-3'-phosphate
  modified_base 20: mod_base = OTHER; note = 2'-O-methyluridine-3'-phosphate
  modified_base 21: mod_base = OTHER; note = 2'-O-methyluridine-3'-phosphate
  modified_base 22: mod_base = OTHER; note = 2'-O-methylguanosine-3'-phosphate
  modified_base 23: mod_base = OTHER; note = 2'-O-methyluridine
taagttgtttactcaaactttgt

SEQ ID NO: 5620 - RNA, 23 nt, synthetic construct
  source 1..23: mol_type = other RNA
  modified_base 1: mod_base = OTHER; note = 2'-O-methyluridine-3'-phosphate 5'-(E)-Vinylphosphonate
  modified_base 2: mod_base = OTHER; note = 2'-deoxy-2'-fluorouridine-3'-phosphate
  modified_base 3: mod_base = OTHER; note = 2'-O-methyladenosine-3'-phosphate
  modified_base 4: mod_base = OTHER; note = 2'-O-methyladenosine-3'-phosphate
  modified_base 5: mod_base = OTHER; note = 2'-O-methylguanosine-3'-phosphate
  modified_base 6: mod_base = OTHER; note = 2'-deoxy-2'-fluorouridine-3'-phosphate
  modified_base 7: mod_base = OTHER; note = 2'-O-methyluridine-3'-phosphate
  modified_base 8: mod_base = OTHER; note = 2'-O-methylguanosine-3'-phosphate
  modified_base 9: mod_base = OTHER; note = 2'-O-methyluridine-3'-phosphate
  modified_base 10: mod_base = OTHER; note = 2'-O-methyluridine-3'-phosphate
  modified_base 11: mod_base = OTHER; note = 2'-O-methyluridine-3'-phosphate
  modified_base 12: mod_base = OTHER; note = 2'-O-methyladenosine-3'-phosphate
  modified_base 13: mod_base = OTHER; note = 2'-O-methylcytidine-3'-phosphate
  modified_base 14: mod_base = OTHER; note = 2'-deoxy-2'-fluorouridine-3'-phosphate
  modified_base 15: mod_base = OTHER; note = 2'-O-methylcytidine-3'-phosphate
  modified_base 16: mod_base = OTHER; note = 2'-deoxy-2'-fluoroadenosine-3'-phosphate
  modified_base 17: mod_base = OTHER; note = 2'-O-methyladenosine-3'-phosphate
  modified_base 18: mod_base = OTHER; note = 2'-O-methyladenosine-3'-phosphate
  modified_base 19: mod_base = OTHER; note = 2'-O-methylcytidine-3'-phosphate
  modified_base 20: mod_base = OTHER; note = 2'-O-methyluridine-3'-phosphate
  modified_base 21: mod_base = OTHER; note = 2'-O-methyluridine-3'-phosphate
  modified_base 22: mod_base = OTHER; note = 2'-O-methyluridine-3'-phosphate
  modified_base 23: mod_base = OTHER; note = 2'-O-methylguanosine
ttaagttgtttactcaaactttg

SEQ ID NO: 5621 - RNA, 23 nt, synthetic construct
  source 1..23: mol_type = other RNA
  modified_base 1: mod_base = OTHER; note = 2'-O-methyluridine-3'-phosphate 5'-(E)-Vinylphosphonate
  modified_base 2: mod_base = OTHER; note = 2'-deoxy-2'-fluoroguanosine-3'-phosphate
  modified_base 3: mod_base = OTHER; note = 2'-O-methylcytidine-3'-phosphate
  modified_base 4: mod_base = OTHER; note = 2'-O-methyladenosine-3'-phosphate
  modified_base 5: mod_base = OTHER; note = 2'-O-methyladenosine-3'-phosphate
  modified_base 6: mod_base = OTHER; note = 2'-deoxy-2'-fluorouridine-3'-phosphate
  modified_base 7: mod_base = OTHER; note = 2'-O-methyluridine-3'-phosphate
  modified_base 8: mod_base = OTHER; note = 2'-O-methyluridine-3'-phosphate
  modified_base 9: mod_base = OTHER; note = 2'-O-methyluridine-3'-phosphate
  modified_base 10: mod_base = OTHER; note = 2'-O-methyladenosine-3'-phosphate
  modified_base 11: mod_base = OTHER; note = 2'-O-methyladenosine-3'-phosphate
  modified_base 12: mod_base = OTHER; note = 2'-O-methylguanosine-3'-phosphate
  modified_base 13: mod_base = OTHER; note = 2'-O-methyluridine-3'-phosphate
  modified_base 14: mod_base = OTHER; note = 2'-deoxy-2'-fluorouridine-3'-phosphate
  modified_base 15: mod_base = OTHER; note = 2'-O-methylguanosine-3'-phosphate
  modified_base 16: mod_base = OTHER; note = 2'-deoxy-2'-fluorouridine-3'-phosphate
  modified_base 17: mod_base = OTHER; note = 2'-O-methyluridine-3'-phosphate
  modified_base 18: mod_base = OTHER; note = 2'-O-methyluridine-3'-phosphate
  modified_base 19: mod_base = OTHER; note = 2'-O-methyladenosine-3'-phosphate
  modified_base 20: mod_base = OTHER; note = 2'-O-methylcytidine-3'-phosphate
  modified_base 21: mod_base = OTHER; note = 2'-O-methyluridine-3'-phosphate
  modified_base 22: mod_base = OTHER; note = 2'-O-methylcytidine-3'-phosphate
  modified_base 23: mod_base = OTHER; note = 2'-O-methyladenosine
tgcaattttaagttgtttactca

SEQ ID NO: 5622 - RNA, 23 nt, synthetic construct
  source 1..23: mol_type = other RNA
  modified_base 1: mod_base = OTHER; note = 2'-O-methyluridine-3'-phosphate 5'-(E)-Vinylphosphonate
  modified_base 2: mod_base = OTHER; note = 2'-deoxy-2'-fluoroadenosine-3'-phosphate
  modified_base 3: mod_base = OTHER; note = 2'-O-methylguanosine-3'-phosphate
  modified_base 4: mod_base = OTHER; note = 2'-O-methylcytidine-3'-phosphate
  modified_base 5: mod_base = OTHER; note = 2'-O-methyladenosine-3'-phosphate
  modified_base 6: mod_base = OTHER; note = 2'-deoxy-2'-fluoroadenosine-3'-phosphate
  modified_base 7: mod_base = OTHER; note = 2'-O-methyluridine-3'-phosphate
  modified_base 8: mod_base = OTHER; note = 2'-O-methyluridine-3'-phosphate
  modified_base 9: mod_base = OTHER; note = 2'-O-methyluridine-3'-phosphate
  modified_base 10: mod_base = OTHER; note = 2'-O-methyluridine-3'-phosphate
  modified_base 11: mod_base = OTHER; note = 2'-O-methyladenosine-3'-phosphate
  modified_base 12: mod_base = OTHER; note = 2'-O-methyladenosine-3'-phosphate
  modified_base 13: mod_base = OTHER; note = 2'-O-methylguanosine-3'-phosphate
  modified_base 14: mod_base = OTHER; note = 2'-deoxy-2'-fluorouridine-3'-phosphate
  modified_base 15: mod_base = OTHER; note = 2'-O-methyluridine-3'-phosphate
  modified_base 16: mod_base = OTHER; note = 2'-deoxy-2'-fluoroguanosine-3'-phosphate
  modified_base 17: mod_base = OTHER; note = 2'-O-methyluridine-3'-phosphate
  modified_base 18: mod_base = OTHER; note = 2'-O-methyluridine-3'-phosphate
  modified_base 19: mod_base = OTHER; note = 2'-O-methyluridine-3'-phosphate
  modified_base 20: mod_base = OTHER; note = 2'-O-methyladenosine-3'-phosphate
  modified_base 21: mod_base = OTHER; note = 2'-O-methylcytidine-3'-phosphate
  modified_base 22: mod_base = OTHER; note = 2'-O-methyluridine-3'-phosphate
  modified_base 23: mod_base = OTHER; note = 2'-O-methylcytidine
tagcaattttaagttgtttactc

SEQ ID NO: 5623 - RNA, 23 nt, synthetic construct
  source 1..23: mol_type = other RNA
  modified_base 1: mod_base = OTHER; note = 2'-O-methyluridine-3'-phosphate 5'-(E)-Vinylphosphonate
  modified_base 2: mod_base = OTHER; note = 2'-deoxy-2'-fluorocytidine-3'-phosphate
  modified_base 3: mod_base = OTHER; note = 2'-O-methyladenosine-3'-phosphate
  modified_base 4: mod_base = OTHER; note = 2'-O-methyladenosine-3'-phosphate
  modified_base 5: mod_base = OTHER; note = 2'-O-methylguanosine-3'-phosphate
  modified_base 6: mod_base = OTHER; note = 2'-deoxy-2'-fluorocytidine-3'-phosphate
  modified_base 7: mod_base = OTHER; note = 2'-O-methyladenosine-3'-phosphate
  modified_base 8: mod_base = OTHER; note = 2'-O-methyladenosine-3'-phosphate
  modified_base 9: mod_base = OTHER; note = 2'-O-methyluridine-3'-phosphate
  modified_base 10: mod_base = OTHER; note = 2'-O-methyluridine-3'-phosphate
  modified_base 11: mod_base = OTHER; note = 2'-O-methyluridine-3'-phosphate
  modified_base 12: mod_base = OTHER; note = 2'-O-methyluridine-3'-phosphate
  modified_base 13: mod_base = OTHER; note = 2'-O-methyladenosine-3'-phosphate
  modified_base 14: mod_base = OTHER; note = 2'-deoxy-2'-fluoroadenosine-3'-phosphate
  modified_base 15: mod_base = OTHER; note = 2'-O-methylguanosine-3'-phosphate
  modified_base 16: mod_base = OTHER; note = 2'-deoxy-2'-fluorouridine-3'-phosphate
  modified_base 17: mod_base = OTHER; note = 2'-O-methyluridine-3'-phosphate
  modified_base 18: mod_base = OTHER; note = 2'-O-methylguanosine-3'-phosphate
  modified_base 19: mod_base = OTHER; note = 2'-O-methyluridine-3'-phosphate
  modified_base 20: mod_base = OTHER; note = 2'-O-methyluridine-3'-phosphate
  modified_base 21: mod_base = OTHER; note = 2'-O-methyluridine-3'-phosphate
  modified_base 22: mod_base = OTHER; note = 2'-O-methyladenosine-3'-phosphate
  modified_base 23: mod_base = OTHER; note = 2'-O-methylcytidine
tcaagcaattttaagttgtttac

SEQ ID NO: 5624 - RNA, 23 nt, synthetic construct
  source 1..23: mol_type = other RNA
  modified_base 1: mod_base = OTHER; note = 2'-O-methyluridine-3'-phosphate 5'-(E)-Vinylphosphonate
  modified_base 2: mod_base = OTHER; note = 2'-deoxy-2'-fluorouridine-3'-phosphate
  modified_base 3: mod_base = OTHER; note = 2'-O-methyluridine-3'-phosphate
  modified_base 4: mod_base = OTHER; note = 2'-O-methyladenosine-3'-phosphate
  modified_base 5: mod_base = OTHER; note = 2'-O-methyluridine-3'-phosphate
  modified_base 6: mod_base = OTHER; note = 2'-deoxy-2'-fluorouridine-3'-phosphate
  modified_base 7: mod_base = OTHER; note = 2'-O-methyluridine-3'-phosphate
  modified_base 8: mod_base = OTHER; note = 2'-O-methylcytidine-3'-phosphate
  modified_base 9: mod_base = OTHER; note = 2'-O-methyladenosine-3'-phosphate
  modified_base 10: mod_base = OTHER; note = 2'-O-methyladenosine-3'-phosphate
  modified_base 11: mod_base = OTHER; note = 2'-O-methyluridine-3'-phosphate
  modified_base 12: mod_base = OTHER; note = 2'-O-methylcytidine-3'-phosphate
  modified_base 13: mod_base = OTHER; note = 2'-O-methyladenosine-3'-phosphate
  modified_base 14: mod_base = OTHER; note = 2'-deoxy-2'-fluoroadenosine-3'-phosphate
  modified_base 15: mod_base = OTHER; note = 2'-O-methyladenosine-3'-phosphate
  modified_base 16: mod_base = OTHER; note = 2'-deoxy-2'-fluoroguanosine-3'-phosphate
  modified_base 17: mod_base = OTHER; note = 2'-O-methyladenosine-3'-phosphate
  modified_base 18: mod_base = OTHER; note = 2'-O-methylcytidine-3'-phosphate
  modified_base 19: mod_base = OTHER; note = 2'-O-methyluridine-3'-phosphate
  modified_base 20: mod_base = OTHER; note = 2'-O-methyladenosine-3'-phosphate
  modified_base 21: mod_base = OTHER; note = 2'-O-methyluridine-3'-phosphate
  modified_base 22: mod_base = OTHER; note = 2'-O-methylguanosine-3'-phosphate
  modified_base 23: mod_base = OTHER; note = 2'-O-methylcytidine
tttatttcaatcaaagactatgc

SEQ ID NO: 5625 - RNA, 23 nt, synthetic construct
  source 1..23: mol_type = other RNA
  modified_base 1: mod_base = OTHER; note = 2'-O-methyluridine-3'-phosphate 5'-(E)-Vinylphosphonate
  modified_base 2: mod_base = OTHER; note = 2'-deoxy-2'-fluoroadenosine-3'-phosphate
  modified_base 3: mod_base = OTHER; note = 2'-O-methyluridine-3'-phosphate
  modified_base 4: mod_base = OTHER; note = 2'-O-methyluridine-3'-phosphate
  modified_base 5: mod_base = OTHER; note = 2'-O-methyluridine-3'-phosphate
  modified_base 6: mod_base = OTHER; note = 2'-deoxy-2'-fluoroadenosine-3'-phosphate
  modified_base 7: mod_base = OTHER; note = 2'-O-methylguanosine-3'-phosphate
  modified_base 8: mod_base = OTHER; note = 2'-O-methylcytidine-3'-phosphate
  modified_base 9: mod_base = OTHER; note = 2'-O-methylcytidine-3'-phosphate
  modified_base 10: mod_base = OTHER; note = 2'-O-methyladenosine-3'-phosphate
  modified_base 11: mod_base = OTHER; note = 2'-O-methyladenosine-3'-phosphate
  modified_base 12: mod_base = OTHER; note = 2'-O-methyladenosine-3'-phosphate
  modified_base 13: mod_base = OTHER; note = 2'-O-methyluridine-3'-phosphate
  modified_base 14: mod_base = OTHER; note = 2'-deoxy-2'-fluoroadenosine-3'-phosphate
  modified_base 15: mod_base = OTHER; note = 2'-O-methylcytidine-3'-phosphate
  modified_base 16: mod_base = OTHER; note = 2'-deoxy-2'-fluoroadenosine-3'-phosphate
  modified_base 17: mod_base = OTHER; note = 2'-O-methyluridine-3'-phosphate
  modified_base 18: mod_base = OTHER; note = 2'-O-methyluridine-3'-phosphate
  modified_base 19: mod_base = OTHER; note = 2'-O-methylcytidine-3'-phosphate
  modified_base 20: mod_base = OTHER; note = 2'-O-methyluridine-3'-phosphate
  modified_base 21: mod_base = OTHER; note = 2'-O-methylcytidine-3'-phosphate
  modified_base 22: mod_base = OTHER; note = 2'-O-methyladenosine-3'-phosphate
  modified_base 23: mod_base = OTHER; note = 2'-O-methyluridine
tatttagccaaatacattctcat

SEQ ID NO: 5626 - RNA, 23 nt, synthetic construct
  source 1..23: mol_type = other RNA
  modified_base 1: mod_base = OTHER; note = 2'-O-methyluridine-3'-phosphate 5'-(E)-Vinylphosphonate
  modified_base 2: mod_base = OTHER; note = 2'-deoxy-2'-fluorouridine-3'-phosphate
  modified_base 3: mod_base = OTHER; note = 2'-O-methyluridine-3'-phosphate
  modified_base 4: mod_base = OTHER; note = 2'-O-methylguanosine-3'-phosphate
  modified_base 5: mod_base = OTHER; note = 2'-O-methyladenosine-3'-phosphate
  modified_base 6: mod_base = OTHER; note = 2'-deoxy-2'-fluoroadenosine-3'-phosphate
  modified_base 7: mod_base = OTHER; note = 2'-O-methylguanosine-3'-phosphate
  modified_base 8: mod_base = OTHER; note = 2'-O-methyladenosine-3'-phosphate
  modified_base 9: mod_base = OTHER; note = 2'-O-methylcytidine-3'-phosphate
  modified_base 10: mod_base = OTHER; note = 2'-O-methyladenosine-3'-phosphate
  modified_base 11: mod_base = OTHER; note = 2'-O-methyluridine-3'-phosphate
  modified_base 12: mod_base = OTHER; note = 2'-O-methylcytidine-3'-phosphate
  modified_base 13: mod_base = OTHER; note = 2'-O-methyladenosine-3'-phosphate
  modified_base 14: mod_base = OTHER; note = 2'-deoxy-2'-fluoroadenosine-3'-phosphate
  modified_base 15: mod_base = OTHER; note = 2'-O-methylcytidine-3'-phosphate
  modified_base 16: mod_base = OTHER; note = 2'-deoxy-2'-fluorouridine-3'-phosphate
  modified_base 17: mod_base = OTHER; note = 2'-O-methylguanosine-3'-phosphate
  modified_base 18: mod_base = OTHER; note = 2'-O-methylcytidine-3'-phosphate
  modified_base 19: mod_base = OTHER; note = 2'-O-methylcytidine-3'-phosphate
  modified_base 20: mod_base = OTHER; note = 2'-O-methyladenosine-3'-phosphate
  modified_base 21: mod_base = OTHER; note = 2'-O-methylguanosine-3'-phosphate
  modified_base 22: mod_base = OTHER; note = 2'-O-methylcytidine-3'-phosphate
  modified_base 23: mod_base = OTHER; note = 2'-O-methyluridine
tttgaagacatcaactgccagct

SEQ ID NO: 5627 - RNA, 23 nt, synthetic construct
  source 1..23: mol_type = other RNA
  modified_base 1: mod_base = OTHER; note = 2'-O-methyluridine-3'-phosphate 5'-(E)-Vinylphosphonate
  modified_base 2: mod_base = OTHER; note = 2'-deoxy-2'-fluorouridine-3'-phosphate
  modified_base 3: mod_base = OTHER; note = 2'-O-methyladenosine-3'-phosphate
  modified_base 4: mod_base = OTHER; note = 2'-O-methyluridine-3'-phosphate
  modified_base 5: mod_base = OTHER; note = 2'-O-methyluridine-3'-phosphate
  modified_base 6: mod_base = OTHER; note = 2'-deoxy-2'-fluoroguanosine-3'-phosphate
  modified_base 7: mod_base = OTHER; note = 2'-O-methyladenosine-3'-phosphate
  modified_base 8: mod_base = OTHER; note = 2'-O-methyladenosine-3'-phosphate
  modified_base 9: mod_base = OTHER; note = 2'-O-methylguanosine-3'-phosphate
  modified_base 10: mod_base = OTHER; note = 2'-O-methyladenosine-3'-phosphate
  modified_base 11: mod_base = OTHER; note = 2'-O-methylcytidine-3'-phosphate
  modified_base 12: mod_base = OTHER; note = 2'-O-methyladenosine-3'-phosphate
  modified_base 13: mod_base = OTHER; note = 2'-O-methyluridine-3'-phosphate
  modified_base 14: mod_base = OTHER; note = 2'-deoxy-2'-fluorocytidine-3'-phosphate
  modified_base 15: mod_base = OTHER; note = 2'-O-methyladenosine-3'-phosphate
  modified_base 16: mod_base = OTHER; note = 2'-deoxy-2'-fluoroadenosine-3'-phosphate
  modified_base 17: mod_base = OTHER; note = 2'-O-methylcytidine-3'-phosphate
  modified_base 18: mod_base = OTHER; note = 2'-O-methyluridine-3'-phosphate
  modified_base 19: mod_base = OTHER; note = 2'-O-methylguanosine-3'-phosphate
  modified_base 20: mod_base = OTHER; note = 2'-O-methylcytidine-3'-phosphate
  modified_base 21: mod_base = OTHER; note = 2'-O-methylcytidine-3'-phosphate
  modified_base 22: mod_base = OTHER; note = 2'-O-methyladenosine-3'-phosphate
  modified_base 23: mod_base = OTHER; note = 2'-O-methylguanosine
ttattgaagacatcaactgccag

SEQ ID NO: 5628 - RNA, 23 nt, synthetic construct
  source 1..23: mol_type = other RNA
  modified_base 1: mod_base = OTHER; note = 2'-O-methyluridine-3'-phosphate 5'-(E)-Vinylphosphonate
  modified_base 2: mod_base = OTHER; note = 2'-deoxy-2'-fluorouridine-3'-phosphate
  modified_base 3: mod_base = OTHER; note = 2'-O-methyluridine-3'-phosphate
  modified_base 4: mod_base = OTHER; note = 2'-O-methyladenosine-3'-phosphate
  modified_base 5: mod_base = OTHER; note = 2'-O-methyluridine-3'-phosphate
  modified_base 6: mod_base = OTHER; note = 2'-deoxy-2'-fluorouridine-3'-phosphate
  modified_base 7: mod_base = OTHER; note = 2'-O-methylguanosine-3'-phosphate
  modified_base 8: mod_base = OTHER; note = 2'-O-methyladenosine-3'-phosphate
  modified_base 9: mod_base = OTHER; note = 2'-O-methyladenosine-3'-phosphate
  modified_base 10: mod_base = OTHER; note = 2'-O-methylguanosine-3'-phosphate
  modified_base 11: mod_base = OTHER; note = 2'-O-methyladenosine-3'-phosphate
  modified_base 12: mod_base = OTHER; note = 2'-O-methylcytidine-3'-phosphate
  modified_base 13: mod_base = OTHER; note = 2'-O-methyladenosine-3'-phosphate
  modified_base 14: mod_base = OTHER; note = 2'-deoxy-2'-fluorouridine-3'-phosphate
  modified_base 15: mod_base = OTHER; note = 2'-O-methylcytidine-3'-phosphate
  modified_base 16: mod_base = OTHER; note = 2'-deoxy-2'-fluoroadenosine-3'-phosphate
  modified_base 17: mod_base = OTHER; note = 2'-O-methyladenosine-3'-phosphate
  modified_base 18: mod_base = OTHER; note = 2'-O-methylcytidine-3'-phosphate
  modified_base 19: mod_base = OTHER; note = 2'-O-methyluridine-3'-phosphate
  modified_base 20: mod_base = OTHER; note = 2'-O-methylguanosine-3'-phosphate
  modified_base 21: mod_base = OTHER; note = 2'-O-methylcytidine-3'-phosphate
  modified_base 22: mod_base = OTHER; note = 2'-O-methylcytidine-3'-phosphate
  modified_base 23: mod_base = OTHER; note = 2'-O-methyladenosine
tttattgaagacatcaactgcca

SEQ ID NO: 5629 - RNA, 23 nt, synthetic construct
  source 1..23: mol_type = other RNA
  modified_base 1: mod_base = OTHER; note = 2'-O-methyluridine-3'-phosphate 5'-(E)-Vinylphosphonate
  modified_base 2: mod_base = OTHER; note = 2'-deoxy-2'-fluoroadenosine-3'-phosphate
  modified_base 3: mod_base = OTHER; note = 2'-O-methyluridine-3'-phosphate
  modified_base 4: mod_base = OTHER; note = 2'-O-methyluridine-3'-phosphate
  modified_base 5: mod_base = OTHER; note = 2'-O-methyladenosine-3'-phosphate
  modified_base 6: mod_base = OTHER; note = 2'-deoxy-2'-fluorouridine-3'-phosphate
  modified_base 7: mod_base = OTHER; note = 2'-O-methyluridine-3'-phosphate
  modified_base 8: mod_base = OTHER; note = 2'-O-methylguanosine-3'-phosphate
  modified_base 9: mod_base = OTHER; note = 2'-O-methyladenosine-3'-phosphate
  modified_base 10: mod_base = OTHER; note = 2'-O-methyladenosine-3'-phosphate
  modified_base 11: mod_base = OTHER; note = 2'-O-methylguanosine-3'-phosphate
  modified_base 12: mod_base = OTHER; note = 2'-O-methyladenosine-3'-phosphate
  modified_base 13: mod_base = OTHER; note = 2'-O-methylcytidine-3'-phosphate
  modified_base 14: mod_base = OTHER; note = 2'-deoxy-2'-fluoroadenosine-3'-phosphate
  modified_base 15: mod_base = OTHER; note = 2'-O-methyluridine-3'-phosphate
  modified_base 16: mod_base = OTHER; note = 2'-deoxy-2'-fluorocytidine-3'-phosphate
  modified_base 17: mod_base = OTHER; note = 2'-O-methyladenosine-3'-phosphate
  modified_base 18: mod_base = OTHER; note = 2'-O-methyladenosine-3'-phosphate
  modified_base 19: mod_base = OTHER; note = 2'-O-methylcytidine-3'-phosphate
  modified_base 20: mod_base = OTHER; note = 2'-O-methyluridine-3'-phosphate
  modified_base 21: mod_base = OTHER; note = 2'-O-methylguanosine-3'-phosphate
  modified_base 22: mod_base = OTHER; note = 2'-O-methylcytidine-3'-phosphate
  modified_base 23: mod_base = OTHER; note = 2'-O-methylcytidine
tattattgaagacatcaactgcc

SEQ ID NO: 5630 - RNA, 23 nt, synthetic construct
  source 1..23: mol_type = other RNA
  modified_base 1: mod_base = OTHER; note = 2'-O-methyluridine-3'-phosphate 5'-(E)-Vinylphosphonate
  modified_base 2: mod_base = OTHER; note = 2'-deoxy-2'-fluoroguanosine-3'-phosphate
  modified_base 3: mod_base = OTHER; note = 2'-O-methyladenosine-3'-phosphate
  modified_base 4: mod_base = OTHER; note = 2'-O-methyluridine-3'-phosphate
  modified_base 5: mod_base = OTHER; note = 2'-O-methyluridine-3'-phosphate
  modified_base 6: mod_base = OTHER; note = 2'-deoxy-2'-fluoroadenosine-3'-phosphate
  modified_base 7: mod_base = OTHER; note = 2'-O-methyluridine-3'-phosphate
  modified_base 8: mod_base = OTHER; note = 2'-O-methyluridine-3'-phosphate
  modified_base 9: mod_base = OTHER; note = 2'-O-methylguanosine-3'-phosphate
  modified_base 10: mod_base = OTHER; note = 2'-O-methyladenosine-3'-phosphate
  modified_base 11: mod_base = OTHER; note = 2'-O-methyladenosine-3'-phosphate
  modified_base 12: mod_base = OTHER; note = 2'-O-methylguanosine-3'-phosphate
  modified_base 13: mod_base = OTHER; note = 2'-O-methyladenosine-3'-phosphate
  modified_base 14: mod_base = OTHER; note = 2'-deoxy-2'-fluorocytidine-3'-phosphate
  modified_base 15: mod_base = OTHER; note = 2'-O-methyladenosine-3'-phosphate
  modified_base 16: mod_base = OTHER; note = 2'-deoxy-2'-fluorouridine-3'-phosphate
  modified_base 17: mod_base = OTHER; note = 2'-O-methylcytidine-3'-phosphate
  modified_base 18: mod_base = OTHER; note = 2'-O-methyladenosine-3'-phosphate
  modified_base 19: mod_base = OTHER; note = 2'-O-methyladenosine-3'-phosphate
  modified_base 20: mod_base = OTHER; note = 2'-O-methylcytidine-3'-phosphate
  modified_base 21: mod_base = OTHER; note = 2'-O-methyluridine-3'-phosphate
  modified_base 22: mod_base = OTHER; note = 2'-O-methylguanosine-3'-phosphate
  modified_base 23: mod_base = OTHER; note = 2'-O-methylcytidine
tgattattgaagacatcaactgc

SEQ ID NO: 5631 - RNA, 23 nt, synthetic construct
  source 1..23: mol_type = other RNA
  modified_base 1: mod_base = OTHER; note = 2'-O-methyluridine-3'-phosphate 5'-(E)-Vinylphosphonate
  modified_base 2: mod_base = OTHER; note = 2'-deoxy-2'-fluorouridine-3'-phosphate
  modified_base 3: mod_base = OTHER; note = 2'-O-methylguanosine-3'-phosphate
  modified_base 4: mod_base = OTHER; note = 2'-O-methyladenosine-3'-phosphate
  modified_base 5: mod_base = OTHER; note = 2'-O-methyluridine-3'-phosphate
  modified_base 6: mod_base = OTHER; note = 2'-deoxy-2'-fluorouridine-3'-phosphate
  modified_base 7: mod_base = OTHER; note = 2'-O-methyladenosine-3'-phosphate
  modified_base 8: mod_base = OTHER; note = 2'-O-methyluridine-3'-phosphate
  modified_base 9: mod_base = OTHER; note = 2'-O-methyluridine-3'-phosphate
  modified_base 10: mod_base = OTHER; note = 2'-O-methylguanosine-3'-phosphate
  modified_base 11: mod_base = OTHER; note = 2'-O-methyladenosine-3'-phosphate
  modified_base 12: mod_base = OTHER; note = 2'-O-methyladenosine-3'-phosphate
  modified_base 13: mod_base = OTHER; note = 2'-O-methylguanosine-3'-phosphate
  modified_base 14: mod_base = OTHER; note = 2'-deoxy-2'-fluoroadenosine-3'-phosphate
  modified_base 15: mod_base = OTHER; note = 2'-O-methylcytidine-3'-phosphate
  modified_base 16: mod_base = OTHER; note = 2'-deoxy-2'-fluoroadenosine-3'-phosphate
  modified_base 17: mod_base = OTHER; note = 2'-O-methyluridine-3'-phosphate
  modified_base 18: mod_base = OTHER; note = 2'-O-methylcytidine-3'-phosphate
  modified_base 19: mod_base = OTHER; note = 2'-O-methyladenosine-3'-phosphate
  modified_base 20: mod_base = OTHER; note = 2'-O-methyladenosine-3'-phosphate
  modified_base 21: mod_base = OTHER; note = 2'-O-methylcytidine-3'-phosphate
  modified_base 22: mod_base = OTHER; note = 2'-O-methyluridine-3'-phosphate
  modified_base 23: mod_base = OTHER; note = 2'-O-methylguanosine
ttgattattgaagacatcaactg

SEQ ID NO: 5632 - RNA, 23 nt, synthetic construct
  source 1..23: mol_type = other RNA
  modified_base 1: mod_base = OTHER; note = 2'-O-methyluridine-3'-phosphate 5'-(E)-Vinylphosphonate
  modified_base 2: mod_base = OTHER; note = 2'-deoxy-2'-fluoroadenosine-3'-phosphate
  modified_base 3: mod_base = OTHER; note = 2'-O-methyluridine-3'-phosphate
  modified_base 4: mod_base = OTHER; note = 2'-O-methylguanosine-3'-phosphate
  modified_base 5: mod_base = OTHER; note = 2'-O-methyladenosine-3'-phosphate
  modified_base 6: mod_base = OTHER; note = 2'-deoxy-2'-fluorouridine-3'-phosphate
  modified_base 7: mod_base = OTHER; note = 2'-O-methyluridine-3'-phosphate
  modified_base 8: mod_base = OTHER; note = 2'-O-methyladenosine-3'-phosphate
  modified_base 9: mod_base = OTHER; note = 2'-O-methyluridine-3'-phosphate
  modified_base 10: mod_base = OTHER; note = 2'-O-methyluridine-3'-phosphate
  modified_base 11: mod_base = OTHER; note = 2'-O-methylguanosine-3'-phosphate
  modified_base 12: mod_base = OTHER; note = 2'-O-methyladenosine-3'-phosphate
  modified_base 13: mod_base = OTHER; note = 2'-O-methyladenosine-3'-phosphate
  modified_base 14: mod_base = OTHER; note = 2'-deoxy-2'-fluoroguanosine-3'-phosphate
  modified_base 15: mod_base = OTHER; note = 2'-O-methyladenosine-3'-phosphate
  modified_base 16: mod_base = OTHER; note = 2'-deoxy-2'-fluorocytidine-3'-phosphate
  modified_base 17: mod_base = OTHER; note = 2'-O-methyladenosine-3'-phosphate
  modified_base 18: mod_base = OTHER; note = 2'-O-methyluridine-3'-phosphate
  modified_base 19: mod_base = OTHER; note = 2'-O-methylcytidine-3'-phosphate
  modified_base 20: mod_base = OTHER; note = 2'-O-methyladenosine-3'-phosphate
  modified_base 21: mod_base = OTHER; note = 2'-O-methyladenosine-3'-phosphate
  modified_base 22: mod_base = OTHER; note = 2'-O-methylcytidine-3'-phosphate
  modified_base 23: mod_base = OTHER; note = 2'-O-methyluridine
tatgattattgaagacatcaact

SEQ ID NO: 5633 - RNA, 23 nt, synthetic construct
  source 1..23: mol_type = other RNA
  modified_base 1: mod_base = OTHER; note = 2'-O-methyluridine-3'-phosphate 5'-(E)-Vinylphosphonate
  modified_base 2: mod_base = OTHER; note = 2'-deoxy-2'-fluoroadenosine-3'-phosphate
  modified_base 3: mod_base = OTHER; note = 2'-O-methyladenosine-3'-phosphate
  modified_base 4: mod_base = OTHER; note = 2'-O-methyluridine-3'-phosphate
  modified_base 5: mod_base = OTHER; note = 2'-O-methylguanosine-3'-phosphate
  modified_base 6: mod_base = OTHER; note = 2'-deoxy-2'-fluoroadenosine-3'-phosphate
  modified_base 7: mod_base = OTHER; note = 2'-O-methyluridine-3'-phosphate
  modified_base 8: mod_base = OTHER; note = 2'-O-methyluridine-3'-phosphate
  modified_base 9: mod_base = OTHER; note = 2'-O-methyladenosine-3'-phosphate
  modified_base 10: mod_base = OTHER; note = 2'-O-methyluridine-3'-phosphate
  modified_base 11: mod_base = OTHER; note = 2'-O-methyluridine-3'-phosphate
  modified_base 12: mod_base = OTHER; note = 2'-O-methylguanosine-3'-phosphate
  modified_base 13: mod_base = OTHER; note = 2'-O-methyladenosine-3'-phosphate
  modified_base 14: mod_base = OTHER; note = 2'-deoxy-2'-fluoroadenosine-3'-phosphate
  modified_base 15: mod_base = OTHER; note = 2'-O-methylguanosine-3'-phosphate
  modified_base 16: mod_base = OTHER; note = 2'-deoxy-2'-fluoroadenosine-3'-phosphate
  modified_base 17: mod_base = OTHER; note = 2'-O-methylcytidine-3'-phosphate
  modified_base 18: mod_base = OTHER; note = 2'-O-methyladenosine-3'-phosphate
  modified_base 19: mod_base = OTHER; note = 2'-O-methyluridine-3'-phosphate
  modified_base 20: mod_base = OTHER; note = 2'-O-methylcytidine-3'-phosphate
  modified_base 21: mod_base = OTHER; note = 2'-O-methyladenosine-3'-phosphate
  modified_base 22: mod_base = OTHER; note = 2'-O-methyladenosine-3'-phosphate
  modified_base 23: mod_base = OTHER; note = 2'-O-methylcytidine
taatgattattgaagacatcaac

SEQ ID NO: 5634 - RNA, 23 nt, synthetic construct
  source 1..23: mol_type = other RNA
  modified_base 1: mod_base = OTHER; note = 2'-O-methyluridine-3'-phosphate 5'-(E)-Vinylphosphonate
  modified_base 2: mod_base = OTHER; note = 2'-deoxy-2'-fluoroguanosine-3'-phosphate
  modified_base 3: mod_base = OTHER; note = 2'-O-methyladenosine-3'-phosphate
  modified_base 4: mod_base = OTHER; note = 2'-O-methyladenosine-3'-phosphate
  modified_base 5: mod_base = OTHER; note = 2'-O-methyluridine-3'-phosphate
  modified_base 6: mod_base = OTHER; note = 2'-deoxy-2'-fluoroguanosine-3'-phosphate
  modified_base 7: mod_base = OTHER; note = 2'-O-methyladenosine-3'-phosphate
  modified_base 8: mod_base = OTHER; note = 2'-O-methyluridine-3'-phosphate
  modified_base 9: mod_base = OTHER; note = 2'-O-methyluridine-3'-phosphate
  modified_base 10: mod_base = OTHER; note = 2'-O-methyladenosine-3'-phosphate
  modified_base 11: mod_base = OTHER; note = 2'-O-methyluridine-3'-phosphate
  modified_base 12: mod_base = OTHER; note = 2'-O-methyluridine-3'-phosphate
  modified_base 13: mod_base = OTHER; note = 2'-O-methylguanosine-3'-phosphate
  modified_base 14: mod_base = OTHER; note = 2'-deoxy-2'-fluoroadenosine-3'-phosphate
  modified_base 15: mod_base = OTHER; note = 2'-O-methyladenosine-3'-phosphate
  modified_base 16: mod_base = OTHER; note = 2'-deoxy-2'-fluoroguanosine-3'-phosphate
  modified_base 17: mod_base = OTHER; note = 2'-O-methyladenosine-3'-phosphate
  modified_base 18: mod_base = OTHER; note = 2'-O-methylcytidine-3'-phosphate
  modified_base 19: mod_base = OTHER; note = 2'-O-methyladenosine-3'-phosphate
  modified_base 20: mod_base = OTHER; note = 2'-O-methyluridine-3'-phosphate
  modified_base 21: mod_base = OTHER; note = 2'-O-methylcytidine-3'-phosphate
  modified_base 22: mod_base = OTHER; note = 2'-O-methyladenosine-3'-phosphate
  modified_base 23: mod_base = OTHER; note = 2'-O-methyladenosine
tgaatgattattgaagacatcaa

SEQ ID NO: 5635 - RNA, 23 nt, synthetic construct
  source 1..23: mol_type = other RNA
  modified_base 1: mod_base = OTHER; note = 2'-O-methyluridine-3'-phosphate 5'-(E)-Vinylphosphonate
  modified_base 2: mod_base = OTHER; note = 2'-deoxy-2'-fluoroguanosine-3'-phosphate
  modified_base 3: mod_base = OTHER; note = 2'-O-methylguanosine-3'-phosphate
  modified_base 4: mod_base = OTHER; note = 2'-O-methyladenosine-3'-phosphate
  modified_base 5: mod_base = OTHER; note = 2'-O-methyladenosine-3'-phosphate
  modified_base 6: mod_base = OTHER; note = 2'-deoxy-2'-fluorouridine-3'-phosphate
  modified_base 7: mod_base = OTHER; note = 2'-O-methylguanosine-3'-phosphate
  modified_base 8: mod_base = OTHER; note = 2'-O-methyladenosine-3'-phosphate
  modified_base 9: mod_base = OTHER; note = 2'-O-methyluridine-3'-phosphate
  modified_base 10: mod_base = OTHER; note = 2'-O-methyluridine-3'-phosphate
  modified_base 11: mod_base = OTHER; note = 2'-O-methyladenosine-3'-phosphate
  modified_base 12: mod_base = OTHER; note = 2'-O-methyluridine-3'-phosphate
  modified_base 13: mod_base = OTHER; note = 2'-O-methyluridine-3'-phosphate
  modified_base 14: mod_base = OTHER; note = 2'-deoxy-2'-fluoroguanosine-3'-phosphate
  modified_base 15: mod_base = OTHER; note = 2'-O-methyladenosine-3'-phosphate
  modified_base 16: mod_base = OTHER; note = 2'-deoxy-2'-fluoroadenosine-3'-phosphate
  modified_base 17: mod_base = OTHER; note = 2'-O-methylguanosine-3'-phosphate
  modified_base 18: mod_base = OTHER; note = 2'-O-methyladenosine-3'-phosphate
  modified_base 19: mod_base = OTHER; note = 2'-O-methylcytidine-3'-phosphate
  modified_base 20: mod_base = OTHER; note = 2'-O-methyladenosine-3'-phosphate
  modified_base 21: mod_base = OTHER; note = 2'-O-methyluridine-3'-phosphate
  modified_base 22: mod_base = OTHER; note = 2'-O-methylcytidine-3'-phosphate
  modified_base 23: mod_base = OTHER; note = 2'-O-methyladenosine
tggaatgattattgaagacatca

SEQ ID NO: 5636 - RNA, 23 nt, synthetic construct
  source 1..23: mol_type = other RNA
  modified_base 1: mod_base = OTHER; note = 2'-O-methyluridine-3'-phosphate 5'-(E)-Vinylphosphonate
  modified_base 2: mod_base = OTHER; note = 2'-deoxy-2'-fluoroadenosine-3'-phosphate
  modified_base 3: mod_base = OTHER; note = 2'-O-methylguanosine-3'-phosphate
  modified_base 4: mod_base = OTHER; note = 2'-O-methylguanosine-3'-phosphate
  modified_base 5: mod_base = OTHER; note = 2'-O-methyladenosine-3'-phosphate
  modified_base 6: mod_base = OTHER; note = 2'-deoxy-2'-fluoroadenosine-3'-phosphate
  modified_base 7: mod_base = OTHER; note = 2'-O-methyluridine-3'-phosphate
  modified_base 8: mod_base = OTHER; note = 2'-O-methylguanosine-3'-phosphate
  modified_base 9: mod_base = OTHER; note = 2'-O-methyladenosine-3'-phosphate
  modified_base 10: mod_base = OTHER; note = 2'-O-methyluridine-3'-phosphate
  modified_base 11: mod_base = OTHER; note = 2'-O-methyluridine-3'-phosphate
  modified_base 12: mod_base = OTHER; note = 2'-O-methyladenosine-3'-phosphate
  modified_base 13: mod_base = OTHER; note = 2'-O-methyluridine-3'-phosphate
  modified_base 14: mod_base = OTHER; note = 2'-deoxy-2'-fluorouridine-3'-phosphate
  modified_base 15: mod_base = OTHER; note = 2'-O-methylguanosine-3'-phosphate
  modified_base 16: mod_base = OTHER; note = 2'-deoxy-2'-fluoroadenosine-3'-phosphate
  modified_base 17: mod_base = OTHER; note = 2'-O-methyladenosine-3'-phosphate
  modified_base 18: mod_base = OTHER; note = 2'-O-methylguanosine-3'-phosphate
  modified_base 19: mod_base = OTHER; note = 2'-O-methyladenosine-3'-phosphate
  modified_base 20: mod_base = OTHER; note = 2'-O-methylcytidine-3'-phosphate
  modified_base 21: mod_base = OTHER; note = 2'-O-methyladenosine-3'-phosphate
  modified_base 22: mod_base = OTHER; note = 2'-O-methyluridine-3'-phosphate
  modified_base 23: mod_base = OTHER; note = 2'-O-methylcytidine
taggaatgattattgaagacatc

SEQ ID NO: 5637 - RNA, 23 nt, synthetic construct
  source 1..23: mol_type = other RNA
  modified_base 1: mod_base = OTHER; note = 2'-O-methyluridine-3'-phosphate 5'-(E)-Vinylphosphonate
  modified_base 2: mod_base = OTHER; note = 2'-deoxy-2'-fluoroadenosine-3'-phosphate
  modified_base 3: mod_base = OTHER; note = 2'-O-methyladenosine-3'-phosphate
  modified_base 4: mod_base = OTHER; note = 2'-O-methylguanosine-3'-phosphate
  modified_base 5: mod_base = OTHER; note = 2'-O-methylguanosine-3'-phosphate
  modified_base 6: mod_base = OTHER; note = 2'-deoxy-2'-fluoroadenosine-3'-phosphate
  modified_base 7: mod_base = OTHER; note = 2'-O-methyladenosine-3'-phosphate
  modified_base 8: mod_base = OTHER; note = 2'-O-methyluridine-3'-phosphate
  modified_base 9: mod_base = OTHER; note = 2'-O-methylguanosine-3'-phosphate
  modified_base 10: mod_base = OTHER; note = 2'-O-methyladenosine-3'-phosphate
  modified_base 11: mod_base = OTHER; note = 2'-O-methyluridine-3'-phosphate
  modified_base 12: mod_base = OTHER; note = 2'-O-methyluridine-3'-phosphate
  modified_base 13: mod_base = OTHER; note = 2'-O-methyladenosine-3'-phosphate
  modified_base 14: mod_base = OTHER; note = 2'-deoxy-2'-fluorouridine-3'-phosphate
  modified_base 15: mod_base = OTHER; note = 2'-O-methyluridine-3'-phosphate
  modified_base 16: mod_base = OTHER; note = 2'-deoxy-2'-fluoroguanosine-3'-phosphate
  modified_base 17: mod_base = OTHER; note = 2'-O-methyladenosine-3'-phosphate
  modified_base 18: mod_base = OTHER; note = 2'-O-methyladenosine-3'-phosphate
  modified_base 19: mod_base = OTHER; note = 2'-O-methylguanosine-3'-phosphate
  modified_base 20: mod_base = OTHER; note = 2'-O-methyladenosine-3'-phosphate
  modified_base 21: mod_base = OTHER; note = 2'-O-methylcytidine-3'-phosphate
  modified_base 22: mod_base = OTHER; note = 2'-O-methyladenosine-3'-phosphate
  modified_base 23: mod_base = OTHER; note = 2'-O-methyluridine
taaggaatgattattgaagacat

SEQ ID NO: 5638 - RNA, 23 nt, synthetic construct
  source 1..23: mol_type = other RNA
  modified_base 1: mod_base = OTHER; note = 2'-O-methyluridine-3'-phosphate 5'-(E)-Vinylphosphonate
  modified_base 2: mod_base = OTHER; note = 2'-deoxy-2'-fluoroadenosine-3'-phosphate
  modified_base 3: mod_base = OTHER; note = 2'-O-methyladenosine-3'-phosphate
  modified_base 4: mod_base = OTHER; note = 2'-O-methyladenosine-3'-phosphate
  modified_base 5: mod_base = OTHER; note = 2'-O-methylguanosine-3'-phosphate
  modified_base 6: mod_base = OTHER; note = 2'-deoxy-2'-fluoroguanosine-3'-phosphate
  modified_base 7: mod_base = OTHER; note = 2'-O-methyladenosine-3'-phosphate
  modified_base 8: mod_base = OTHER; note = 2'-O-methyladenosine-3'-phosphate
  modified_base 9: mod_base = OTHER; note = 2'-O-methyluridine-3'-phosphate
  modified_base 10: mod_base = OTHER; note = 2'-O-methylguanosine-3'-phosphate
  modified_base 11: mod_base = OTHER; note = 2'-O-methyladenosine-3'-phosphate
  modified_base 12: mod_base = OTHER; note = 2'-O-methyluridine-3'-phosphate
  modified_base 13: mod_base = OTHER; note = 2'-O-methyluridine-3'-phosphate
  modified_base 14: mod_base = OTHER; note = 2'-deoxy-2'-fluoroadenosine-3'-phosphate
  modified_base 15: mod_base = OTHER; note = 2'-O-methyluridine-3'-phosphate
  modified_base 16: mod_base = OTHER; note = 2'-deoxy-2'-fluorouridine-3'-phosphate
  modified_base 17: mod_base = OTHER; note = 2'-O-methylguanosine-3'-phosphate
  modified_base 18: mod_base = OTHER; note = 2'-O-methyladenosine-3'-phosphate
  modified_base 19: mod_base = OTHER; note = 2'-O-methyladenosine-3'-phosphate
  modified_base 20: mod_base = OTHER; note = 2'-O-methylguanosine-3'-phosphate
  modified_base 21: mod_base = OTHER; note = 2'-O-methyladenosine-3'-phosphate
  modified_base 22: mod_base = OTHER; note = 2'-O-methylcytidine-3'-phosphate
  modified_base 23: mod_base = OTHER; note = 2'-O-methyladenosine
taaaggaatgattattgaagaca

SEQ ID NO: 5639 - RNA, 23 nt, synthetic construct
  source 1..23: mol_type = other RNA
  modified_base 1: mod_base = OTHER; note = 2'-O-methyluridine-3'-phosphate 5'-(E)-Vinylphosphonate
  modified_base 2: mod_base = OTHER; note = 2'-deoxy-2'-fluorouridine-3'-phosphate
  modified_base 3: mod_base = OTHER; note = 2'-O-methyladenosine-3'-phosphate
  modified_base 4: mod_base = OTHER; note = 2'-O-methyladenosine-3'-phosphate
  modified_base 5: mod_base = OTHER; note = 2'-O-methyladenosine-3'-phosphate
  modified_base 6: mod_base = OTHER; note = 2'-deoxy-2'-fluoroguanosine-3'-phosphate
  modified_base 7: mod_base = OTHER; note = 2'-O-methylguanosine-3'-phosphate
  modified_base 8: mod_base = OTHER; note = 2'-O-methyladenosine-3'-phosphate
  modified_base 9: mod_base = OTHER; note = 2'-O-methyladenosine-3'-phosphate
  modified_base 10: mod_base = OTHER; note = 2'-O-methyluridine-3'-phosphate
  modified_base 11: mod_base = OTHER; note = 2'-O-methylguanosine-3'-phosphate
  modified_base 12: mod_base = OTHER; note = 2'-O-methyladenosine-3'-phosphate
  modified_base 13: mod_base = OTHER; note = 2'-O-methyluridine-3'-phosphate
  modified_base 14: mod_base = OTHER; note = 2'-deoxy-2'-fluorouridine-3'-phosphate
  modified_base 15: mod_base = OTHER; note = 2'-O-methyladenosine-3'-phosphate
  modified_base 16: mod_base = OTHER; note = 2'-deoxy-2'-fluorouridine-3'-phosphate
  modified_base 17: mod_base = OTHER; note = 2'-O-methyluridine-3'-phosphate
  modified_base 18: mod_base = OTHER; note = 2'-O-methylguanosine-3'-phosphate
  modified_base 19: mod_base = OTHER; note = 2'-O-methyladenosine-3'-phosphate
  modified_base 20: mod_base = OTHER; note = 2'-O-methyladenosine-3'-phosphate
  modified_base 21: mod_base = OTHER; note = 2'-O-methylguanosine-3'-phosphate
  modified_base 22: mod_base = OTHER; note = 2'-O-methyladenosine-3'-phosphate
  modified_base 23: mod_base = OTHER; note = 2'-O-methylcytidine
ttaaaggaatgattattgaagac

SEQ ID NO: 5640 - RNA, 23 nt, synthetic construct
  source 1..23: mol_type = other RNA
  modified_base 1: mod_base = OTHER; note = 2'-O-methyluridine-3'-phosphate 5'-(E)-Vinylphosphonate
  modified_base 2: mod_base = OTHER; note = 2'-deoxy-2'-fluoroguanosine-3'-phosphate
  modified_base 3: mod_base = OTHER; note = 2'-O-methyluridine-3'-phosphate
  modified_base 4: mod_base = OTHER; note = 2'-O-methyladenosine-3'-phosphate
  modified_base 5: mod_base = OTHER; note = 2'-O-methyladenosine-3'-phosphate
  modified_base 6: mod_base = OTHER; note = 2'-deoxy-2'-fluorouridine-3'-phosphate
  modified_base 7: mod_base = OTHER; note = 2'-O-methylguanosine-3'-phosphate
  modified_base 8: mod_base = OTHER; note = 2'-O-methyladenosine-3'-phosphate
  modified_base 9: mod_base = OTHER; note = 2'-O-methyluridine-3'-phosphate
  modified_base 10: mod_base = OTHER; note = 2'-O-methylguanosine-3'-phosphate
  modified_base 11: mod_base = OTHER; note = 2'-O-methyluridine-3'-phosphate
  modified_base 12: mod_base = OTHER; note = 2'-O-methylguanosine-3'-phosphate
  modified_base 13: mod_base = OTHER; note = 2'-O-methyluridine-3'-phosphate
  modified_base 14: mod_base = OTHER; note = 2'-deoxy-2'-fluorouridine-3'-phosphate
  modified_base 15: mod_base = OTHER; note = 2'-O-methyluridine-3'-phosphate
  modified_base 16: mod_base = OTHER; note = 2'-deoxy-2'-fluoroguanosine-3'-phosphate
  modified_base 17: mod_base = OTHER; note = 2'-O-methyluridine-3'-phosphate
  modified_base 18: mod_base = OTHER; note = 2'-O-methylguanosine-3'-phosphate
  modified_base 19: mod_base = OTHER; note = 2'-O-methyladenosine-3'-phosphate
  modified_base 20: mod_base = OTHER; note = 2'-O-methyladenosine-3'-phosphate
  modified_base 21: mod_base = OTHER; note = 2'-O-methyluridine-3'-phosphate
  modified_base 22: mod_base = OTHER; note = 2'-O-methyluridine-3'-phosphate
  modified_base 23: mod_base = OTHER; note = 2'-O-methyluridine
tgtaatgatgtgtttgtgaattt

SEQ ID NO: 5641 - RNA, 23 nt, synthetic construct
  source 1..23: mol_type = other RNA
  modified_base 1: mod_base = OTHER; note = 2'-O-methyluridine-3'-phosphate 5'-(E)-Vinylphosphonate
  modified_base 2: mod_base = OTHER; note = 2'-deoxy-2'-fluorouridine-3'-phosphate
  modified_base 3: mod_base = OTHER; note = 2'-O-methylguanosine-3'-phosphate
  modified_base 4: mod_base = OTHER; note = 2'-O-methyluridine-3'-phosphate
  modified_base 5: mod_base = OTHER; note = 2'-O-methyladenosine-3'-phosphate
  modified_base 6: mod_base = OTHER; note = 2'-deoxy-2'-fluoroadenosine-3'-phosphate
  modified_base 7: mod_base = OTHER; note = 2'-O-methyluridine-3'-phosphate
  modified_base 8: mod_base = OTHER; note = 2'-O-methylguanosine-3'-phosphate
  modified_base 9: mod_base = OTHER; note = 2'-O-methyladenosine-3'-phosphate
  modified_base 10: mod_base = OTHER; note = 2'-O-methyluridine-3'-phosphate
  modified_base 11: mod_base = OTHER; note = 2'-O-methylguanosine-3'-phosphate
  modified_base 12: mod_base = OTHER; note = 2'-O-methyluridine-3'-phosphate
  modified_base 13: mod_base = OTHER; note = 2'-O-methylguanosine-3'-phosphate
  modified_base 14: mod_base = OTHER; note = 2'-deoxy-2'-fluorouridine-3'-phosphate
  modified_base 15: mod_base = OTHER; note = 2'-O-methyluridine-3'-phosphate
  modified_base 16: mod_base = OTHER; note = 2'-deoxy-2'-fluorouridine-3'-phosphate
  modified_base 17: mod_base = OTHER; note = 2'-O-methylguanosine-3'-phosphate
  modified_base 18: mod_base = OTHER; note = 2'-O-methyluridine-3'-phosphate
  modified_base 19: mod_base = OTHER; note = 2'-O-methylguanosine-3'-phosphate
  modified_base 20: mod_base = OTHER; note = 2'-O-methyladenosine-3'-phosphate
  modified_base 21: mod_base = OTHER; note = 2'-O-methyladenosine-3'-phosphate
  modified_base 22: mod_base = OTHER; note = 2'-O-methyluridine-3'-phosphate
  modified_base 23: mod_base = OTHER; note = 2'-O-methyluridine
ttgtaatgatgtgtttgtgaatt

SEQ ID NO: 5642 - RNA, 23 nt, synthetic construct
  source 1..23: mol_type = other RNA
  modified_base 1: mod_base = OTHER; note = 2'-O-methyluridine-3'-phosphate 5'-(E)-Vinylphosphonate
  modified_base 2: mod_base = OTHER; note = 2'-deoxy-2'-fluorouridine-3'-phosphate
  modified_base 3: mod_base = OTHER; note = 2'-O-methyluridine-3'-phosphate
  modified_base 4: mod_base = OTHER; note = 2'-O-methylguanosine-3'-phosphate
  modified_base 5: mod_base = OTHER; note = 2'-O-methyluridine-3'-phosphate
  modified_base 6: mod_base = OTHER; note = 2'-deoxy-2'-fluoroadenosine-3'-phosphate
  modified_base 7: mod_base = OTHER; note = 2'-O-methyladenosine-3'-phosphate
  modified_base 8: mod_base = OTHER; note = 2'-O-methyluridine-3'-phosphate
  modified_base 9: mod_base = OTHER; note = 2'-O-methylguanosine-3'-phosphate
  modified_base 10: mod_base = OTHER; note = 2'-O-methyladenosine-3'-phosphate
  modified_base 11: mod_base = OTHER; note = 2'-O-methyluridine-3'-phosphate
  modified_base 12: mod_base = OTHER; note = 2'-O-methylguanosine-3'-phosphate
  modified_base 13: mod_base = OTHER; note = 2'-O-methyluridine-3'-phosphate
  modified_base 14: mod_base = OTHER; note = 2'-deoxy-2'-fluoroguanosine-3'-phosphate
  modified_base 15: mod_base = OTHER; note = 2'-O-methyluridine-3'-phosphate
  modified_base 16: mod_base = OTHER; note = 2'-deoxy-2'-fluorouridine-3'-phosphate
  modified_base 17: mod_base = OTHER; note = 2'-O-methyluridine-3'-phosphate
  modified_base 18: mod_base = OTHER; note = 2'-O-methylguanosine-3'-phosphate
  modified_base 19: mod_base = OTHER; note = 2'-O-methyluridine-3'-phosphate
  modified_base 20: mod_base = OTHER; note = 2'-O-methylguanosine-3'-phosphate
  modified_base 21: mod_base = OTHER; note = 2'-O-methyladenosine-3'-phosphate
  modified_base 22: mod_base = OTHER; note = 2'-O-methyladenosine-3'-phosphate
  modified_base 23: mod_base = OTHER; note = 2'-O-methyluridine
tttgtaatgatgtgtttgtgaat

SEQ ID NO: 5643 - RNA, 23 nt, synthetic construct
  source 1..23: mol_type = other RNA
  modified_base 1: mod_base = OTHER; note = 2'-O-methyluridine-3'-phosphate 5'-(E)-Vinylphosphonate
  modified_base 2: mod_base = OTHER; note = 2'-deoxy-2'-fluorocytidine-3'-phosphate
  modified_base 3: mod_base = OTHER; note = 2'-O-methyluridine-3'-phosphate
  modified_base 4: mod_base = OTHER; note = 2'-O-methyluridine-3'-phosphate
  modified_base 5: mod_base = OTHER; note = 2'-O-methylguanosine-3'-phosphate
  modified_base 6: mod_base = OTHER; note = 2'-deoxy-2'-fluorouridine-3'-phosphate
  modified_base 7: mod_base = OTHER; note = 2'-O-methyladenosine-3'-phosphate
  modified_base 8: mod_base = OTHER; note = 2'-O-methyladenosine-3'-phosphate
  modified_base 9: mod_base = OTHER; note = 2'-O-methyluridine-3'-phosphate
  modified_base 10: mod_base = OTHER; note = 2'-O-methylguanosine-3'-phosphate
  modified_base 11: mod_base = OTHER; note = 2'-O-methyladenosine-3'-phosphate
  modified_base 12: mod_base = OTHER; note = 2'-O-methyluridine-3'-phosphate
  modified_base 13: mod_base = OTHER; note = 2'-O-methylguanosine-3'-phosphate
  modified_base 14: mod_base = OTHER; note = 2'-deoxy-2'-fluorouridine-3'-phosphate
  modified_base 15: mod_base = OTHER; note = 2'-O-methylguanosine-3'-phosphate
  modified_base 16: mod_base = OTHER; note = 2'-deoxy-2'-fluorouridine-3'-phosphate
  modified_base 17: mod_base = OTHER; note = 2'-O-methyluridine-3'-phosphate
  modified_base 18: mod_base = OTHER; note = 2'-O-methyluridine-3'-phosphate
  modified_base 19: mod_base = OTHER; note = 2'-O-methylguanosine-3'-phosphate
  modified_base 20: mod_base = OTHER; note = 2'-O-methyluridine-3'-phosphate
  modified_base 21: mod_base = OTHER; note = 2'-O-methylguanosine-3'-phosphate
  modified_base 22: mod_base = OTHER; note = 2'-O-methyladenosine-3'-phosphate
  modified_base 23: mod_base = OTHER; note = 2'-O-methyladenosine
tcttgtaatgatgtgtttgtgaa

SEQ ID NO: 5644 - RNA, 23 nt, synthetic construct
  source 1..23: mol_type = other RNA
  modified_base 1: mod_base = OTHER; note = 2'-O-methyluridine-3'-phosphate 5'-(E)-Vinylphosphonate
  modified_base 2: mod_base = OTHER; note = 2'-deoxy-2'-fluoroguanosine-3'-phosphate
  modified_base 3: mod_base = OTHER; note = 2'-O-methylcytidine-3'-phosphate
  modified_base 4: mod_base = OTHER; note = 2'-O-methyluridine-3'-phosphate
  modified_base 5: mod_base = OTHER; note = 2'-O-methyluridine-3'-phosphate
  modified_base 6: mod_base = OTHER; note = 2'-deoxy-2'-fluoroguanosine-3'-phosphate
  modified_base 7: mod_base = OTHER; note = 2'-O-methyluridine-3'-phosphate
  modified_base 8: mod_base = OTHER; note = 2'-O-methyladenosine-3'-phosphate
  modified_base 9: mod_base = OTHER; note = 2'-O-methyladenosine-3'-phosphate
  modified_base 10: mod_base = OTHER; note = 2'-O-methyluridine-3'-phosphate
  modified_base 11: mod_base = OTHER; note = 2'-O-methylguanosine-3'-phosphate
  modified_base 12: mod_base = OTHER; note = 2'-O-methyladenosine-3'-phosphate
  modified_base 13: mod_base = OTHER; note = 2'-O-methyluridine-3'-phosphate
  modified_base 14: mod_base = OTHER; note = 2'-deoxy-2'-fluoroguanosine-3'-phosphate
  modified_base 15: mod_base = OTHER; note = 2'-O-methyluridine-3'-phosphate
  modified_base 16: mod_base = OTHER; note = 2'-deoxy-2'-fluoroguanosine-3'-phosphate
  modified_base 17: mod_base = OTHER; note = 2'-O-methyluridine-3'-phosphate
  modified_base 18: mod_base = OTHER; note = 2'-O-methyluridine-3'-phosphate
  modified_base 19: mod_base = OTHER; note = 2'-O-methyluridine-3'-phosphate
  modified_base 20: mod_base = OTHER; note = 2'-O-methylguanosine-3'-phosphate
  modified_base 21: mod_base = OTHER; note = 2'-O-methyluridine-3'-phosphate
  modified_base 22: mod_base = OTHER; note = 2'-O-methylguanosine-3'-phosphate
  modified_base 23: mod_base = OTHER; note = 2'-O-methyladenosine
tgcttgtaatgatgtgtttgtga

SEQ ID NO: 5645 - RNA, 23 nt, synthetic construct
  source 1..23: mol_type = other RNA
  modified_base 1: mod_base = OTHER; note = 2'-O-methyluridine-3'-phosphate 5'-(E)-Vinylphosphonate
  modified_base 2: mod_base = OTHER; note = 2'-deoxy-2'-fluoroadenosine-3'-phosphate
  modified_base 3: mod_base = OTHER; note = 2'-O-methylguanosine-3'-phosphate
  modified_base 4: mod_base = OTHER; note = 2'-O-methylcytidine-3'-phosphate
  modified_base 5: mod_base = OTHER; note = 2'-O-methyluridine-3'-phosphate
  modified_base 6: mod_base = OTHER; note = 2'-deoxy-2'-fluorouridine-3'-phosphate
  modified_base 7: mod_base = OTHER; note = 2'-O-methylguanosine-3'-phosphate
  modified_base 8: mod_base = OTHER; note = 2'-O-methyluridine-3'-phosphate
  modified_base 9: mod_base = OTHER; note = 2'-O-methyladenosine-3'-phosphate
  modified_base 10: mod_base = OTHER; note = 2'-O-methyladenosine-3'-phosphate
  modified_base 11: mod_base = OTHER; note = 2'-O-methyluridine-3'-phosphate
  modified_base 12: mod_base = OTHER; note = 2'-O-methylguanosine-3'-phosphate
  modified_base 13: mod_base = OTHER; note = 2'-O-methyladenosine-3'-phosphate
  modified_base 14: mod_base = OTHER; note = 2'-deoxy-2'-fluorouridine-3'-phosphate
  modified_base 15: mod_base = OTHER; note = 2'-O-methylguanosine-3'-phosphate
  modified_base 16: mod_base = OTHER; note = 2'-deoxy-2'-fluorouridine-3'-phosphate
  modified_base 17: mod_base = OTHER; note = 2'-O-methylguanosine-3'-phosphate
  modified_base 18: mod_base = OTHER; note = 2'-O-methyluridine-3'-phosphate
  modified_base 19: mod_base = OTHER; note = 2'-O-methyluridine-3'-phosphate
  modified_base 20: mod_base = OTHER; note = 2'-O-methyluridine-3'-phosphate
  modified_base 21: mod_base = OTHER; note = 2'-O-methylguanosine-3'-phosphate
  modified_base 22: mod_base = OTHER; note = 2'-O-methyluridine-3'-phosphate
  modified_base 23: mod_base = OTHER; note = 2'-O-methylguanosine
tagcttgtaatgatgtgtttgtg

SEQ ID NO: 5646 - RNA, 23 nt, synthetic construct
  source 1..23: mol_type = other RNA
  modified_base 1: mod_base = OTHER; note = 2'-O-methyluridine-3'-phosphate 5'-(E)-Vinylphosphonate
  modified_base 2: mod_base = OTHER; note = 2'-deoxy-2'-fluorouridine-3'-phosphate
  modified_base 3: mod_base = OTHER; note = 2'-O-methyladenosine-3'-phosphate
  modified_base 4: mod_base = OTHER; note = 2'-O-methylguanosine-3'-phosphate
  modified_base 5: mod_base = OTHER; note = 2'-O-methylcytidine-3'-phosphate
  modified_base 6: mod_base = OTHER; note = 2'-deoxy-2'-fluorouridine-3'-phosphate
  modified_base 7: mod_base = OTHER; note = 2'-O-methyluridine-3'-phosphate
  modified_base 8: mod_base = OTHER; note = 2'-O-methylguanosine-3'-phosphate
  modified_base 9: mod_base = OTHER; note = 2'-O-methyluridine-3'-phosphate
  modified_base 10: mod_base = OTHER; note = 2'-O-methyladenosine-3'-phosphate
  modified_base 11: mod_base = OTHER; note = 2'-O-methyladenosine-3'-phosphate
  modified_base 12: mod_base = OTHER; note = 2'-O-methyluridine-3'-phosphate
  modified_base 13: mod_base = OTHER; note = 2'-O-methylguanosine-3'-phosphate
  modified_base 14: mod_base = OTHER; note = 2'-deoxy-2'-fluoroadenosine-3'-phosphate
  modified_base 15: mod_base = OTHER; note = 2'-O-methyluridine-3'-phosphate
  modified_base 16: mod_base = OTHER; note = 2'-deoxy-2'-fluoroguanosine-3'-phosphate
  modified_base 17: mod_base = OTHER; note = 2'-O-methyluridine-3'-phosphate
  modified_base 18: mod_base = OTHER; note = 2'-O-methylguanosine-3'-phosphate
  modified_base 19: mod_base = OTHER; note = 2'-O-methyluridine-3'-phosphate
  modified_base 20: mod_base = OTHER; note = 2'-O-methyluridine-3'-phosphate
  modified_base 21: mod_base = OTHER; note = 2'-O-methyluridine-3'-phosphate
  modified_base 22: mod_base = OTHER; note = 2'-O-methylguanosine-3'-phosphate
  modified_base 23: mod_base = OTHER; note = 2'-O-methyluridine
ttagcttgtaatgatgtgtttgt

SEQ ID NO: 5647 - RNA, 23 nt, synthetic construct
  source 1..23: mol_type = other RNA
  modified_base 1: mod_base = OTHER; note = 2'-O-methyluridine-3'-phosphate 5'-(E)-Vinylphosphonate
  modified_base 2: mod_base = OTHER; note = 2'-deoxy-2'-fluoroguanosine-3'-phosphate
  modified_base 3: mod_base = OTHER; note = 2'-O-methyluridine-3'-phosphate
  modified_base 4: mod_base = OTHER; note = 2'-O-methyladenosine-3'-phosphate
  modified_base 5: mod_base = OTHER; note = 2'-O-methylguanosine-3'-phosphate
  modified_base 6: mod_base = OTHER; note = 2'-deoxy-2'-fluorocytidine-3'-phosphate
  modified_base 7: mod_base = OTHER; note = 2'-O-methyluridine-3'-phosphate
  modified_base 8: mod_base = OTHER; note = 2'-O-methyluridine-3'-phosphate
  modified_base 9: mod_base = OTHER; note = 2'-O-methylguanosine-3'-phosphate
  modified_base 10: mod_base = OTHER; note = 2'-O-methyluridine-3'-phosphate
  modified_base 11: mod_base = OTHER; note = 2'-O-methyladenosine-3'-phosphate
  modified_base 12: mod_base = OTHER; note = 2'-O-methyladenosine-3'-phosphate
  modified_base 13: mod_base = OTHER; note = 2'-O-methyluridine-3'-phosphate
  modified_base 14: mod_base = OTHER; note = 2'-deoxy-2'-fluoroguanosine-3'-phosphate
  modified_base 15: mod_base = OTHER; note = 2'-O-methyladenosine-3'-phosphate
  modified_base 16: mod_base = OTHER; note = 2'-deoxy-2'-fluorouridine-3'-phosphate
  modified_base 17: mod_base = OTHER; note = 2'-O-methylguanosine-3'-phosphate
  modified_base 18: mod_base = OTHER; note = 2'-O-methyluridine-3'-phosphate
  modified_base 19: mod_base = OTHER; note = 2'-O-methylguanosine-3'-phosphate
  modified_base 20: mod_base = OTHER; note = 2'-O-methyluridine-3'-phosphate
  modified_base 21: mod_base = OTHER; note = 2'-O-methyluridine-3'-phosphate
  modified_base 22: mod_base = OTHER; note = 2'-O-methyluridine-3'-phosphate
  modified_base 23: mod_base = OTHER; note = 2'-O-methylguanosine
tgtagcttgtaatgatgtgtttg

SEQ ID NO: 5648 - RNA, 23 nt, synthetic construct
  source 1..23: mol_type = other RNA
  modified_base 1: mod_base = OTHER; note = 2'-O-methyluridine-3'-phosphate 5'-(E)-Vinylphosphonate
  modified_base 2: mod_base = OTHER; note = 2'-deoxy-2'-fluoroadenosine-3'-phosphate
  modified_base 3: mod_base = OTHER; note = 2'-O-methylguanosine-3'-phosphate
  modified_base 4: mod_base = OTHER; note = 2'-O-methyluridine-3'-phosphate
  modified_base 5: mod_base = OTHER; note = 2'-O-methyladenosine-3'-phosphate
  modified_base 6: mod_base = OTHER; note = 2'-deoxy-2'-fluoroguanosine-3'-phosphate
  modified_base 7: mod_base = OTHER; note = 2'-O-methylcytidine-3'-phosphate
  modified_base 8: mod_base = OTHER; note = 2'-O-methyluridine-3'-phosphate
  modified_base 9: mod_base = OTHER; note = 2'-O-methyluridine-3'-phosphate
  modified_base 10: mod_base = OTHER; note = 2'-O-methylguanosine-3'-phosphate
  modified_base 11: mod_base = OTHER; note = 2'-O-methyluridine-3'-phosphate
  modified_base 12: mod_base = OTHER; note = 2'-O-methyladenosine-3'-phosphate
  modified_base 13: mod_base = OTHER; note = 2'-O-methyladenosine-3'-phosphate
  modified_base 14: mod_base = OTHER; note = 2'-deoxy-2'-fluorouridine-3'-phosphate
  modified_base 15: mod_base = OTHER; note = 2'-O-methylguanosine-3'-phosphate
  modified_base 16: mod_base = OTHER; note = 2'-deoxy-2'-fluoroadenosine-3'-phosphate
  modified_base 17: mod_base = OTHER; note = 2'-O-methyluridine-3'-phosphate
  modified_base 18: mod_base = OTHER; note = 2'-O-methylguanosine-3'-phosphate
  modified_base 19: mod_base = OTHER; note = 2'-O-methyluridine-3'-phosphate
  modified_base 20: mod_base = OTHER; note = 2'-O-methylguanosine-3'-phosphate
  modified_base 21: mod_base = OTHER; note = 2'-O-methyluridine-3'-phosphate
  modified_base 22: mod_base = OTHER; note = 2'-O-methyluridine-3'-phosphate
  modified_base 23: mod_base = OTHER; note = 2'-O-methyluridine
tagtagcttgtaatgatgtgttt

SEQ ID NO: 5649 - RNA, 23 nt, synthetic construct
  source 1..23: mol_type = other RNA
  modified_base 1: mod_base = OTHER; note = 2'-O-methyluridine-3'-phosphate 5'-(E)-Vinylphosphonate
  modified_base 2: mod_base = OTHER; note = 2'-deoxy-2'-fluoroadenosine-3'-phosphate
  modified_base 3: mod_base = OTHER; note = 2'-O-methyladenosine-3'-phosphate
  modified_base 4: mod_base = OTHER; note = 2'-O-methylguanosine-3'-phosphate
  modified_base 5: mod_base = OTHER; note = 2'-O-methyluridine-3'-phosphate
  modified_base 6: mod_base = OTHER; note = 2'-deoxy-2'-fluoroadenosine-3'-phosphate
  modified_base 7: mod_base = OTHER; note = 2'-O-methylguanosine-3'-phosphate
  modified_base 8: mod_base = OTHER; note = 2'-O-methylcytidine-3'-phosphate
  modified_base 9: mod_base = OTHER; note = 2'-O-methyluridine-3'-phosphate
  modified_base 10: mod_base = OTHER; note = 2'-O-methyluridine-3'-phosphate
  modified_base 11: mod_base = OTHER; note = 2'-O-methylguanosine-3'-phosphate
  modified_base 12: mod_base = OTHER; note = 2'-O-methyluridine-3'-phosphate
  modified_base 13: mod_base = OTHER; note = 2'-O-methyladenosine-3'-phosphate
  modified_base 14: mod_base = OTHER; note = 2'-deoxy-2'-fluoroadenosine-3'-phosphate
  modified_base 15: mod_base = OTHER; note = 2'-O-methyluridine-3'-phosphate
  modified_base 16: mod_base = OTHER; note = 2'-deoxy-2'-fluoroguanosine-3'-phosphate
  modified_base 17: mod_base = OTHER; note = 2'-O-methyladenosine-3'-phosphate
  modified_base 18: mod_base = OTHER; note = 2'-O-methyluridine-3'-phosphate
  modified_base 19: mod_base = OTHER; note = 2'-O-methylguanosine-3'-phosphate
  modified_base 20: mod_base = OTHER; note = 2'-O-methyluridine-3'-phosphate
  modified_base 21: mod_base = OTHER; note = 2'-O-methylguanosine-3'-phosphate
  modified_base 22: mod_base = OTHER; note = 2'-O-methyluridine-3'-phosphate
  modified_base 23: mod_base = OTHER; note = 2'-O-methyluridine
taagtagcttgtaatgatgtgtt

SEQ ID NO: 5650 - RNA, 23 nt, synthetic construct
  source 1..23: mol_type = other RNA
  modified_base 1: mod_base = OTHER; note = 2'-O-methyluridine-3'-phosphate 5'-(E)-Vinylphosphonate
  modified_base 2: mod_base = OTHER; note = 2'-deoxy-2'-fluorouridine-3'-phosphate
  modified_base 3: mod_base = OTHER; note = 2'-O-methyluridine-3'-phosphate
  modified_base 4: mod_base = OTHER; note = 2'-O-methylcytidine-3'-phosphate
  modified_base 5: mod_base = OTHER; note = 2'-O-methyluridine-3'-phosphate
  modified_base 6: mod_base = OTHER; note = 2'-deoxy-2'-fluoroadenosine-3'-phosphate
  modified_base 7: mod_base = OTHER; note = 2'-O-methyladenosine-3'-phosphate
  modified_base 8: mod_base = OTHER; note = 2'-O-methylguanosine-3'-phosphate
  modified_base 9: mod_base = OTHER; note = 2'-O-methyluridine-3'-phosphate
  modified_base 10: mod_base = OTHER; note = 2'-O-methyladenosine-3'-phosphate
  modified_base 11: mod_base = OTHER; note = 2'-O-methylguanosine-3'-phosphate
  modified_base 12: mod_base = OTHER; note = 2'-O-methylcytidine-3'-phosphate
  modified_base 13: mod_base = OTHER; note = 2'-O-methyluridine-3'-phosphate
  modified_base 14: mod_base = OTHER; note = 2'-deoxy-2'-fluorouridine-3'-phosphate
  modified_base 15: mod_base = OTHER; note = 2'-O-methylguanosine-3'-phosphate
  modified_base 16: mod_base = OTHER; note = 2'-deoxy-2'-fluorouridine-3'-phosphate
  modified_base 17: mod_base = OTHER; note = 2'-O-methyladenosine-3'-phosphate
  modified_base 18: mod_base = OTHER; note = 2'-O-methyladenosine-3'-phosphate
  modified_base 19: mod_base = OTHER; note = 2'-O-methyluridine-3'-phosphate
  modified_base 20: mod_base = OTHER; note = 2'-O-methylguanosine-3'-phosphate
  modified_base 21: mod_base = OTHER; note = 2'-O-methyladenosine-3'-phosphate
  modified_base 22: mod_base = OTHER; note = 2'-O-methyluridine-3'-phosphate
  modified_base 23: mod_base = OTHER; note = 2'-O-methylguanosine
tttctaagtagcttgtaatgatg

SEQ ID NO: 5651 - RNA, 23 nt, synthetic construct
  source 1..23: mol_type = other RNA
  modified_base 1: mod_base = OTHER; note = 2'-O-methyluridine-3'-phosphate 5'-(E)-Vinylphosphonate
  modified_base 2: mod_base = OTHER; note = 2'-deoxy-2'-fluoroadenosine-3'-phosphate
  modified_base 3: mod_base = OTHER; note = 2'-O-methyladenosine-3'-phosphate
  modified_base 4: mod_base = OTHER; note = 2'-O-methylcytidine-3'-phosphate
  modified_base 5: mod_base = OTHER; note = 2'-O-methyladenosine-3'-phosphate
  modified_base 6: mod_base = OTHER; note = 2'-deoxy-2'-fluorouridine-3'-phosphate
  modified_base 7: mod_base = OTHER; note = 2'-O-methyluridine-3'-phosphate
  modified_base 8: mod_base = OTHER; note = 2'-O-methyluridine-3'-phosphate
  modified_base 9: mod_base = OTHER; note = 2'-O-methylcytidine-3'-phosphate
  modified_base 10: mod_base = OTHER; note = 2'-O-methyluridine-3'-phosphate
  modified_base 11: mod_base = OTHER; note = 2'-O-methyladenosine-3'-phosphate
  modified_base 12: mod_base = OTHER; note = 2'-O-methyladenosine-3'-phosphate
  modified_base 13: mod_base = OTHER; note = 2'-O-methylguanosine-3'-phosphate
  modified_base 14: mod_base = OTHER; note = 2'-deoxy-2'-fluorouridine-3'-phosphate
  modified_base 15: mod_base = OTHER; note = 2'-O-methyladenosine-3'-phosphate
  modified_base 16: mod_base = OTHER; note = 2'-deoxy-2'-fluoroguanosine-3'-phosphate
  modified_base 17: mod_base = OTHER; note = 2'-O-methylcytidine-3'-phosphate
  modified_base 18: mod_base = OTHER; note = 2'-O-methyluridine-3'-phosphate
  modified_base 19: mod_base = OTHER; note = 2'-O-methyluridine-3'-phosphate
  modified_base 20: mod_base = OTHER; note = 2'-O-methylguanosine-3'-phosphate
  modified_base 21: mod_base = OTHER; note = 2'-O-methyluridine-3'-phosphate
  modified_base 22: mod_base = OTHER; note = 2'-O-methyladenosine-3'-phosphate
  modified_base 23: mod_base = OTHER; note = 2'-O-methyladenosine
taacatttctaagtagcttgtaa

SEQ ID NO: 5652 - RNA, 23 nt, synthetic construct
  source 1..23: mol_type = other RNA
  modified_base 1: mod_base = OTHER; note = 2'-O-methyluridine-3'-phosphate 5'-(E)-Vinylphosphonate
  modified_base 2: mod_base = OTHER; note = 2'-deoxy-2'-fluorouridine-3'-phosphate
  modified_base 3: mod_base = OTHER; note = 2'-O-methyladenosine-3'-phosphate
  modified_base 4: mod_base = OTHER; note = 2'-O-methyladenosine-3'-phosphate
  modified_base 5: mod_base = OTHER; note = 2'-O-methyladenosine-3'-phosphate
  modified_base 6: mod_base = OTHER; note = 2'-deoxy-2'-fluorocytidine-3'-phosphate
  modified_base 7: mod_base = OTHER; note = 2'-O-methyladenosine-3'-phosphate
  modified_base 8: mod_base = OTHER; note = 2'-O-methyluridine-3'-phosphate
  modified_base 9: mod_base = OTHER; note = 2'-O-methyluridine-3'-phosphate
  modified_base 10: mod_base = OTHER; note = 2'-O-methyluridine-3'-phosphate
  modified_base 11: mod_base = OTHER; note = 2'-O-methylcytidine-3'-phosphate
  modified_base 12: mod_base = OTHER; note = 2'-O-methyluridine-3'-phosphate
  modified_base 13: mod_base = OTHER; note = 2'-O-methyladenosine-3'-phosphate
  modified_base 14: mod_base = OTHER; note = 2'-deoxy-2'-fluoroadenosine-3'-phosphate
  modified_base 15: mod_base = OTHER; note = 2'-O-methylguanosine-3'-phosphate
  modified_base 16: mod_base = OTHER; note = 2'-deoxy-2'-fluorouridine-3'-phosphate
  modified_base 17: mod_base = OTHER; note = 2'-O-methyladenosine-3'-phosphate
  modified_base 18: mod_base = OTHER; note = 2'-O-methylguanosine-3'-phosphate
  modified_base 19: mod_base = OTHER; note = 2'-O-methylcytidine-3'-phosphate
  modified_base 20: mod_base = OTHER; note = 2'-O-methyluridine-3'-phosphate
  modified_base 21: mod_base = OTHER; note = 2'-O-methyluridine-3'-phosphate
  modified_base 22: mod_base = OTHER; note = 2'-O-methylguanosine-3'-phosphate
  modified_base 23: mod_base = OTHER; note = 2'-O-methyluridine
ttaaacatttctaagtagcttgt

SEQ ID NO: 5653 - RNA, 23 nt, synthetic construct
  source 1..23: mol_type = other RNA
  modified_base 1: mod_base = OTHER; note = 2'-O-methyluridine-3'-phosphate 5'-(E)-Vinylphosphonate
  modified_base 2: mod_base = OTHER; note = 2'-deoxy-2'-fluorouridine-3'-phosphate
  modified_base 3: mod_base = OTHER; note = 2'-O-methyladenosine-3'-phosphate
  modified_base 4: mod_base = OTHER; note = 2'-O-methylcytidine-3'-phosphate
  modified_base 5: mod_base = OTHER; note = 2'-O-methyluridine-3'-phosphate
  modified_base 6: mod_base = OTHER; note = 2'-deoxy-2'-fluoroadenosine-3'-phosphate
  modified_base 7: mod_base = OTHER; note = 2'-O-methyladenosine-3'-phosphate
  modified_base 8: mod_base = OTHER; note = 2'-O-methyladenosine-3'-phosphate
  modified_base 9: mod_base = OTHER; note = 2'-O-methylcytidine-3'-phosphate
  modified_base 10: mod_base = OTHER; note = 2'-O-methyladenosine-3'-phosphate
  modified_base 11: mod_base = OTHER; note = 2'-O-methyluridine-3'-phosphate
  modified_base 12: mod_base = OTHER; note = 2'-O-methyluridine-3'-phosphate
  modified_base 13: mod_base = OTHER; note = 2'-O-methyluridine-3'-phosphate
  modified_base 14: mod_base = OTHER; note = 2'-deoxy-2'-fluorocytidine-3'-phosphate
  modified_base 15: mod_base = OTHER; note = 2'-O-methyluridine-3'-phosphate
  modified_base 16: mod_base = OTHER; note = 2'-deoxy-2'-fluoroadenosine-3'-phosphate
  modified_base 17: mod_base = OTHER; note = 2'-O-methyladenosine-3'-phosphate
  modified_base 18: mod_base = OTHER; note = 2'-O-methylguanosine-3'-phosphate
  modified_base 19: mod_base = OTHER; note = 2'-O-methyluridine-3'-phosphate
  modified_base 20: mod_base = OTHER; note = 2'-O-methyladenosine-3'-phosphate
  modified_base 21: mod_base = OTHER; note = 2'-O-methylguanosine-3'-phosphate
  modified_base 22: mod_base = OTHER; note = 2'-O-methylcytidine-3'-phosphate
  modified_base 23: mod_base = OTHER; note = 2'-O-methyluridine
ttactaaacatttctaagtagct

SEQ ID NO: 5654 - RNA, 23 nt, synthetic construct
  source 1..23: mol_type = other RNA
  modified_base 1: mod_base = OTHER; note = 2'-O-methyluridine-3'-phosphate 5'-(E)-Vinylphosphonate
  modified_base 2: mod_base = OTHER; note = 2'-deoxy-2'-fluoroadenosine-3'-phosphate
  modified_base 3: mod_base = OTHER; note = 2'-O-methyladenosine-3'-phosphate
  modified_base 4: mod_base = OTHER; note = 2'-O-methyladenosine-3'-phosphate
  modified_base 5: mod_base = OTHER; note = 2'-O-methylcytidine-3'-phosphate
  modified_base 6: mod_base = OTHER; note = 2'-deoxy-2'-fluoroadenosine-3'-phosphate
  modified_base 7: mod_base = OTHER; note = 2'-O-methylguanosine-3'-phosphate
  modified_base 8: mod_base = OTHER; note = 2'-O-methyladenosine-3'-phosphate
  modified_base 9: mod_base = OTHER; note = 2'-O-methyladenosine-3'-phosphate
  modified_base 10: mod_base = OTHER; note = 2'-O-methyladenosine-3'-phosphate
  modified_base 11: mod_base = OTHER; note = 2'-O-methyluridine-3'-phosphate
  modified_base 12: mod_base = OTHER; note = 2'-O-methyladenosine-3'-phosphate
  modified_base 13: mod_base = OTHER; note = 2'-O-methylguanosine-3'-phosphate
  modified_base 14: mod_base = OTHER; note = 2'-deoxy-2'-fluorouridine-3'-phosphate
  modified_base 15: mod_base = OTHER; note = 2'-O-methyladenosine-3'-phosphate
  modified_base 16: mod_base = OTHER; note = 2'-deoxy-2'-fluorouridine-3'-phosphate
  modified_base 17: mod_base = OTHER; note = 2'-O-methylguanosine-3'-phosphate
  modified_base 18: mod_base = OTHER; note = 2'-O-methyluridine-3'-phosphate
  modified_base 19: mod_base = OTHER; note = 2'-O-methyluridine-3'-phosphate
  modified_base 20: mod_base = OTHER; note = 2'-O-methyluridine-3'-phosphate
  modified_base 21: mod_base = OTHER; note = 2'-O-methylcytidine-3'-phosphate
  modified_base 22: mod_base = OTHER; note = 2'-O-methyladenosine-3'-phosphate
  modified_base 23: mod_base = OTHER; note = 2'-O-methylcytidine
taaacagaaatagtatgtttcac

SEQ ID NO: 5655 - RNA, 23 nt, synthetic construct
  source 1..23: mol_type = other RNA
  modified_base 1: mod_base = OTHER; note = 2'-O-methyluridine-3'-phosphate 5'-(E)-Vinylphosphonate
  modified_base 2: mod_base = OTHER; note = 2'-deoxy-2'-fluorouridine-3'-phosphate
  modified_base 3: mod_base = OTHER; note = 2'-O-methyluridine-3'-phosphate
  modified_base 4: mod_base = OTHER; note = 2'-O-methyluridine-3'-phosphate
  modified_base 5: mod_base = OTHER; note = 2'-O-methyluridine-3'-phosphate
  modified_base 6: mod_base = OTHER; note = 2'-deoxy-2'-fluorouridine-3'-phosphate
  modified_base 7: mod_base = OTHER; note = 2'-O-methylguanosine-3'-phosphate
  modified_base 8: mod_base = OTHER; note = 2'-O-methyluridine-3'-phosphate
  modified_base 9: mod_base = OTHER; note = 2'-O-methyluridine-3'-phosphate
  modified_base 10: mod_base = OTHER; note = 2'-O-methyladenosine-3'-phosphate
  modified_base 11: mod_base = OTHER; note = 2'-O-methyluridine-3'-phosphate
  modified_base 12: mod_base = OTHER; note = 2'-O-methyluridine-3'-phosphate
  modified_base 13: mod_base = OTHER; note = 2'-O-methyluridine-3'-phosphate
  modified_base 14: mod_base = OTHER; note = 2'-deoxy-2'-fluoroadenosine-3'-phosphate
  modified_base 15: mod_base = OTHER; note = 2'-O-methylguanosine-3'-phosphate
  modified_base 16: mod_base = OTHER; note = 2'-deoxy-2'-fluoroadenosine-3'-phosphate
  modified_base 17: mod_base = OTHER; note = 2'-O-methyladenosine-3'-phosphate
  modified_base 18: mod_base = OTHER; note = 2'-O-methylguanosine-3'-phosphate
  modified_base 19: mod_base = OTHER; note = 2'-O-methylcytidine-3'-phosphate
  modified_base 20: mod_base = OTHER; note = 2'-O-methyladenosine-3'-phosphate
  modified_base 21: mod_base = OTHER; note = 2'-O-methylguanosine-3'-phosphate
  modified_base 22: mod_base = OTHER; note = 2'-O-methylcytidine-3'-phosphate
  modified_base 23: mod_base = OTHER; note = 2'-O-methyluridine
ttttttgttatttagaagcagct

SEQ ID NO: 5656 - RNA, 23 nt, synthetic construct
  source 1..23: mol_type = other RNA
  modified_base 1: mod_base = OTHER; note = 2'-O-methyluridine-3'-phosphate 5'-(E)-Vinylphosphonate
  modified_base 2: mod_base = OTHER; note = 2'-deoxy-2'-fluorouridine-3'-phosphate
  modified_base 3: mod_base = OTHER; note = 2'-O-methyluridine-3'-phosphate
  modified_base 4: mod_base = OTHER; note = 2'-O-methyluridine-3'-phosphate
  modified_base 5: mod_base = OTHER; note = 2'-O-methyluridine-3'-phosphate
  modified_base 6: mod_base = OTHER; note = 2'-deoxy-2'-fluorouridine-3'-phosphate
  modified_base 7: mod_base = OTHER; note = 2'-O-methyluridine-3'-phosphate
  modified_base 8: mod_base = OTHER; note = 2'-O-methylguanosine-3'-phosphate
  modified_base 9: mod_base = OTHER; note = 2'-O-methyluridine-3'-phosphate
  modified_base 10: mod_base = OTHER; note = 2'-O-methyluridine-3'-phosphate
  modified_base 11: mod_base = OTHER; note = 2'-O-methyladenosine-3'-phosphate
  modified_base 12: mod_base = OTHER; note = 2'-O-methyluridine-3'-phosphate
  modified_base 13: mod_base = OTHER; note = 2'-O-methyluridine-3'-phosphate
  modified_base 14: mod_base = OTHER; note = 2'-deoxy-2'-fluorouridine-3'-phosphate
  modified_base 15: mod_base = OTHER; note = 2'-O-methyladenosine-3'-phosphate
  modified_base 16: mod_base = OTHER; note = 2'-deoxy-2'-fluoroguanosine-3'-phosphate
  modified_base 17: mod_base = OTHER; note = 2'-O-methyladenosine-3'-phosphate
  modified_base 18: mod_base = OTHER; note = 2'-O-methyladenosine-3'-phosphate
  modified_base 19: mod_base = OTHER; note = 2'-O-methylguanosine-3'-phosphate
  modified_base 20: mod_base = OTHER; note = 2'-O-methylcytidine-3'-phosphate
  modified_base 21: mod_base = OTHER; note = 2'-O-methyladenosine-3'-phosphate
  modified_base 22: mod_base = OTHER; note = 2'-O-methylguanosine-3'-phosphate
  modified_base 23: mod_base = OTHER; note = 2'-O-methylcytidine
tttttttgttatttagaagcagc

SEQ ID NO: 5657 - RNA, 23 nt, synthetic construct
  source 1..23: mol_type = other RNA
  modified_base 1: mod_base = OTHER; note = 2'-O-methyluridine-3'-phosphate 5'-(E)-Vinylphosphonate
  modified_base 2: mod_base = OTHER; note = 2'-deoxy-2'-fluoroadenosine-3'-phosphate
  modified_base 3: mod_base = OTHER; note = 2'-O-methyladenosine-3'-phosphate
  modified_base 4: mod_base = OTHER; note = 2'-O-methyluridine-3'-phosphate
  modified_base 5: mod_base = OTHER; note = 2'-O-methylguanosine-3'-phosphate
  modified_base 6: mod_base = OTHER; note = 2'-deoxy-2'-fluorouridine-3'-phosphate
  modified_base 7: mod_base = OTHER; note = 2'-O-methyluridine-3'-phosphate
  modified_base 8: mod_base = OTHER; note = 2'-O-methyluridine-3'-phosphate
  modified_base 9: mod_base = OTHER; note = 2'-O-methyluridine-3'-phosphate
  modified_base 10: mod_base = OTHER; note = 2'-O-methylguanosine-3'-phosphate
  modified_base 11: mod_base = OTHER; note = 2'-O-methyladenosine-3'-phosphate
  modified_base 12: mod_base = OTHER; note = 2'-O-methyladenosine-3'-phosphate
  modified_base 13: mod_base = OTHER; note = 2'-O-methyladenosine-3'-phosphate
  modified_base 14: mod_base = OTHER; note = 2'-deoxy-2'-fluoroadenosine-3'-phosphate
  modified_base 15: mod_base = OTHER; note = 2'-O-methyladenosine-3'-phosphate
  modified_base 16: mod_base = OTHER; note = 2'-deoxy-2'-fluorouridine-3'-phosphate
  modified_base 17: mod_base = OTHER; note = 2'-O-methylguanosine-3'-phosphate
  modified_base 18: mod_base = OTHER; note = 2'-O-methylcytidine-3'-phosphate
  modified_base 19: mod_base = OTHER; note = 2'-O-methylcytidine-3'-phosphate
  modified_base 20: mod_base = OTHER; note = 2'-O-methylcytidine-3'-phosphate
  modified_base 21: mod_base = OTHER; note = 2'-O-methyladenosine-3'-phosphate
  modified_base 22: mod_base = OTHER; note = 2'-O-methyluridine-3'-phosphate
  modified_base 23: mod_base = OTHER; note = 2'-O-methyladenosine
taatgttttgaaaaatgcccata

SEQ ID NO: 5658 - RNA, 23 nt, synthetic construct
  source 1..23: mol_type = other RNA
  modified_base 1: mod_base = OTHER; note = 2'-O-methyluridine-3'-phosphate 5'-(E)-Vinylphosphonate
  modified_base 2: mod_base = OTHER; note = 2'-deoxy-2'-fluorocytidine-3'-phosphate
  modified_base 3: mod_base = OTHER; note = 2'-O-methyluridine-3'-phosphate
  modified_base 4: mod_base = OTHER; note = 2'-O-methyladenosine-3'-phosphate
  modified_base 5: mod_base = OTHER; note = 2'-O-methylguanosine-3'-phosphate
  modified_base 6: mod_base = OTHER; note = 2'-deoxy-2'-fluoroadenosine-3'-phosphate
  modified_base 7: mod_base = OTHER; note = 2'-O-methyluridine-3'-phosphate
  modified_base 8: mod_base = OTHER; note = 2'-O-methylguanosine-3'-phosphate
  modified_base 9: mod_base = OTHER; note = 2'-O-methyladenosine-3'-phosphate
  modified_base 10: mod_base = OTHER; note = 2'-O-methyladenosine-3'-phosphate
  modified_base 11: mod_base = OTHER; note = 2'-O-methyladenosine-3'-phosphate
  modified_base 12: mod_base = OTHER; note = 2'-O-methyladenosine-3'-phosphate
  modified_base 13: mod_base = OTHER; note = 2'-O-methyladenosine-3'-phosphate
  modified_base 14: mod_base = OTHER; note = 2'-deoxy-2'-fluoroadenosine-3'-phosphate
  modified_base 15: mod_base = OTHER; note = 2'-O-methyladenosine-3'-phosphate
  modified_base 16: mod_base = OTHER; note = 2'-deoxy-2'-fluoroguanosine-3'-phosphate
  modified_base 17: mod_base = OTHER; note = 2'-O-methyladenosine-3'-phosphate
  modified_base 18: mod_base = OTHER; note = 2'-O-methyladenosine-3'-phosphate
  modified_base 19: mod_base = OTHER; note = 2'-O-methyladenosine-3'-phosphate
  modified_base 20: mod_base = OTHER; note = 2'-O-methylguanosine-3'-phosphate
  modified_base 21: mod_base = OTHER; note = 2'-O-methyluridine-3'-phosphate
  modified_base 22: mod_base = OTHER; note = 2'-O-methylcytidine-3'-phosphate
  modified_base 23: mod_base = OTHER; note = 2'-O-methyladenosine
tctagatgaaaaaaagaaagtca

SEQ ID NO: 5659 - RNA, 23 nt, synthetic construct
  source 1..23: mol_type = other RNA
  modified_base 1: mod_base = OTHER; note = 2'-O-methyluridine-3'-phosphate 5'-(E)-Vinylphosphonate
  modified_base 2: mod_base = OTHER; note = 2'-deoxy-2'-fluoroguanosine-3'-phosphate
  modified_base 3: mod_base = OTHER; note = 2'-O-methylcytidine-3'-phosphate
  modified_base 4: mod_base = OTHER; note = 2'-O-methyluridine-3'-phosphate
  modified_base 5: mod_base = OTHER; note = 2'-O-methyladenosine-3'-phosphate
  modified_base 6: mod_base = OTHER; note = 2'-deoxy-2'-fluoroguanosine-3'-phosphate
  modified_base 7: mod_base = OTHER; note = 2'-O-methyladenosine-3'-phosphate
  modified_base 8: mod_base = OTHER; note = 2'-O-methyluridine-3'-phosphate
  modified_base 9: mod_base = OTHER; note = 2'-O-methylguanosine-3'-phosphate
  modified_base 10: mod_base = OTHER; note = 2'-O-methyladenosine-3'-phosphate
  modified_base 11: mod_base = OTHER; note = 2'-O-methyladenosine-3'-phosphate
  modified_base 12: mod_base = OTHER; note = 2'-O-methyladenosine-3'-phosphate
  modified_base 13: mod_base = OTHER; note = 2'-O-methyladenosine-3'-phosphate
  modified_base 14: mod_base = OTHER; note = 2'-deoxy-2'-fluoroadenosine-3'-phosphate
  modified_base 15: mod_base = OTHER; note = 2'-O-methyladenosine-3'-phosphate
  modified_base 16: mod_base = OTHER; note = 2'-deoxy-2'-fluoroadenosine-3'-phosphate
  modified_base 17: mod_base = OTHER; note = 2'-O-methylguanosine-3'-phosphate
  modified_base 18: mod_base = OTHER; note = 2'-O-methyladenosine-3'-phosphate
  modified_base 19: mod_base = OTHER; note = 2'-O-methyladenosine-3'-phosphate
  modified_base 20: mod_base = OTHER; note = 2'-O-methyladenosine-3'-phosphate
  modified_base 21: mod_base = OTHER; note = 2'-O-methylguanosine-3'-phosphate
  modified_base 22: mod_base = OTHER; note = 2'-O-methyluridine-3'-phosphate
  modified_base 23: mod_base = OTHER; note = 2'-O-methylcytidine
tgctagatgaaaaaaagaaagtc

SEQ ID NO: 5660 - RNA, 23 nt, synthetic construct
  source 1..23: mol_type = other RNA
  modified_base 1: mod_base = OTHER; note = 2'-O-methyluridine-3'-phosphate 5'-(E)-Vinylphosphonate
  modified_base 2: mod_base = OTHER; note = 2'-deoxy-2'-fluoroguanosine-3'-phosphate
  modified_base 3: mod_base = OTHER; note = 2'-O-methylguanosine-3'-phosphate
  modified_base 4: mod_base = OTHER; note = 2'-O-methylcytidine-3'-phosphate
  modified_base 5: mod_base = OTHER; note = 2'-O-methyluridine-3'-phosphate
  modified_base 6: mod_base = OTHER; note = 2'-deoxy-2'-fluoroadenosine-3'-phosphate
  modified_base 7: mod_base = OTHER; note = 2'-O-methylguanosine-3'-phosphate
  modified_base 8: mod_base = OTHER; note = 2'-O-methyladenosine-3'-phosphate
  modified_base 9: mod_base = OTHER; note = 2'-O-methyluridine-3'-phosphate
  modified_base 10: mod_base = OTHER; note = 2'-O-methylguanosine-3'-phosphate
  modified_base 11: mod_base = OTHER; note = 2'-O-methyladenosine-3'-phosphate
  modified_base 12: mod_base = OTHER; note = 2'-O-methyladenosine-3'-phosphate
  modified_base 13: mod_base = OTHER; note = 2'-O-methyladenosine-3'-phosphate
  modified_base 14: mod_base = OTHER; note = 2'-deoxy-2'-fluoroadenosine-3'-phosphate
  modified_base 15: mod_base = OTHER; note = 2'-O-methyladenosine-3'-phosphate
  modified_base 16: mod_base = OTHER; note = 2'-deoxy-2'-fluoroadenosine-3'-phosphate
  modified_base 17: mod_base = OTHER; note = 2'-O-methyladenosine-3'-phosphate
  modified_base 18: mod_base = OTHER; note = 2'-O-methylguanosine-3'-phosphate
  modified_base 19: mod_base = OTHER; note = 2'-O-methyladenosine-3'-phosphate
  modified_base 20: mod_base = OTHER; note = 2'-O-methyladenosine-3'-phosphate
  modified_base 21: mod_base = OTHER; note = 2'-O-methyladenosine-3'-phosphate
  modified_base 22: mod_base = OTHER; note = 2'-O-methylguanosine-3'-phosphate
  modified_base 23: mod_base = OTHER; note = 2'-O-methyluridine
tggctagatgaaaaaaagaaagt

SEQ ID NO: 5661 - RNA, 23 nt, synthetic construct
  source 1..23: mol_type = other RNA
  modified_base 1: mod_base = OTHER; note = 2'-O-methyluridine-3'-phosphate 5'-(E)-Vinylphosphonate
  modified_base 2: mod_base = OTHER; note = 2'-deoxy-2'-fluoroadenosine-3'-phosphate
  modified_base 3: mod_base = OTHER; note = 2'-O-methylguanosine-3'-phosphate
  modified_base 4: mod_base = OTHER; note = 2'-O-methylguanosine-3'-phosphate
  modified_base 5: mod_base = OTHER; note = 2'-O-methylcytidine-3'-phosphate
  modified_base 6: mod_base = OTHER; note = 2'-deoxy-2'-fluorouridine-3'-phosphate
  modified_base 7: mod_base = OTHER; note = 2'-O-methyladenosine-3'-phosphate
  modified_base 8: mod_base = OTHER; note = 2'-O-methylguanosine-3'-phosphate
  modified_base 9: mod_base = OTHER; note = 2'-O-methyladenosine-3'-phosphate
  modified_base 10: mod_base = OTHER; note = 2'-O-methyluridine-3'-phosphate
  modified_base 11: mod_base = OTHER; note = 2'-O-methylguanosine-3'-phosphate
  modified_base 12: mod_base = OTHER; note = 2'-O-methyladenosine-3'-phosphate
  modified_base 13: mod_base = OTHER; note = 2'-O-methyladenosine-3'-phosphate
  modified_base 14: mod_base = OTHER; note = 2'-deoxy-2'-fluoroadenosine-3'-phosphate
  modified_base 15: mod_base = OTHER; note = 2'-O-methyladenosine-3'-phosphate
  modified_base 16: mod_base = OTHER; note = 2'-deoxy-2'-fluoroadenosine-3'-phosphate
  modified_base 17: mod_base = OTHER; note = 2'-O-methyladenosine-3'-phosphate
  modified_base 18: mod_base = OTHER; note = 2'-O-methyladenosine-3'-phosphate
  modified_base 19: mod_base = OTHER; note = 2'-O-methylguanosine-3'-phosphate
  modified_base 20: mod_base = OTHER; note = 2'-O-methyladenosine-3'-phosphate
  modified_base 21: mod_base = OTHER; note = 2'-O-methyladenosine-3'-phosphate
  modified_base 22: mod_base = OTHER; note = 2'-O-methyladenosine-3'-phosphate
  modified_base 23: mod_base = OTHER; note = 2'-O-methylguanosine
taggctagatgaaaaaaagaaag

SEQ ID NO: 5662 - RNA, 23 nt, synthetic construct
  source 1..23: mol_type = other RNA
  modified_base 1: mod_base = OTHER; note = 2'-O-methyluridine-3'-phosphate 5'-(E)-Vinylphosphonate
  modified_base 2: mod_base = OTHER; note = 2'-deoxy-2'-fluoroadenosine-3'-phosphate
  modified_base 3: mod_base = OTHER; note = 2'-O-methyladenosine-3'-phosphate
  modified_base 4: mod_base = OTHER; note = 2'-O-methylguanosine-3'-phosphate
  modified_base 5: mod_base = OTHER; note = 2'-O-methylguanosine-3'-phosphate
  modified_base 6: mod_base = OTHER; note = 2'-deoxy-2'-fluorocytidine-3'-phosphate
  modified_base 7: mod_base = OTHER; note = 2'-O-methyluridine-3'-phosphate
  modified_base 8: mod_base = OTHER; note = 2'-O-methyladenosine-3'-phosphate
  modified_base 9: mod_base = OTHER; note = 2'-O-methylguanosine-3'-phosphate
  modified_base 10: mod_base = OTHER; note = 2'-O-methyladenosine-3'-phosphate
  modified_base 11: mod_base = OTHER; note = 2'-O-methyluridine-3'-phosphate
  modified_base 12: mod_base = OTHER; note = 2'-O-methylguanosine-3'-phosphate
  modified_base 13: mod_base = OTHER; note = 2'-O-methyladenosine-3'-phosphate
  modified_base 14: mod_base = OTHER; note = 2'-deoxy-2'-fluoroadenosine-3'-phosphate
  modified_base 15: mod_base = OTHER; note = 2'-O-methyladenosine-3'-phosphate
  modified_base 16: mod_base = OTHER; note = 2'-deoxy-2'-fluoroadenosine-3'-phosphate
  modified_base 17: mod_base = OTHER; note = 2'-O-methyladenosine-3'-phosphate
  modified_base 18: mod_base = OTHER; note = 2'-O-methyladenosine-3'-phosphate
  modified_base 19: mod_base = OTHER; note = 2'-O-methyladenosine-3'-phosphate
  modified_base 20: mod_base = OTHER; note = 2'-O-methylguanosine-3'-phosphate
  modified_base 21: mod_base = OTHER; note = 2'-O-methyladenosine-3'-phosphate
  modified_base 22: mod_base = OTHER; note = 2'-O-methyladenosine-3'-phosphate
  modified_base 23: mod_base = OTHER; note = 2'-O-methyladenosine
taaggctagatgaaaaaaagaaa

SEQ ID NO: 5663 - RNA, 23 nt, synthetic construct
  source 1..23: mol_type = other RNA
  modified_base 1: mod_base = OTHER; note = 2'-O-methyluridine-3'-phosphate 5'-(E)-Vinylphosphonate
  modified_base 2: mod_base = OTHER; note = 2'-deoxy-2'-fluorocytidine-3'-phosphate
  modified_base 3: mod_base = OTHER; note = 2'-O-methyladenosine-3'-phosphate
  modified_base 4: mod_base = OTHER; note = 2'-O-methyladenosine-3'-phosphate
  modified_base 5: mod_base = OTHER; note = 2'-O-methylguanosine-3'-phosphate
  modified_base 6: mod_base = OTHER; note = 2'-deoxy-2'-fluoroguanosine-3'-phosphate
  modified_base 7: mod_base = OTHER; note = 2'-O-methylcytidine-3'-phosphate
  modified_base 8: mod_base = OTHER; note = 2'-O-methyluridine-3'-phosphate
  modified_base 9: mod_base = OTHER; note = 2'-O-methyladenosine-3'-phosphate
  modified_base 10: mod_base = OTHER; note = 2'-O-methylguanosine-3'-phosphate
  modified_base 11: mod_base = OTHER; note = 2'-O-methyladenosine-3'-phosphate
  modified_base 12: mod_base = OTHER; note = 2'-O-methyluridine-3'-phosphate
  modified_base 13: mod_base = OTHER; note = 2'-O-methylguanosine-3'-phosphate
  modified_base 14: mod_base = OTHER; note = 2'-deoxy-2'-fluoroadenosine-3'-phosphate
  modified_base 15: mod_base = OTHER; note = 2'-O-methyladenosine-3'-phosphate
  modified_base 16: mod_base = OTHER; note = 2'-deoxy-2'-fluoroadenosine-3'-phosphate
  modified_base 17: mod_base = OTHER; note = 2'-O-methyladenosine-3'-phosphate
  modified_base 18: mod_base = OTHER; note = 2'-O-methyladenosine-3'-phosphate
  modified_base 19: mod_base = OTHER; note = 2'-O-methyladenosine-3'-phosphate
  modified_base 20: mod_base = OTHER; note = 2'-O-methyladenosine-3'-phosphate
  modified_base 21: mod_base = OTHER; note = 2'-O-methylguanosine-3'-phosphate
  modified_base 22: mod_base = OTHER; note = 2'-O-methyladenosine-3'-phosphate
  modified_base 23: mod_base = OTHER; note = 2'-O-methyladenosine
tcaaggctagatgaaaaaaagaa

SEQ ID NO: 5664 - RNA, 23 nt, synthetic construct
  source 1..23: mol_type = other RNA
  modified_base 1: mod_base = OTHER; note = 2'-O-methyluridine-3'-phosphate 5'-(E)-Vinylphosphonate
  modified_base 2: mod_base = OTHER; note = 2'-deoxy-2'-fluoroguanosine-3'-phosphate
  modified_base 3: mod_base = OTHER; note = 2'-O-methylcytidine-3'-phosphate
  modified_base 4: mod_base = OTHER; note = 2'-O-methyladenosine-3'-phosphate
  modified_base 5: mod_base = OTHER; note = 2'-O-methyladenosine-3'-phosphate
  modified_base 6: mod_base = OTHER; note = 2'-deoxy-2'-fluoroguanosine-3'-phosphate
  modified_base 7: mod_base = OTHER; note = 2'-O-methylguanosine-3'-phosphate
  modified_base 8: mod_base = OTHER; note = 2'-O-methylcytidine-3'-phosphate
  modified_base 9: mod_base = OTHER; note = 2'-O-methyluridine-3'-phosphate
  modified_base 10: mod_base = OTHER; note = 2'-O-methyladenosine-3'-phosphate
  modified_base 11: mod_base = OTHER; note = 2'-O-methylguanosine-3'-phosphate
  modified_base 12: mod_base = OTHER; note = 2'-O-methyladenosine-3'-phosphate
  modified_base 13: mod_base = OTHER; note = 2'-O-methyluridine-3'-phosphate
  modified_base 14: mod_base = OTHER; note = 2'-deoxy-2'-fluoroguanosine-3'-phosphate
  modified_base 15: mod_base = OTHER; note = 2'-O-methyladenosine-3'-phosphate
  modified_base 16: mod_base = OTHER; note = 2'-deoxy-2'-fluoroadenosine-3'-phosphate
  modified_base 17: mod_base = OTHER; note = 2'-O-methyladenosine-3'-phosphate
  modified_base 18: mod_base = OTHER; note = 2'-O-methyladenosine-3'-phosphate
  modified_base 19: mod_base = OTHER; note = 2'-O-methyladenosine-3'-phosphate
  modified_base 20: mod_base = OTHER; note = 2'-O-methyladenosine-3'-phosphate
  modified_base 21: mod_base = OTHER; note = 2'-O-methyladenosine-3'-phosphate
  modified_base 22: mod_base = OTHER; note = 2'-O-methylguanosine-3'-phosphate
  modified_base 23: mod_base = OTHER; note = 2'-O-methyladenosine
tgcaaggctagatgaaaaaaaga

SEQ ID NO: 5665 - RNA, 23 nt, synthetic construct
  source 1..23: mol_type = other RNA
  modified_base 1: mod_base = OTHER; note = 2'-O-methyluridine-3'-phosphate 5'-(E)-Vinylphosphonate
  modified_base 2: mod_base = OTHER; note = 2'-deoxy-2'-fluoroadenosine-3'-phosphate
  modified_base 3: mod_base = OTHER; note = 2'-O-methylguanosine-3'-phosphate
  modified_base 4: mod_base = OTHER; note = 2'-O-methylcytidine-3'-phosphate
  modified_base 5: mod_base = OTHER; note = 2'-O-methyladenosine-3'-phosphate
  modified_base 6: mod_base = OTHER; note = 2'-deoxy-2'-fluoroadenosine-3'-phosphate
  modified_base 7: mod_base = OTHER; note = 2'-O-methylguanosine-3'-phosphate
  modified_base 8: mod_base = OTHER; note = 2'-O-methylguanosine-3'-phosphate
  modified_base 9: mod_base = OTHER; note = 2'-O-methylcytidine-3'-phosphate
  modified_base 10: mod_base = OTHER; note = 2'-O-methyluridine-3'-phosphate
  modified_base 11: mod_base = OTHER; note = 2'-O-methyladenosine-3'-phosphate
  modified_base 12: mod_base = OTHER; note = 2'-O-methylguanosine-3'-phosphate
  modified_base 13: mod_base = OTHER; note = 2'-O-methyladenosine-3'-phosphate
  modified_base 14: mod_base = OTHER; note = 2'-deoxy-2'-fluorouridine-3'-phosphate
  modified_base 15: mod_base = OTHER; note = 2'-O-methylguanosine-3'-phosphate
  modified_base 16: mod_base = OTHER; note = 2'-deoxy-2'-fluoroadenosine-3'-phosphate
  modified_base 17: mod_base = OTHER; note = 2'-O-methyladenosine-3'-phosphate
  modified_base 18: mod_base = OTHER; note = 2'-O-methyladenosine-3'-phosphate
  modified_base 19: mod_base = OTHER; note = 2'-O-methyladenosine-3'-phosphate
  modified_base 20: mod_base = OTHER; note = 2'-O-methyladenosine-3'-phosphate
  modified_base 21: mod_base = OTHER; note = 2'-O-methyladenosine-3'-phosphate
  modified_base 22: mod_base = OTHER; note = 2'-O-methyladenosine-3'-phosphate
  modified_base 23: mod_base = OTHER; note = 2'-O-methylguanosine
tagcaaggctagatgaaaaaaag

SEQ ID NO: 5666 - RNA, 23 nt, synthetic construct
  source 1..23: mol_type = other RNA
  modified_base 1: mod_base = OTHER; note = 2'-O-methyluridine-3'-phosphate 5'-(E)-Vinylphosphonate
  modified_base 2: mod_base = OTHER; note = 2'-deoxy-2'-fluoroadenosine-3'-phosphate
  modified_base 3: mod_base = OTHER; note = 2'-O-methyladenosine-3'-phosphate
  modified_base 4: mod_base = OTHER; note = 2'-O-methylguanosine-3'-phosphate
  modified_base 5: mod_base = OTHER; note = 2'-O-methylcytidine-3'-phosphate
  modified_base 6: mod_base = OTHER; note = 2'-deoxy-2'-fluoroadenosine-3'-phosphate
  modified_base 7: mod_base = OTHER; note = 2'-O-methyladenosine-3'-phosphate
  modified_base 8: mod_base = OTHER; note = 2'-O-methylguanosine-3'-phosphate
  modified_base 9: mod_base = OTHER; note = 2'-O-methylguanosine-3'-phosphate
  modified_base 10: mod_base = OTHER; note = 2'-O-methylcytidine-3'-phosphate
  modified_base 11: mod_base = OTHER; note = 2'-O-methyluridine-3'-phosphate
  modified_base 12: mod_base = OTHER; note = 2'-O-methyladenosine-3'-phosphate
  modified_base 13: mod_base = OTHER; note = 2'-O-methylguanosine-3'-phosphate
  modified_base 14: mod_base = OTHER; note = 2'-deoxy-2'-fluoroadenosine-3'-phosphate
  modified_base 15: mod_base = OTHER; note = 2'-O-methyluridine-3'-phosphate
  modified_base 16: mod_base = OTHER; note = 2'-deoxy-2'-fluoroguanosine-3'-phosphate
  modified_base 17: mod_base = OTHER; note = 2'-O-methyladenosine-3'-phosphate
  modified_base 18: mod_base = OTHER; note = 2'-O-methyladenosine-3'-phosphate
  modified_base 19: mod_base = OTHER; note = 2'-O-methyladenosine-3'-phosphate
  modified_base 20: mod_base = OTHER; note = 2'-O-methyladenosine-3'-phosphate
  modified_base 21: mod_base = OTHER; note = 2'-O-methyladenosine-3'-phosphate
  modified_base 22: mod_base = OTHER; note = 2'-O-methyladenosine-3'-phosphate
  modified_base 23: mod_base = OTHER; note = 2'-O-methyladenosine
taagcaaggctagatgaaaaaaa

SEQ ID NO: 5667 - RNA, 23 nt, synthetic construct
  source 1..23: mol_type = other RNA
  modified_base 1: mod_base = OTHER; note = 2'-O-methyluridine-3'-phosphate 5'-(E)-Vinylphosphonate
  modified_base 2: mod_base = OTHER; note = 2'-deoxy-2'-fluoroadenosine-3'-phosphate
  modified_base 3: mod_base = OTHER; note = 2'-O-methyladenosine-3'-phosphate
  modified_base 4: mod_base = OTHER; note = 2'-O-methyladenosine-3'-phosphate
  modified_base 5: mod_base = OTHER; note = 2'-O-methylguanosine-3'-phosphate
  modified_base 6: mod_base = OTHER; note = 2'-deoxy-2'-fluorocytidine-3'-phosphate
  modified_base 7: mod_base = OTHER; note = 2'-O-methyladenosine-3'-phosphate
  modified_base 8: mod_base = OTHER; note = 2'-O-methyladenosine-3'-phosphate
  modified_base 9: mod_base = OTHER; note = 2'-O-methylguanosine-3'-phosphate
  modified_base 10: mod_base = OTHER; note = 2'-O-methylguanosine-3'-phosphate
  modified_base 11: mod_base = OTHER; note = 2'-O-methylcytidine-3'-phosphate
  modified_base 12: mod_base = OTHER; note = 2'-O-methyluridine-3'-phosphate
  modified_base 13: mod_base = OTHER; note = 2'-O-methyladenosine-3'-phosphate
  modified_base 14: mod_base = OTHER; note = 2'-deoxy-2'-fluoroguanosine-3'-phosphate
  modified_base 15: mod_base = OTHER; note = 2'-O-methyladenosine-3'-phosphate
  modified_base 16: mod_base = OTHER; note = 2'-deoxy-2'-fluorouridine-3'-phosphate
  modified_base 17: mod_base = OTHER; note = 2'-O-methylguanosine-3'-phosphate
  modified_base 18: mod_base = OTHER; note = 2'-O-methyladenosine-3'-phosphate
  modified_base 19: mod_base = OTHER; note = 2'-O-methyladenosine-3'-phosphate
  modified_base 20: mod_base = OTHER; note = 2'-O-methyladenosine-3'-phosphate
  modified_base 21: mod_base = OTHER; note = 2'-O-methyladenosine-3'-phosphate
  modified_base 22: mod_base = OTHER; note = 2'-O-methyladenosine-3'-phosphate
  modified_base 23: mod_base = OTHER; note = 2'-O-methyladenosine
taaagcaaggctagatgaaaaaa

SEQ ID NO: 5668 - RNA, 23 nt, synthetic construct
  source 1..23: mol_type = other RNA
  modified_base 1: mod_base = OTHER; note = 2'-O-methyluridine-3'-phosphate 5'-(E)-Vinylphosphonate
  modified_base 2: mod_base = OTHER; note = 2'-deoxy-2'-fluoroadenosine-3'-phosphate
  modified_base 3: mod_base = OTHER; note = 2'-O-methyluridine-3'-phosphate
  modified_base 4: mod_base = OTHER; note = 2'-O-methyladenosine-3'-phosphate
  modified_base 5: mod_base = OTHER; note = 2'-O-methyladenosine-3'-phosphate
  modified_base 6: mod_base = OTHER; note = 2'-deoxy-2'-fluoroadenosine-3'-phosphate
  modified_base 7: mod_base = OTHER; note = 2'-O-methylguanosine-3'-phosphate
  modified_base 8: mod_base = OTHER; note = 2'-O-methylcytidine-3'-phosphate
  modified_base 9: mod_base = OTHER; note = 2'-O-methyladenosine-3'-phosphate
  modified_base 10: mod_base = OTHER; note = 2'-O-methyladenosine-3'-phosphate
  modified_base 11: mod_base = OTHER; note = 2'-O-methylguanosine-3'-phosphate
  modified_base 12: mod_base = OTHER; note = 2'-O-methylguanosine-3'-phosphate
  modified_base 13: mod_base = OTHER; note = 2'-O-methylcytidine-3'-phosphate
  modified_base 14: mod_base = OTHER; note = 2'-deoxy-2'-fluorouridine-3'-phosphate
  modified_base 15: mod_base = OTHER; note = 2'-O-methyladenosine-3'-phosphate
  modified_base 16: mod_base = OTHER; note = 2'-deoxy-2'-fluoroguanosine-3'-phosphate
  modified_base 17: mod_base = OTHER; note = 2'-O-methyladenosine-3'-phosphate
  modified_base 18: mod_base = OTHER; note = 2'-O-methyluridine-3'-phosphate
  modified_base 19: mod_base = OTHER; note = 2'-O-methylguanosine-3'-phosphate
  modified_base 20: mod_base = OTHER; note = 2'-O-methyladenosine-3'-phosphate
  modified_base 21: mod_base = OTHER; note = 2'-O-methyladenosine-3'-phosphate
  modified_base 22: mod_base = OTHER; note = 2'-O-methyladenosine-3'-phosphate
  modified_base 23: mod_base = OTHER; note = 2'-O-methyladenosine
tataaagcaaggctagatgaaaa

SEQ ID NO: 5669 - RNA, 23 nt, synthetic construct
  source 1..23: mol_type = other RNA
  modified_base 1: mod_base = OTHER; note = 2'-O-methyluridine-3'-phosphate 5'-(E)-Vinylphosphonate
  modified_base 2: mod_base = OTHER; note = 2'-deoxy-2'-fluoroadenosine-3'-phosphate
  modified_base 3: mod_base = OTHER; note = 2'-O-methyladenosine-3'-phosphate
  modified_base 4: mod_base = OTHER; note = 2'-O-methyluridine-3'-phosphate
  modified_base 5: mod_base = OTHER; note = 2'-O-methylcytidine-3'-phosphate
  modified_base 6: mod_base = OTHER; note = 2'-deoxy-2'-fluorouridine-3'-phosphate
  modified_base 7: mod_base = OTHER; note = 2'-O-methylcytidine-3'-phosphate
  modified_base 8: mod_base = OTHER; note = 2'-O-methyluridine-3'-phosphate
  modified_base 9: mod_base = OTHER; note = 2'-O-methylguanosine-3'-phosphate
  modified_base 10: mod_base = OTHER; note = 2'-O-methyladenosine-3'-phosphate
  modified_base 11: mod_base = OTHER; note = 2'-O-methylguanosine-3'-phosphate
  modified_base 12: mod_base = OTHER; note = 2'-O-methyladenosine-3'-phosphate
  modified_base 13: mod_base = OTHER; note = 2'-O-methylguanosine-3'-phosphate
  modified_base 14: mod_base = OTHER; note = 2'-deoxy-2'-fluorouridine-3'-phosphate
  modified_base 15: mod_base = OTHER; note = 2'-O-methyladenosine-3'-phosphate
  modified_base 16: mod_base = OTHER; note = 2'-deoxy-2'-fluorocytidine-3'-phosphate
  modified_base 17: mod_base = OTHER; note = 2'-O-methyluridine-3'-phosphate
  modified_base 18: mod_base = OTHER; note = 2'-O-methyladenosine-3'-phosphate
  modified_base 19: mod_base = OTHER; note = 2'-O-methyladenosine-3'-phosphate
  modified_base 20: mod_base = OTHER; note = 2'-O-methylguanosine-3'-phosphate
  modified_base 21: mod_base = OTHER; note = 2'-O-methylguanosine-3'-phosphate
  modified_base 22: mod_base = OTHER; note = 2'-O-methylguanosine-3'-phosphate
  modified_base 23: mod_base = OTHER; note = 2'-O-methyladenosine
taatctctgagagtactaaggga

SEQ ID NO: 5670 - RNA, 23 nt, synthetic construct
  source 1..23: mol_type = other RNA
  modified_base 1: mod_base = OTHER; note = 2'-O-methyluridine-3'-phosphate 5'-(E)-Vinylphosphonate
  modified_base 2: mod_base = OTHER; note = 2'-deoxy-2'-fluorouridine-3'-phosphate
  modified_base 3: mod_base = OTHER; note = 2'-O-methyluridine-3'-phosphate
  modified_base 4: mod_base = OTHER; note = 2'-O-methyladenosine-3'-phosphate
  modified_base 5: mod_base = OTHER; note = 2'-O-methyluridine-3'-phosphate
  modified_base 6: mod_base = OTHER; note = 2'-deoxy-2'-fluoroadenosine-3'-phosphate
  modified_base 7: mod_base = OTHER; note = 2'-O-methyluridine-3'-phosphate
  modified_base 8: mod_base = OTHER; note = 2'-O-methyladenosine-3'-phosphate
  modified_base 9: mod_base = OTHER; note = 2'-O-methyladenosine-3'-phosphate
  modified_base 10: mod_base = OTHER; note = 2'-O-methyluridine-3'-phosphate
  modified_base 11: mod_base = OTHER; note = 2'-O-methylcytidine-3'-phosphate
  modified_base 12: mod_base = OTHER; note = 2'-O-methyluridine-3'-phosphate
  modified_base 13: mod_base = OTHER; note = 2'-O-methylcytidine-3'-phosphate
  modified_base 14: mod_base = OTHER; note = 2'-deoxy-2'-fluorouridine-3'-phosphate
  modified_base 15: mod_base = OTHER; note = 2'-O-methylguanosine-3'-phosphate
  modified_base 16: mod_base = OTHER; note = 2'-deoxy-2'-fluoroadenosine-3'-phosphate
  modified_base 17: mod_base = OTHER; note = 2'-O-methylguanosine-3'-phosphate
  modified_base 18: mod_base = OTHER; note = 2'-O-methyladenosine-3'-phosphate
  modified_base 19: mod_base = OTHER; note = 2'-O-methylguanosine-3'-phosphate
  modified_base 20: mod_base = OTHER; note = 2'-O-methyluridine-3'-phosphate
  modified_base 21: mod_base = OTHER; note = 2'-O-methyladenosine-3'-phosphate
  modified_base 22: mod_base = OTHER; note = 2'-O-methylcytidine-3'-phosphate
  modified_base 23: mod_base = OTHER; note = 2'-O-methyluridine
tttatataatctctgagagtact

SEQ ID NO: 5671 - RNA, 23 nt, synthetic construct
  source 1..23: mol_type = other RNA
  modified_base 1: mod_base = OTHER; note = 2'-O-methyluridine-3'-phosphate 5'-(E)-Vinylphosphonate
  modified_base 2: mod_base = OTHER; note = 2'-deoxy-2'-fluorouridine-3'-phosphate
  modified_base 3: mod_base = OTHER; note = 2'-O-methyluridine-3'-phosphate
  modified_base 4: mod_base = OTHER; note = 2'-O-methyluridine-3'-phosphate
  modified_base 5: mod_base = OTHER; note = 2'-O-methyladenosine-3'-phosphate
  modified_base 6: mod_base = OTHER; note = 2'-deoxy-2'-fluorouridine-3'-phosphate
  modified_base 7: mod_base = OTHER; note = 2'-O-methyladenosine-3'-phosphate
  modified_base 8: mod_base = OTHER; note = 2'-O-methyluridine-3'-phosphate
  modified_base 9: mod_base = OTHER; note = 2'-O-methyladenosine-3'-phosphate
  modified_base 10: mod_base = OTHER; note = 2'-O-methyladenosine-3'-phosphate
  modified_base 11: mod_base = OTHER; note = 2'-O-methyluridine-3'-phosphate
  modified_base 12: mod_base = OTHER; note = 2'-O-methylcytidine-3'-phosphate
  modified_base 13: mod_base = OTHER; note = 2'-O-methyluridine-3'-phosphate
  modified_base 14: mod_base = OTHER; note = 2'-deoxy-2'-fluorocytidine-3'-phosphate
  modified_base 15: mod_base = OTHER; note = 2'-O-methyluridine-3'-phosphate
  modified_base 16: mod_base = OTHER; note = 2'-deoxy-2'-fluoroguanosine-3'-phosphate
  modified_base 17: mod_base = OTHER; note = 2'-O-methyladenosine-3'-phosphate
  modified_base 18: mod_base = OTHER; note = 2'-O-methylguanosine-3'-phosphate
  modified_base 19: mod_base = OTHER; note = 2'-O-methyladenosine-3'-phosphate
  modified_base 20: mod_base = OTHER; note = 2'-O-methylguanosine-3'-phosphate
  modified_base 21: mod_base = OTHER; note = 2'-O-methyluridine-3'-phosphate
  modified_base 22: mod_base = OTHER; note = 2'-O-methyladenosine-3'-phosphate
  modified_base 23: mod_base = OTHER; note = 2'-O-methylcytidine
ttttatataatctctgagagtac

SEQ ID NO: 5672 - RNA, 23 nt, synthetic construct
  source 1..23: mol_type = other RNA
  modified_base 1: mod_base = OTHER; note = 2'-O-methyluridine-3'-phosphate 5'-(E)-Vinylphosphonate
  modified_base 2: mod_base = OTHER; note = 2'-deoxy-2'-fluorouridine-3'-phosphate
  modified_base 3: mod_base = OTHER; note = 2'-O-methyladenosine-3'-phosphate
  modified_base 4: mod_base = OTHER; note = 2'-O-methyladenosine-3'-phosphate
  modified_base 5: mod_base = OTHER; note = 2'-O-methylguanosine-3'-phosphate
  modified_base 6: mod_base = OTHER; note = 2'-deoxy-2'-fluoroadenosine-3'-phosphate
  modified_base 7: mod_base = OTHER; note = 2'-O-methylguanosine-3'-phosphate
  modified_base 8: mod_base = OTHER; note = 2'-O-methyluridine-3'-phosphate
  modified_base 9: mod_base = OTHER; note = 2'-O-methyluridine-3'-phosphate
  modified_base 10: mod_base = OTHER; note = 2'-O-methylcytidine-3'-phosphate
  modified_base 11: mod_base = OTHER; note = 2'-O-methyluridine-3'-phosphate
  modified_base 12: mod_base = OTHER; note = 2'-O-methylguanosine-3'-phosphate
  modified_base 13: mod_base = OTHER; note = 2'-O-methylcytidine-3'-phosphate
  modified_base 14: mod_base = OTHER; note = 2'-deoxy-2'-fluorouridine-3'-phosphate
  modified_base 15: mod_base = OTHER; note = 2'-O-methyladenosine-3'-phosphate
  modified_base 16: mod_base = OTHER; note = 2'-deoxy-2'-fluoroguanosine-3'-phosphate
  modified_base 17: mod_base = OTHER; note = 2'-O-methyluridine-3'-phosphate
  modified_base 18: mod_base = OTHER; note = 2'-O-methyladenosine-3'-phosphate
  modified_base 19: mod_base = OTHER; note = 2'-O-methyladenosine-3'-phosphate
  modified_base 20: mod_base = OTHER; note = 2'-O-methylcytidine-3'-phosphate
  modified_base 21: mod_base = OTHER; note = 2'-O-methyluridine-3'-phosphate
  modified_base 22: mod_base = OTHER; note = 2'-O-methyladenosine-3'-phosphate
  modified_base 23: mod_base = OTHER; note = 2'-O-methylguanosine
ttaagagttctgctagtaactag

SEQ ID NO: 5673 - RNA, 23 nt, synthetic construct
  source 1..23: mol_type = other RNA
  modified_base 1: mod_base = OTHER; note = 2'-O-methyluridine-3'-phosphate 5'-(E)-Vinylphosphonate
  modified_base 2: mod_base = OTHER; note = 2'-deoxy-2'-fluorouridine-3'-phosphate
  modified_base 3: mod_base = OTHER; note = 2'-O-methyladenosine-3'-phosphate
  modified_base 4: mod_base = OTHER; note = 2'-O-methyluridine-3'-phosphate
  modified_base 5: mod_base = OTHER; note = 2'-O-methylguanosine-3'-phosphate
  modified_base 6: mod_base = OTHER; note = 2'-deoxy-2'-fluoroguanosine-3'-phosphate
  modified_base 7: mod_base = OTHER; note = 2'-O-methylcytidine-3'-phosphate
  modified_base 8: mod_base = OTHER; note = 2'-O-methyladenosine-3'-phosphate
  modified_base 9: mod_base = OTHER; note = 2'-O-methylguanosine-3'-phosphate
  modified_base 10: mod_base = OTHER; note = 2'-O-methylguanosine-3'-phosphate
  modified_base 11: mod_base = OTHER; note = 2'-O-methylguanosine-3'-phosphate
  modified_base 12: mod_base = OTHER; note = 2'-O-methyladenosine-3'-phosphate
  modified_base 13: mod_base = OTHER; note = 2'-O-methyladenosine-3'-phosphate
  modified_base 14: mod_base = OTHER; note = 2'-deoxy-2'-fluorocytidine-3'-phosphate
  modified_base 15: mod_base = OTHER; note = 2'-O-methyladenosine-3'-phosphate
  modified_base 16: mod_base = OTHER; note = 2'-deoxy-2'-fluoroguanosine-3'-phosphate
  modified_base 17: mod_base = OTHER; note = 2'-O-methyluridine-3'-phosphate
  modified_base 18: mod_base = OTHER; note = 2'-O-methylguanosine-3'-phosphate
  modified_base 19: mod_base = OTHER; note = 2'-O-methylcytidine-3'-phosphate
  modified_base 20: mod_base = OTHER; note = 2'-O-methyluridine-3'-phosphate
  modified_base 21: mod_base = OTHER; note = 2'-O-methylguanosine-3'-phosphate
  modified_base 22: mod_base = OTHER; note = 2'-O-methylguanosine-3'-phosphate
  modified_base 23: mod_base = OTHER; note = 2'-O-methylguanosine
ttatggcagggaacagtgctggg

SEQ ID NO: 5674 - RNA, 23 nt, synthetic construct
  source 1..23: mol_type = other RNA
  modified_base 1: mod_base = OTHER; note = 2'-O-methyluridine-3'-phosphate 5'-(E)-Vinylphosphonate
  modified_base 2: mod_base = OTHER; note = 2'-deoxy-2'-fluoroadenosine-3'-phosphate
  modified_base 3: mod_base = OTHER; note = 2'-O-methyluridine-3'-phosphate
  modified_base 4: mod_base = OTHER; note = 2'-O-methyladenosine-3'-phosphate
  modified_base 5: mod_base = OTHER; note = 2'-O-methyluridine-3'-phosphate
  modified_base 6: mod_base = OTHER; note = 2'-deoxy-2'-fluoroguanosine-3'-phosphate
  modified_base 7: mod_base = OTHER; note = 2'-O-methylguanosine-3'-phosphate
  modified_base 8: mod_base = OTHER; note = 2'-O-methylcytidine-3'-phosphate
  modified_base 9: mod_base = OTHER; note = 2'-O-methyladenosine-3'-phosphate
  modified_base 10: mod_base = OTHER; note = 2'-O-methylguanosine-3'-phosphate
  modified_base 11: mod_base = OTHER; note = 2'-O-methylguanosine-3'-phosphate
  modified_base 12: mod_base = OTHER; note = 2'-O-methylguanosine-3'-phosphate
  modified_base 13: mod_base = OTHER; note = 2'-O-methyladenosine-3'-phosphate
  modified_base 14: mod_base = OTHER; note = 2'-deoxy-2'-fluoroadenosine-3'-phosphate
  modified_base 15: mod_base = OTHER; note = 2'-O-methylcytidine-3'-phosphate
  modified_base 16: mod_base = OTHER; note = 2'-deoxy-2'-fluoroadenosine-3'-phosphate
  modified_base 17: mod_base = OTHER; note = 2'-O-methylguanosine-3'-phosphate
  modified_base 18: mod_base = OTHER; note = 2'-O-methyluridine-3'-phosphate
  modified_base 19: mod_base = OTHER; note = 2'-O-methylguanosine-3'-phosphate
  modified_base 20: mod_base = OTHER; note = 2'-O-methylcytidine-3'-phosphate
  modified_base 21: mod_base = OTHER; note = 2'-O-methyluridine-3'-phosphate
  modified_base 22: mod_base = OTHER; note = 2'-O-methylguanosine-3'-phosphate
  modified_base 23: mod_base = OTHER; note = 2'-O-methylguanosine
tatatggcagggaacagtgctgg

SEQ ID NO: 5675 - RNA, 23 nt, synthetic construct
  source 1..23: mol_type = other RNA
  modified_base 1: mod_base = OTHER; note = 2'-O-methyluridine-3'-phosphate 5'-(E)-Vinylphosphonate
  modified_base 2: mod_base = OTHER; note = 2'-deoxy-2'-fluoroguanosine-3'-phosphate
  modified_base 3: mod_base = OTHER; note = 2'-O-methyladenosine-3'-phosphate
  modified_base 4: mod_base = OTHER; note = 2'-O-methyluridine-3'-phosphate
  modified_base 5: mod_base = OTHER; note = 2'-O-methyladenosine-3'-phosphate
  modified_base 6: mod_base = OTHER; note = 2'-deoxy-2'-fluorouridine-3'-phosphate
  modified_base 7: mod_base = OTHER; note = 2'-O-methylguanosine-3'-phosphate
  modified_base 8: mod_base = OTHER; note = 2'-O-methylguanosine-3'-phosphate
  modified_base 9: mod_base = OTHER; note = 2'-O-methylcytidine-3'-phosphate
  modified_base 10: mod_base = OTHER; note = 2'-O-methyladenosine-3'-phosphate
  modified_base 11: mod_base = OTHER; note = 2'-O-methylguanosine-3'-phosphate
  modified_base 12: mod_base = OTHER; note = 2'-O-methylguanosine-3'-phosphate
  modified_base 13: mod_base = OTHER; note = 2'-O-methylguanosine-3'-phosphate
  modified_base 14: mod_base = OTHER; note = 2'-deoxy-2'-fluoroadenosine-3'-phosphate
  modified_base 15: mod_base = OTHER; note = 2'-O-methyladenosine-3'-phosphate
  modified_base 16: mod_base = OTHER; note = 2'-deoxy-2'-fluorocytidine-3'-phosphate
  modified_base 17: mod_base = OTHER; note = 2'-O-methyladenosine-3'-phosphate
  modified_base 18: mod_base = OTHER; note = 2'-O-methylguanosine-3'-phosphate
  modified_base 19: mod_base = OTHER; note = 2'-O-methyluridine-3'-phosphate
  modified_base 20: mod_base = OTHER; note = 2'-O-methylguanosine-3'-phosphate
  modified_base 21: mod_base = OTHER; note = 2'-O-methylcytidine-3'-phosphate
  modified_base 22: mod_base = OTHER; note = 2'-O-methyluridine-3'-phosphate
  modified_base 23: mod_base = OTHER; note = 2'-O-methylguanosine
tgatatggcagggaacagtgctg

SEQ ID NO: 5676 - RNA, 23 nt, synthetic construct
  source 1..23: mol_type = other RNA
  modified_base 1: mod_base = OTHER; note = 2'-O-methyluridine-3'-phosphate 5'-(E)-Vinylphosphonate
  modified_base 2: mod_base = OTHER; note = 2'-deoxy-2'-fluoroguanosine-3'-phosphate
  modified_base 3: mod_base = OTHER; note = 2'-O-methylguanosine-3'-phosphate
  modified_base 4: mod_base = OTHER; note = 2'-O-methyladenosine-3'-phosphate
  modified_base 5: mod_base = OTHER; note = 2'-O-methyluridine-3'-phosphate
  modified_base 6: mod_base = OTHER; note = 2'-deoxy-2'-fluoroadenosine-3'-phosphate
  modified_base 7: mod_base = OTHER; note = 2'-O-methyluridine-3'-phosphate
  modified_base 8: mod_base = OTHER; note = 2'-O-methylguanosine-3'-phosphate
  modified_base 9: mod_base = OTHER; note = 2'-O-methylguanosine-3'-phosphate
  modified_base 10: mod_base = OTHER; note = 2'-O-methylcytidine-3'-phosphate
  modified_base 11: mod_base = OTHER; note = 2'-O-methyladenosine-3'-phosphate
  modified_base 12: mod_base = OTHER; note = 2'-O-methylguanosine-3'-phosphate
  modified_base 13: mod_base = OTHER; note = 2'-O-methylguanosine-3'-phosphate
  modified_base 14: mod_base = OTHER; note = 2'-deoxy-2'-fluoroguanosine-3'-phosphate
  modified_base 15: mod_base = OTHER; note = 2'-O-methyladenosine-3'-phosphate
  modified_base 16: mod_base = OTHER; note = 2'-deoxy-2'-fluoroadenosine-3'-phosphate
  modified_base 17: mod_base = OTHER; note = 2'-O-methylcytidine-3'-phosphate
  modified_base 18: mod_base = OTHER; note = 2'-O-methyladenosine-3'-phosphate
  modified_base 19: mod_base = OTHER; note = 2'-O-methylguanosine-3'-phosphate
  modified_base 20: mod_base = OTHER; note = 2'-O-methyluridine-3'-phosphate
  modified_base 21: mod_base = OTHER; note = 2'-O-methylguanosine-3'-phosphate
  modified_base 22: mod_base = OTHER; note = 2'-O-methylcytidine-3'-phosphate
  modified_base 23: mod_base = OTHER; note = 2'-O-methyluridine
tggatatggcagggaacagtgct

SEQ ID NO: 5677 - RNA, 23 nt, synthetic construct
  source 1..23: mol_type = other RNA
  modified_base 1: mod_base = OTHER; note = 2'-O-methyluridine-3'-phosphate 5'-(E)-Vinylphosphonate
  modified_base 2: mod_base = OTHER; note = 2'-deoxy-2'-fluorouridine-3'-phosphate
  modified_base 3: mod_base = OTHER; note = 2'-O-methyluridine-3'-phosphate
  modified_base 4: mod_base = OTHER; note = 2'-O-methyluridine-3'-phosphate
  modified_base 5: mod_base = OTHER; note = 2'-O-methyluridine-3'-phosphate
  modified_base 6: mod_base = OTHER; note = 2'-deoxy-2'-fluorouridine-3'-phosphate
  modified_base 7: mod_base = OTHER; note = 2'-O-methyladenosine-3'-phosphate
  modified_base 8: mod_base = OTHER; note = 2'-O-methyladenosine-3'-phosphate
  modified_base 9: mod_base = OTHER; note = 2'-O-methyluridine-3'-phosphate
  modified_base 10: mod_base = OTHER; note = 2'-O-methylcytidine-3'-phosphate
  modified_base 11: mod_base = OTHER; note = 2'-O-methyladenosine-3'-phosphate
  modified_base 12: mod_base = OTHER; note = 2'-O-methylguanosine-3'-phosphate
  modified_base 13: mod_base = OTHER; note = 2'-O-methyluridine-3'-phosphate
  modified_base 14: mod_base = OTHER; note = 2'-deoxy-2'-fluoroadenosine-3'-phosphate
  modified_base 15: mod_base = OTHER; note = 2'-O-methyladenosine-3'-phosphate
  modified_base 16: mod_base = OTHER; note = 2'-deoxy-2'-fluoroadenosine-3'-phosphate
  modified_base 17: mod_base = OTHER; note = 2'-O-methyladenosine-3'-phosphate
  modified_base 18: mod_base = OTHER; note = 2'-O-methylguanosine-3'-phosphate
  modified_base 19: mod_base = OTHER; note = 2'-O-methyluridine-3'-phosphate
  modified_base 20: mod_base = OTHER; note = 2'-O-methyluridine-3'-phosphate
  modified_base 21: mod_base = OTHER; note = 2'-O-methylguanosine-3'-phosphate
  modified_base 22: mod_base = OTHER; note = 2'-O-methylguanosine-3'-phosphate
  modified_base 23: mod_base = OTHER; note = 2'-O-methylguanosine
ttttttaatcagtaaaagttggg

SEQ ID NO: 5678 - RNA, 23 nt, synthetic construct
  source 1..23: mol_type = other RNA
  modified_base 1: mod_base = OTHER; note = 2'-O-methyluridine-3'-phosphate 5'-(E)-Vinylphosphonate
  modified_base 2: mod_base = OTHER; note = 2'-deoxy-2'-fluoroadenosine-3'-phosphate
  modified_base 3: mod_base = OTHER; note = 2'-O-methyluridine-3'-phosphate
  modified_base 4: mod_base = OTHER; note = 2'-O-methylcytidine-3'-phosphate
  modified_base 5: mod_base = OTHER; note = 2'-O-methyladenosine-3'-phosphate
  modified_base 6: mod_base = OTHER; note = 2'-deoxy-2'-fluorouridine-3'-phosphate
  modified_base 7: mod_base = OTHER; note = 2'-O-methyluridine-3'-phosphate
  modified_base 8: mod_base = OTHER; note = 2'-O-methylguanosine-3'-phosphate
  modified_base 9: mod_base = OTHER; note = 2'-O-methyladenosine-3'-phosphate
  modified_base 10: mod_base = OTHER; note = 2'-O-methyladenosine-3'-phosphate
  modified_base 11: mod_base = OTHER; note = 2'-O-methyluridine-3'-phosphate
  modified_base 12: mod_base = OTHER; note = 2'-O-methylguanosine-3'-phosphate
  modified_base 13: mod_base = OTHER; note = 2'-O-methylguanosine-3'-phosphate
  modified_base 14: mod_base = OTHER; note = 2'-deoxy-2'-fluorocytidine-3'-phosphate
  modified_base 15: mod_base = OTHER; note = 2'-O-methyladenosine-3'-phosphate
  modified_base 16: mod_base = OTHER; note = 2'-deoxy-2'-fluorocytidine-3'-phosphate
  modified_base 17: mod_base = OTHER; note = 2'-O-methyladenosine-3'-phosphate
  modified_base 18: mod_base = OTHER; note = 2'-O-methyluridine-3'-phosphate
  modified_base 19: mod_base = OTHER; note = 2'-O-methyluridine-3'-phosphate
  modified_base 20: mod_base = OTHER; note = 2'-O-methyladenosine-3'-phosphate
  modified_base 21: mod_base = OTHER; note = 2'-O-methylcytidine-3'-phosphate
  modified_base 22: mod_base = OTHER; note = 2'-O-methylguanosine-3'-phosphate
  modified_base 23: mod_base = OTHER; note = 2'-O-methyluridine
tatcattgaatggcacattacgt

SEQ ID NO: 5679 - RNA, 23 nt, synthetic construct
  source 1..23: mol_type = other RNA
  modified_base 1: mod_base = OTHER; note = 2'-O-methyluridine-3'-phosphate 5'-(E)-Vinylphosphonate
  modified_base 2: mod_base = OTHER; note = 2'-deoxy-2'-fluoroadenosine-3'-phosphate
  modified_base 3: mod_base = OTHER; note = 2'-O-methyladenosine-3'-phosphate
  modified_base 4: mod_base = OTHER; note = 2'-O-methyladenosine-3'-phosphate
  modified_base 5: mod_base = OTHER; note = 2'-O-methylguanosine-3'-phosphate
  modified_base 6: mod_base = OTHER; note = 2'-deoxy-2'-fluorouridine-3'-phosphate
  modified_base 7: mod_base = OTHER; note = 2'-O-methylguanosine-3'-phosphate
  modified_base 8: mod_base = OTHER; note = 2'-O-methylguanosine-3'-phosphate
  modified_base 9: mod_base = OTHER; note = 2'-O-methylguanosine-3'-phosphate
  modified_base 10: mod_base = OTHER; note = 2'-O-methyladenosine-3'-phosphate
  modified_base 11: mod_base = OTHER; note = 2'-O-methyluridine-3'-phosphate
  modified_base 12: mod_base = OTHER; note = 2'-O-methyluridine-3'-phosphate
  modified_base 13: mod_base = OTHER; note = 2'-O-methyluridine-3'-phosphate
  modified_base 14: mod_base = OTHER; note = 2'-deoxy-2'-fluorouridine-3'-phosphate
  modified_base 15: mod_base = OTHER; note = 2'-O-methyladenosine-3'-phosphate
  modified_base 16: mod_base = OTHER; note = 2'-deoxy-2'-fluorouridine-3'-phosphate
  modified_base 17: mod_base = OTHER; note = 2'-O-methylcytidine-3'-phosphate
  modified_base 18: mod_base = OTHER; note = 2'-O-methyladenosine-3'-phosphate
  modified_base 19: mod_base = OTHER; note = 2'-O-methyluridine-3'-phosphate
  modified_base 20: mod_base = OTHER; note = 2'-O-methylcytidine-3'-phosphate
  modified_base 21: mod_base = OTHER; note = 2'-O-methyladenosine-3'-phosphate
  modified_base 22: mod_base = OTHER; note = 2'-O-methyluridine-3'-phosphate
  modified_base 23: mod_base = OTHER; note = 2'-O-methylcytidine
taaagtgggattttatcatcatc

SEQ ID NO: 5680 - RNA, 23 nt, synthetic construct
  source 1..23: mol_type = other RNA
  modified_base 1: mod_base = OTHER; note = 2'-O-methyluridine-3'-phosphate 5'-(E)-Vinylphosphonate
  modified_base 2: mod_base = OTHER; note = 2'-deoxy-2'-fluoroadenosine-3'-phosphate
  modified_base 3: mod_base = OTHER; note = 2'-O-methyladenosine-3'-phosphate
  modified_base 4: mod_base = OTHER; note = 2'-O-methyladenosine-3'-phosphate
  modified_base 5: mod_base = OTHER; note = 2'-O-methyladenosine-3'-phosphate
  modified_base 6: mod_base = OTHER; note = 2'-deoxy-2'-fluoroguanosine-3'-phosphate
  modified_base 7: mod_base = OTHER; note = 2'-O-methyluridine-3'-phosphate
  modified_base 8: mod_base = OTHER; note = 2'-O-methylguanosine-3'-phosphate
  modified_base 9: mod_base = OTHER; note = 2'-O-methylguanosine-3'-phosphate
  modified_base 10: mod_base = OTHER; note = 2'-O-methylguanosine-3'-phosphate
  modified_base 11: mod_base = OTHER; note = 2'-O-methyladenosine-3'-phosphate
  modified_base 12: mod_base = OTHER; note = 2'-O-methyluridine-3'-phosphate
  modified_base 13: mod_base = OTHER; note = 2'-O-methyluridine-3'-phosphate
  modified_base 14: mod_base = OTHER; note = 2'-deoxy-2'-fluorouridine-3'-phosphate
  modified_base 15: mod_base = OTHER; note = 2'-O-methyluridine-3'-phosphate
  modified_base 16: mod_base = OTHER; note = 2'-deoxy-2'-fluoroadenosine-3'-phosphate
  modified_base 17: mod_base = OTHER; note = 2'-O-methyluridine-3'-phosphate
  modified_base 18: mod_base = OTHER; note = 2'-O-methylcytidine-3'-phosphate
  modified_base 19: mod_base = OTHER; note = 2'-O-methyladenosine-3'-phosphate
  modified_base 20: mod_base = OTHER; note = 2'-O-methyluridine-3'-phosphate
  modified_base 21: mod_base = OTHER; note = 2'-O-methylcytidine-3'-phosphate
  modified_base 22: mod_base = OTHER; note = 2'-O-methyladenosine-3'-phosphate
  modified_base 23: mod_base = OTHER; note = 2'-O-methyluridine
taaaagtgggattttatcatcat

SEQ ID NO: 5681 - RNA, 23 nt, synthetic construct
  source 1..23: mol_type = other RNA
  modified_base 1: mod_base = OTHER; note = 2'-O-methyluridine-3'-phosphate 5'-(E)-Vinylphosphonate
  modified_base 2: mod_base = OTHER; note = 2'-deoxy-2'-fluoroadenosine-3'-phosphate
  modified_base 3: mod_base = OTHER; note = 2'-O-methylguanosine-3'-phosphate
  modified_base 4: mod_base = OTHER; note = 2'-O-methyladenosine-3'-phosphate
  modified_base 5: mod_base = OTHER; note = 2'-O-methyladenosine-3'-phosphate
  modified_base 6: mod_base = OTHER; note = 2'-deoxy-2'-fluoroadenosine-3'-phosphate
  modified_base 7: mod_base = OTHER; note = 2'-O-methylcytidine-3'-phosphate
  modified_base 8: mod_base = OTHER; note = 2'-O-methylcytidine-3'-phosphate
  modified_base 9: mod_base = OTHER; note = 2'-O-methylcytidine-3'-phosphate
  modified_base 10: mod_base = OTHER; note = 2'-O-methyladenosine-3'-phosphate
  modified_base 11: mod_base = OTHER; note = 2'-O-methyladenosine-3'-phosphate
  modified_base 12: mod_base = OTHER; note = 2'-O-methyladenosine-3'-phosphate
  modified_base 13: mod_base = OTHER; note = 2'-O-methylguanosine-3'-phosphate
  modified_base 14: mod_base = OTHER; note = 2'-deoxy-2'-fluoroadenosine-3'-phosphate
  modified_base 15: mod_base = OTHER; note = 2'-O-methyladenosine-3'-phosphate
  modified_base 16: mod_base = OTHER; note = 2'-deoxy-2'-fluoroadenosine-3'-phosphate
  modified_base 17: mod_base = OTHER; note = 2'-O-methyladenosine-3'-phosphate
  modified_base 18: mod_base = OTHER; note = 2'-O-methylguanosine-3'-phosphate
  modified_base 19: mod_base = OTHER; note = 2'-O-methyluridine-3'-phosphate
  modified_base 20: mod_base = OTHER; note = 2'-O-methylguanosine-3'-phosphate
  modified_base 21: mod_base = OTHER; note = 2'-O-methylguanosine-3'-phosphate
  modified_base 22: mod_base = OTHER; note = 2'-O-methylguanosine-3'-phosphate
  modified_base 23: mod_base = OTHER; note = 2'-O-methyladenosine
tagaaacccaaagaaaagtggga

SEQ ID NO: 5682 - RNA, 23 nt, synthetic construct
  source 1..23: mol_type = other RNA
  modified_base 1: mod_base = OTHER; note = 2'-O-methyluridine-3'-phosphate 5'-(E)-Vinylphosphonate
  modified_base 2: mod_base = OTHER; note = 2'-deoxy-2'-fluorouridine-3'-phosphate
  modified_base 3: mod_base = OTHER; note = 2'-O-methyladenosine-3'-phosphate
  modified_base 4: mod_base = OTHER; note = 2'-O-methylguanosine-3'-phosphate
  modified_base 5: mod_base = OTHER; note = 2'-O-methyladenosine-3'-phosphate
  modified_base 6: mod_base = OTHER; note = 2'-deoxy-2'-fluoroadenosine-3'-phosphate
  modified_base 7: mod_base = OTHER; note = 2'-O-methyladenosine-3'-phosphate
  modified_base 8: mod_base = OTHER; note = 2'-O-methylcytidine-3'-phosphate
  modified_base 9: mod_base = OTHER; note = 2'-O-methylcytidine-3'-phosphate
  modified_base 10: mod_base = OTHER; note = 2'-O-methylcytidine-3'-phosphate
  modified_base 11: mod_base = OTHER; note = 2'-O-methyladenosine-3'-phosphate
  modified_base 12: mod_base = OTHER; note = 2'-O-methyladenosine-3'-phosphate
  modified_base 13: mod_base = OTHER; note = 2'-O-methyladenosine-3'-phosphate
  modified_base 14: mod_base = OTHER; note = 2'-deoxy-2'-fluoroguanosine-3'-phosphate
  modified_base 15: mod_base = OTHER; note = 2'-O-methyladenosine-3'-phosphate
  modified_base 16: mod_base = OTHER; note = 2'-deoxy-2'-fluoroadenosine-3'-phosphate
  modified_base 17: mod_base = OTHER; note = 2'-O-methyladenosine-3'-phosphate
  modified_base 18: mod_base = OTHER; note = 2'-O-methyladenosine-3'-phosphate
  modified_base 19: mod_base = OTHER; note = 2'-O-methylguanosine-3'-phosphate
  modified_base 20: mod_base = OTHER; note = 2'-O-methyluridine-3'-phosphate
  modified_base 21: mod_base = OTHER; note = 2'-O-methylguanosine-3'-phosphate
  modified_base 22: mod_base = OTHER; note = 2'-O-methylguanosine-3'-phosphate
  modified_base 23: mod_base = OTHER; note = 2'-O-methylguanosine
ttagaaacccaaagaaaagtggg

SEQ ID NO: 5683 - RNA, 23 nt, synthetic construct
  source 1..23: mol_type = other RNA
  modified_base 1: mod_base = OTHER; note = 2'-O-methyluridine-3'-phosphate 5'-(E)-Vinylphosphonate
  modified_base 2: mod_base = OTHER; note = 2'-deoxy-2'-fluoroguanosine-3'-phosphate
  modified_base 3: mod_base = OTHER; note = 2'-O-methyluridine-3'-phosphate
  modified_base 4: mod_base = OTHER; note = 2'-O-methyladenosine-3'-phosphate
  modified_base 5: mod_base = OTHER; note = 2'-O-methylguanosine-3'-phosphate
  modified_base 6: mod_base = OTHER; note = 2'-deoxy-2'-fluoroadenosine-3'-phosphate
  modified_base 7: mod_base = OTHER; note = 2'-O-methyladenosine-3'-phosphate
  modified_base 8: mod_base = OTHER; note = 2'-O-methyladenosine-3'-phosphate
  modified_base 9: mod_base = OTHER; note = 2'-O-methylcytidine-3'-phosphate
  modified_base 10: mod_base = OTHER; note = 2'-O-methylcytidine-3'-phosphate
  modified_base 11: mod_base = OTHER; note = 2'-O-methylcytidine-3'-phosphate
  modified_base 12: mod_base = OTHER; note = 2'-O-methyladenosine-3'-phosphate
  modified_base 13: mod_base = OTHER; note = 2'-O-methyladenosine-3'-phosphate
  modified_base 14: mod_base = OTHER; note = 2'-deoxy-2'-fluoroadenosine-3'-phosphate
  modified_base 15: mod_base = OTHER; note = 2'-O-methylguanosine-3'-phosphate
  modified_base 16: mod_base = OTHER; note = 2'-deoxy-2'-fluoroadenosine-3'-phosphate
  modified_base 17: mod_base = OTHER; note = 2'-O-methyladenosine-3'-phosphate
  modified_base 18: mod_base = OTHER; note = 2'-O-methyladenosine-3'-phosphate
  modified_base 19: mod_base = OTHER; note = 2'-O-methyladenosine-3'-phosphate
  modified_base 20: mod_base = OTHER; note = 2'-O-methylguanosine-3'-phosphate
  modified_base 21: mod_base = OTHER; note = 2'-O-methyluridine-3'-phosphate
  modified_base 22: mod_base = OTHER; note = 2'-O-methylguanosine-3'-phosphate
  modified_base 23: mod_base = OTHER; note = 2'-O-methylguanosine
tgtagaaacccaaagaaaagtgg

SEQ ID NO: 5684 - RNA, 23 nt, synthetic construct
  source 1..23: mol_type = other RNA
  modified_base 1: mod_base = OTHER; note = 2'-O-methyluridine-3'-phosphate 5'-(E)-Vinylphosphonate
  modified_base 2: mod_base = OTHER; note = 2'-deoxy-2'-fluoroadenosine-3'-phosphate
  modified_base 3: mod_base = OTHER; note = 2'-O-methylguanosine-3'-phosphate
  modified_base 4: mod_base = OTHER; note = 2'-O-methyluridine-3'-phosphate
  modified_base 5: mod_base = OTHER; note = 2'-O-methyladenosine-3'-phosphate
  modified_base 6: mod_base = OTHER; note = 2'-deoxy-2'-fluoroguanosine-3'-phosphate
  modified_base 7: mod_base = OTHER; note = 2'-O-methyladenosine-3'-phosphate
  modified_base 8: mod_base = OTHER; note = 2'-O-methyladenosine-3'-phosphate
  modified_base 9: mod_base = OTHER; note = 2'-O-methyladenosine-3'-phosphate
  modified_base 10: mod_base = OTHER; note = 2'-O-methylcytidine-3'-phosphate
  modified_base 11: mod_base = OTHER; note = 2'-O-methylcytidine-3'-phosphate
  modified_base 12: mod_base = OTHER; note = 2'-O-methylcytidine-3'-phosphate
  modified_base 13: mod_base = OTHER; note = 2'-O-methyladenosine-3'-phosphate
  modified_base 14: mod_base = OTHER; note = 2'-deoxy-2'-fluoroadenosine-3'-phosphate
  modified_base 15: mod_base = OTHER; note = 2'-O-methyladenosine-3'-phosphate
  modified_base 16: mod_base = OTHER; note = 2'-deoxy-2'-fluoroguanosine-3'-phosphate
  modified_base 17: mod_base = OTHER; note = 2'-O-methyladenosine-3'-phosphate
  modified_base 18: mod_base = OTHER; note = 2'-O-methyladenosine-3'-phosphate
  modified_base 19: mod_base = OTHER; note = 2'-O-methyladenosine-3'-phosphate
  modified_base 20: mod_base = OTHER; note = 2'-O-methyladenosine-3'-phosphate
  modified_base 21: mod_base = OTHER; note = 2'-O-methylguanosine-3'-phosphate
  modified_base 22: mod_base = OTHER; note = 2'-O-methyluridine-3'-phosphate
  modified_base 23: mod_base = OTHER; note = 2'-O-methylguanosine
tagtagaaacccaaagaaaagtg

SEQ ID NO: 5685 - RNA, 23 nt, synthetic construct
  source 1..23: mol_type = other RNA
  modified_base 1: mod_base = OTHER; note = 2'-O-methyluridine-3'-phosphate 5'-(E)-Vinylphosphonate
  modified_base 2: mod_base = OTHER; note = 2'-deoxy-2'-fluorouridine-3'-phosphate
  modified_base 3: mod_base = OTHER; note = 2'-O-methyladenosine-3'-phosphate
  modified_base 4: mod_base = OTHER; note = 2'-O-methylguanosine-3'-phosphate
  modified_base 5: mod_base = OTHER; note = 2'-O-methyluridine-3'-phosphate
  modified_base 6: mod_base = OTHER; note = 2'-deoxy-2'-fluoroadenosine-3'-phosphate
  modified_base 7: mod_base = OTHER; note = 2'-O-methylguanosine-3'-phosphate
  modified_base 8: mod_base = OTHER; note = 2'-O-methyladenosine-3'-phosphate
  modified_base 9: mod_base = OTHER; note = 2'-O-methyladenosine-3'-phosphate
  modified_base 10: mod_base = OTHER; note = 2'-O-methyladenosine-3'-phosphate
  modified_base 11: mod_base = OTHER; note = 2'-O-methylcytidine-3'-phosphate
  modified_base 12: mod_base = OTHER; note = 2'-O-methylcytidine-3'-phosphate
  modified_base 13: mod_base = OTHER; note = 2'-O-methylcytidine-3'-phosphate
  modified_base 14: mod_base = OTHER; note = 2'-deoxy-2'-fluoroadenosine-3'-phosphate
  modified_base 15: mod_base = OTHER; note = 2'-O-methyladenosine-3'-phosphate
  modified_base 16: mod_base = OTHER; note = 2'-deoxy-2'-fluoroadenosine-3'-phosphate
  modified_base 17: mod_base = OTHER; note = 2'-O-methylguanosine-3'-phosphate
  modified_base 18: mod_base = OTHER; note = 2'-O-methyladenosine-3'-phosphate
  modified_base 19: mod_base = OTHER; note = 2'-O-methyladenosine-3'-phosphate
  modified_base 20: mod_base = OTHER; note = 2'-O-methyladenosine-3'-phosphate
  modified_base 21: mod_base = OTHER; note = 2'-O-methyladenosine-3'-phosphate
  modified_base 22: mod_base = OTHER; note = 2'-O-methylguanosine-3'-phosphate
  modified_base 23: mod_base = OTHER; note = 2'-O-methyluridine
ttagtagaaacccaaagaaaagt

SEQ ID NO: 5686 - RNA, 23 nt, synthetic construct
  source 1..23: mol_type = other RNA
  modified_base 1: mod_base = OTHER; note = 2'-O-methyluridine-3'-phosphate 5'-(E)-Vinylphosphonate
  modified_base 2: mod_base = OTHER; note = 2'-deoxy-2'-fluorouridine-3'-phosphate
  modified_base 3: mod_base = OTHER; note = 2'-O-methyluridine-3'-phosphate
  modified_base 4: mod_base = OTHER; note = 2'-O-methyladenosine-3'-phosphate
  modified_base 5: mod_base = OTHER; note = 2'-O-methylguanosine-3'-phosphate
  modified_base 6: mod_base = OTHER; note = 2'-deoxy-2'-fluorouridine-3'-phosphate
  modified_base 7: mod_base = OTHER; note = 2'-O-methyladenosine-3'-phosphate
  modified_base 8: mod_base = OTHER; note = 2'-O-methylguanosine-3'-phosphate
  modified_base 9: mod_base = OTHER; note = 2'-O-methyladenosine-3'-phosphate
  modified_base 10: mod_base = OTHER; note = 2'-O-methyladenosine-3'-phosphate
  modified_base 11: mod_base = OTHER; note = 2'-O-methyladenosine-3'-phosphate
  modified_base 12: mod_base = OTHER; note = 2'-O-methylcytidine-3'-phosphate
  modified_base 13: mod_base = OTHER; note = 2'-O-methylcytidine-3'-phosphate
  modified_base 14: mod_base = OTHER; note = 2'-deoxy-2'-fluorocytidine-3'-phosphate
  modified_base 15: mod_base = OTHER; note = 2'-O-methyladenosine-3'-phosphate
  modified_base 16: mod_base = OTHER; note = 2'-deoxy-2'-fluoroadenosine-3'-phosphate
  modified_base 17: mod_base = OTHER; note = 2'-O-methyladenosine-3'-phosphate
  modified_base 18: mod_base = OTHER; note = 2'-O-methylguanosine-3'-phosphate
  modified_base 19: mod_base = OTHER; note = 2'-O-methyladenosine-3'-phosphate
  modified_base 20: mod_base = OTHER; note = 2'-O-methyladenosine-3'-phosphate
  modified_base 21: mod_base = OTHER; note = 2'-O-methyladenosine-3'-phosphate
  modified_base 22: mod_base = OTHER; note = 2'-O-methyladenosine-3'-phosphate
  modified_base 23: mod_base = OTHER; note = 2'-O-methylguanosine
tttagtagaaacccaaagaaaag

SEQ ID NO: 5687 - RNA, 23 nt, synthetic construct
  source 1..23: mol_type = other RNA
  modified_base 1: mod_base = OTHER; note = 2'-O-methyluridine-3'-phosphate 5'-(E)-Vinylphosphonate
  modified_base 2: mod_base = OTHER; note = 2'-deoxy-2'-fluorouridine-3'-phosphate
  modified_base 3: mod_base = OTHER; note = 2'-O-methyluridine-3'-phosphate
  modified_base 4: mod_base = OTHER; note = 2'-O-methyluridine-3'-phosphate
  modified_base 5: mod_base = OTHER; note = 2'-O-methyladenosine-3'-phosphate
  modified_base 6: mod_base = OTHER; note = 2'-deoxy-2'-fluoroguanosine-3'-phosphate
  modified_base 7: mod_base = OTHER; note = 2'-O-methyluridine-3'-phosphate
  modified_base 8: mod_base = OTHER; note = 2'-O-methyladenosine-3'-phosphate
  modified_base 9: mod_base = OTHER; note = 2'-O-methylguanosine-3'-phosphate
  modified_base 10: mod_base = OTHER; note = 2'-O-methyladenosine-3'-phosphate
  modified_base 11: mod_base = OTHER; note = 2'-O-methyladenosine-3'-phosphate
  modified_base 12: mod_base = OTHER; note = 2'-O-methyladenosine-3'-phosphate
  modified_base 13: mod_base = OTHER; note = 2'-O-methylcytidine-3'-phosphate
  modified_base 14: mod_base = OTHER; note = 2'-deoxy-2'-fluorocytidine-3'-phosphate
  modified_base 15: mod_base = OTHER; note = 2'-O-methylcytidine-3'-phosphate
  modified_base 16: mod_base = OTHER; note = 2'-deoxy-2'-fluoroadenosine-3'-phosphate
  modified_base 17: mod_base = OTHER; note = 2'-O-methyladenosine-3'-phosphate
  modified_base 18: mod_base = OTHER; note = 2'-O-methyladenosine-3'-phosphate
  modified_base 19: mod_base = OTHER; note = 2'-O-methylguanosine-3'-phosphate
  modified_base 20: mod_base = OTHER; note = 2'-O-methyladenosine-3'-phosphate
  modified_base 21: mod_base = OTHER; note = 2'-O-methyladenosine-3'-phosphate
  modified_base 22: mod_base = OTHER; note = 2'-O-methyladenosine-3'-phosphate
  modified_base 23: mod_base = OTHER; note = 2'-O-methyladenosine
ttttagtagaaacccaaagaaaa

SEQ ID NO: 5688 - RNA, 23 nt, synthetic construct
  source 1..23: mol_type = other RNA
  modified_base 1: mod_base = OTHER; note = 2'-O-methyluridine-3'-phosphate 5'-(E)-Vinylphosphonate
  modified_base 2: mod_base = OTHER; note = 2'-deoxy-2'-fluorouridine-3'-phosphate
  modified_base 3: mod_base = OTHER; note = 2'-O-methyluridine-3'-phosphate
  modified_base 4: mod_base = OTHER; note = 2'-O-methyluridine-3'-phosphate
  modified_base 5: mod_base = OTHER; note = 2'-O-methyluridine-3'-phosphate
  modified_base 6: mod_base = OTHER; note = 2'-deoxy-2'-fluoroadenosine-3'-phosphate
  modified_base 7: mod_base = OTHER; note = 2'-O-methylguanosine-3'-phosphate
  modified_base 8: mod_base = OTHER; note = 2'-O-methyluridine-3'-phosphate
  modified_base 9: mod_base = OTHER; note = 2'-O-methyladenosine-3'-phosphate
  modified_base 10: mod_base = OTHER; note = 2'-O-methylguanosine-3'-phosphate
  modified_base 11: mod_base = OTHER; note = 2'-O-methyladenosine-3'-phosphate
  modified_base 12: mod_base = OTHER; note = 2'-O-methyladenosine-3'-phosphate
  modified_base 13: mod_base = OTHER; note = 2'-O-methyladenosine-3'-phosphate
  modified_base 14: mod_base = OTHER; note = 2'-deoxy-2'-fluorocytidine-3'-phosphate
  modified_base 15: mod_base = OTHER; note = 2'-O-methylcytidine-3'-phosphate
  modified_base 16: mod_base = OTHER; note = 2'-deoxy-2'-fluorocytidine-3'-phosphate
  modified_base 17: mod_base = OTHER; note = 2'-O-methyladenosine-3'-phosphate
  modified_base 18: mod_base = OTHER; note = 2'-O-methyladenosine-3'-phosphate
  modified_base 19: mod_base = OTHER; note = 2'-O-methyladenosine-3'-phosphate
  modified_base 20: mod_base = OTHER; note = 2'-O-methylguanosine-3'-phosphate
  modified_base 21: mod_base = OTHER; note = 2'-O-methyladenosine-3'-phosphate
  modified_base 22: mod_base = OTHER; note = 2'-O-methyladenosine-3'-phosphate
  modified_base 23: mod_base = OTHER; note = 2'-O-methyladenosine
tttttagtagaaacccaaagaaa

SEQ ID NO: 5689 - RNA, 23 nt, synthetic construct
  source 1..23: mol_type = other RNA
  modified_base 1: mod_base = OTHER; note = 2'-O-methyluridine-3'-phosphate 5'-(E)-Vinylphosphonate
  modified_base 2: mod_base = OTHER; note = 2'-deoxy-2'-fluoroadenosine-3'-phosphate
  modified_base 3: mod_base = OTHER; note = 2'-O-methyluridine-3'-phosphate
  modified_base 4: mod_base = OTHER; note = 2'-O-methyluridine-3'-phosphate
  modified_base 5: mod_base = OTHER; note = 2'-O-methyluridine-3'-phosphate
  modified_base 6: mod_base = OTHER; note = 2'-deoxy-2'-fluorouridine-3'-phosphate
  modified_base 7: mod_base = OTHER; note = 2'-O-methyladenosine-3'-phosphate
  modified_base 8: mod_base = OTHER; note = 2'-O-methylguanosine-3'-phosphate
  modified_base 9: mod_base = OTHER; note = 2'-O-methyluridine-3'-phosphate
  modified_base 10: mod_base = OTHER; note = 2'-O-methyladenosine-3'-phosphate
  modified_base 11: mod_base = OTHER; note = 2'-O-methylguanosine-3'-phosphate
  modified_base 12: mod_base = OTHER; note = 2'-O-methyladenosine-3'-phosphate
  modified_base 13: mod_base = OTHER; note = 2'-O-methyladenosine-3'-phosphate
  modified_base 14: mod_base = OTHER; note = 2'-deoxy-2'-fluoroadenosine-3'-phosphate
  modified_base 15: mod_base = OTHER; note = 2'-O-methylcytidine-3'-phosphate
  modified_base 16: mod_base = OTHER; note = 2'-deoxy-2'-fluorocytidine-3'-phosphate
  modified_base 17: mod_base = OTHER; note = 2'-O-methylcytidine-3'-phosphate
  modified_base 18: mod_base = OTHER; note = 2'-O-methyladenosine-3'-phosphate
  modified_base 19: mod_base = OTHER; note = 2'-O-methyladenosine-3'-phosphate
  modified_base 20: mod_base = OTHER; note = 2'-O-methyladenosine-3'-phosphate
  modified_base 21: mod_base = OTHER; note = 2'-O-methylguanosine-3'-phosphate
  modified_base 22: mod_base = OTHER; note = 2'-O-methyladenosine-3'-phosphate
  modified_base 23: mod_base = OTHER; note = 2'-O-methyladenosine
tattttagtagaaacccaaagaa

SEQ ID NO: 5690 - RNA, 23 nt, synthetic construct
  source 1..23: mol_type = other RNA
  modified_base 1: mod_base = OTHER; note = 2'-O-methyluridine-3'-phosphate 5'-(E)-Vinylphosphonate
  modified_base 2: mod_base = OTHER; note = 2'-deoxy-2'-fluorouridine-3'-phosphate
  modified_base 3: mod_base = OTHER; note = 2'-O-methyladenosine-3'-phosphate
  modified_base 4: mod_base = OTHER; note = 2'-O-methyluridine-3'-phosphate
  modified_base 5: mod_base = OTHER; note = 2'-O-methyluridine-3'-phosphate
  modified_base 6: mod_base = OTHER; note = 2'-deoxy-2'-fluorouridine-3'-phosphate
  modified_base 7: mod_base = OTHER; note = 2'-O-methyluridine-3'-phosphate
  modified_base 8: mod_base = OTHER; note = 2'-O-methyladenosine-3'-phosphate
  modified_base 9: mod_base = OTHER; note = 2'-O-methylguanosine-3'-phosphate
  modified_base 10: mod_base = OTHER; note = 2'-O-methyluridine-3'-phosphate
  modified_base 11: mod_base = OTHER; note = 2'-O-methyladenosine-3'-phosphate
  modified_base 12: mod_base = OTHER; note = 2'-O-methylguanosine-3'-phosphate
  modified_base 13: mod_base = OTHER; note = 2'-O-methyladenosine-3'-phosphate
  modified_base 14: mod_base = OTHER; note = 2'-deoxy-2'-fluoroadenosine-3'-phosphate
  modified_base 15: mod_base = OTHER; note = 2'-O-methyladenosine-3'-phosphate
  modified_base 16: mod_base = OTHER; note = 2'-deoxy-2'-fluorocytidine-3'-phosphate
  modified_base 17: mod_base = OTHER; note = 2'-O-methylcytidine-3'-phosphate
  modified_base 18: mod_base = OTHER; note = 2'-O-methylcytidine-3'-phosphate
  modified_base 19: mod_base = OTHER; note = 2'-O-methyladenosine-3'-phosphate
  modified_base 20: mod_base = OTHER; note = 2'-O-methyladenosine-3'-phosphate
  modified_base 21: mod_base = OTHER; note = 2'-O-methyladenosine-3'-phosphate
  modified_base 22: mod_base = OTHER; note = 2'-O-methylguanosine-3'-phosphate
  modified_base 23: mod_base = OTHER; note = 2'-O-methyladenosine
ttattttagtagaaacccaaaga

SEQ ID NO: 5691 - RNA, 23 nt, synthetic construct
  source 1..23: mol_type = other RNA
  modified_base 1: mod_base = OTHER; note = 2'-O-methyluridine-3'-phosphate 5'-(E)-Vinylphosphonate
  modified_base 2: mod_base = OTHER; note = 2'-deoxy-2'-fluorouridine-3'-phosphate
  modified_base 3: mod_base = OTHER; note = 2'-O-methyluridine-3'-phosphate
  modified_base 4: mod_base = OTHER; note = 2'-O-methyladenosine-3'-phosphate
  modified_base 5: mod_base = OTHER; note = 2'-O-methyluridine-3'-phosphate
  modified_base 6: mod_base = OTHER; note = 2'-deoxy-2'-fluorouridine-3'-phosphate
  modified_base 7: mod_base = OTHER; note = 2'-O-methyluridine-3'-phosphate
  modified_base 8: mod_base = OTHER; note = 2'-O-methyluridine-3'-phosphate
  modified_base 9: mod_base = OTHER; note = 2'-O-methyladenosine-3'-phosphate
  modified_base 10: mod_base = OTHER; note = 2'-O-methylguanosine-3'-phosphate
  modified_base 11: mod_base = OTHER; note = 2'-O-methyluridine-3'-phosphate
  modified_base 12: mod_base = OTHER; note = 2'-O-methyladenosine-3'-phosphate
  modified_base 13: mod_base = OTHER; note = 2'-O-methylguanosine-3'-phosphate
  modified_base 14: mod_base = OTHER; note = 2'-deoxy-2'-fluoroadenosine-3'-phosphate
  modified_base 15: mod_base = OTHER; note = 2'-O-methyladenosine-3'-phosphate
  modified_base 16: mod_base = OTHER; note = 2'-deoxy-2'-fluoroadenosine-3'-phosphate
  modified_base 17: mod_base = OTHER; note = 2'-O-methylcytidine-3'-phosphate
  modified_base 18: mod_base = OTHER; note = 2'-O-methylcytidine-3'-phosphate
  modified_base 19: mod_base = OTHER; note = 2'-O-methylcytidine-3'-phosphate
  modified_base 20: mod_base = OTHER; note = 2'-O-methyladenosine-3'-phosphate
  modified_base 21: mod_base = OTHER; note = 2'-O-methyladenosine-3'-phosphate
  modified_base 22: mod_base = OTHER; note = 2'-O-methyladenosine-3'-phosphate
  modified_base 23: mod_base = OTHER; note = 2'-O-methylguanosine
tttattttagtagaaacccaaag

SEQ ID NO: 5692 - RNA, 23 nt, synthetic construct
  source 1..23: mol_type = other RNA
  modified_base 1: mod_base = OTHER; note = 2'-O-methyluridine-3'-phosphate 5'-(E)-Vinylphosphonate
  modified_base 2: mod_base = OTHER; note = 2'-deoxy-2'-fluorocytidine-3'-phosphate
  modified_base 3: mod_base = OTHER; note = 2'-O-methyluridine-3'-phosphate
  modified_base 4: mod_base = OTHER; note = 2'-O-methylguanosine-3'-phosphate
  modified_base 5: mod_base = OTHER; note = 2'-O-methyladenosine-3'-phosphate
  modified_base 6: mod_base = OTHER; note = 2'-deoxy-2'-fluoroguanosine-3'-phosphate
  modified_base 7: mod_base = OTHER; note = 2'-O-methyluridine-3'-phosphate
  modified_base 8: mod_base = OTHER; note = 2'-O-methylguanosine-3'-phosphate
  modified_base 9: mod_base = OTHER; note = 2'-O-methyladenosine-3'-phosphate
  modified_base 10: mod_base = OTHER; note = 2'-O-methylguanosine-3'-phosphate
  modified_base 11: mod_base = OTHER; note = 2'-O-methyluridine-3'-phosphate
  modified_base 12: mod_base = OTHER; note = 2'-O-methyladenosine-3'-phosphate
  modified_base 13: mod_base = OTHER; note = 2'-O-methyladenosine-3'-phosphate
  modified_base 14: mod_base = OTHER; note = 2'-deoxy-2'-fluoroadenosine-3'-phosphate
  modified_base 15: mod_base = OTHER; note = 2'-O-methyluridine-3'-phosphate
  modified_base 16: mod_base = OTHER; note = 2'-deoxy-2'-fluorouridine-3'-phosphate
  modified_base 17: mod_base = OTHER; note = 2'-O-methyladenosine-3'-phosphate
  modified_base 18: mod_base = OTHER; note = 2'-O-methyluridine-3'-phosphate
  modified_base 19: mod_base = OTHER; note = 2'-O-methyluridine-3'-phosphate
  modified_base 20: mod_base = OTHER; note = 2'-O-methyluridine-3'-phosphate
  modified_base 21: mod_base = OTHER; note = 2'-O-methyluridine-3'-phosphate
  modified_base 22: mod_base = OTHER; note = 2'-O-methyladenosine-3'-phosphate
  modified_base 23: mod_base = OTHER; note = 2'-O-methylguanosine
tctgagtgagtaaattattttag

SEQ ID NO: 5693 - RNA, 23 nt, synthetic construct
  source 1..23: mol_type = other RNA
  modified_base 1: mod_base = OTHER; note = 2'-O-methyluridine-3'-phosphate 5'-(E)-Vinylphosphonate
  modified_base 2: mod_base = OTHER; note = 2'-deoxy-2'-fluorocytidine-3'-phosphate
  modified_base 3: mod_base = OTHER; note = 2'-O-methyluridine-3'-phosphate
  modified_base 4: mod_base = OTHER; note = 2'-O-methylcytidine-3'-phosphate
  modified_base 5: mod_base = OTHER; note = 2'-O-methyluridine-3'-phosphate
  modified_base 6: mod_base = OTHER; note = 2'-deoxy-2'-fluoroguanosine-3'-phosphate
  modified_base 7: mod_base = OTHER; note = 2'-O-methyladenosine-3'-phosphate
  modified_base 8: mod_base = OTHER; note = 2'-O-methylguanosine-3'-phosphate
  modified_base 9: mod_base = OTHER; note = 2'-O-methyluridine-3'-phosphate
  modified_base 10: mod_base = OTHER; note = 2'-O-methylguanosine-3'-phosphate
  modified_base 11: mod_base = OTHER; note = 2'-O-methyladenosine-3'-phosphate
  modified_base 12: mod_base = OTHER; note = 2'-O-methylguanosine-3'-phosphate
  modified_base 13: mod_base = OTHER; note = 2'-O-methyluridine-3'-phosphate
  modified_base 14: mod_base = OTHER; note = 2'-deoxy-2'-fluoroadenosine-3'-phosphate
  modified_base 15: mod_base = OTHER; note = 2'-O-methyladenosine-3'-phosphate
  modified_base 16: mod_base = OTHER; note = 2'-deoxy-2'-fluoroadenosine-3'-phosphate
  modified_base 17: mod_base = OTHER; note = 2'-O-methyluridine-3'-phosphate
  modified_base 18: mod_base = OTHER; note = 2'-O-methyluridine-3'-phosphate
  modified_base 19: mod_base = OTHER; note = 2'-O-methyladenosine-3'-phosphate
  modified_base 20: mod_base = OTHER; note = 2'-O-methyluridine-3'-phosphate
  modified_base 21: mod_base = OTHER; note = 2'-O-methyluridine-3'-phosphate
  modified_base 22: mod_base = OTHER; note = 2'-O-methyluridine-3'-phosphate
  modified_base 23: mod_base = OTHER; note = 2'-O-methyluridine
tctctgagtgagtaaattatttt

SEQ ID NO: 5694 - RNA, 23 nt, synthetic construct
  source 1..23: mol_type = other RNA
  modified_base 1: mod_base = OTHER; note = 2'-O-methyluridine-3'-phosphate 5'-(E)-Vinylphosphonate
  modified_base 2: mod_base = OTHER; note = 2'-deoxy-2'-fluoroadenosine-3'-phosphate
  modified_base 3: mod_base = OTHER; note = 2'-O-methylcytidine-3'-phosphate
  modified_base 4: mod_base = OTHER; note = 2'-O-methyluridine-3'-phosphate
  modified_base 5: mod_base = OTHER; note = 2'-O-methylcytidine-3'-phosphate
  modified_base 6: mod_base = OTHER; note = 2'-deoxy-2'-fluorouridine-3'-phosphate
  modified_base 7: mod_base = OTHER; note = 2'-O-methylguanosine-3'-phosphate
  modified_base 8: mod_base = OTHER; note = 2'-O-methyladenosine-3'-phosphate
  modified_base 9: mod_base = OTHER; note = 2'-O-methylguanosine-3'-phosphate
  modified_base 10: mod_base = OTHER; note = 2'-O-methyluridine-3'-phosphate
  modified_base 11: mod_base = OTHER; note = 2'-O-methylguanosine-3'-phosphate
  modified_base 12: mod_base = OTHER; note = 2'-O-methyladenosine-3'-phosphate
  modified_base 13: mod_base = OTHER; note = 2'-O-methylguanosine-3'-phosphate
  modified_base 14: mod_base = OTHER; note = 2'-deoxy-2'-fluorouridine-3'-phosphate
  modified_base 15: mod_base = OTHER; note = 2'-O-methyladenosine-3'-phosphate
  modified_base 16: mod_base = OTHER; note = 2'-deoxy-2'-fluoroadenosine-3'-phosphate
  modified_base 17: mod_base = OTHER; note = 2'-O-methyladenosine-3'-phosphate
  modified_base 18: mod_base = OTHER; note = 2'-O-methyluridine-3'-phosphate
  modified_base 19: mod_base = OTHER; note = 2'-O-methyluridine-3'-phosphate
  modified_base 20: mod_base = OTHER; note = 2'-O-methyladenosine-3'-phosphate
  modified_base 21: mod_base = OTHER; note = 2'-O-methyluridine-3'-phosphate
  modified_base 22: mod_base = OTHER; note = 2'-O-methyluridine-3'-phosphate
  modified_base 23: mod_base = OTHER; note = 2'-O-methyluridine
tactctgagtgagtaaattattt

SEQ ID NO: 5695 - RNA, 23 nt, synthetic construct
  source 1..23: mol_type = other RNA
  modified_base 1: mod_base = OTHER; note = 2'-O-methyluridine-3'-phosphate 5'-(E)-Vinylphosphonate
  modified_base 2: mod_base = OTHER; note = 2'-deoxy-2'-fluorocytidine-3'-phosphate
  modified_base 3: mod_base = OTHER; note = 2'-O-methyladenosine-3'-phosphate
  modified_base 4: mod_base = OTHER; note = 2'-O-methylcytidine-3'-phosphate
  modified_base 5: mod_base = OTHER; note = 2'-O-methyluridine-3'-phosphate
  modified_base 6: mod_base = OTHER; note = 2'-deoxy-2'-fluorocytidine-3'-phosphate
  modified_base 7: mod_base = OTHER; note = 2'-O-methyluridine-3'-phosphate
  modified_base 8: mod_base = OTHER; note = 2'-O-methylguanosine-3'-phosphate
  modified_base 9: mod_base = OTHER; note = 2'-O-methyladenosine-3'-phosphate
  modified_base 10: mod_base = OTHER; note = 2'-O-methylguanosine-3'-phosphate
  modified_base 11: mod_base = OTHER; note = 2'-O-methyluridine-3'-phosphate
  modified_base 12: mod_base = OTHER; note = 2'-O-methylguanosine-3'-phosphate
  modified_base 13: mod_base = OTHER; note = 2'-O-methyladenosine-3'-phosphate
  modified_base 14: mod_base = OTHER; note = 2'-deoxy-2'-fluoroguanosine-3'-phosphate
  modified_base 15: mod_base = OTHER; note = 2'-O-methyluridine-3'-phosphate
  modified_base 16: mod_base = OTHER; note = 2'-deoxy-2'-fluoroadenosine-3'-phosphate
  modified_base 17: mod_base = OTHER; note = 2'-O-methyladenosine-3'-phosphate
  modified_base 18: mod_base = OTHER; note = 2'-O-methyladenosine-3'-phosphate
  modified_base 19: mod_base = OTHER; note = 2'-O-methyluridine-3'-phosphate
  modified_base 20: mod_base = OTHER; note = 2'-O-methyluridine-3'-phosphate
  modified_base 21: mod_base = OTHER; note = 2'-O-methyladenosine-3'-phosphate
  modified_base 22: mod_base = OTHER; note = 2'-O-methyluridine-3'-phosphate
  modified_base 23: mod_base = OTHER; note = 2'-O-methyluridine
tcactctgagtgagtaaattatt

SEQ ID NO: 5696 - RNA, 23 nt, synthetic construct
  source 1..23: mol_type = other RNA
  modified_base 1: mod_base = OTHER; note = 2'-O-methyluridine-3'-phosphate 5'-(E)-Vinylphosphonate
  modified_base 2: mod_base = OTHER; note = 2'-deoxy-2'-fluorouridine-3'-phosphate
  modified_base 3: mod_base = OTHER; note = 2'-O-methylcytidine-3'-phosphate
  modified_base 4: mod_base = OTHER; note = 2'-O-methyladenosine-3'-phosphate
  modified_base 5: mod_base = OTHER; note = 2'-O-methylcytidine-3'-phosphate
  modified_base 6: mod_base = OTHER; note = 2'-deoxy-2'-fluorouridine-3'-phosphate
  modified_base 7: mod_base = OTHER; note = 2'-O-methylcytidine-3'-phosphate
  modified_base 8: mod_base = OTHER; note = 2'-O-methyluridine-3'-phosphate
  modified_base 9: mod_base = OTHER; note = 2'-O-methylguanosine-3'-phosphate
  modified_base 10: mod_base = OTHER; note = 2'-O-methyladenosine-3'-phosphate
  modified_base 11: mod_base = OTHER; note = 2'-O-methylguanosine-3'-phosphate
  modified_base 12: mod_base = OTHER; note = 2'-O-methyluridine-3'-phosphate
  modified_base 13: mod_base = OTHER; note = 2'-O-methylguanosine-3'-phosphate
  modified_base 14: mod_base = OTHER; note = 2'-deoxy-2'-fluoroadenosine-3'-phosphate
  modified_base 15: mod_base = OTHER; note = 2'-O-methylguanosine-3'-phosphate
  modified_base 16: mod_base = OTHER; note = 2'-deoxy-2'-fluorouridine-3'-phosphate
  modified_base 17: mod_base = OTHER; note = 2'-O-methyladenosine-3'-phosphate
  modified_base 18: mod_base = OTHER; note = 2'-O-methyladenosine-3'-phosphate
  modified_base 19: mod_base = OTHER; note = 2'-O-methyladenosine-3'-phosphate
  modified_base 20: mod_base = OTHER; note = 2'-O-methyluridine-3'-phosphate
  modified_base 21: mod_base = OTHER; note = 2'-O-methyluridine-3'-phosphate
  modified_base 22: mod_base = OTHER; note = 2'-O-methyladenosine-3'-phosphate
  modified_base 23: mod_base = OTHER; note = 2'-O-methyluridine
ttcactctgagtgagtaaattat

SEQ ID NO: 5697 - RNA, 23 nt, synthetic construct
  source 1..23: mol_type = other RNA
  modified_base 1: mod_base = OTHER; note = 2'-O-methyluridine-3'-phosphate 5'-(E)-Vinylphosphonate
  modified_base 2: mod_base = OTHER; note = 2'-deoxy-2'-fluorocytidine-3'-phosphate
  modified_base 3: mod_base = OTHER; note = 2'-O-methyluridine-3'-phosphate
  modified_base 4: mod_base = OTHER; note = 2'-O-methylcytidine-3'-phosphate
  modified_base 5: mod_base = OTHER; note = 2'-O-methyladenosine-3'-phosphate
  modified_base 6: mod_base = OTHER; note = 2'-deoxy-2'-fluorocytidine-3'-phosphate
  modified_base 7: mod_base = OTHER; note = 2'-O-methyluridine-3'-phosphate
  modified_base 8: mod_base = OTHER; note = 2'-O-methylcytidine-3'-phosphate
  modified_base 9: mod_base = OTHER; note = 2'-O-methyluridine-3'-phosphate
  modified_base 10: mod_base = OTHER; note = 2'-O-methylguanosine-3'-phosphate
  modified_base 11: mod_base = OTHER; note = 2'-O-methyladenosine-3'-phosphate
  modified_base 12: mod_base = OTHER; note = 2'-O-methylguanosine-3'-phosphate
  modified_base 13: mod_base = OTHER; note = 2'-O-methyluridine-3'-phosphate
  modified_base 14: mod_base = OTHER; note = 2'-deoxy-2'-fluoroguanosine-3'-phosphate
  modified_base 15: mod_base = OTHER; note = 2'-O-methyladenosine-3'-phosphate
  modified_base 16: mod_base = OTHER; note = 2'-deoxy-2'-fluoroguanosine-3'-phosphate
  modified_base 17: mod_base = OTHER; note = 2'-O-methyluridine-3'-phosphate
  modified_base 18: mod_base = OTHER; note = 2'-O-methyladenosine-3'-phosphate
  modified_base 19: mod_base = OTHER; note = 2'-O-methyladenosine-3'-phosphate
  modified_base 20: mod_base = OTHER; note = 2'-O-methyladenosine-3'-phosphate
  modified_base 21: mod_base = OTHER; note = 2'-O-methyluridine-3'-phosphate
  modified_base 22: mod_base = OTHER; note = 2'-O-methyluridine-3'-phosphate
  modified_base 23: mod_base = OTHER; note = 2'-O-methyladenosine
tctcactctgagtgagtaaatta

SEQ ID NO: 5698 - RNA, 23 nt, synthetic construct
  source 1..23: mol_type = other RNA
  modified_base 1: mod_base = OTHER; note = 2'-O-methyluridine-3'-phosphate 5'-(E)-Vinylphosphonate
  modified_base 2: mod_base = OTHER; note = 2'-deoxy-2'-fluorouridine-3'-phosphate
  modified_base 3: mod_base = OTHER; note = 2'-O-methyluridine-3'-phosphate
  modified_base 4: mod_base = OTHER; note = 2'-O-methyluridine-3'-phosphate
  modified_base 5: mod_base = OTHER; note = 2'-O-methyluridine-3'-phosphate
  modified_base 6: mod_base = OTHER; note = 2'-deoxy-2'-fluorouridine-3'-phosphate
  modified_base 7: mod_base = OTHER; note = 2'-O-methylcytidine-3'-phosphate
  modified_base 8: mod_base = OTHER; note = 2'-O-methyluridine-3'-phosphate
  modified_base 9: mod_base = OTHER; note = 2'-O-methylcytidine-3'-phosphate
  modified_base 10: mod_base = OTHER; note = 2'-O-methyladenosine-3'-phosphate
  modified_base 11: mod_base = OTHER; note = 2'-O-methyluridine-3'-phosphate
  modified_base 12: mod_base = OTHER; note = 2'-O-methyluridine-3'-phosphate
  modified_base 13: mod_base = OTHER; note = 2'-O-methylguanosine-3'-phosphate
  modified_base 14: mod_base = OTHER; note = 2'-deoxy-2'-fluoroadenosine-3'-phosphate
  modified_base 15: mod_base = OTHER; note = 2'-O-methylcytidine-3'-phosphate
  modified_base 16: mod_base = OTHER; note = 2'-deoxy-2'-fluorocytidine-3'-phosphate
  modified_base 17: mod_base = OTHER; note = 2'-O-methyluridine-3'-phosphate
  modified_base 18: mod_base = OTHER; note = 2'-O-methylcytidine-3'-phosphate
  modified_base 19: mod_base = OTHER; note = 2'-O-methyladenosine-3'-phosphate
  modified_base 20: mod_base = OTHER; note = 2'-O-methylcytidine-3'-phosphate
  modified_base 21: mod_base = OTHER; note = 2'-O-methyluridine-3'-phosphate
  modified_base 22: mod_base = OTHER; note = 2'-O-methylcytidine-3'-phosphate
  modified_base 23: mod_base = OTHER; note = 2'-O-methyluridine
ttttttctcattgacctcactct

SEQ ID NO: 5699 - RNA, 23 nt, synthetic construct
  source 1..23: mol_type = other RNA
  modified_base 1: mod_base = OTHER; note = 2'-O-methyluridine-3'-phosphate 5'-(E)-Vinylphosphonate
  modified_base 2: mod_base = OTHER; note = 2'-deoxy-2'-fluoroadenosine-3'-phosphate
  modified_base 3: mod_base = OTHER; note = 2'-O-methyluridine-3'-phosphate
  modified_base 4: mod_base = OTHER; note = 2'-O-methyluridine-3'-phosphate
  modified_base 5: mod_base = OTHER; note = 2'-O-methylcytidine-3'-phosphate
  modified_base 6: mod_base = OTHER; note = 2'-deoxy-2'-fluorouridine-3'-phosphate
  modified_base 7: mod_base = OTHER; note = 2'-O-methyladenosine-3'-phosphate
  modified_base 8: mod_base = OTHER; note = 2'-O-methylcytidine-3'-phosphate
  modified_base 9: mod_base = OTHER; note = 2'-O-methyladenosine-3'-phosphate
  modified_base 10: mod_base = OTHER; note = 2'-O-methyladenosine-3'-phosphate
  modified_base 11: mod_base = OTHER; note = 2'-O-methylcytidine-3'-phosphate
  modified_base 12: mod_base = OTHER; note = 2'-O-methyluridine-3'-phosphate
  modified_base 13: mod_base = OTHER; note = 2'-O-methylcytidine-3'-phosphate
  modified_base 14: mod_base = OTHER; note = 2'-deoxy-2'-fluorouridine-3'-phosphate
  modified_base 15: mod_base = OTHER; note = 2'-O-methyluridine-3'-phosphate
  modified_base 16: mod_base = OTHER; note = 2'-deoxy-2'-fluorouridine-3'-phosphate
  modified_base 17: mod_base = OTHER; note = 2'-O-methylcytidine-3'-phosphate
  modified_base 18: mod_base = OTHER; note = 2'-O-methyluridine-3'-phosphate
  modified_base 19: mod_base = OTHER; note = 2'-O-methyluridine-3'-phosphate
  modified_base 20: mod_base = OTHER; note = 2'-O-methyladenosine-3'-phosphate
  modified_base 21: mod_base = OTHER; note = 2'-O-methylguanosine-3'-phosphate
  modified_base 22: mod_base = OTHER; note = 2'-O-methylcytidine-3'-phosphate
  modified_base 23: mod_base = OTHER; note = 2'-O-methylcytidine
tattctacaactctttcttagcc

SEQ ID NO: 5700 - RNA, 23 nt, synthetic construct
  source 1..23: mol_type = other RNA
  modified_base 1: mod_base = OTHER; note = 2'-O-methyluridine-3'-phosphate 5'-(E)-Vinylphosphonate
  modified_base 2: mod_base = OTHER; note = 2'-deoxy-2'-fluoroadenosine-3'-phosphate
  modified_base 3: mod_base = OTHER; note = 2'-O-methyladenosine-3'-phosphate
  modified_base 4: mod_base = OTHER; note = 2'-O-methylcytidine-3'-phosphate
  modified_base 5: mod_base = OTHER; note = 2'-O-methylcytidine-3'-phosphate
  modified_base 6: mod_base = OTHER; note = 2'-deoxy-2'-fluoroadenosine-3'-phosphate
  modified_base 7: mod_base = OTHER; note = 2'-O-methyluridine-3'-phosphate
  modified_base 8: mod_base = OTHER; note = 2'-O-methyluridine-3'-phosphate
  modified_base 9: mod_base = OTHER; note = 2'-O-methylcytidine-3'-phosphate
  modified_base 10: mod_base = OTHER; note = 2'-O-methyluridine-3'-phosphate
  modified_base 11: mod_base = OTHER; note = 2'-O-methyladenosine-3'-phosphate
  modified_base 12: mod_base = OTHER; note = 2'-O-methylcytidine-3'-phosphate
  modified_base 13: mod_base = OTHER; note = 2'-O-methyladenosine-3'-phosphate
  modified_base 14: mod_base = OTHER; note = 2'-deoxy-2'-fluoroadenosine-3'-phosphate
  modified_base 15: mod_base = OTHER; note = 2'-O-methylcytidine-3'-phosphate
  modified_base 16: mod_base = OTHER; note = 2'-deoxy-2'-fluorouridine-3'-phosphate
  modified_base 17: mod_base = OTHER; note = 2'-O-methylcytidine-3'-phosphate
  modified_base 18: mod_base = OTHER; note = 2'-O-methyluridine-3'-phosphate
  modified_base 19: mod_base = OTHER; note = 2'-O-methyluridine-3'-phosphate
  modified_base 20: mod_base = OTHER; note = 2'-O-methyluridine-3'-phosphate
  modified_base 21: mod_base = OTHER; note = 2'-O-methylcytidine-3'-phosphate
  modified_base 22: mod_base = OTHER; note = 2'-O-methyluridine-3'-phosphate
  modified_base 23: mod_base = OTHER; note = 2'-O-methyluridine
taaccattctacaactctttctt

SEQ ID NO: 5701 - RNA, 23 nt, synthetic construct
  source 1..23: mol_type = other RNA
  modified_base 1: mod_base = OTHER; note = 2'-O-methyluridine-3'-phosphate 5'-(E)-Vinylphosphonate
  modified_base 2: mod_base = OTHER; note = 2'-deoxy-2'-fluorouridine-3'-phosphate
  modified_base 3: mod_base = OTHER; note = 2'-O-methylcytidine-3'-phosphate
  modified_base 4: mod_base = OTHER; note = 2'-O-methylcytidine-3'-phosphate
  modified_base 5: mod_base = OTHER; note = 2'-O-methyladenosine-3'-phosphate
  modified_base 6: mod_base = OTHER; note = 2'-deoxy-2'-fluorouridine-3'-phosphate
  modified_base 7: mod_base = OTHER; note = 2'-O-methyluridine-3'-phosphate
  modified_base 8: mod_base = OTHER; note = 2'-O-methyladenosine-3'-phosphate
  modified_base 9: mod_base = OTHER; note = 2'-O-methyladenosine-3'-phosphate
  modified_base 10: mod_base = OTHER; note = 2'-O-methyluridine-3'-phosphate
  modified_base 11: mod_base = OTHER; note = 2'-O-methyluridine-3'-phosphate
  modified_base 12: mod_base = OTHER; note = 2'-O-methyluridine-3'-phosphate
  modified_base 13: mod_base = OTHER; note = 2'-O-methyluridine-3'-phosphate
  modified_base 14: mod_base = OTHER; note = 2'-deoxy-2'-fluoroadenosine-3'-phosphate
  modified_base 15: mod_base = OTHER; note = 2'-O-methyluridine-3'-phosphate
  modified_base 16: mod_base = OTHER; note = 2'-deoxy-2'-fluorocytidine-3'-phosphate
  modified_base 17: mod_base = OTHER; note = 2'-O-methyladenosine-3'-phosphate
  modified_base 18: mod_base = OTHER; note = 2'-O-methylguanosine-3'-phosphate
  modified_base 19: mod_base = OTHER; note = 2'-O-methylcytidine-3'-phosphate
  modified_base 20: mod_base = OTHER; note = 2'-O-methyladenosine-3'-phosphate
  modified_base 21: mod_base = OTHER; note = 2'-O-methylcytidine-3'-phosphate
  modified_base 22: mod_base = OTHER; note = 2'-O-methylcytidine-3'-phosphate
  modified_base 23: mod_base = OTHER; note = 2'-O-methylcytidine
ttccattaattttatcagcaccc

SEQ ID NO: 5702 - RNA, 23 nt, synthetic construct
  source 1..23: mol_type = other RNA
  modified_base 1: mod_base = OTHER; note = 2'-O-methyluridine-3'-phosphate 5'-(E)-Vinylphosphonate
  modified_base 2: mod_base = OTHER; note = 2'-deoxy-2'-fluoroadenosine-3'-phosphate
  modified_base 3: mod_base = OTHER; note = 2'-O-methyluridine-3'-phosphate
  modified_base 4: mod_base = OTHER; note = 2'-O-methylcytidine-3'-phosphate
  modified_base 5: mod_base = OTHER; note = 2'-O-methylcytidine-3'-phosphate
  modified_base 6: mod_base = OTHER; note = 2'-deoxy-2'-fluoroadenosine-3'-phosphate
  modified_base 7: mod_base = OTHER; note = 2'-O-methyluridine-3'-phosphate
  modified_base 8: mod_base = OTHER; note = 2'-O-methyluridine-3'-phosphate
  modified_base 9: mod_base = OTHER; note = 2'-O-methyladenosine-3'-phosphate
  modified_base 10: mod_base = OTHER; note = 2'-O-methyladenosine-3'-phosphate
  modified_base 11: mod_base = OTHER; note = 2'-O-methyluridine-3'-phosphate
  modified_base 12: mod_base = OTHER; note = 2'-O-methyluridine-3'-phosphate
  modified_base 13: mod_base = OTHER; note = 2'-O-methyluridine-3'-phosphate
  modified_base 14: mod_base = OTHER; note = 2'-deoxy-2'-fluorouridine-3'-phosphate
  modified_base 15: mod_base = OTHER; note = 2'-O-methyladenosine-3'-phosphate
  modified_base 16: mod_base = OTHER; note = 2'-deoxy-2'-fluorouridine-3'-phosphate
  modified_base 17: mod_base = OTHER; note = 2'-O-methylcytidine-3'-phosphate
  modified_base 18: mod_base = OTHER; note = 2'-O-methyladenosine-3'-phosphate
  modified_base 19: mod_base = OTHER; note = 2'-O-methylguanosine-3'-phosphate
  modified_base 20: mod_base = OTHER; note = 2'-O-methylcytidine-3'-phosphate
  modified_base 21: mod_base = OTHER; note = 2'-O-methyladenosine-3'-phosphate
  modified_base 22: mod_base = OTHER; note = 2'-O-methylcytidine-3'-phosphate
  modified_base 23: mod_base = OTHER; note = 2'-O-methylcytidine
tatccattaattttatcagcacc

SEQ ID NO: 5703 - RNA, 23 nt, synthetic construct
  source 1..23: mol_type = other RNA
  modified_base 1: mod_base = OTHER; note = 2'-O-methyluridine-3'-phosphate 5'-(E)-Vinylphosphonate
  modified_base 2: mod_base = OTHER; note = 2'-deoxy-2'-fluorouridine-3'-phosphate
  modified_base 3: mod_base = OTHER; note = 2'-O-methyladenosine-3'-phosphate
  modified_base 4: mod_base = OTHER; note = 2'-O-methyluridine-3'-phosphate
  modified_base 5: mod_base = OTHER; note = 2'-O-methylcytidine-3'-phosphate
  modified_base 6: mod_base = OTHER; note = 2'-deoxy-2'-fluorocytidine-3'-phosphate
  modified_base 7: mod_base = OTHER; note = 2'-O-methyladenosine-3'-phosphate
  modified_base 8: mod_base = OTHER; note = 2'-O-methyluridine-3'-phosphate
  modified_base 9: mod_base = OTHER; note = 2'-O-methyluridine-3'-phosphate
  modified_base 10: mod_base = OTHER; note = 2'-O-methyladenosine-3'-phosphate
  modified_base 11: mod_base = OTHER; note = 2'-O-methyladenosine-3'-phosphate
  modified_base 12: mod_base = OTHER; note = 2'-O-methyluridine-3'-phosphate
  modified_base 13: mod_base = OTHER; note = 2'-O-methyluridine-3'-phosphate
  modified_base 14: mod_base = OTHER; note = 2'-deoxy-2'-fluorouridine-3'-phosphate
  modified_base 15: mod_base = OTHER; note = 2'-O-methyluridine-3'-phosphate
  modified_base 16: mod_base = OTHER; note = 2'-deoxy-2'-fluoroadenosine-3'-phosphate
  modified_base 17: mod_base = OTHER; note = 2'-O-methyluridine-3'-phosphate
  modified_base 18: mod_base = OTHER; note = 2'-O-methylcytidine-3'-phosphate
  modified_base 19: mod_base = OTHER; note = 2'-O-methyladenosine-3'-phosphate
  modified_base 20: mod_base = OTHER; note = 2'-O-methylguanosine-3'-phosphate
  modified_base 21: mod_base = OTHER; note = 2'-O-methylcytidine-3'-phosphate
  modified_base 22: mod_base = OTHER; note = 2'-O-methyladenosine-3'-phosphate
  modified_base 23: mod_base = OTHER; note = 2'-O-methylcytidine
ttatccattaattttatcagcac

SEQ ID NO: 5704 - RNA, 23 nt, synthetic construct
  source 1..23: mol_type = other RNA
  modified_base 1: mod_base = OTHER; note = 2'-O-methyluridine-3'-phosphate 5'-(E)-Vinylphosphonate
  modified_base 2: mod_base = OTHER; note = 2'-deoxy-2'-fluorouridine-3'-phosphate
  modified_base 3: mod_base = OTHER; note = 2'-O-methyluridine-3'-phosphate
  modified_base 4: mod_base = OTHER; note = 2'-O-methylcytidine-3'-phosphate
  modified_base 5: mod_base = OTHER; note = 2'-O-methyluridine-3'-phosphate
  modified_base 6: mod_base = OTHER; note = 2'-deoxy-2'-fluoroadenosine-3'-phosphate
  modified_base 7: mod_base = OTHER; note = 2'-O-methyluridine-3'-phosphate
  modified_base 8: mod_base = OTHER; note = 2'-O-methyladenosine-3'-phosphate
  modified_base 9: mod_base = OTHER; note = 2'-O-methylcytidine-3'-phosphate
  modified_base 10: mod_base = OTHER; note = 2'-O-methyluridine-3'-phosphate
  modified_base 11: mod_base = OTHER; note = 2'-O-methylcytidine-3'-phosphate
  modified_base 12: mod_base = OTHER; note = 2'-O-methyluridine-3'-phosphate
  modified_base 13: mod_base = OTHER; note = 2'-O-methylcytidine-3'-phosphate
  modified_base 14: mod_base = OTHER; note = 2'-deoxy-2'-fluoroadenosine-3'-phosphate
  modified_base 15: mod_base = OTHER; note = 2'-O-methylcytidine-3'-phosphate
  modified_base 16: mod_base = OTHER; note = 2'-deoxy-2'-fluoroadenosine-3'-phosphate
  modified_base 17: mod_base = OTHER; note = 2'-O-methylguanosine-3'-phosphate
  modified_base 18: mod_base = OTHER; note = 2'-O-methyluridine-3'-phosphate
  modified_base 19: mod_base = OTHER; note = 2'-O-methyluridine-3'-phosphate
  modified_base 20: mod_base = OTHER; note = 2'-O-methylcytidine-3'-phosphate
  modified_base 21: mod_base = OTHER; note = 2'-O-methylcytidine-3'-phosphate
  modified_base 22: mod_base = OTHER; note = 2'-O-methyluridine-3'-phosphate
  modified_base 23: mod_base = OTHER; note = 2'-O-methyladenosine
tttctatactctcacagttccta

SEQ ID NO: 5705 - RNA, 23 nt, synthetic construct
  source 1..23: mol_type = other RNA
  modified_base 1: mod_base = OTHER; note = 2'-O-methyluridine-3'-phosphate 5'-(E)-Vinylphosphonate
  modified_base 2: mod_base = OTHER; note = 2'-deoxy-2'-fluoroadenosine-3'-phosphate
  modified_base 3: mod_base = OTHER; note = 2'-O-methyluridine-3'-phosphate
  modified_base 4: mod_base = OTHER; note = 2'-O-methyluridine-3'-phosphate
  modified_base 5: mod_base = OTHER; note = 2'-O-methylcytidine-3'-phosphate
  modified_base 6: mod_base = OTHER; note = 2'-deoxy-2'-fluorouridine-3'-phosphate
  modified_base 7: mod_base = OTHER; note = 2'-O-methyladenosine-3'-phosphate
  modified_base 8: mod_base = OTHER; note = 2'-O-methyluridine-3'-phosphate
  modified_base 9: mod_base = OTHER; note = 2'-O-methyladenosine-3'-phosphate
  modified_base 10: mod_base = OTHER; note = 2'-O-methylcytidine-3'-phosphate
  modified_base 11: mod_base = OTHER; note = 2'-O-methyluridine-3'-phosphate
  modified_base 12: mod_base = OTHER; note = 2'-O-methylcytidine-3'-phosphate
  modified_base 13: mod_base = OTHER; note = 2'-O-methyluridine-3'-phosphate
  modified_base 14: mod_base = OTHER; note = 2'-deoxy-2'-fluorocytidine-3'-phosphate
  modified_base 15: mod_base = OTHER; note = 2'-O-methyladenosine-3'-phosphate
  modified_base 16: mod_base = OTHER; note = 2'-deoxy-2'-fluorocytidine-3'-phosphate
  modified_base 17: mod_base = OTHER; note = 2'-O-methyladenosine-3'-phosphate
  modified_base 18: mod_base = OTHER; note = 2'-O-methylguanosine-3'-phosphate
  modified_base 19: mod_base = OTHER; note = 2'-O-methyluridine-3'-phosphate
  modified_base 20: mod_base = OTHER; note = 2'-O-methyluridine-3'-phosphate
  modified_base 21: mod_base = OTHER; note = 2'-O-methylcytidine-3'-phosphate
  modified_base 22: mod_base = OTHER; note = 2'-O-methylcytidine-3'-phosphate
  modified_base 23: mod_base = OTHER; note = 2'-O-methyluridine
tattctatactctcacagttcct

SEQ ID NO: 5706 - RNA, 23 nt, synthetic construct
  source 1..23: mol_type = other RNA
  modified_base 1: mod_base = OTHER; note = 2'-O-methyluridine-3'-phosphate 5'-(E)-Vinylphosphonate
  modified_base 2: mod_base = OTHER; note = 2'-deoxy-2'-fluoroadenosine-3'-phosphate
  modified_base 3: mod_base = OTHER; note = 2'-O-methyladenosine-3'-phosphate
  modified_base 4: mod_base = OTHER; note = 2'-O-methyluridine-3'-phosphate
  modified_base 5: mod_base = OTHER; note = 2'-O-methyluridine-3'-phosphate
  modified_base 6: mod_base = OTHER; note = 2'-deoxy-2'-fluorocytidine-3'-phosphate
  modified_base 7: mod_base = OTHER; note = 2'-O-methyluridine-3'-phosphate
  modified_base 8: mod_base = OTHER; note = 2'-O-methyladenosine-3'-phosphate
  modified_base 9: mod_base = OTHER; note = 2'-O-methyluridine-3'-phosphate
  modified_base 10: mod_base = OTHER; note = 2'-O-methyladenosine-3'-phosphate
  modified_base 11: mod_base = OTHER; note = 2'-O-methylcytidine-3'-phosphate
  modified_base 12: mod_base = OTHER; note = 2'-O-methyluridine-3'-phosphate
  modified_base 13: mod_base = OTHER; note = 2'-O-methylcytidine-3'-phosphate
  modified_base 14: mod_base = OTHER; note = 2'-deoxy-2'-fluorouridine-3'-phosphate
  modified_base 15: mod_base = OTHER; note = 2'-O-methylcytidine-3'-phosphate
  modified_base 16: mod_base = OTHER; note = 2'-deoxy-2'-fluoroadenosine-3'-phosphate
  modified_base 17: mod_base = OTHER; note = 2'-O-methylcytidine-3'-phosphate
  modified_base 18: mod_base = OTHER; note = 2'-O-methyladenosine-3'-phosphate
  modified_base 19: mod_base = OTHER; note = 2'-O-methylguanosine-3'-phosphate
  modified_base 20: mod_base = OTHER; note = 2'-O-methyluridine-3'-phosphate
  modified_base 21: mod_base = OTHER; note = 2'-O-methyluridine-3'-phosphate
  modified_base 22: mod_base = OTHER; note = 2'-O-methylcytidine-3'-phosphate
  modified_base 23: mod_base = OTHER; note = 2'-O-methylcytidine
taattctatactctcacagttcc

SEQ ID NO: 5707 - RNA, 23 nt, synthetic construct
  source 1..23: mol_type = other RNA
  modified_base 1: mod_base = OTHER; note = 2'-O-methyluridine-3'-phosphate 5'-(E)-Vinylphosphonate
  modified_base 2: mod_base = OTHER; note = 2'-deoxy-2'-fluoroadenosine-3'-phosphate
  modified_base 3: mod_base = OTHER; note = 2'-O-methyladenosine-3'-phosphate
  modified_base 4: mod_base = OTHER; note = 2'-O-methyladenosine-3'-phosphate
  modified_base 5: mod_base = OTHER; note = 2'-O-methyluridine-3'-phosphate
  modified_base 6: mod_base = OTHER; note = 2'-deoxy-2'-fluorouridine-3'-phosphate
  modified_base 7: mod_base = OTHER; note = 2'-O-methylcytidine-3'-phosphate
  modified_base 8: mod_base = OTHER; note = 2'-O-methyluridine-3'-phosphate
  modified_base 9: mod_base = OTHER; note = 2'-O-methyladenosine-3'-phosphate
  modified_base 10: mod_base = OTHER; note = 2'-O-methyluridine-3'-phosphate
  modified_base 11: mod_base = OTHER; note = 2'-O-methyladenosine-3'-phosphate
  modified_base 12: mod_base = OTHER; note = 2'-O-methylcytidine-3'-phosphate
  modified_base 13: mod_base = OTHER; note = 2'-O-methyluridine-3'-phosphate
  modified_base 14: mod_base = OTHER; note = 2'-deoxy-2'-fluorocytidine-3'-phosphate
  modified_base 15: mod_base = OTHER; note = 2'-O-methyluridine-3'-phosphate
  modified_base 16: mod_base = OTHER; note = 2'-deoxy-2'-fluorocytidine-3'-phosphate
  modified_base 17: mod_base = OTHER; note = 2'-O-methyladenosine-3'-phosphate
  modified_base 18: mod_base = OTHER; note = 2'-O-methylcytidine-3'-phosphate
  modified_base 19: mod_base = OTHER; note = 2'-O-methyladenosine-3'-phosphate
  modified_base 20: mod_base = OTHER; note = 2'-O-methylguanosine-3'-phosphate
  modified_base 21: mod_base = OTHER; note = 2'-O-methyluridine-3'-phosphate
  modified_base 22: mod_base = OTHER; note = 2'-O-methyluridine-3'-phosphate
  modified_base 23: mod_base = OTHER; note = 2'-O-methylcytidine
taaattctatactctcacagttc

SEQ ID NO: 5708 - RNA, 23 nt, synthetic construct
  source 1..23: mol_type = other RNA
  modified_base 1: mod_base = OTHER; note = 2'-O-methyluridine-3'-phosphate 5'-(E)-Vinylphosphonate
  modified_base 2: mod_base = OTHER; note = 2'-deoxy-2'-fluoroguanosine-3'-phosphate
  modified_base 3: mod_base = OTHER; note = 2'-O-methyladenosine-3'-phosphate
  modified_base 4: mod_base = OTHER; note = 2'-O-methyladenosine-3'-phosphate
  modified_base 5: mod_base = OTHER; note = 2'-O-methyladenosine-3'-phosphate
  modified_base 6: mod_base = OTHER; note = 2'-deoxy-2'-fluorouridine-3'-phosphate
  modified_base 7: mod_base = OTHER; note = 2'-O-methyluridine-3'-phosphate
  modified_base 8: mod_base = OTHER; note = 2'-O-methylcytidine-3'-phosphate
  modified_base 9: mod_base = OTHER; note = 2'-O-methyluridine-3'-phosphate
  modified_base 10: mod_base = OTHER; note = 2'-O-methyladenosine-3'-phosphate
  modified_base 11: mod_base = OTHER; note = 2'-O-methyluridine-3'-phosphate
  modified_base 12: mod_base = OTHER; note = 2'-O-methyladenosine-3'-phosphate
  modified_base 13: mod_base = OTHER; note = 2'-O-methylcytidine-3'-phosphate
  modified_base 14: mod_base = OTHER; note = 2'-deoxy-2'-fluorouridine-3'-phosphate
  modified_base 15: mod_base = OTHER; note = 2'-O-methylcytidine-3'-phosphate
  modified_base 16: mod_base = OTHER; note = 2'-deoxy-2'-fluorouridine-3'-phosphate
  modified_base 17: mod_base = OTHER; note = 2'-O-methylcytidine-3'-phosphate
  modified_base 18: mod_base = OTHER; note = 2'-O-methyladenosine-3'-phosphate
  modified_base 19: mod_base = OTHER; note = 2'-O-methylcytidine-3'-phosphate
  modified_base 20: mod_base = OTHER; note = 2'-O-methyladenosine-3'-phosphate
  modified_base 21: mod_base = OTHER; note = 2'-O-methylguanosine-3'-phosphate
  modified_base 22: mod_base = OTHER; note = 2'-O-methyluridine-3'-phosphate
  modified_base 23: mod_base = OTHER; note = 2'-O-methyluridine
tgaaattctatactctcacagtt

SEQ ID NO: 5709 - RNA, 23 nt, synthetic construct
  source 1..23: mol_type = other RNA
  modified_base 1: mod_base = OTHER; note = 2'-O-methyluridine-3'-phosphate 5'-(E)-Vinylphosphonate
  modified_base 2: mod_base = OTHER; note = 2'-deoxy-2'-fluoroadenosine-3'-phosphate
  modified_base 3: mod_base = OTHER; note = 2'-O-methylguanosine-3'-phosphate
  modified_base 4: mod_base = OTHER; note = 2'-O-methyladenosine-3'-phosphate
  modified_base 5: mod_base = OTHER; note = 2'-O-methyladenosine-3'-phosphate
  modified_base 6: mod_base = OTHER; note = 2'-deoxy-2'-fluoroadenosine-3'-phosphate
  modified_base 7: mod_base = OTHER; note = 2'-O-methyluridine-3'-phosphate
  modified_base 8: mod_base = OTHER; note = 2'-O-methyluridine-3'-phosphate
  modified_base 9: mod_base = OTHER; note = 2'-O-methylcytidine-3'-phosphate
  modified_base 10: mod_base = OTHER; note = 2'-O-methyluridine-3'-phosphate
  modified_base 11: mod_base = OTHER; note = 2'-O-methyladenosine-3'-phosphate
  modified_base 12: mod_base = OTHER; note = 2'-O-methyluridine-3'-phosphate
  modified_base 13: mod_base = OTHER; note = 2'-O-methyladenosine-3'-phosphate
  modified_base 14: mod_base = OTHER; note = 2'-deoxy-2'-fluorocytidine-3'-phosphate
  modified_base 15: mod_base = OTHER; note = 2'-O-methyluridine-3'-phosphate
  modified_base 16: mod_base = OTHER; note = 2'-deoxy-2'-fluorocytidine-3'-phosphate
  modified_base 17: mod_base = OTHER; note = 2'-O-methyluridine-3'-phosphate
  modified_base 18: mod_base = OTHER; note = 2'-O-methylcytidine-3'-phosphate
  modified_base 19: mod_base = OTHER; note = 2'-O-methyladenosine-3'-phosphate
  modified_base 20: mod_base = OTHER; note = 2'-O-methylcytidine-3'-phosphate
  modified_base 21: mod_base = OTHER; note = 2'-O-methyladenosine-3'-phosphate
  modified_base 22: mod_base = OTHER; note = 2'-O-methylguanosine-3'-phosphate
  modified_base 23: mod_base = OTHER; note = 2'-O-methyluridine
tagaaattctatactctcacagt

SEQ ID NO: 5710 - RNA, 23 nt, synthetic construct
  source 1..23: mol_type = other RNA
  modified_base 1: mod_base = OTHER; note = 2'-O-methyluridine-3'-phosphate 5'-(E)-Vinylphosphonate
  modified_base 2: mod_base = OTHER; note = 2'-deoxy-2'-fluoroadenosine-3'-phosphate
  modified_base 3: mod_base = OTHER; note = 2'-O-methyladenosine-3'-phosphate
  modified_base 4: mod_base = OTHER; note = 2'-O-methylguanosine-3'-phosphate
  modified_base 5: mod_base = OTHER; note = 2'-O-methyladenosine-3'-phosphate
  modified_base 6: mod_base = OTHER; note = 2'-deoxy-2'-fluoroadenosine-3'-phosphate
  modified_base 7: mod_base = OTHER; note = 2'-O-methyladenosine-3'-phosphate
  modified_base 8: mod_base = OTHER; note = 2'-O-methyluridine-3'-phosphate
  modified_base 9: mod_base = OTHER; note = 2'-O-methyluridine-3'-phosphate
  modified_base 10: mod_base = OTHER; note = 2'-O-methylcytidine-3'-phosphate
  modified_base 11: mod_base = OTHER; note = 2'-O-methyluridine-3'-phosphate
  modified_base 12: mod_base = OTHER; note = 2'-O-methyladenosine-3'-phosphate
  modified_base 13: mod_base = OTHER; note = 2'-O-methyluridine-3'-phosphate
  modified_base 14: mod_base = OTHER; note = 2'-deoxy-2'-fluoroadenosine-3'-phosphate
  modified_base 15: mod_base = OTHER; note = 2'-O-methylcytidine-3'-phosphate
  modified_base 16: mod_base = OTHER; note = 2'-deoxy-2'-fluorouridine-3'-phosphate
  modified_base 17: mod_base = OTHER; note = 2'-O-methylcytidine-3'-phosphate
  modified_base 18: mod_base = OTHER; note = 2'-O-methyluridine-3'-phosphate
  modified_base 19: mod_base = OTHER; note = 2'-O-methylcytidine-3'-phosphate
  modified_base 20: mod_base = OTHER; note = 2'-O-methyladenosine-3'-phosphate
  modified_base 21: mod_base = OTHER; note = 2'-O-methylcytidine-3'-phosphate
  modified_base 22: mod_base = OTHER; note = 2'-O-methyladenosine-3'-phosphate
  modified_base 23: mod_base = OTHER; note = 2'-O-methylguanosine
taagaaattctatactctcacag

SEQ ID NO: 5711 - RNA, 23 nt, synthetic construct
  source 1..23: mol_type = other RNA
  modified_base 1: mod_base = OTHER; note = 2'-O-methyluridine-3'-phosphate 5'-(E)-Vinylphosphonate
  modified_base 2: mod_base = OTHER; note = 2'-deoxy-2'-fluorouridine-3'-phosphate
  modified_base 3: mod_base = OTHER; note = 2'-O-methyladenosine-3'-phosphate
  modified_base 4: mod_base = OTHER; note = 2'-O-methyladenosine-3'-phosphate
  modified_base 5: mod_base = OTHER; note = 2'-O-methylguanosine-3'-phosphate
  modified_base 6: mod_base = OTHER; note = 2'-deoxy-2'-fluoroadenosine-3'-phosphate
  modified_base 7: mod_base = OTHER; note = 2'-O-methyladenosine-3'-phosphate
  modified_base 8: mod_base = OTHER; note = 2'-O-methyladenosine-3'-phosphate
  modified_base 9: mod_base = OTHER; note = 2'-O-methyluridine-3'-phosphate
  modified_base 10: mod_base = OTHER; note = 2'-O-methyluridine-3'-phosphate
  modified_base 11: mod_base = OTHER; note = 2'-O-methylcytidine-3'-phosphate
  modified_base 12: mod_base = OTHER; note = 2'-O-methyluridine-3'-phosphate
  modified_base 13: mod_base = OTHER; note = 2'-O-methyladenosine-3'-phosphate
  modified_base 14: mod_base = OTHER; note = 2'-deoxy-2'-fluorouridine-3'-phosphate
  modified_base 15: mod_base = OTHER; note = 2'-O-methyladenosine-3'-phosphate
  modified_base 16: mod_base = OTHER; note = 2'-deoxy-2'-fluorocytidine-3'-phosphate
  modified_base 17: mod_base = OTHER; note = 2'-O-methyluridine-3'-phosphate
  modified_base 18: mod_base = OTHER; note = 2'-O-methylcytidine-3'-phosphate
  modified_base 19: mod_base = OTHER; note = 2'-O-methyluridine-3'-phosphate
  modified_base 20: mod_base = OTHER; note = 2'-O-methylcytidine-3'-phosphate
  modified_base 21: mod_base = OTHER; note = 2'-O-methyladenosine-3'-phosphate
  modified_base 22: mod_base = OTHER; note = 2'-O-methylcytidine-3'-phosphate
  modified_base 23: mod_base = OTHER; note = 2'-O-methyladenosine
ttaagaaattctatactctcaca

SEQ ID NO: 5712 - RNA, 23 nt, synthetic construct
  source 1..23: mol_type = other RNA
  modified_base 1: mod_base = OTHER; note = 2'-O-methyluridine-3'-phosphate 5'-(E)-Vinylphosphonate
  modified_base 2: mod_base = OTHER; note = 2'-deoxy-2'-fluorocytidine-3'-phosphate
  modified_base 3: mod_base = OTHER; note = 2'-O-methyluridine-3'-phosphate
  modified_base 4: mod_base = OTHER; note = 2'-O-methyladenosine-3'-phosphate
  modified_base 5: mod_base = OTHER; note = 2'-O-methyladenosine-3'-phosphate
  modified_base 6: mod_base = OTHER; note = 2'-deoxy-2'-fluoroguanosine-3'-phosphate
  modified_base 7: mod_base = OTHER; note = 2'-O-methyladenosine-3'-phosphate
  modified_base 8: mod_base = OTHER; note = 2'-O-methyladenosine-3'-phosphate
  modified_base 9: mod_base = OTHER; note = 2'-O-methyladenosine-3'-phosphate
  modified_base 10: mod_base = OTHER; note = 2'-O-methyluridine-3'-phosphate
  modified_base 11: mod_base = OTHER; note = 2'-O-methyluridine-3'-phosphate
  modified_base 12: mod_base = OTHER; note = 2'-O-methylcytidine-3'-phosphate
  modified_base 13: mod_base = OTHER; note = 2'-O-methyluridine-3'-phosphate
  modified_base 14: mod_base = OTHER; note = 2'-deoxy-2'-fluoroadenosine-3'-phosphate
  modified_base 15: mod_base = OTHER; note = 2'-O-methyluridine-3'-phosphate
  modified_base 16: mod_base = OTHER; note = 2'-deoxy-2'-fluoroadenosine-3'-phosphate
  modified_base 17: mod_base = OTHER; note = 2'-O-methylcytidine-3'-phosphate
  modified_base 18: mod_base = OTHER; note = 2'-O-methyluridine-3'-phosphate
  modified_base 19: mod_base = OTHER; note = 2'-O-methylcytidine-3'-phosphate
  modified_base 20: mod_base = OTHER; note = 2'-O-methyluridine-3'-phosphate
  modified_base 21: mod_base = OTHER; note = 2'-O-methylcytidine-3'-phosphate
  modified_base 22: mod_base = OTHER; note = 2'-O-methyladenosine-3'-phosphate
  modified_base 23: mod_base = OTHER; note = 2'-O-methylcytidine
tctaagaaattctatactctcac

SEQ ID NO: 5713 - RNA, 23 nt, synthetic construct
  source 1..23: mol_type = other RNA
  modified_base 1: mod_base = OTHER; note = 2'-O-methyluridine-3'-phosphate 5'-(E)-Vinylphosphonate
  modified_base 2: mod_base = OTHER; note = 2'-deoxy-2'-fluoroadenosine-3'-phosphate
  modified_base 3: mod_base = OTHER; note = 2'-O-methylcytidine-3'-phosphate
  modified_base 4: mod_base = OTHER; note = 2'-O-methyluridine-3'-phosphate
  modified_base 5: mod_base = OTHER; note = 2'-O-methyladenosine-3'-phosphate
  modified_base 6: mod_base = OTHER; note = 2'-deoxy-2'-fluoroadenosine-3'-phosphate
  modified_base 7: mod_base = OTHER; note = 2'-O-methylguanosine-3'-phosphate
  modified_base 8: mod_base = OTHER; note = 2'-O-methyladenosine-3'-phosphate
  modified_base 9: mod_base = OTHER; note = 2'-O-methyladenosine-3'-phosphate
  modified_base 10: mod_base = OTHER; note = 2'-O-methyladenosine-3'-phosphate
  modified_base 11: mod_base = OTHER; note = 2'-O-methyluridine-3'-phosphate
  modified_base 12: mod_base = OTHER; note = 2'-O-methyluridine-3'-phosphate
  modified_base 13: mod_base = OTHER; note = 2'-O-methylcytidine-3'-phosphate
  modified_base 14: mod_base = OTHER; note = 2'-deoxy-2'-fluorouridine-3'-phosphate
  modified_base 15: mod_base = OTHER; note = 2'-O-methyladenosine-3'-phosphate
  modified_base 16: mod_base = OTHER; note = 2'-deoxy-2'-fluorouridine-3'-phosphate
  modified_base 17: mod_base = OTHER; note = 2'-O-methyladenosine-3'-phosphate
  modified_base 18: mod_base = OTHER; note = 2'-O-methylcytidine-3'-phosphate
  modified_base 19: mod_base = OTHER; note = 2'-O-methyluridine-3'-phosphate
  modified_base 20: mod_base = OTHER; note = 2'-O-methylcytidine-3'-phosphate
  modified_base 21: mod_base = OTHER; note = 2'-O-methyluridine-3'-phosphate
  modified_base 22: mod_base = OTHER; note = 2'-O-methylcytidine-3'-phosphate
  modified_base 23: mod_base = OTHER; note = 2'-O-methyladenosine
tactaagaaattctatactctca

SEQ ID NO: 5714 - RNA, 23 nt, synthetic construct
  source 1..23: mol_type = other RNA
  modified_base 1: mod_base = OTHER; note = 2'-O-methyluridine-3'-phosphate 5'-(E)-Vinylphosphonate
  modified_base 2: mod_base = OTHER; note = 2'-deoxy-2'-fluorocytidine-3'-phosphate
  modified_base 3: mod_base = OTHER; note = 2'-O-methyladenosine-3'-phosphate
  modified_base 4: mod_base = OTHER; note = 2'-O-methylcytidine-3'-phosphate
  modified_base 5: mod_base = OTHER; note = 2'-O-methyluridine-3'-phosphate
  modified_base 6: mod_base = OTHER; note = 2'-deoxy-2'-fluoroadenosine-3'-phosphate
  modified_base 7: mod_base = OTHER; note = 2'-O-methyladenosine-3'-phosphate
  modified_base 8: mod_base = OTHER; note = 2'-O-methylguanosine-3'-phosphate
  modified_base 9: mod_base = OTHER; note = 2'-O-methyladenosine-3'-phosphate
  modified_base 10: mod_base = OTHER; note = 2'-O-methyladenosine-3'-phosphate
  modified_base 11: mod_base = OTHER; note = 2'-O-methyladenosine-3'-phosphate
  modified_base 12: mod_base = OTHER; note = 2'-O-methyluridine-3'-phosphate
  modified_base 13: mod_base = OTHER; note = 2'-O-methyluridine-3'-phosphate
  modified_base 14: mod_base = OTHER; note = 2'-deoxy-2'-fluorocytidine-3'-phosphate
  modified_base 15: mod_base = OTHER; note = 2'-O-methyluridine-3'-phosphate
  modified_base 16: mod_base = OTHER; note = 2'-deoxy-2'-fluoroadenosine-3'-phosphate
  modified_base 17: mod_base = OTHER; note = 2'-O-methyluridine-3'-phosphate
  modified_base 18: mod_base = OTHER; note = 2'-O-methyladenosine-3'-phosphate
  modified_base 19: mod_base = OTHER; note = 2'-O-methylcytidine-3'-phosphate
  modified_base 20: mod_base = OTHER; note = 2'-O-methyluridine-3'-phosphate
  modified_base 21: mod_base = OTHER; note = 2'-O-methylcytidine-3'-phosphate
  modified_base 22: mod_base = OTHER; note = 2'-O-methyluridine-3'-phosphate
  modified_base 23: mod_base = OTHER; note = 2'-O-methylcytidine
tcactaagaaattctatactctc

SEQ ID NO: 5715 - RNA, 23 nt, synthetic construct
  source 1..23: mol_type = other RNA
  modified_base 1: mod_base = OTHER; note = 2'-O-methyluridine-3'-phosphate 5'-(E)-Vinylphosphonate
  modified_base 2: mod_base = OTHER; note = 2'-deoxy-2'-fluoroguanosine-3'-phosphate
  modified_base 3: mod_base = OTHER; note = 2'-O-methylcytidine-3'-phosphate
  modified_base 4: mod_base = OTHER; note = 2'-O-methyladenosine-3'-phosphate
  modified_base 5: mod_base = OTHER; note = 2'-O-methylcytidine-3'-phosphate
  modified_base 6: mod_base = OTHER; note = 2'-deoxy-2'-fluorouridine-3'-phosphate
  modified_base 7: mod_base = OTHER; note = 2'-O-methyladenosine-3'-phosphate
  modified_base 8: mod_base = OTHER; note = 2'-O-methyladenosine-3'-phosphate
  modified_base 9: mod_base = OTHER; note = 2'-O-methylguanosine-3'-phosphate
  modified_base 10: mod_base = OTHER; note = 2'-O-methyladenosine-3'-phosphate
  modified_base 11: mod_base = OTHER; note = 2'-O-methyladenosine-3'-phosphate
  modified_base 12: mod_base = OTHER; note = 2'-O-methyladenosine-3'-phosphate
  modified_base 13: mod_base = OTHER; note = 2'-O-methyluridine-3'-phosphate
  modified_base 14: mod_base = OTHER; note = 2'-deoxy-2'-fluorouridine-3'-phosphate
  modified_base 15: mod_base = OTHER; note = 2'-O-methylcytidine-3'-phosphate
  modified_base 16: mod_base = OTHER; note = 2'-deoxy-2'-fluorouridine-3'-phosphate
  modified_base 17: mod_base = OTHER; note = 2'-O-methyladenosine-3'-phosphate
  modified_base 18: mod_base = OTHER; note = 2'-O-methyluridine-3'-phosphate
  modified_base 19: mod_base = OTHER; note = 2'-O-methyladenosine-3'-phosphate
  modified_base 20: mod_base = OTHER; note = 2'-O-methylcytidine-3'-phosphate
  modified_base 21: mod_base = OTHER; note = 2'-O-methyluridine-3'-phosphate
  modified_base 22: mod_base = OTHER; note = 2'-O-methylcytidine-3'-phosphate
  modified_base 23: mod_base = OTHER; note = 2'-O-methyluridine
tgcactaagaaattctatactct

SEQ ID NO: 5716 - RNA, 23 nt, synthetic construct
  source 1..23: mol_type = other RNA
  modified_base 1: mod_base = OTHER; note = 2'-O-methyluridine-3'-phosphate 5'-(E)-Vinylphosphonate
  modified_base 2: mod_base = OTHER; note = 2'-deoxy-2'-fluorouridine-3'-phosphate
  modified_base 3: mod_base = OTHER; note = 2'-O-methylguanosine-3'-phosphate
  modified_base 4: mod_base = OTHER; note = 2'-O-methylcytidine-3'-phosphate
  modified_base 5: mod_base = OTHER; note = 2'-O-methyladenosine-3'-phosphate
  modified_base 6: mod_base = OTHER; note = 2'-deoxy-2'-fluorocytidine-3'-phosphate
  modified_base 7: mod_base = OTHER; note = 2'-O-methyluridine-3'-phosphate
  modified_base 8: mod_base = OTHER; note = 2'-O-methyladenosine-3'-phosphate
  modified_base 9: mod_base = OTHER; note = 2'-O-methyladenosine-3'-phosphate
  modified_base 10: mod_base = OTHER; note = 2'-O-methylguanosine-3'-phosphate
  modified_base 11: mod_base = OTHER; note = 2'-O-methyladenosine-3'-phosphate
  modified_base 12: mod_base = OTHER; note = 2'-O-methyladenosine-3'-phosphate
  modified_base 13: mod_base = OTHER; note = 2'-O-methyladenosine-3'-phosphate
  modified_base 14: mod_base = OTHER; note = 2'-deoxy-2'-fluorouridine-3'-phosphate
  modified_base 15: mod_base = OTHER; note = 2'-O-methyluridine-3'-phosphate
  modified_base 16: mod_base = OTHER; note = 2'-deoxy-2'-fluorocytidine-3'-phosphate
  modified_base 17: mod_base = OTHER; note = 2'-O-methyluridine-3'-phosphate
  modified_base 18: mod_base = OTHER; note = 2'-O-methyladenosine-3'-phosphate
  modified_base 19: mod_base = OTHER; note = 2'-O-methyluridine-3'-phosphate
  modified_base 20: mod_base = OTHER; note = 2'-O-methyladenosine-3'-phosphate
  modified_base 21: mod_base = OTHER; note = 2'-O-methylcytidine-3'-phosphate
  modified_base 22: mod_base = OTHER; note = 2'-O-methyluridine-3'-phosphate
  modified_base 23: mod_base = OTHER; note = 2'-O-methylcytidine
ttgcactaagaaattctatactc

SEQ ID NO: 5717 - RNA, 23 nt, synthetic construct
  source 1..23: mol_type = other RNA
  modified_base 1: mod_base = OTHER; note = 2'-O-methyluridine-3'-phosphate 5'-(E)-Vinylphosphonate
  modified_base 2: mod_base = OTHER; note = 2'-deoxy-2'-fluoroguanosine-3'-phosphate
  modified_base 3: mod_base = OTHER; note = 2'-O-methyladenosine-3'-phosphate
  modified_base 4: mod_base = OTHER; note = 2'-O-methylguanosine-3'-phosphate
  modified_base 5: mod_base = OTHER; note = 2'-O-methyladenosine-3'-phosphate
  modified_base 6: mod_base = OTHER; note = 2'-deoxy-2'-fluoroadenosine-3'-phosphate
  modified_base 7: mod_base = OTHER; note = 2'-O-methyladenosine-3'-phosphate
  modified_base 8: mod_base = OTHER; note = 2'-O-methylguanosine-3'-phosphate
  modified_base 9: mod_base = OTHER; note = 2'-O-methyladenosine-3'-phosphate
  modified_base 10: mod_base = OTHER; note = 2'-O-methyladenosine-3'-phosphate
  modified_base 11: mod_base = OTHER; note = 2'-O-methylcytidine-3'-phosphate
  modified_base 12: mod_base = OTHER; note = 2'-O-methyladenosine-3'-phosphate
  modified_base 13: mod_base = OTHER; note = 2'-O-methylguanosine-3'-phosphate
  modified_base 14: mod_base = OTHER; note = 2'-deoxy-2'-fluorouridine-3'-phosphate
  modified_base 15: mod_base = OTHER; note = 2'-O-methylcytidine-3'-phosphate
  modified_base 16: mod_base = OTHER; note = 2'-deoxy-2'-fluorocytidine-3'-phosphate
  modified_base 17: mod_base = OTHER; note = 2'-O-methyluridine-3'-phosphate
  modified_base 18: mod_base = OTHER; note = 2'-O-methyluridine-3'-phosphate
  modified_base 19: mod_base = OTHER; note = 2'-O-methyladenosine-3'-phosphate
  modified_base 20: mod_base = OTHER; note = 2'-O-methylcytidine-3'-phosphate
  modified_base 21: mod_base = OTHER; note = 2'-O-methyladenosine-3'-phosphate
  modified_base 22: mod_base = OTHER; note = 2'-O-methylguanosine-3'-phosphate
  modified_base 23: mod_base = OTHER; note = 2'-O-methyladenosine
tgagaaagaacagtccttacaga

SEQ ID NO: 5718 - RNA, 23 nt, synthetic construct
  source 1..23: mol_type = other RNA
  modified_base 1: mod_base = OTHER; note = 2'-O-methyluridine-3'-phosphate 5'-(E)-Vinylphosphonate
  modified_base 2: mod_base = OTHER; note = 2'-deoxy-2'-fluoroadenosine-3'-phosphate
  modified_base 3: mod_base = OTHER; note = 2'-O-methyladenosine-3'-phosphate
  modified_base 4: mod_base = OTHER; note = 2'-O-methyladenosine-3'-phosphate
  modified_base 5: mod_base = OTHER; note = 2'-O-methyladenosine-3'-phosphate
  modified_base 6: mod_base = OTHER; note = 2'-deoxy-2'-fluoroguanosine-3'-phosphate
  modified_base 7: mod_base = OTHER; note = 2'-O-methyluridine-3'-phosphate
  modified_base 8: mod_base = OTHER; note = 2'-O-methyluridine-3'-phosphate
  modified_base 9: mod_base = OTHER; note = 2'-O-methyladenosine-3'-phosphate
  modified_base 10: mod_base = OTHER; note = 2'-O-methylguanosine-3'-phosphate
  modified_base 11: mod_base = OTHER; note = 2'-O-methyladenosine-3'-phosphate
  modified_base 12: mod_base = OTHER; note = 2'-O-methyluridine-3'-phosphate
  modified_base 13: mod_base = OTHER; note = 2'-O-methyladenosine-3'-phosphate
  modified_base 14: mod_base = OTHER; note = 2'-deoxy-2'-fluoroadenosine-3'-phosphate
  modified_base 15: mod_base = OTHER; note = 2'-O-methyluridine-3'-phosphate
  modified_base 16: mod_base = OTHER; note = 2'-deoxy-2'-fluoroadenosine-3'-phosphate
  modified_base 17: mod_base = OTHER; note = 2'-O-methyluridine-3'-phosphate
  modified_base 18: mod_base = OTHER; note = 2'-O-methylcytidine-3'-phosphate
  modified_base 19: mod_base = OTHER; note = 2'-O-methylcytidine-3'-phosphate
  modified_base 20: mod_base = OTHER; note = 2'-O-methylcytidine-3'-phosphate
  modified_base 21: mod_base = OTHER; note = 2'-O-methyladenosine-3'-phosphate
  modified_base 22: mod_base = OTHER; note = 2'-O-methylcytidine-3'-phosphate
  modified_base 23: mod_base = OTHER; note = 2'-O-methyluridine
taaaagttagataatatcccact

SEQ ID NO: 5719 - RNA, 23 nt, synthetic construct
  source 1..23: mol_type = other RNA
  modified_base 1: mod_base = OTHER; note = 2'-O-methyluridine-3'-phosphate 5'-(E)-Vinylphosphonate
  modified_base 2: mod_base = OTHER; note = 2'-deoxy-2'-fluoroguanosine-3'-phosphate
  modified_base 3: mod_base = OTHER; note = 2'-O-methyladenosine-3'-phosphate
  modified_base 4: mod_base = OTHER; note = 2'-O-methyladenosine-3'-phosphate
  modified_base 5: mod_base = OTHER; note = 2'-O-methylguanosine-3'-phosphate
  modified_base 6: mod_base = OTHER; note = 2'-deoxy-2'-fluoroadenosine-3'-phosphate
  modified_base 7: mod_base = OTHER; note = 2'-O-methyluridine-3'-phosphate
  modified_base 8: mod_base = OTHER; note = 2'-O-methylguanosine-3'-phosphate
  modified_base 9: mod_base = OTHER; note = 2'-O-methyladenosine-3'-phosphate
  modified_base 10: mod_base = OTHER; note = 2'-O-methyladenosine-3'-phosphate
  modified_base 11: mod_base = OTHER; note = 2'-O-methyluridine-3'-phosphate
  modified_base 12: mod_base = OTHER; note = 2'-O-methylguanosine-3'-phosphate
  modified_base 13: mod_base = OTHER; note = 2'-O-methylcytidine-3'-phosphate
  modified_base 14: mod_base = OTHER; note = 2'-deoxy-2'-fluorocytidine-3'-phosphate
  modified_base 15: mod_base = OTHER; note = 2'-O-methyladenosine-3'-phosphate
  modified_base 16: mod_base = OTHER; note = 2'-deoxy-2'-fluoroadenosine-3'-phosphate
  modified_base 17: mod_base = OTHER; note = 2'-O-methyladenosine-3'-phosphate
  modified_base 18: mod_base = OTHER; note = 2'-O-methylguanosine-3'-phosphate
  modified_base 19: mod_base = OTHER; note = 2'-O-methyladenosine-3'-phosphate
  modified_base 20: mod_base = OTHER; note = 2'-O-methylcytidine-3'-phosphate
  modified_base 21: mod_base = OTHER; note = 2'-O-methyladenosine-3'-phosphate
  modified_base 22: mod_base = OTHER; note = 2'-O-methyladenosine-3'-phosphate
  modified_base 23: mod_base = OTHER; note = 2'-O-methyladenosine
tgaagatgaatgccaaagacaaa

SEQ ID NO: 5720 - RNA, 23 nt, synthetic construct
  source 1..23: mol_type = other RNA
  modified_base 1: mod_base = OTHER; note = 2'-O-methyluridine-3'-phosphate 5'-(E)-Vinylphosphonate
  modified_base 2: mod_base = OTHER; note = 2'-deoxy-2'-fluoroadenosine-3'-phosphate
  modified_base 3: mod_base = OTHER; note = 2'-O-methyladenosine-3'-phosphate
  modified_base 4: mod_base = OTHER; note = 2'-O-methyladenosine-3'-phosphate
  modified_base 5: mod_base = OTHER; note = 2'-O-methyladenosine-3'-phosphate
  modified_base 6: mod_base = OTHER; note = 2'-deoxy-2'-fluoroguanosine-3'-phosphate
  modified_base 7: mod_base = OTHER; note = 2'-O-methyladenosine-3'-phosphate
  modified_base 8: mod_base = OTHER; note = 2'-O-methyladenosine-3'-phosphate
  modified_base 9: mod_base = OTHER; note = 2'-O-methylguanosine-3'-phosphate
  modified_base 10: mod_base = OTHER; note = 2'-O-methyladenosine-3'-phosphate
  modified_base 11: mod_base = OTHER; note = 2'-O-methyluridine-3'-phosphate
  modified_base 12: mod_base = OTHER; note = 2'-O-methylguanosine-3'-phosphate
  modified_base 13: mod_base = OTHER; note = 2'-O-methyladenosine-3'-phosphate
  modified_base 14: mod_base = OTHER; note = 2'-deoxy-2'-fluoroadenosine-3'-phosphate
  modified_base 15: mod_base = OTHER; note = 2'-O-methyluridine-3'-phosphate
  modified_base 16: mod_base = OTHER; note = 2'-deoxy-2'-fluoroguanosine-3'-phosphate
  modified_base 17: mod_base = OTHER; note = 2'-O-methylcytidine-3'-phosphate
  modified_base 18: mod_base = OTHER; note = 2'-O-methylcytidine-3'-phosphate
  modified_base 19: mod_base = OTHER; note = 2'-O-methyladenosine-3'-phosphate
  modified_base 20: mod_base = OTHER; note = 2'-O-methyladenosine-3'-phosphate
  modified_base 21: mod_base = OTHER; note = 2'-O-methyladenosine-3'-phosphate
  modified_base 22: mod_base = OTHER; note = 2'-O-methylguanosine-3'-phosphate
  modified_base 23: mod_base = OTHER; note = 2'-O-methyladenosine
taaaagaagatgaatgccaaaga

SEQ ID NO: 5721 - RNA, 23 nt, synthetic construct
  source 1..23: mol_type = other RNA
  modified_base 1: mod_base = OTHER; note = 2'-O-methyluridine-3'-phosphate 5'-(E)-Vinylphosphonate
  modified_base 2: mod_base = OTHER; note = 2'-deoxy-2'-fluorouridine-3'-phosphate
  modified_base 3: mod_base = OTHER; note = 2'-O-methylguanosine-3'-phosphate
  modified_base 4: mod_base = OTHER; note = 2'-O-methylcytidine-3'-phosphate
  modified_base 5: mod_base = OTHER; note = 2'-O-methylcytidine-3'-phosphate
  modified_base 6: mod_base = OTHER; note = 2'-deoxy-2'-fluoroadenosine-3'-phosphate
  modified_base 7: mod_base = OTHER; note = 2'-O-methyladenosine-3'-phosphate
  modified_base 8: mod_base = OTHER; note = 2'-O-methyladenosine-3'-phosphate
  modified_base 9: mod_base = OTHER; note = 2'-O-methylcytidine-3'-phosphate
  modified_base 10: mod_base = OTHER; note = 2'-O-methyladenosine-3'-phosphate
  modified_base 11: mod_base = OTHER; note = 2'-O-methyluridine-3'-phosphate
  modified_base 12: mod_base = OTHER; note = 2'-O-methyluridine-3'-phosphate
  modified_base 13: mod_base = OTHER; note = 2'-O-methyluridine-3'-phosphate
  modified_base 14: mod_base = OTHER; note = 2'-deoxy-2'-fluorouridine-3'-phosphate
  modified_base 15: mod_base = OTHER; note = 2'-O-methyluridine-3'-phosphate
  modified_base 16: mod_base = OTHER; note = 2'-deoxy-2'-fluorouridine-3'-phosphate
  modified_base 17: mod_base = OTHER; note = 2'-O-methyladenosine-3'-phosphate
  modified_base 18: mod_base = OTHER; note = 2'-O-methyladenosine-3'-phosphate
  modified_base 19: mod_base = OTHER; note = 2'-O-methyluridine-3'-phosphate
  modified_base 20: mod_base = OTHER; note = 2'-O-methylguanosine-3'-phosphate
  modified_base 21: mod_base = OTHER; note = 2'-O-methylcytidine-3'-phosphate
  modified_base 22: mod_base = OTHER; note = 2'-O-methyladenosine-3'-phosphate
  modified_base 23: mod_base = OTHER; note = 2'-O-methylcytidine
ttgccaaacattttttaatgcac

SEQ ID NO: 5722 - RNA, 23 nt, synthetic construct
  source 1..23: mol_type = other RNA
  modified_base 1: mod_base = OTHER; note = 2'-O-methyluridine-3'-phosphate 5'-(E)-Vinylphosphonate
  modified_base 2: mod_base = OTHER; note = 2'-deoxy-2'-fluoroadenosine-3'-phosphate
  modified_base 3: mod_base = OTHER; note = 2'-O-methyluridine-3'-phosphate
  modified_base 4: mod_base = OTHER; note = 2'-O-methyladenosine-3'-phosphate
  modified_base 5: mod_base = OTHER; note = 2'-O-methylcytidine-3'-phosphate
  modified_base 6: mod_base = OTHER; note = 2'-deoxy-2'-fluoroadenosine-3'-phosphate
  modified_base 7: mod_base = OTHER; note = 2'-O-methylguanosine-3'-phosphate
  modified_base 8: mod_base = OTHER; note = 2'-O-methylguanosine-3'-phosphate
  modified_base 9: mod_base = OTHER; note = 2'-O-methyladenosine-3'-phosphate
  modified_base 10: mod_base = OTHER; note = 2'-O-methyladenosine-3'-phosphate
  modified_base 11: mod_base = OTHER; note = 2'-O-methyluridine-3'-phosphate
  modified_base 12: mod_base = OTHER; note = 2'-O-methyluridine-3'-phosphate
  modified_base 13: mod_base = OTHER; note = 2'-O-methyladenosine-3'-phosphate
  modified_base 14: mod_base = OTHER; note = 2'-deoxy-2'-fluorouridine-3'-phosphate
  modified_base 15: mod_base = OTHER; note = 2'-O-methyladenosine-3'-phosphate
  modified_base 16: mod_base = OTHER; note = 2'-deoxy-2'-fluoroguanosine-3'-phosphate
  modified_base 17: mod_base = OTHER; note = 2'-O-methyladenosine-3'-phosphate
  modified_base 18: mod_base = OTHER; note = 2'-O-methylguanosine-3'-phosphate
  modified_base 19: mod_base = OTHER; note = 2'-O-methyluridine-3'-phosphate
  modified_base 20: mod_base = OTHER; note = 2'-O-methylguanosine-3'-phosphate
  modified_base 21: mod_base = OTHER; note = 2'-O-methyladenosine-3'-phosphate
  modified_base 22: mod_base = OTHER; note = 2'-O-methylcytidine-3'-phosphate
  modified_base 23: mod_base = OTHER; note = 2'-O-methyluridine
tatacaggaattatagagtgact

SEQ ID NO: 5723 - RNA, 23 nt, synthetic construct
  source 1..23: mol_type = other RNA
  modified_base 1: mod_base = OTHER; note = 2'-O-methyluridine-3'-phosphate 5'-(E)-Vinylphosphonate
  modified_base 2: mod_base = OTHER; note = 2'-deoxy-2'-fluoroguanosine-3'-phosphate
  modified_base 3: mod_base = OTHER; note = 2'-O-methyladenosine-3'-phosphate
  modified_base 4: mod_base = OTHER; note = 2'-O-methylcytidine-3'-phosphate
  modified_base 5: mod_base = OTHER; note = 2'-O-methyladenosine-3'-phosphate
  modified_base 6: mod_base = OTHER; note = 2'-deoxy-2'-fluoroguanosine-3'-phosphate
  modified_base 7: mod_base = OTHER; note = 2'-O-methylguanosine-3'-phosphate
  modified_base 8: mod_base = OTHER; note = 2'-O-methyluridine-3'-phosphate
  modified_base 9: mod_base = OTHER; note = 2'-O-methyluridine-3'-phosphate
  modified_base 10: mod_base = OTHER; note = 2'-O-methyladenosine-3'-phosphate
  modified_base 11: mod_base = OTHER; note = 2'-O-methyladenosine-3'-phosphate
  modified_base 12: mod_base = OTHER; note = 2'-O-methyladenosine-3'-phosphate
  modified_base 13: mod_base = OTHER; note = 2'-O-methylcytidine-3'-phosphate
  modified_base 14: mod_base = OTHER; note = 2'-deoxy-2'-fluoroguanosine-3'-phosphate
  modified_base 15: mod_base = OTHER; note = 2'-O-methyladenosine-3'-phosphate
  modified_base 16: mod_base = OTHER; note = 2'-deoxy-2'-fluorocytidine-3'-phosphate
  modified_base 17: mod_base = OTHER; note = 2'-O-methyladenosine-3'-phosphate
  modified_base 18: mod_base = OTHER; note = 2'-O-methyladenosine-3'-phosphate
  modified_base 19: mod_base = OTHER; note = 2'-O-methylcytidine-3'-phosphate
  modified_base 20: mod_base = OTHER; note = 2'-O-methyluridine-3'-phosphate
  modified_base 21: mod_base = OTHER; note = 2'-O-methyladenosine-3'-phosphate
  modified_base 22: mod_base = OTHER; note = 2'-O-methyladenosine-3'-phosphate
  modified_base 23: mod_base = OTHER; note = 2'-O-methyladenosine
tgacaggttaaacgacaactaaa

SEQ ID NO: 5724 - RNA, 23 nt, synthetic construct
  source 1..23: mol_type = other RNA
  modified_base 1: mod_base = OTHER; note = 2'-O-methyluridine-3'-phosphate 5'-(E)-Vinylphosphonate
  modified_base 2: mod_base = OTHER; note = 2'-deoxy-2'-fluoroguanosine-3'-phosphate
  modified_base 3: mod_base = OTHER; note = 2'-O-methylguanosine-3'-phosphate
  modified_base 4: mod_base = OTHER; note = 2'-O-methyladenosine-3'-phosphate
  modified_base 5: mod_base = OTHER; note = 2'-O-methylcytidine-3'-phosphate
  modified_base 6: mod_base = OTHER; note = 2'-deoxy-2'-fluoroadenosine-3'-phosphate
  modified_base 7: mod_base = OTHER; note = 2'-O-methylguanosine-3'-phosphate
  modified_base 8: mod_base = OTHER; note = 2'-O-methylguanosine-3'-phosphate
  modified_base 9: mod_base = OTHER; note = 2'-O-methyluridine-3'-phosphate
  modified_base 10: mod_base = OTHER; note = 2'-O-methyluridine-3'-phosphate
  modified_base 11: mod_base = OTHER; note = 2'-O-methyladenosine-3'-phosphate
  modified_base 12: mod_base = OTHER; note = 2'-O-methyladenosine-3'-phosphate
  modified_base 13: mod_base = OTHER; note = 2'-O-methyladenosine-3'-phosphate
  modified_base 14: mod_base = OTHER; note = 2'-deoxy-2'-fluorocytidine-3'-phosphate
  modified_base 15: mod_base = OTHER; note = 2'-O-methylguanosine-3'-phosphate
  modified_base 16: mod_base = OTHER; note = 2'-deoxy-2'-fluoroadenosine-3'-phosphate
  modified_base 17: mod_base = OTHER; note = 2'-O-methylcytidine-3'-phosphate
  modified_base 18: mod_base = OTHER; note = 2'-O-methyladenosine-3'-phosphate
  modified_base 19: mod_base = OTHER; note = 2'-O-methyladenosine-3'-phosphate
  modified_base 20: mod_base = OTHER; note = 2'-O-methylcytidine-3'-phosphate
  modified_base 21: mod_base = OTHER; note = 2'-O-methyluridine-3'-phosphate
  modified_base 22: mod_base = OTHER; note = 2'-O-methyladenosine-3'-phosphate
  modified_base 23: mod_base = OTHER; note = 2'-O-methyladenosine
tggacaggttaaacgacaactaa

SEQ ID NO: 5725 - RNA, 23 nt, synthetic construct
  source 1..23: mol_type = other RNA
  modified_base 1: mod_base = OTHER; note = 2'-O-methyluridine-3'-phosphate 5'-(E)-Vinylphosphonate
  modified_base 2: mod_base = OTHER; note = 2'-deoxy-2'-fluorouridine-3'-phosphate
  modified_base 3: mod_base = OTHER; note = 2'-O-methylguanosine-3'-phosphate
  modified_base 4: mod_base = OTHER; note = 2'-O-methylguanosine-3'-phosphate
  modified_base 5: mod_base = OTHER; note = 2'-O-methyladenosine-3'-phosphate
  modified_base 6: mod_base = OTHER; note = 2'-deoxy-2'-fluorocytidine-3'-phosphate
  modified_base 7: mod_base = OTHER; note = 2'-O-methyladenosine-3'-phosphate
  modified_base 8: mod_base = OTHER; note = 2'-O-methylguanosine-3'-phosphate
  modified_base 9: mod_base = OTHER; note = 2'-O-methylguanosine-3'-phosphate
  modified_base 10: mod_base = OTHER; note = 2'-O-methyluridine-3'-phosphate
  modified_base 11: mod_base = OTHER; note = 2'-O-methyluridine-3'-phosphate
  modified_base 12: mod_base = OTHER; note = 2'-O-methyladenosine-3'-phosphate
  modified_base 13: mod_base = OTHER; note = 2'-O-methyladenosine-3'-phosphate
  modified_base 14: mod_base = OTHER; note = 2'-deoxy-2'-fluoroadenosine-3'-phosphate
  modified_base 15: mod_base = OTHER; note = 2'-O-methylcytidine-3'-phosphate
  modified_base 16: mod_base = OTHER; note = 2'-deoxy-2'-fluoroguanosine-3'-phosphate
  modified_base 17: mod_base = OTHER; note = 2'-O-methyladenosine-3'-phosphate
  modified_base 18: mod_base = OTHER; note = 2'-O-methylcytidine-3'-phosphate
  modified_base 19: mod_base = OTHER; note = 2'-O-methyladenosine-3'-phosphate
  modified_base 20: mod_base = OTHER; note = 2'-O-methyladenosine-3'-phosphate
  modified_base 21: mod_base = OTHER; note = 2'-O-methylcytidine-3'-phosphate
  modified_base 22: mod_base = OTHER; note = 2'-O-methyluridine-3'-phosphate
  modified_base 23: mod_base = OTHER; note = 2'-O-methyladenosine
ttggacaggttaaacgacaacta

SEQ ID NO: 5726 - RNA, 23 nt, synthetic construct
  source 1..23: mol_type = other RNA
  modified_base 1: mod_base = OTHER; note = 2'-O-methyluridine-3'-phosphate 5'-(E)-Vinylphosphonate
  modified_base 2: mod_base = OTHER; note = 2'-deoxy-2'-fluorouridine-3'-phosphate
  modified_base 3: mod_base = OTHER; note = 2'-O-methyluridine-3'-phosphate
  modified_base 4: mod_base = OTHER; note = 2'-O-methylguanosine-3'-phosphate
  modified_base 5: mod_base = OTHER; note = 2'-O-methylguanosine-3'-phosphate
  modified_base 6: mod_base = OTHER; note = 2'-deoxy-2'-fluoroadenosine-3'-phosphate
  modified_base 7: mod_base = OTHER; note = 2'-O-methylcytidine-3'-phosphate
  modified_base 8: mod_base = OTHER; note = 2'-O-methyladenosine-3'-phosphate
  modified_base 9: mod_base = OTHER; note = 2'-O-methylguanosine-3'-phosphate
  modified_base 10: mod_base = OTHER; note = 2'-O-methylguanosine-3'-phosphate
  modified_base 11: mod_base = OTHER; note = 2'-O-methyluridine-3'-phosphate
  modified_base 12: mod_base = OTHER; note = 2'-O-methyluridine-3'-phosphate
  modified_base 13: mod_base = OTHER; note = 2'-O-methyladenosine-3'-phosphate
  modified_base 14: mod_base = OTHER; note = 2'-deoxy-2'-fluoroadenosine-3'-phosphate
  modified_base 15: mod_base = OTHER; note = 2'-O-methyladenosine-3'-phosphate
  modified_base 16: mod_base = OTHER; note = 2'-deoxy-2'-fluorocytidine-3'-phosphate
  modified_base 17: mod_base = OTHER; note = 2'-O-methylguanosine-3'-phosphate
  modified_base 18: mod_base = OTHER; note = 2'-O-methyladenosine-3'-phosphate
  modified_base 19: mod_base = OTHER; note = 2'-O-methylcytidine-3'-phosphate
  modified_base 20: mod_base = OTHER; note = 2'-O-methyladenosine-3'-phosphate
  modified_base 21: mod_base = OTHER; note = 2'-O-methyladenosine-3'-phosphate
  modified_base 22: mod_base = OTHER; note = 2'-O-methylcytidine-3'-phosphate
  modified_base 23: mod_base = OTHER; note = 2'-O-methyluridine
tttggacaggttaaacgacaact

SEQ ID NO: 5727 - RNA, 23 nt, synthetic construct
  source 1..23: mol_type = other RNA
  modified_base 1: mod_base = OTHER; note = 2'-O-methyluridine-3'-phosphate 5'-(E)-Vinylphosphonate
  modified_base 2: mod_base = OTHER; note = 2'-deoxy-2'-fluorouridine-3'-phosphate
  modified_base 3: mod_base = OTHER; note = 2'-O-methyluridine-3'-phosphate
  modified_base 4: mod_base = OTHER; note = 2'-O-methyluridine-3'-phosphate
  modified_base 5: mod_base = OTHER; note = 2'-O-methylguanosine-3'-phosphate
  modified_base 6: mod_base = OTHER; note = 2'-deoxy-2'-fluoroguanosine-3'-phosphate
  modified_base 7: mod_base = OTHER; note = 2'-O-methyladenosine-3'-phosphate
  modified_base 8: mod_base = OTHER; note = 2'-O-methylcytidine-3'-phosphate
  modified_base 9: mod_base = OTHER; note = 2'-O-methyladenosine-3'-phosphate
  modified_base 10: mod_base = OTHER; note = 2'-O-methylguanosine-3'-phosphate
  modified_base 11: mod_base = OTHER; note = 2'-O-methylguanosine-3'-phosphate
  modified_base 12: mod_base = OTHER; note = 2'-O-methyluridine-3'-phosphate
  modified_base 13: mod_base = OTHER; note = 2'-O-methyluridine-3'-phosphate
  modified_base 14: mod_base = OTHER; note = 2'-deoxy-2'-fluoroadenosine-3'-phosphate
  modified_base 15: mod_base = OTHER; note = 2'-O-methyladenosine-3'-phosphate
  modified_base 16: mod_base = OTHER; note = 2'-deoxy-2'-fluoroadenosine-3'-phosphate
  modified_base 17: mod_base = OTHER; note = 2'-O-methylcytidine-3'-phosphate
  modified_base 18: mod_base = OTHER; note = 2'-O-methylguanosine-3'-phosphate
  modified_base 19: mod_base = OTHER; note = 2'-O-methyladenosine-3'-phosphate
  modified_base 20: mod_base = OTHER; note = 2'-O-methylcytidine-3'-phosphate
  modified_base 21: mod_base = OTHER; note = 2'-O-methyladenosine-3'-phosphate
  modified_base 22: mod_base = OTHER; note = 2'-O-methyladenosine-3'-phosphate
  modified_base 23: mod_base = OTHER; note = 2'-O-methylcytidine
ttttggacaggttaaacgacaac

SEQ ID NO: 5728 - RNA, 23 nt, synthetic construct
  source 1..23: mol_type = other RNA
  modified_base 1: mod_base = OTHER; note = 2'-O-methyluridine-3'-phosphate 5'-(E)-Vinylphosphonate
  modified_base 2: mod_base = OTHER; note = 2'-deoxy-2'-fluoroguanosine-3'-phosphate
  modified_base 3: mod_base = OTHER; note = 2'-O-methyluridine-3'-phosphate
  modified_base 4: mod_base = OTHER; note = 2'-O-methyluridine-3'-phosphate
  modified_base 5: mod_base = OTHER; note = 2'-O-methyluridine-3'-phosphate
  modified_base 6: mod_base = OTHER; note = 2'-deoxy-2'-fluoroguanosine-3'-phosphate
  modified_base 7: mod_base = OTHER; note = 2'-O-methylguanosine-3'-phosphate
  modified_base 8: mod_base = OTHER; note = 2'-O-methyladenosine-3'-phosphate
  modified_base 9: mod_base = OTHER; note = 2'-O-methylcytidine-3'-phosphate
  modified_base 10: mod_base = OTHER; note = 2'-O-methyladenosine-3'-phosphate
  modified_base 11: mod_base = OTHER; note = 2'-O-methylguanosine-3'-phosphate
  modified_base 12: mod_base = OTHER; note = 2'-O-methylguanosine-3'-phosphate
  modified_base 13: mod_base = OTHER; note = 2'-O-methyluridine-3'-phosphate
  modified_base 14: mod_base = OTHER; note = 2'-deoxy-2'-fluorouridine-3'-phosphate
  modified_base 15: mod_base = OTHER; note = 2'-O-methyladenosine-3'-phosphate
  modified_base 16: mod_base = OTHER; note = 2'-deoxy-2'-fluoroadenosine-3'-phosphate
  modified_base 17: mod_base = OTHER; note = 2'-O-methyladenosine-3'-phosphate
  modified_base 18: mod_base = OTHER; note = 2'-O-methylcytidine-3'-phosphate
  modified_base 19: mod_base = OTHER; note = 2'-O-methylguanosine-3'-phosphate
  modified_base 20: mod_base = OTHER; note = 2'-O-methyladenosine-3'-phosphate
  modified_base 21: mod_base = OTHER; note = 2'-O-methylcytidine-3'-phosphate
  modified_base 22: mod_base = OTHER; note = 2'-O-methyladenosine-3'-phosphate
  modified_base 23: mod_base = OTHER; note = 2'-O-methyladenosine
tgtttggacaggttaaacgacaa

SEQ ID NO: 5729 - RNA, 23 nt, synthetic construct
  source 1..23: mol_type = other RNA
  modified_base 1: mod_base = OTHER; note = 2'-O-methyluridine-3'-phosphate 5'-(E)-Vinylphosphonate
  modified_base 2: mod_base = OTHER; note = 2'-deoxy-2'-fluoroadenosine-3'-phosphate
  modified_base 3: mod_base = OTHER; note = 2'-O-methylguanosine-3'-phosphate
  modified_base 4: mod_base = OTHER; note = 2'-O-methyluridine-3'-phosphate
  modified_base 5: mod_base = OTHER; note = 2'-O-methyluridine-3'-phosphate
  modified_base 6: mod_base = OTHER; note = 2'-deoxy-2'-fluorouridine-3'-phosphate
  modified_base 7: mod_base = OTHER; note = 2'-O-methylguanosine-3'-phosphate
  modified_base 8: mod_base = OTHER; note = 2'-O-methylguanosine-3'-phosphate
  modified_base 9: mod_base = OTHER; note = 2'-O-methyladenosine-3'-phosphate
  modified_base 10: mod_base = OTHER; note = 2'-O-methylcytidine-3'-phosphate
  modified_base 11: mod_base = OTHER; note = 2'-O-methyladenosine-3'-phosphate
  modified_base 12: mod_base = OTHER; note = 2'-O-methylguanosine-3'-phosphate
  modified_base 13: mod_base = OTHER; note = 2'-O-methylguanosine-3'-phosphate
  modified_base 14: mod_base = OTHER; note = 2'-deoxy-2'-fluorouridine-3'-phosphate
  modified_base 15: mod_base = OTHER; note = 2'-O-methyluridine-3'-phosphate
  modified_base 16: mod_base = OTHER; note = 2'-deoxy-2'-fluoroadenosine-3'-phosphate
  modified_base 17: mod_base = OTHER; note = 2'-O-methyladenosine-3'-phosphate
  modified_base 18: mod_base = OTHER; note = 2'-O-methyladenosine-3'-phosphate
  modified_base 19: mod_base = OTHER; note = 2'-O-methylcytidine-3'-phosphate
  modified_base 20: mod_base = OTHER; note = 2'-O-methylguanosine-3'-phosphate
  modified_base 21: mod_base = OTHER; note = 2'-O-methyladenosine-3'-phosphate
  modified_base 22: mod_base = OTHER; note = 2'-O-methylcytidine-3'-phosphate
  modified_base 23: mod_base = OTHER; note = 2'-O-methyladenosine
tagtttggacaggttaaacgaca

SEQ ID NO: 5730 - RNA, 23 nt, synthetic construct
  source 1..23: mol_type = other RNA
  modified_base 1: mod_base = OTHER; note = 2'-O-methyluridine-3'-phosphate 5'-(E)-Vinylphosphonate
  modified_base 2: mod_base = OTHER; note = 2'-deoxy-2'-fluoroadenosine-3'-phosphate
  modified_base 3: mod_base = OTHER; note = 2'-O-methyladenosine-3'-phosphate
  modified_base 4: mod_base = OTHER; note = 2'-O-methylguanosine-3'-phosphate
  modified_base 5: mod_base = OTHER; note = 2'-O-methyluridine-3'-phosphate
  modified_base 6: mod_base = OTHER; note = 2'-deoxy-2'-fluorouridine-3'-phosphate
  modified_base 7: mod_base = OTHER; note = 2'-O-methyluridine-3'-phosphate
  modified_base 8: mod_base = OTHER; note = 2'-O-methylguanosine-3'-phosphate
  modified_base 9: mod_base = OTHER; note = 2'-O-methylguanosine-3'-phosphate
  modified_base 10: mod_base = OTHER; note = 2'-O-methyladenosine-3'-phosphate
  modified_base 11: mod_base = OTHER; note = 2'-O-methylcytidine-3'-phosphate
  modified_base 12: mod_base = OTHER; note = 2'-O-methyladenosine-3'-phosphate
  modified_base 13: mod_base = OTHER; note = 2'-O-methylguanosine-3'-phosphate
  modified_base 14: mod_base = OTHER; note = 2'-deoxy-2'-fluoroguanosine-3'-phosphate
  modified_base 15: mod_base = OTHER; note = 2'-O-methyluridine-3'-phosphate
  modified_base 16: mod_base = OTHER; note = 2'-deoxy-2'-fluorouridine-3'-phosphate
  modified_base 17: mod_base = OTHER; note = 2'-O-methyladenosine-3'-phosphate
  modified_base 18: mod_base = OTHER; note = 2'-O-methyladenosine-3'-phosphate
  modified_base 19: mod_base = OTHER; note = 2'-O-methyladenosine-3'-phosphate
  modified_base 20: mod_base = OTHER; note = 2'-O-methylcytidine-3'-phosphate
  modified_base 21: mod_base = OTHER; note = 2'-O-methylguanosine-3'-phosphate
  modified_base 22: mod_base = OTHER; note = 2'-O-methyladenosine-3'-phosphate
  modified_base 23: mod_base = OTHER; note = 2'-O-methylcytidine
taagtttggacaggttaaacgac

SEQ ID NO: 5731 - RNA, 23 nt, synthetic construct
  source 1..23: mol_type = other RNA
  modified_base 1: mod_base = OTHER; note = 2'-O-methyluridine-3'-phosphate 5'-(E)-Vinylphosphonate
  modified_base 2: mod_base = OTHER; note = 2'-deoxy-2'-fluoroguanosine-3'-phosphate
  modified_base 3: mod_base = OTHER; note = 2'-O-methyladenosine-3'-phosphate
  modified_base 4: mod_base = OTHER; note = 2'-O-methyladenosine-3'-phosphate
  modified_base 5: mod_base = OTHER; note = 2'-O-methylguanosine-3'-phosphate
  modified_base 6: mod_base = OTHER; note = 2'-deoxy-2'-fluorouridine-3'-phosphate
  modified_base 7: mod_base = OTHER; note = 2'-O-methyluridine-3'-phosphate
  modified_base 8: mod_base = OTHER; note = 2'-O-methyluridine-3'-phosphate
  modified_base 9: mod_base = OTHER; note = 2'-O-methylguanosine-3'-phosphate
  modified_base 10: mod_base = OTHER; note = 2'-O-methylguanosine-3'-phosphate
  modified_base 11: mod_base = OTHER; note = 2'-O-methyladenosine-3'-phosphate
  modified_base 12: mod_base = OTHER; note = 2'-O-methylcytidine-3'-phosphate
  modified_base 13: mod_base = OTHER; note = 2'-O-methyladenosine-3'-phosphate
  modified_base 14: mod_base = OTHER; note = 2'-deoxy-2'-fluoroguanosine-3'-phosphate
  modified_base 15: mod_base = OTHER; note = 2'-O-methylguanosine-3'-phosphate
  modified_base 16: mod_base = OTHER; note = 2'-deoxy-2'-fluorouridine-3'-phosphate
  modified_base 17: mod_base = OTHER; note = 2'-O-methyluridine-3'-phosphate
  modified_base 18: mod_base = OTHER; note = 2'-O-methyladenosine-3'-phosphate
  modified_base 19: mod_base = OTHER; note = 2'-O-methyladenosine-3'-phosphate
  modified_base 20: mod_base = OTHER; note = 2'-O-methyladenosine-3'-phosphate
  modified_base 21: mod_base = OTHER; note = 2'-O-methylcytidine-3'-phosphate
  modified_base 22: mod_base = OTHER; note = 2'-O-methylguanosine-3'-phosphate
  modified_base 23: mod_base = OTHER; note = 2'-O-methyladenosine
tgaagtttggacaggttaaacga

SEQ ID NO: 5732 - RNA, 23 nt, synthetic construct
  source 1..23: mol_type = other RNA
  modified_base 1: mod_base = OTHER; note = 2'-O-methyluridine-3'-phosphate 5'-(E)-Vinylphosphonate
  modified_base 2: mod_base = OTHER; note = 2'-deoxy-2'-fluoroadenosine-3'-phosphate
  modified_base 3: mod_base = OTHER; note = 2'-O-methylguanosine-3'-phosphate
  modified_base 4: mod_base = OTHER; note = 2'-O-methyladenosine-3'-phosphate
  modified_base 5: mod_base = OTHER; note = 2'-O-methyladenosine-3'-phosphate
  modified_base 6: mod_base = OTHER; note = 2'-deoxy-2'-fluoroguanosine-3'-phosphate
  modified_base 7: mod_base = OTHER; note = 2'-O-methyluridine-3'-phosphate
  modified_base 8: mod_base = OTHER; note = 2'-O-methyluridine-3'-phosphate
  modified_base 9: mod_base = OTHER; note = 2'-O-methyluridine-3'-phosphate
  modified_base 10: mod_base = OTHER; note = 2'-O-methylguanosine-3'-phosphate
  modified_base 11: mod_base = OTHER; note = 2'-O-methylguanosine-3'-phosphate
  modified_base 12: mod_base = OTHER; note = 2'-O-methyladenosine-3'-phosphate
  modified_base 13: mod_base = OTHER; note = 2'-O-methylcytidine-3'-phosphate
  modified_base 14: mod_base = OTHER; note = 2'-deoxy-2'-fluoroadenosine-3'-phosphate
  modified_base 15: mod_base = OTHER; note = 2'-O-methylguanosine-3'-phosphate
  modified_base 16: mod_base = OTHER; note = 2'-deoxy-2'-fluoroguanosine-3'-phosphate
  modified_base 17: mod_base = OTHER; note = 2'-O-methyluridine-3'-phosphate
  modified_base 18: mod_base = OTHER; note = 2'-O-methyluridine-3'-phosphate
  modified_base 19: mod_base = OTHER; note = 2'-O-methyladenosine-3'-phosphate
  modified_base 20: mod_base = OTHER; note = 2'-O-methyladenosine-3'-phosphate
  modified_base 21: mod_base = OTHER; note = 2'-O-methyladenosine-3'-phosphate
  modified_base 22: mod_base = OTHER; note = 2'-O-methylcytidine-3'-phosphate
  modified_base 23: mod_base = OTHER; note = 2'-O-methylguanosine
tagaagtttggacaggttaaacg

SEQ ID NO: 5733 - RNA, 23 nt, synthetic construct
  source 1..23: mol_type = other RNA
  modified_base 1: mod_base = OTHER; note = 2'-O-methyluridine-3'-phosphate 5'-(E)-Vinylphosphonate
  modified_base 2: mod_base = OTHER; note = 2'-deoxy-2'-fluorouridine-3'-phosphate
  modified_base 3: mod_base = OTHER; note = 2'-O-methyladenosine-3'-phosphate
  modified_base 4: mod_base = OTHER; note = 2'-O-methylguanosine-3'-phosphate
  modified_base 5: mod_base = OTHER; note = 2'-O-methyladenosine-3'-phosphate
  modified_base 6: mod_base = OTHER; note = 2'-deoxy-2'-fluoroadenosine-3'-phosphate
  modified_base 7: mod_base = OTHER; note = 2'-O-methylguanosine-3'-phosphate
  modified_base 8: mod_base = OTHER; note = 2'-O-methyluridine-3'-phosphate
  modified_base 9: mod_base = OTHER; note = 2'-O-methyluridine-3'-phosphate
  modified_base 10: mod_base = OTHER; note = 2'-O-methyluridine-3'-phosphate
  modified_base 11: mod_base = OTHER; note = 2'-O-methylguanosine-3'-phosphate
  modified_base 12: mod_base = OTHER; note = 2'-O-methylguanosine-3'-phosphate
  modified_base 13: mod_base = OTHER; note = 2'-O-methyladenosine-3'-phosphate
  modified_base 14: mod_base = OTHER; note = 2'-deoxy-2'-fluorocytidine-3'-phosphate
  modified_base 15: mod_base = OTHER; note = 2'-O-methyladenosine-3'-phosphate
  modified_base 16: mod_base = OTHER; note = 2'-deoxy-2'-fluoroguanosine-3'-phosphate
  modified_base 17: mod_base = OTHER; note = 2'-O-methylguanosine-3'-phosphate
  modified_base 18: mod_base = OTHER; note = 2'-O-methyluridine-3'-phosphate
  modified_base 19: mod_base = OTHER; note = 2'-O-methyluridine-3'-phosphate
  modified_base 20: mod_base = OTHER; note = 2'-O-methyladenosine-3'-phosphate
  modified_base 21: mod_base = OTHER; note = 2'-O-methyladenosine-3'-phosphate
  modified_base 22: mod_base = OTHER; note = 2'-O-methyladenosine-3'-phosphate
  modified_base 23: mod_base = OTHER; note = 2'-O-methylcytidine
ttagaagtttggacaggttaaac

SEQ ID NO: 5734 - RNA, 23 nt, synthetic construct
  source 1..23: mol_type = other RNA
  modified_base 1: mod_base = OTHER; note = 2'-O-methyluridine-3'-phosphate 5'-(E)-Vinylphosphonate
  modified_base 2: mod_base = OTHER; note = 2'-deoxy-2'-fluoroguanosine-3'-phosphate
  modified_base 3: mod_base = OTHER; note = 2'-O-methyluridine-3'-phosphate
  modified_base 4: mod_base = OTHER; note = 2'-O-methyladenosine-3'-phosphate
  modified_base 5: mod_base = OTHER; note = 2'-O-methylguanosine-3'-phosphate
  modified_base 6: mod_base = OTHER; note = 2'-deoxy-2'-fluoroadenosine-3'-phosphate
  modified_base 7: mod_base = OTHER; note = 2'-O-methyladenosine-3'-phosphate
  modified_base 8: mod_base = OTHER; note = 2'-O-methylguanosine-3'-phosphate
  modified_base 9: mod_base = OTHER; note = 2'-O-methyluridine-3'-phosphate
  modified_base 10: mod_base = OTHER; note = 2'-O-methyluridine-3'-phosphate
  modified_base 11: mod_base = OTHER; note = 2'-O-methyluridine-3'-phosphate
  modified_base 12: mod_base = OTHER; note = 2'-O-methylguanosine-3'-phosphate
  modified_base 13: mod_base = OTHER; note = 2'-O-methylguanosine-3'-phosphate
  modified_base 14: mod_base = OTHER; note = 2'-deoxy-2'-fluoroadenosine-3'-phosphate
  modified_base 15: mod_base = OTHER; note = 2'-O-methylcytidine-3'-phosphate
  modified_base 16: mod_base = OTHER; note = 2'-deoxy-2'-fluoroadenosine-3'-phosphate
  modified_base 17: mod_base = OTHER; note = 2'-O-methylguanosine-3'-phosphate
  modified_base 18: mod_base = OTHER; note = 2'-O-methylguanosine-3'-phosphate
  modified_base 19: mod_base = OTHER; note = 2'-O-methyluridine-3'-phosphate
  modified_base 20: mod_base = OTHER; note = 2'-O-methyluridine-3'-phosphate
  modified_base 21: mod_base = OTHER; note = 2'-O-methyladenosine-3'-phosphate
  modified_base 22: mod_base = OTHER; note = 2'-O-methyladenosine-3'-phosphate
  modified_base 23: mod_base = OTHER; note = 2'-O-methyladenosine
tgtagaagtttggacaggttaaa

SEQ ID NO: 5735 - RNA, 23 nt, synthetic construct
  source 1..23: mol_type = other RNA
  modified_base 1: mod_base = OTHER; note = 2'-O-methyluridine-3'-phosphate 5'-(E)-Vinylphosphonate
  modified_base 2: mod_base = OTHER; note = 2'-deoxy-2'-fluorouridine-3'-phosphate
  modified_base 3: mod_base = OTHER; note = 2'-O-methylguanosine-3'-phosphate
  modified_base 4: mod_base = OTHER; note = 2'-O-methyluridine-3'-phosphate
  modified_base 5: mod_base = OTHER; note = 2'-O-methyladenosine-3'-phosphate
  modified_base 6: mod_base = OTHER; note = 2'-deoxy-2'-fluoroguanosine-3'-phosphate
  modified_base 7: mod_base = OTHER; note = 2'-O-methyladenosine-3'-phosphate
  modified_base 8: mod_base = OTHER; note = 2'-O-methyladenosine-3'-phosphate
  modified_base 9: mod_base = OTHER; note = 2'-O-methylguanosine-3'-phosphate
  modified_base 10: mod_base = OTHER; note = 2'-O-methyluridine-3'-phosphate
  modified_base 11: mod_base = OTHER; note = 2'-O-methyluridine-3'-phosphate
  modified_base 12: mod_base = OTHER; note = 2'-O-methyluridine-3'-phosphate
  modified_base 13: mod_base = OTHER; note = 2'-O-methylguanosine-3'-phosphate
  modified_base 14: mod_base = OTHER; note = 2'-deoxy-2'-fluoroguanosine-3'-phosphate
  modified_base 15: mod_base = OTHER; note = 2'-O-methyladenosine-3'-phosphate
  modified_base 16: mod_base = OTHER; note = 2'-deoxy-2'-fluorocytidine-3'-phosphate
  modified_base 17: mod_base = OTHER; note = 2'-O-methyladenosine-3'-phosphate
  modified_base 18: mod_base = OTHER; note = 2'-O-methylguanosine-3'-phosphate
  modified_base 19: mod_base = OTHER; note = 2'-O-methylguanosine-3'-phosphate
  modified_base 20: mod_base = OTHER; note = 2'-O-methyluridine-3'-phosphate
  modified_base 21: mod_base = OTHER; note = 2'-O-methyluridine-3'-phosphate
  modified_base 22: mod_base = OTHER; note = 2'-O-methyladenosine-3'-phosphate
  modified_base 23: mod_base = OTHER; note = 2'-O-methyladenosine
ttgtagaagtttggacaggttaa

SEQ ID NO: 5736 - RNA, 23 nt, synthetic construct
  source 1..23: mol_type = other RNA
  modified_base 1: mod_base = OTHER; note = 2'-O-methyluridine-3'-phosphate 5'-(E)-Vinylphosphonate
  modified_base 2: mod_base = OTHER; note = 2'-deoxy-2'-fluoroguanosine-3'-phosphate
  modified_base 3: mod_base = OTHER; note = 2'-O-methyluridine-3'-phosphate
  modified_base 4: mod_base = OTHER; note = 2'-O-methylguanosine-3'-phosphate
  modified_base 5: mod_base = OTHER; note = 2'-O-methyluridine-3'-phosphate
  modified_base 6: mod_base = OTHER; note = 2'-deoxy-2'-fluoroadenosine-3'-phosphate
  modified_base 7: mod_base = OTHER; note = 2'-O-methylguanosine-3'-phosphate
  modified_base 8: mod_base = OTHER; note = 2'-O-methyladenosine-3'-phosphate
  modified_base 9: mod_base = OTHER; note = 2'-O-methyladenosine-3'-phosphate
  modified_base 10: mod_base = OTHER; note = 2'-O-methylguanosine-3'-phosphate
  modified_base 11: mod_base = OTHER; note = 2'-O-methyluridine-3'-phosphate
  modified_base 12: mod_base = OTHER; note = 2'-O-methyluridine-3'-phosphate
  modified_base 13: mod_base = OTHER; note = 2'-O-methyluridine-3'-phosphate
  modified_base 14: mod_base = OTHER; note = 2'-deoxy-2'-fluoroguanosine-3'-phosphate
  modified_base 15: mod_base = OTHER; note = 2'-O-methylguanosine-3'-phosphate
  modified_base 16: mod_base = OTHER; note = 2'-deoxy-2'-fluoroadenosine-3'-phosphate
  modified_base 17: mod_base = OTHER; note = 2'-O-methylcytidine-3'-phosphate
  modified_base 18: mod_base = OTHER; note = 2'-O-methyladenosine-3'-phosphate
  modified_base 19: mod_base = OTHER; note = 2'-O-methylguanosine-3'-phosphate
  modified_base 20: mod_base = OTHER; note = 2'-O-methylguanosine-3'-phosphate
  modified_base 21: mod_base = OTHER; note = 2'-O-methyluridine-3'-phosphate
  modified_base 22: mod_base = OTHER; note = 2'-O-methyluridine-3'-phosphate
  modified_base 23: mod_base = OTHER; note = 2'-O-methyladenosine
tgtgtagaagtttggacaggtta

SEQ ID NO: 5737 - RNA, 23 nt, synthetic construct
  source 1..23: mol_type = other RNA
  modified_base 1: mod_base = OTHER; note = 2'-O-methyluridine-3'-phosphate 5'-(E)-Vinylphosphonate
  modified_base 2: mod_base = OTHER; note = 2'-deoxy-2'-fluorouridine-3'-phosphate
  modified_base 3: mod_base = OTHER; note = 2'-O-methylguanosine-3'-phosphate
  modified_base 4: mod_base = OTHER; note = 2'-O-methyluridine-3'-phosphate
  modified_base 5: mod_base = OTHER; note = 2'-O-methylguanosine-3'-phosphate
  modified_base 6: mod_base = OTHER; note = 2'-deoxy-2'-fluorouridine-3'-phosphate
  modified_base 7: mod_base = OTHER; note = 2'-O-methyladenosine-3'-phosphate
  modified_base 8: mod_base = OTHER; note = 2'-O-methylguanosine-3'-phosphate
  modified_base 9: mod_base = OTHER; note = 2'-O-methyladenosine-3'-phosphate
  modified_base 10: mod_base = OTHER; note = 2'-O-methyladenosine-3'-phosphate
  modified_base 11: mod_base = OTHER; note = 2'-O-methylguanosine-3'-phosphate
  modified_base 12: mod_base = OTHER; note = 2'-O-methyluridine-3'-phosphate
  modified_base 13: mod_base = OTHER; note = 2'-O-methyluridine-3'-phosphate
  modified_base 14: mod_base = OTHER; note = 2'-deoxy-2'-fluorouridine-3'-phosphate
  modified_base 15: mod_base = OTHER; note = 2'-O-methylguanosine-3'-phosphate
  modified_base 16: mod_base = OTHER; note = 2'-deoxy-2'-fluoroguanosine-3'-phosphate
  modified_base 17: mod_base = OTHER; note = 2'-O-methyladenosine-3'-phosphate
  modified_base 18: mod_base = OTHER; note = 2'-O-methylcytidine-3'-phosphate
  modified_base 19: mod_base = OTHER; note = 2'-O-methyladenosine-3'-phosphate
  modified_base 20: mod_base = OTHER; note = 2'-O-methylguanosine-3'-phosphate
  modified_base 21: mod_base = OTHER; note = 2'-O-methylguanosine-3'-phosphate
  modified_base 22: mod_base = OTHER; note = 2'-O-methyluridine-3'-phosphate
  modified_base 23: mod_base = OTHER; note = 2'-O-methyluridine
ttgtgtagaagtttggacaggtt

SEQ ID NO: 5738 - RNA, 23 nt, synthetic construct
  source 1..23: mol_type = other RNA
  modified_base 1: mod_base = OTHER; note = 2'-O-methyluridine-3'-phosphate 5'-(E)-Vinylphosphonate
  modified_base 2: mod_base = OTHER; note = 2'-deoxy-2'-fluorouridine-3'-phosphate
  modified_base 3: mod_base = OTHER; note = 2'-O-methyluridine-3'-phosphate
  modified_base 4: mod_base = OTHER; note = 2'-O-methylguanosine-3'-phosphate
  modified_base 5: mod_base = OTHER; note = 2'-O-methyluridine-3'-phosphate
  modified_base 6: mod_base = OTHER; note = 2'-deoxy-2'-fluoroguanosine-3'-phosphate
  modified_base 7: mod_base = OTHER; note = 2'-O-methyluridine-3'-phosphate
  modified_base 8: mod_base = OTHER; note = 2'-O-methyladenosine-3'-phosphate
  modified_base 9: mod_base = OTHER; note = 2'-O-methylguanosine-3'-phosphate
  modified_base 10: mod_base = OTHER; note = 2'-O-methyladenosine-3'-phosphate
  modified_base 11: mod_base = OTHER; note = 2'-O-methyladenosine-3'-phosphate
  modified_base 12: mod_base = OTHER; note = 2'-O-methylguanosine-3'-phosphate
  modified_base 13: mod_base = OTHER; note = 2'-O-methyluridine-3'-phosphate
  modified_base 14: mod_base = OTHER; note = 2'-deoxy-2'-fluorouridine-3'-phosphate
  modified_base 15: mod_base = OTHER; note = 2'-O-methyluridine-3'-phosphate
  modified_base 16: mod_base = OTHER; note = 2'-deoxy-2'-fluoroguanosine-3'-phosphate
  modified_base 17: mod_base = OTHER; note = 2'-O-methylguanosine-3'-phosphate
  modified_base 18: mod_base = OTHER; note = 2'-O-methyladenosine-3'-phosphate
  modified_base 19: mod_base = OTHER; note = 2'-O-methylcytidine-3'-phosphate
  modified_base 20: mod_base = OTHER; note = 2'-O-methyladenosine-3'-phosphate
  modified_base 21: mod_base = OTHER; note = 2'-O-methylguanosine-3'-phosphate
  modified_base 22: mod_base = OTHER; note = 2'-O-methylguanosine-3'-phosphate
  modified_base 23: mod_base = OTHER; note = 2'-O-methyluridine
tttgtgtagaagtttggacaggt

SEQ ID NO: 5739 - RNA, 23 nt, synthetic construct
  source 1..23: mol_type = other RNA
  modified_base 1: mod_base = OTHER; note = 2'-O-methyluridine-3'-phosphate 5'-(E)-Vinylphosphonate
  modified_base 2: mod_base = OTHER; note = 2'-deoxy-2'-fluoroadenosine-3'-phosphate
  modified_base 3: mod_base = OTHER; note = 2'-O-methyluridine-3'-phosphate
  modified_base 4: mod_base = OTHER; note = 2'-O-methyluridine-3'-phosphate
  modified_base 5: mod_base = OTHER; note = 2'-O-methylguanosine-3'-phosphate
  modified_base 6: mod_base = OTHER; note = 2'-deoxy-2'-fluorouridine-3'-phosphate
  modified_base 7: mod_base = OTHER; note = 2'-O-methylguanosine-3'-phosphate
  modified_base 8: mod_base = OTHER; note = 2'-O-methyluridine-3'-phosphate
  modified_base 9: mod_base = OTHER; note = 2'-O-methyladenosine-3'-phosphate
  modified_base 10: mod_base = OTHER; note = 2'-O-methylguanosine-3'-phosphate
  modified_base 11: mod_base = OTHER; note = 2'-O-methyladenosine-3'-phosphate
  modified_base 12: mod_base = OTHER; note = 2'-O-methyladenosine-3'-phosphate
  modified_base 13: mod_base = OTHER; note = 2'-O-methylguanosine-3'-phosphate
  modified_base 14: mod_base = OTHER; note = 2'-deoxy-2'-fluorouridine-3'-phosphate
  modified_base 15: mod_base = OTHER; note = 2'-O-methyluridine-3'-phosphate
  modified_base 16: mod_base = OTHER; note = 2'-deoxy-2'-fluorouridine-3'-phosphate
  modified_base 17: mod_base = OTHER; note = 2'-O-methylguanosine-3'-phosphate
  modified_base 18: mod_base = OTHER; note = 2'-O-methylguanosine-3'-phosphate
  modified_base 19: mod_base = OTHER; note = 2'-O-methyladenosine-3'-phosphate
  modified_base 20: mod_base = OTHER; note = 2'-O-methylcytidine-3'-phosphate
  modified_base 21: mod_base = OTHER; note = 2'-O-methyladenosine-3'-phosphate
  modified_base 22: mod_base = OTHER; note = 2'-O-methylguanosine-3'-phosphate
  modified_base 23: mod_base = OTHER; note = 2'-O-methylguanosine
tattgtgtagaagtttggacagg

SEQ ID NO: 5740 - RNA, 23 nt, synthetic construct
  source 1..23: mol_type = other RNA
  modified_base 1: mod_base = OTHER; note = 2'-O-methyluridine-3'-phosphate 5'-(E)-Vinylphosphonate
  modified_base 2: mod_base = OTHER; note = 2'-deoxy-2'-fluorocytidine-3'-phosphate
  modified_base 3: mod_base = OTHER; note = 2'-O-methyladenosine-3'-phosphate
  modified_base 4: mod_base = OTHER; note = 2'-O-methyluridine-3'-phosphate
  modified_base 5: mod_base = OTHER; note = 2'-O-methyluridine-3'-phosphate
  modified_base 6: mod_base = OTHER; note = 2'-deoxy-2'-fluoroguanosine-3'-phosphate
  modified_base 7: mod_base = OTHER; note = 2'-O-methyluridine-3'-phosphate
  modified_base 8: mod_base = OTHER; note = 2'-O-methylguanosine-3'-phosphate
  modified_base 9: mod_base = OTHER; note = 2'-O-methyluridine-3'-phosphate
  modified_base 10: mod_base = OTHER; note = 2'-O-methyladenosine-3'-phosphate
  modified_base 11: mod_base = OTHER; note = 2'-O-methylguanosine-3'-phosphate
  modified_base 12: mod_base = OTHER; note = 2'-O-methyladenosine-3'-phosphate
  modified_base 13: mod_base = OTHER; note = 2'-O-methyladenosine-3'-phosphate
  modified_base 14: mod_base = OTHER; note = 2'-deoxy-2'-fluoroguanosine-3'-phosphate
  modified_base 15: mod_base = OTHER; note = 2'-O-methyluridine-3'-phosphate
  modified_base 16: mod_base = OTHER; note = 2'-deoxy-2'-fluorouridine-3'-phosphate
  modified_base 17: mod_base = OTHER; note = 2'-O-methyluridine-3'-phosphate
  modified_base 18: mod_base = OTHER; note = 2'-O-methylguanosine-3'-phosphate
  modified_base 19: mod_base = OTHER; note = 2'-O-methylguanosine-3'-phosphate
  modified_base 20: mod_base = OTHER; note = 2'-O-methyladenosine-3'-phosphate
  modified_base 21: mod_base = OTHER; note = 2'-O-methylcytidine-3'-phosphate
  modified_base 22: mod_base = OTHER; note = 2'-O-methyladenosine-3'-phosphate
  modified_base 23: mod_base = OTHER; note = 2'-O-methylguanosine
tcattgtgtagaagtttggacag

SEQ ID NO: 5741 - RNA, 23 nt, synthetic construct
  source 1..23: mol_type = other RNA
  modified_base 1: mod_base = OTHER; note = 2'-O-methyluridine-3'-phosphate 5'-(E)-Vinylphosphonate
  modified_base 2: mod_base = OTHER; note = 2'-deoxy-2'-fluorouridine-3'-phosphate
  modified_base 3: mod_base = OTHER; note = 2'-O-methylcytidine-3'-phosphate
  modified_base 4: mod_base = OTHER; note = 2'-O-methyladenosine-3'-phosphate
  modified_base 5: mod_base = OTHER; note = 2'-O-methyluridine-3'-phosphate
  modified_base 6: mod_base = OTHER; note = 2'-deoxy-2'-fluorouridine-3'-phosphate
  modified_base 7: mod_base = OTHER; note = 2'-O-methylguanosine-3'-phosphate
  modified_base 8: mod_base = OTHER; note = 2'-O-methyluridine-3'-phosphate
  modified_base 9: mod_base = OTHER; note = 2'-O-methylguanosine-3'-phosphate
  modified_base 10: mod_base = OTHER; note = 2'-O-methyluridine-3'-phosphate
  modified_base 11: mod_base = OTHER; note = 2'-O-methyladenosine-3'-phosphate
  modified_base 12: mod_base = OTHER; note = 2'-O-methylguanosine-3'-phosphate
  modified_base 13: mod_base = OTHER; note = 2'-O-methyladenosine-3'-phosphate
  modified_base 14: mod_base = OTHER; note = 2'-deoxy-2'-fluoroadenosine-3'-phosphate
  modified_base 15: mod_base = OTHER; note = 2'-O-methylguanosine-3'-phosphate
  modified_base 16: mod_base = OTHER; note = 2'-deoxy-2'-fluorouridine-3'-phosphate
  modified_base 17: mod_base = OTHER; note = 2'-O-methyluridine-3'-phosphate
  modified_base 18: mod_base = OTHER; note = 2'-O-methyluridine-3'-phosphate
  modified_base 19: mod_base = OTHER; note = 2'-O-methylguanosine-3'-phosphate
  modified_base 20: mod_base = OTHER; note = 2'-O-methylguanosine-3'-phosphate
  modified_base 21: mod_base = OTHER; note = 2'-O-methyladenosine-3'-phosphate
  modified_base 22: mod_base = OTHER; note = 2'-O-methylcytidine-3'-phosphate
  modified_base 23: mod_base = OTHER; note = 2'-O-methyladenosine
ttcattgtgtagaagtttggaca

SEQ ID NO: 5742 - RNA, 23 nt, synthetic construct
  source 1..23: mol_type = other RNA
  modified_base 1: mod_base = OTHER; note = 2'-O-methyluridine-3'-phosphate 5'-(E)-Vinylphosphonate
  modified_base 2: mod_base = OTHER; note = 2'-deoxy-2'-fluorouridine-3'-phosphate
  modified_base 3: mod_base = OTHER; note = 2'-O-methyluridine-3'-phosphate
  modified_base 4: mod_base = OTHER; note = 2'-O-methylcytidine-3'-phosphate
  modified_base 5: mod_base = OTHER; note = 2'-O-methyladenosine-3'-phosphate
  modified_base 6: mod_base = OTHER; note = 2'-deoxy-2'-fluorouridine-3'-phosphate
  modified_base 7: mod_base = OTHER; note = 2'-O-methyluridine-3'-phosphate
  modified_base 8: mod_base = OTHER; note = 2'-O-methylguanosine-3'-phosphate
  modified_base 9: mod_base = OTHER; note = 2'-O-methyluridine-3'-phosphate
  modified_base 10: mod_base = OTHER; note = 2'-O-methylguanosine-3'-phosphate
  modified_base 11: mod_base = OTHER; note = 2'-O-methyluridine-3'-phosphate
  modified_base 12: mod_base = OTHER; note = 2'-O-methyladenosine-3'-phosphate
  modified_base 13: mod_base = OTHER; note = 2'-O-methylguanosine-3'-phosphate
  modified_base 14: mod_base = OTHER; note = 2'-deoxy-2'-fluoroadenosine-3'-phosphate
  modified_base 15: mod_base = OTHER; note = 2'-O-methyladenosine-3'-phosphate
  modified_base 16: mod_base = OTHER; note = 2'-deoxy-2'-fluoroguanosine-3'-phosphate
  modified_base 17: mod_base = OTHER; note = 2'-O-methyluridine-3'-phosphate
  modified_base 18: mod_base = OTHER; note = 2'-O-methyluridine-3'-phosphate
  modified_base 19: mod_base = OTHER; note = 2'-O-methyluridine-3'-phosphate
  modified_base 20: mod_base = OTHER; note = 2'-O-methylguanosine-3'-phosphate
  modified_base 21: mod_base = OTHER; note = 2'-O-methylguanosine-3'-phosphate
  modified_base 22: mod_base = OTHER; note = 2'-O-methyladenosine-3'-phosphate
  modified_base 23: mod_base = OTHER; note = 2'-O-methylcytidine
tttcattgtgtagaagtttggac

SEQ ID NO: 5743 - RNA, 23 nt, synthetic construct
  source 1..23: mol_type = other RNA
  modified_base 1: mod_base = OTHER; note = 2'-O-methyluridine-3'-phosphate 5'-(E)-Vinylphosphonate
  modified_base 2: mod_base = OTHER; note = 2'-deoxy-2'-fluoroguanosine-3'-phosphate
  modified_base 3: mod_base = OTHER; note = 2'-O-methyluridine-3'-phosphate
  modified_base 4: mod_base = OTHER; note = 2'-O-methyluridine-3'-phosphate
  modified_base 5: mod_base = OTHER; note = 2'-O-methylcytidine-3'-phosphate
  modified_base 6: mod_base = OTHER; note = 2'-deoxy-2'-fluoroadenosine-3'-phosphate
  modified_base 7: mod_base = OTHER; note = 2'-O-methyluridine-3'-phosphate
  modified_base 8: mod_base = OTHER; note = 2'-O-methyluridine-3'-phosphate
  modified_base 9: mod_base = OTHER; note = 2'-O-methylguanosine-3'-phosphate
  modified_base 10: mod_base = OTHER; note = 2'-O-methyluridine-3'-phosphate
  modified_base 11: mod_base = OTHER; note = 2'-O-methylguanosine-3'-phosphate
  modified_base 12: mod_base = OTHER; note = 2'-O-methyluridine-3'-phosphate
  modified_base 13: mod_base = OTHER; note = 2'-O-methyladenosine-3'-phosphate
  modified_base 14: mod_base = OTHER; note = 2'-deoxy-2'-fluoroguanosine-3'-phosphate
  modified_base 15: mod_base = OTHER; note = 2'-O-methyladenosine-3'-phosphate
  modified_base 16: mod_base = OTHER; note = 2'-deoxy-2'-fluoroadenosine-3'-phosphate
  modified_base 17: mod_base = OTHER; note = 2'-O-methylguanosine-3'-phosphate
  modified_base 18: mod_base = OTHER; note = 2'-O-methyluridine-3'-phosphate
  modified_base 19: mod_base = OTHER; note = 2'-O-methyluridine-3'-phosphate
  modified_base 20: mod_base = OTHER; note = 2'-O-methyluridine-3'-phosphate
  modified_base 21: mod_base = OTHER; note = 2'-O-methylguanosine-3'-phosphate
  modified_base 22: mod_base = OTHER; note = 2'-O-methylguanosine-3'-phosphate
  modified_base 23: mod_base = OTHER; note = 2'-O-methyladenosine
tgttcattgtgtagaagtttgga

SEQ ID NO: 5744 - RNA, 23 nt, synthetic construct
  source 1..23: mol_type = other RNA
  modified_base 1: mod_base = OTHER; note = 2'-O-methyluridine-3'-phosphate 5'-(E)-Vinylphosphonate
  modified_base 2: mod_base = OTHER; note = 2'-deoxy-2'-fluoroadenosine-3'-phosphate
  modified_base 3: mod_base = OTHER; note = 2'-O-methylguanosine-3'-phosphate
  modified_base 4: mod_base = OTHER; note = 2'-O-methyluridine-3'-phosphate
  modified_base 5: mod_base = OTHER; note = 2'-O-methyluridine-3'-phosphate
  modified_base 6: mod_base = OTHER; note = 2'-deoxy-2'-fluorocytidine-3'-phosphate
  modified_base 7: mod_base = OTHER; note = 2'-O-methyladenosine-3'-phosphate
  modified_base 8: mod_base = OTHER; note = 2'-O-methyluridine-3'-phosphate
  modified_base 9: mod_base = OTHER; note = 2'-O-methyluridine-3'-phosphate
  modified_base 10: mod_base = OTHER; note = 2'-O-methylguanosine-3'-phosphate
  modified_base 11: mod_base = OTHER; note = 2'-O-methyluridine-3'-phosphate
  modified_base 12: mod_base = OTHER; note = 2'-O-methylguanosine-3'-phosphate
  modified_base 13: mod_base = OTHER; note = 2'-O-methyluridine-3'-phosphate
  modified_base 14: mod_base = OTHER; note = 2'-deoxy-2'-fluoroadenosine-3'-phosphate
  modified_base 15: mod_base = OTHER; note = 2'-O-methylguanosine-3'-phosphate
  modified_base 16: mod_base = OTHER; note = 2'-deoxy-2'-fluoroadenosine-3'-phosphate
  modified_base 17: mod_base = OTHER; note = 2'-O-methyladenosine-3'-phosphate
  modified_base 18: mod_base = OTHER; note = 2'-O-methylguanosine-3'-phosphate
  modified_base 19: mod_base = OTHER; note = 2'-O-methyluridine-3'-phosphate
  modified_base 20: mod_base = OTHER; note = 2'-O-methyluridine-3'-phosphate
  modified_base 21: mod_base = OTHER; note = 2'-O-methyluridine-3'-phosphate
  modified_base 22: mod_base = OTHER; note = 2'-O-methylguanosine-3'-phosphate
  modified_base 23: mod_base = OTHER; note = 2'-O-methylguanosine
tagttcattgtgtagaagtttgg

SEQ ID NO: 5745 - RNA, 23 nt, synthetic construct
  source 1..23: mol_type = other RNA
  modified_base 1: mod_base = OTHER; note = 2'-O-methyluridine-3'-phosphate 5'-(E)-Vinylphosphonate
  modified_base 2: mod_base = OTHER; note = 2'-deoxy-2'-fluoroadenosine-3'-phosphate
  modified_base 3: mod_base = OTHER; note = 2'-O-methyladenosine-3'-phosphate
  modified_base 4: mod_base = OTHER; note = 2'-O-methylguanosine-3'-phosphate
  modified_base 5: mod_base = OTHER; note = 2'-O-methyluridine-3'-phosphate
  modified_base 6: mod_base = OTHER; note = 2'-deoxy-2'-fluorouridine-3'-phosphate
  modified_base 7: mod_base = OTHER; note = 2'-O-methylcytidine-3'-phosphate
  modified_base 8: mod_base = OTHER; note = 2'-O-methyladenosine-3'-phosphate
  modified_base 9: mod_base = OTHER; note = 2'-O-methyluridine-3'-phosphate
  modified_base 10: mod_base = OTHER; note = 2'-O-methyluridine-3'-phosphate
  modified_base 11: mod_base = OTHER; note = 2'-O-methylguanosine-3'-phosphate
  modified_base 12: mod_base = OTHER; note = 2'-O-methyluridine-3'-phosphate
  modified_base 13: mod_base = OTHER; note = 2'-O-methylguanosine-3'-phosphate
  modified_base 14: mod_base = OTHER; note = 2'-deoxy-2'-fluorouridine-3'-phosphate
  modified_base 15: mod_base = OTHER; note = 2'-O-methyladenosine-3'-phosphate
  modified_base 16: mod_base = OTHER; note = 2'-deoxy-2'-fluoroguanosine-3'-phosphate
  modified_base 17: mod_base = OTHER; note = 2'-O-methyladenosine-3'-phosphate
  modified_base 18: mod_base = OTHER; note = 2'-O-methyladenosine-3'-phosphate
  modified_base 19: mod_base = OTHER; note = 2'-O-methylguanosine-3'-phosphate
  modified_base 20: mod_base = OTHER; note = 2'-O-methyluridine-3'-phosphate
  modified_base 21: mod_base = OTHER; note = 2'-O-methyluridine-3'-phosphate
  modified_base 22: mod_base = OTHER; note = 2'-O-methyluridine-3'-phosphate
  modified_base 23: mod_base = OTHER; note = 2'-O-methylguanosine
taagttcattgtgtagaagtttg

SEQ ID NO: 5746 - RNA, 23 nt, synthetic construct
  source 1..23: mol_type = other RNA
  modified_base 1: mod_base = OTHER; note = 2'-O-methyluridine-3'-phosphate 5'-(E)-Vinylphosphonate
  modified_base 2: mod_base = OTHER; note = 2'-deoxy-2'-fluoroguanosine-3'-phosphate
  modified_base 3: mod_base = OTHER; note = 2'-O-methyladenosine-3'-phosphate
  modified_base 4: mod_base = OTHER; note = 2'-O-methyladenosine-3'-phosphate
  modified_base 5: mod_base = OTHER; note = 2'-O-methylguanosine-3'-phosphate
  modified_base 6: mod_base = OTHER; note = 2'-deoxy-2'-fluorouridine-3'-phosphate
  modified_base 7: mod_base = OTHER; note = 2'-O-methyluridine-3'-phosphate
  modified_base 8: mod_base = OTHER; note = 2'-O-methylcytidine-3'-phosphate
  modified_base 9: mod_base = OTHER; note = 2'-O-methyladenosine-3'-phosphate
  modified_base 10: mod_base = OTHER; note = 2'-O-methyluridine-3'-phosphate
  modified_base 11: mod_base = OTHER; note = 2'-O-methyluridine-3'-phosphate
  modified_base 12: mod_base = OTHER; note = 2'-O-methylguanosine-3'-phosphate
  modified_base 13: mod_base = OTHER; note = 2'-O-methyluridine-3'-phosphate
  modified_base 14: mod_base = OTHER; note = 2'-deoxy-2'-fluoroguanosine-3'-phosphate
  modified_base 15: mod_base = OTHER; note = 2'-O-methyluridine-3'-phosphate
  modified_base 16: mod_base = OTHER; note = 2'-deoxy-2'-fluoroadenosine-3'-phosphate
  modified_base 17: mod_base = OTHER; note = 2'-O-methylguanosine-3'-phosphate
  modified_base 18: mod_base = OTHER; note = 2'-O-methyladenosine-3'-phosphate
  modified_base 19: mod_base = OTHER; note = 2'-O-methyladenosine-3'-phosphate
  modified_base 20: mod_base = OTHER; note = 2'-O-methylguanosine-3'-phosphate
  modified_base 21: mod_base = OTHER; note = 2'-O-methyluridine-3'-phosphate
  modified_base 22: mod_base = OTHER; note = 2'-O-methyluridine-3'-phosphate
  modified_base 23: mod_base = OTHER; note = 2'-O-methyluridine
tgaagttcattgtgtagaagttt

SEQ ID NO: 5747 - RNA, 23 nt, synthetic construct
  source 1..23: mol_type = other RNA
  modified_base 1: mod_base = OTHER; note = 2'-O-methyluridine-3'-phosphate 5'-(E)-Vinylphosphonate
  modified_base 2: mod_base = OTHER; note = 2'-deoxy-2'-fluoroadenosine-3'-phosphate
  modified_base 3: mod_base = OTHER; note = 2'-O-methylguanosine-3'-phosphate
  modified_base 4: mod_base = OTHER; note = 2'-O-methyladenosine-3'-phosphate
  modified_base 5: mod_base = OTHER; note = 2'-O-methyladenosine-3'-phosphate
  modified_base 6: mod_base = OTHER; note = 2'-deoxy-2'-fluoroguanosine-3'-phosphate
  modified_base 7: mod_base = OTHER; note = 2'-O-methyluridine-3'-phosphate
  modified_base 8: mod_base = OTHER; note = 2'-O-methyluridine-3'-phosphate
  modified_base 9: mod_base = OTHER; note = 2'-O-methylcytidine-3'-phosphate
  modified_base 10: mod_base = OTHER; note = 2'-O-methyladenosine-3'-phosphate
  modified_base 11: mod_base = OTHER; note = 2'-O-methyluridine-3'-phosphate
  modified_base 12: mod_base = OTHER; note = 2'-O-methyluridine-3'-phosphate
  modified_base 13: mod_base = OTHER; note = 2'-O-methylguanosine-3'-phosphate
  modified_base 14: mod_base = OTHER; note = 2'-deoxy-2'-fluorouridine-3'-phosphate
  modified_base 15: mod_base = OTHER; note = 2'-O-methylguanosine-3'-phosphate
  modified_base 16: mod_base = OTHER; note = 2'-deoxy-2'-fluorouridine-3'-phosphate
  modified_base 17: mod_base = OTHER; note = 2'-O-methyladenosine-3'-phosphate
  modified_base 18: mod_base = OTHER; note = 2'-O-methylguanosine-3'-phosphate
  modified_base 19: mod_base = OTHER; note = 2'-O-methyladenosine-3'-phosphate
  modified_base 20: mod_base = OTHER; note = 2'-O-methyladenosine-3'-phosphate
  modified_base 21: mod_base = OTHER; note = 2'-O-methylguanosine-3'-phosphate
  modified_base 22: mod_base = OTHER; note = 2'-O-methyluridine-3'-phosphate
  modified_base 23: mod_base = OTHER; note = 2'-O-methyluridine
tagaagttcattgtgtagaagtt

SEQ ID NO: 5748 - RNA, 23 nt, synthetic construct
  source 1..23: mol_type = other RNA
  modified_base 1: mod_base = OTHER; note = 2'-O-methyluridine-3'-phosphate 5'-(E)-Vinylphosphonate
  modified_base 2: mod_base = OTHER; note = 2'-deoxy-2'-fluoroadenosine-3'-phosphate
  modified_base 3: mod_base = OTHER; note = 2'-O-methyladenosine-3'-phosphate
  modified_base 4: mod_base = OTHER; note = 2'-O-methylguanosine-3'-phosphate
  modified_base 5: mod_base = OTHER; note = 2'-O-methyladenosine-3'-phosphate
  modified_base 6: mod_base = OTHER; note = 2'-deoxy-2'-fluoroadenosine-3'-phosphate
  modified_base 7: mod_base = OTHER; note = 2'-O-methylguanosine-3'-phosphate
  modified_base 8: mod_base = OTHER; note = 2'-O-methyluridine-3'-phosphate
  modified_base 9: mod_base = OTHER; note = 2'-O-methyluridine-3'-phosphate
  modified_base 10: mod_base = OTHER; note = 2'-O-methylcytidine-3'-phosphate
  modified_base 11: mod_base = OTHER; note = 2'-O-methyladenosine-3'-phosphate
  modified_base 12: mod_base = OTHER; note = 2'-O-methyluridine-3'-phosphate
  modified_base 13: mod_base = OTHER; note = 2'-O-methyluridine-3'-phosphate
  modified_base 14: mod_base = OTHER; note = 2'-deoxy-2'-fluoroguanosine-3'-phosphate
  modified_base 15: mod_base = OTHER; note = 2'-O-methyluridine-3'-phosphate
  modified_base 16: mod_base = OTHER; note = 2'-deoxy-2'-fluoroguanosine-3'-phosphate
  modified_base 17: mod_base = OTHER; note = 2'-O-methyluridine-3'-phosphate
  modified_base 18: mod_base = OTHER; note = 2'-O-methyladenosine-3'-phosphate
  modified_base 19: mod_base = OTHER; note = 2'-O-methylguanosine-3'-phosphate
  modified_base 20: mod_base = OTHER; note = 2'-O-methyladenosine-3'-phosphate
  modified_base 21: mod_base = OTHER; note = 2'-O-methyladenosine-3'-phosphate
  modified_base 22: mod_base = OTHER; note = 2'-O-methylguanosine-3'-phosphate
  modified_base 23: mod_base = OTHER; note = 2'-O-methyluridine
taagaagttcattgtgtagaagt

SEQ ID NO: 5749 - RNA, 23 nt, synthetic construct
  source 1..23: mol_type = other RNA
  modified_base 1: mod_base = OTHER; note = 2'-O-methyluridine-3'-phosphate 5'-(E)-Vinylphosphonate
  modified_base 2: mod_base = OTHER; note = 2'-deoxy-2'-fluorouridine-3'-phosphate
  modified_base 3: mod_base = OTHER; note = 2'-O-methyladenosine-3'-phosphate
  modified_base 4: mod_base = OTHER; note = 2'-O-methyladenosine-3'-phosphate
  modified_base 5: mod_base = OTHER; note = 2'-O-methylguanosine-3'-phosphate
  modified_base 6: mod_base = OTHER; note = 2'-deoxy-2'-fluoroadenosine-3'-phosphate
  modified_base 7: mod_base = OTHER; note = 2'-O-methyladenosine-3'-phosphate
  modified_base 8: mod_base = OTHER; note = 2'-O-methylguanosine-3'-phosphate
  modified_base 9: mod_base = OTHER; note = 2'-O-methyluridine-3'-phosphate
  modified_base 10: mod_base = OTHER; note = 2'-O-methyluridine-3'-phosphate
  modified_base 11: mod_base = OTHER; note = 2'-O-methylcytidine-3'-phosphate
  modified_base 12: mod_base = OTHER; note = 2'-O-methyladenosine-3'-phosphate
  modified_base 13: mod_base = OTHER; note = 2'-O-methyluridine-3'-phosphate
  modified_base 14: mod_base = OTHER; note = 2'-deoxy-2'-fluorouridine-3'-phosphate
  modified_base 15: mod_base = OTHER; note = 2'-O-methylguanosine-3'-phosphate
  modified_base 16: mod_base = OTHER; note = 2'-deoxy-2'-fluorouridine-3'-phosphate
  modified_base 17: mod_base = OTHER; note = 2'-O-methylguanosine-3'-phosphate
  modified_base 18: mod_base = OTHER; note = 2'-O-methyluridine-3'-phosphate
  modified_base 19: mod_base = OTHER; note = 2'-O-methyladenosine-3'-phosphate
  modified_base 20: mod_base = OTHER; note = 2'-O-methylguanosine-3'-phosphate
  modified_base 21: mod_base = OTHER; note = 2'-O-methyladenosine-3'-phosphate
  modified_base 22: mod_base = OTHER; note = 2'-O-methyladenosine-3'-phosphate
  modified_base 23: mod_base = OTHER; note = 2'-O-methylguanosine
ttaagaagttcattgtgtagaag

SEQ ID NO: 5750 - RNA, 23 nt, synthetic construct
  source 1..23: mol_type = other RNA
  modified_base 1: mod_base = OTHER; note = 2'-O-methyluridine-3'-phosphate 5'-(E)-Vinylphosphonate
  modified_base 2: mod_base = OTHER; note = 2'-deoxy-2'-fluorouridine-3'-phosphate
  modified_base 3: mod_base = OTHER; note = 2'-O-methyluridine-3'-phosphate
  modified_base 4: mod_base = OTHER; note = 2'-O-methyladenosine-3'-phosphate
  modified_base 5: mod_base = OTHER; note = 2'-O-methyladenosine-3'-phosphate
  modified_base 6: mod_base = OTHER; note = 2'-deoxy-2'-fluoroguanosine-3'-phosphate
  modified_base 7: mod_base = OTHER; note = 2'-O-methyladenosine-3'-phosphate
  modified_base 8: mod_base = OTHER; note = 2'-O-methyladenosine-3'-phosphate
  modified_base 9: mod_base = OTHER; note = 2'-O-methylguanosine-3'-phosphate
  modified_base 10: mod_base = OTHER; note = 2'-O-methyluridine-3'-phosphate
  modified_base 11: mod_base = OTHER; note = 2'-O-methyluridine-3'-phosphate
  modified_base 12: mod_base = OTHER; note = 2'-O-methylcytidine-3'-phosphate
  modified_base 13: mod_base = OTHER; note = 2'-O-methyladenosine-3'-phosphate
  modified_base 14: mod_base = OTHER; note = 2'-deoxy-2'-fluorouridine-3'-phosphate
  modified_base 15: mod_base = OTHER; note = 2'-O-methyluridine-3'-phosphate
  modified_base 16: mod_base = OTHER; note = 2'-deoxy-2'-fluoroguanosine-3'-phosphate
  modified_base 17: mod_base = OTHER; note = 2'-O-methyluridine-3'-phosphate
  modified_base 18: mod_base = OTHER; note = 2'-O-methylguanosine-3'-phosphate
  modified_base 19: mod_base = OTHER; note = 2'-O-methyluridine-3'-phosphate
  modified_base 20: mod_base = OTHER; note = 2'-O-methyladenosine-3'-phosphate
  modified_base 21: mod_base = OTHER; note = 2'-O-methylguanosine-3'-phosphate
  modified_base 22: mod_base = OTHER; note = 2'-O-methyladenosine-3'-phosphate
  modified_base 23: mod_base = OTHER; note = 2'-O-methyladenosine
tttaagaagttcattgtgtagaa

SEQ ID NO: 5751 - RNA, 23 nt, synthetic construct
  source 1..23: mol_type = other RNA
  modified_base 1: mod_base = OTHER; note = 2'-O-methyluridine-3'-phosphate 5'-(E)-Vinylphosphonate
  modified_base 2: mod_base = OTHER; note = 2'-deoxy-2'-fluoroguanosine-3'-phosphate
  modified_base 3: mod_base = OTHER; note = 2'-O-methyluridine-3'-phosphate
  modified_base 4: mod_base = OTHER; note = 2'-O-methyluridine-3'-phosphate
  modified_base 5: mod_base = OTHER; note = 2'-O-methyladenosine-3'-phosphate
  modified_base 6: mod_base = OTHER; note = 2'-deoxy-2'-fluoroadenosine-3'-phosphate
  modified_base 7: mod_base = OTHER; note = 2'-O-methylguanosine-3'-phosphate
  modified_base 8: mod_base = OTHER; note = 2'-O-methyladenosine-3'-phosphate
  modified_base 9: mod_base = OTHER; note = 2'-O-methyladenosine-3'-phosphate
  modified_base 10: mod_base = OTHER; note = 2'-O-methylguanosine-3'-phosphate
  modified_base 11: mod_base = OTHER; note = 2'-O-methyluridine-3'-phosphate
  modified_base 12: mod_base = OTHER; note = 2'-O-methyluridine-3'-phosphate
  modified_base 13: mod_base = OTHER; note = 2'-O-methylcytidine-3'-phosphate
  modified_base 14: mod_base = OTHER; note = 2'-deoxy-2'-fluoroadenosine-3'-phosphate
  modified_base 15: mod_base = OTHER; note = 2'-O-methyluridine-3'-phosphate
  modified_base 16: mod_base = OTHER; note = 2'-deoxy-2'-fluorouridine-3'-phosphate
  modified_base 17: mod_base = OTHER; note = 2'-O-methylguanosine-3'-phosphate
  modified_base 18: mod_base = OTHER; note = 2'-O-methyluridine-3'-phosphate
  modified_base 19: mod_base = OTHER; note = 2'-O-methylguanosine-3'-phosphate
  modified_base 20: mod_base = OTHER; note = 2'-O-methyluridine-3'-phosphate
  modified_base 21: mod_base = OTHER; note = 2'-O-methyladenosine-3'-phosphate
  modified_base 22: mod_base = OTHER; note = 2'-O-methylguanosine-3'-phosphate
  modified_base 23: mod_base = OTHER; note = 2'-O-methyladenosine
tgttaagaagttcattgtgtaga

SEQ ID NO: 5752 - RNA, 23 nt, synthetic construct
  source 1..23: mol_type = other RNA
  modified_base 1: mod_base = OTHER; note = 2'-O-methyluridine-3'-phosphate 5'-(E)-Vinylphosphonate
  modified_base 2: mod_base = OTHER; note = 2'-deoxy-2'-fluorouridine-3'-phosphate
  modified_base 3: mod_base = OTHER; note = 2'-O-methylguanosine-3'-phosphate
  modified_base 4: mod_base = OTHER; note = 2'-O-methyluridine-3'-phosphate
  modified_base 5: mod_base = OTHER; note = 2'-O-methyluridine-3'-phosphate
  modified_base 6: mod_base = OTHER; note = 2'-deoxy-2'-fluoroadenosine-3'-phosphate
  modified_base 7: mod_base = OTHER; note = 2'-O-methyladenosine-3'-phosphate
  modified_base 8: mod_base = OTHER; note = 2'-O-methylguanosine-3'-phosphate
  modified_base 9: mod_base = OTHER; note = 2'-O-methyladenosine-3'-phosphate
  modified_base 10: mod_base = OTHER; note = 2'-O-methyladenosine-3'-phosphate
  modified_base 11: mod_base = OTHER; note = 2'-O-methylguanosine-3'-phosphate
  modified_base 12: mod_base = OTHER; note = 2'-O-methyluridine-3'-phosphate
  modified_base 13: mod_base = OTHER; note = 2'-O-methyluridine-3'-phosphate
  modified_base 14: mod_base = OTHER; note = 2'-deoxy-2'-fluorocytidine-3'-phosphate
  modified_base 15: mod_base = OTHER; note = 2'-O-methyladenosine-3'-phosphate
  modified_base 16: mod_base = OTHER; note = 2'-deoxy-2'-fluorouridine-3'-phosphate
  modified_base 17: mod_base = OTHER; note = 2'-O-methyluridine-3'-phosphate
  modified_base 18: mod_base = OTHER; note = 2'-O-methylguanosine-3'-phosphate
  modified_base 19: mod_base = OTHER; note = 2'-O-methyluridine-3'-phosphate
  modified_base 20: mod_base = OTHER; note = 2'-O-methylguanosine-3'-phosphate
  modified_base 21: mod_base = OTHER; note = 2'-O-methyluridine-3'-phosphate
  modified_base 22: mod_base = OTHER; note = 2'-O-methyladenosine-3'-phosphate
  modified_base 23: mod_base = OTHER; note = 2'-O-methylguanosine
ttgttaagaagttcattgtgtag

SEQ ID NO: 5753 - RNA, 23 nt, synthetic construct
  source 1..23: mol_type = other RNA
  modified_base 1: mod_base = OTHER; note = 2'-O-methyluridine-3'-phosphate 5'-(E)-Vinylphosphonate
  modified_base 2: mod_base = OTHER; note = 2'-deoxy-2'-fluorouridine-3'-phosphate
  modified_base 3: mod_base = OTHER; note = 2'-O-methyluridine-3'-phosphate
  modified_base 4: mod_base = OTHER; note = 2'-O-methylguanosine-3'-phosphate
  modified_base 5: mod_base = OTHER; note = 2'-O-methyluridine-3'-phosphate
  modified_base 6: mod_base = OTHER; note = 2'-deoxy-2'-fluorouridine-3'-phosphate
  modified_base 7: mod_base = OTHER; note = 2'-O-methyladenosine-3'-phosphate
  modified_base 8: mod_base = OTHER; note = 2'-O-methyladenosine-3'-phosphate
  modified_base 9: mod_base = OTHER; note = 2'-O-methylguanosine-3'-phosphate
  modified_base 10: mod_base = OTHER; note = 2'-O-methyladenosine-3'-phosphate
  modified_base 11: mod_base = OTHER; note = 2'-O-methyladenosine-3'-phosphate
  modified_base 12: mod_base = OTHER; note = 2'-O-methylguanosine-3'-phosphate
  modified_base 13: mod_base = OTHER; note = 2'-O-methyluridine-3'-phosphate
  modified_base 14: mod_base = OTHER; note = 2'-deoxy-2'-fluorouridine-3'-phosphate
  modified_base 15: mod_base = OTHER; note = 2'-O-methylcytidine-3'-phosphate
  modified_base 16: mod_base = OTHER; note = 2'-deoxy-2'-fluoroadenosine-3'-phosphate
  modified_base 17: mod_base = OTHER; note = 2'-O-methyluridine-3'-phosphate
  modified_base 18: mod_base = OTHER; note = 2'-O-methyluridine-3'-phosphate
  modified_base 19: mod_base = OTHER; note = 2'-O-methylguanosine-3'-phosphate
  modified_base 20: mod_base = OTHER; note = 2'-O-methyluridine-3'-phosphate
  modified_base 21: mod_base = OTHER; note = 2'-O-methylguanosine-3'-phosphate
  modified_base 22: mod_base = OTHER; note = 2'-O-methyluridine-3'-phosphate
  modified_base 23: mod_base = OTHER; note = 2'-O-methyladenosine
tttgttaagaagttcattgtgta

SEQ ID NO: 5754 - RNA, 23 nt, synthetic construct
  source 1..23: mol_type = other RNA
  modified_base 1: mod_base = OTHER; note = 2'-O-methyluridine-3'-phosphate 5'-(E)-Vinylphosphonate
  modified_base 2: mod_base = OTHER; note = 2'-deoxy-2'-fluorocytidine-3'-phosphate
  modified_base 3: mod_base = OTHER; note = 2'-O-methyluridine-3'-phosphate
  modified_base 4: mod_base = OTHER; note = 2'-O-methyluridine-3'-phosphate
  modified_base 5: mod_base = OTHER; note = 2'-O-methylguanosine-3'-phosphate
  modified_base 6: mod_base = OTHER; note = 2'-deoxy-2'-fluorouridine-3'-phosphate
  modified_base 7: mod_base = OTHER; note = 2'-O-methyluridine-3'-phosphate
  modified_base 8: mod_base = OTHER; note = 2'-O-methyladenosine-3'-phosphate
  modified_base 9: mod_base = OTHER; note = 2'-O-methyladenosine-3'-phosphate
  modified_base 10: mod_base = OTHER; note = 2'-O-methylguanosine-3'-phosphate
  modified_base 11: mod_base = OTHER; note = 2'-O-methyladenosine-3'-phosphate
  modified_base 12: mod_base = OTHER; note = 2'-O-methyladenosine-3'-phosphate
  modified_base 13: mod_base = OTHER; note = 2'-O-methylguanosine-3'-phosphate
  modified_base 14: mod_base = OTHER; note = 2'-deoxy-2'-fluorouridine-3'-phosphate
  modified_base 15: mod_base = OTHER; note = 2'-O-methyluridine-3'-phosphate
  modified_base 16: mod_base = OTHER; note = 2'-deoxy-2'-fluorocytidine-3'-phosphate
  modified_base 17: mod_base = OTHER; note = 2'-O-methyladenosine-3'-phosphate
  modified_base 18: mod_base = OTHER; note = 2'-O-methyluridine-3'-phosphate
  modified_base 19: mod_base = OTHER; note = 2'-O-methyluridine-3'-phosphate
  modified_base 20: mod_base = OTHER; note = 2'-O-methylguanosine-3'-phosphate
  modified_base 21: mod_base = OTHER; note = 2'-O-methyluridine-3'-phosphate
  modified_base 22: mod_base = OTHER; note = 2'-O-methylguanosine-3'-phosphate
  modified_base 23: mod_base = OTHER; note = 2'-O-methyluridine
tcttgttaagaagttcattgtgt

SEQ ID NO: 5755 - RNA, 23 nt, synthetic construct
  source 1..23: mol_type = other RNA
  modified_base 1: mod_base = OTHER; note = 2'-O-methyluridine-3'-phosphate 5'-(E)-Vinylphosphonate
  modified_base 2: mod_base = OTHER; note = 2'-deoxy-2'-fluorouridine-3'-phosphate
  modified_base 3: mod_base = OTHER; note = 2'-O-methylcytidine-3'-phosphate
  modified_base 4: mod_base = OTHER; note = 2'-O-methyluridine-3'-phosphate
  modified_base 5: mod_base = OTHER; note = 2'-O-methyluridine-3'-phosphate
  modified_base 6: mod_base = OTHER; note = 2'-deoxy-2'-fluoroguanosine-3'-phosphate
  modified_base 7: mod_base = OTHER; note = 2'-O-methyluridine-3'-phosphate
  modified_base 8: mod_base = OTHER; note = 2'-O-methyluridine-3'-phosphate
  modified_base 9: mod_base = OTHER; note = 2'-O-methyladenosine-3'-phosphate
  modified_base 10: mod_base = OTHER; note = 2'-O-methyladenosine-3'-phosphate
  modified_base 11: mod_base = OTHER; note = 2'-O-methylguanosine-3'-phosphate
  modified_base 12: mod_base = OTHER; note = 2'-O-methyladenosine-3'-phosphate
  modified_base 13: mod_base = OTHER; note = 2'-O-methyladenosine-3'-phosphate
  modified_base 14: mod_base = OTHER; note = 2'-deoxy-2'-fluoroguanosine-3'-phosphate
  modified_base 15: mod_base = OTHER; note = 2'-O-methyluridine-3'-phosphate
  modified_base 16: mod_base = OTHER; note = 2'-deoxy-2'-fluorouridine-3'-phosphate
  modified_base 17: mod_base = OTHER; note = 2'-O-methylcytidine-3'-phosphate
  modified_base 18: mod_base = OTHER; note = 2'-O-methyladenosine-3'-phosphate
  modified_base 19: mod_base = OTHER; note = 2'-O-methyluridine-3'-phosphate
  modified_base 20: mod_base = OTHER; note = 2'-O-methyluridine-3'-phosphate
  modified_base 21: mod_base = OTHER; note = 2'-O-methylguanosine-3'-phosphate
  modified_base 22: mod_base = OTHER; note = 2'-O-methyluridine-3'-phosphate
  modified_base 23: mod_base = OTHER; note = 2'-O-methylguanosine
ttcttgttaagaagttcattgtg

SEQ ID NO: 5756 - RNA, 23 nt, synthetic construct
  source 1..23: mol_type = other RNA
  modified_base 1: mod_base = OTHER; note = 2'-O-methyluridine-3'-phosphate 5'-(E)-Vinylphosphonate
  modified_base 2: mod_base = OTHER; note = 2'-deoxy-2'-fluoroadenosine-3'-phosphate
  modified_base 3: mod_base = OTHER; note = 2'-O-methyluridine-3'-phosphate
  modified_base 4: mod_base = OTHER; note = 2'-O-methylcytidine-3'-phosphate
  modified_base 5: mod_base = OTHER; note = 2'-O-methyluridine-3'-phosphate
  modified_base 6: mod_base = OTHER; note = 2'-deoxy-2'-fluorouridine-3'-phosphate
  modified_base 7: mod_base = OTHER; note = 2'-O-methylguanosine-3'-phosphate
  modified_base 8: mod_base = OTHER; note = 2'-O-methyluridine-3'-phosphate
  modified_base 9: mod_base = OTHER; note = 2'-O-methyluridine-3'-phosphate
  modified_base 10: mod_base = OTHER; note = 2'-O-methyladenosine-3'-phosphate
  modified_base 11: mod_base = OTHER; note = 2'-O-methyladenosine-3'-phosphate
  modified_base 12: mod_base = OTHER; note = 2'-O-methylguanosine-3'-phosphate
  modified_base 13: mod_base = OTHER; note = 2'-O-methyladenosine-3'-phosphate
  modified_base 14: mod_base = OTHER; note = 2'-deoxy-2'-fluoroadenosine-3'-phosphate
  modified_base 15: mod_base = OTHER; note = 2'-O-methylguanosine-3'-phosphate
  modified_base 16: mod_base = OTHER; note = 2'-deoxy-2'-fluorouridine-3'-phosphate
  modified_base 17: mod_base = OTHER; note = 2'-O-methyluridine-3'-phosphate
  modified_base 18: mod_base = OTHER; note = 2'-O-methylcytidine-3'-phosphate
  modified_base 19: mod_base = OTHER; note = 2'-O-methyladenosine-3'-phosphate
  modified_base 20: mod_base = OTHER; note = 2'-O-methyluridine-3'-phosphate
  modified_base 21: mod_base = OTHER; note = 2'-O-methyluridine-3'-phosphate
  modified_base 22: mod_base = OTHER; note = 2'-O-methylguanosine-3'-phosphate
  modified_base 23: mod_base = OTHER; note = 2'-O-methyluridine
tatcttgttaagaagttcattgt

SEQ ID NO: 5757 - RNA, 23 nt, synthetic construct
  source 1..23: mol_type = other RNA
  modified_base 1: mod_base = OTHER; note = 2'-O-methyluridine-3'-phosphate 5'-(E)-Vinylphosphonate
  modified_base 2: mod_base = OTHER; note = 2'-deoxy-2'-fluoroadenosine-3'-phosphate
  modified_base 3: mod_base = OTHER; note = 2'-O-methyladenosine-3'-phosphate
  modified_base 4: mod_base = OTHER; note = 2'-O-methyluridine-3'-phosphate
  modified_base 5: mod_base = OTHER; note = 2'-O-methylcytidine-3'-phosphate
  modified_base 6: mod_base = OTHER; note = 2'-deoxy-2'-fluorouridine-3'-phosphate
  modified_base 7: mod_base = OTHER; note = 2'-O-methyluridine-3'-phosphate
  modified_base 8: mod_base = OTHER; note = 2'-O-methylguanosine-3'-phosphate
  modified_base 9: mod_base = OTHER; note = 2'-O-methyluridine-3'-phosphate
  modified_base 10: mod_base = OTHER; note = 2'-O-methyluridine-3'-phosphate
  modified_base 11: mod_base = OTHER; note = 2'-O-methyladenosine-3'-phosphate
  modified_base 12: mod_base = OTHER; note = 2'-O-methyladenosine-3'-phosphate
  modified_base 13: mod_base = OTHER; note = 2'-O-methylguanosine-3'-phosphate
  modified_base 14: mod_base = OTHER; note = 2'-deoxy-2'-fluoroadenosine-3'-phosphate
  modified_base 15: mod_base = OTHER; note = 2'-O-methyladenosine-3'-phosphate
  modified_base 16: mod_base = OTHER; note = 2'-deoxy-2'-fluoroguanosine-3'-phosphate
  modified_base 17: mod_base = OTHER; note = 2'-O-methyluridine-3'-phosphate
  modified_base 18: mod_base = OTHER; note = 2'-O-methyluridine-3'-phosphate
  modified_base 19: mod_base = OTHER; note = 2'-O-methylcytidine-3'-phosphate
  modified_base 20: mod_base = OTHER; note = 2'-O-methyladenosine-3'-phosphate
  modified_base 21: mod_base = OTHER; note = 2'-O-methyluridine-3'-phosphate
  modified_base 22: mod_base = OTHER; note = 2'-O-methyluridine-3'-phosphate
  modified_base 23: mod_base = OTHER; note = 2'-O-methylguanosine
taatcttgttaagaagttcattg

SEQ ID NO: 5758 - RNA, 23 nt, synthetic construct
  source 1..23: mol_type = other RNA
  modified_base 1: mod_base = OTHER; note = 2'-O-methyluridine-3'-phosphate 5'-(E)-Vinylphosphonate
  modified_base 2: mod_base = OTHER; note = 2'-deoxy-2'-fluoroguanosine-3'-phosphate
  modified_base 3: mod_base = OTHER; note = 2'-O-methyladenosine-3'-phosphate
  modified_base 4: mod_base = OTHER; note = 2'-O-methylguanosine-3'-phosphate
  modified_base 5: mod_base = OTHER; note = 2'-O-methyladenosine-3'-phosphate
  modified_base 6: mod_base = OTHER; note = 2'-deoxy-2'-fluoroadenosine-3'-phosphate
  modified_base 7: mod_base = OTHER; note = 2'-O-methylcytidine-3'-phosphate
  modified_base 8: mod_base = OTHER; note = 2'-O-methyluridine-3'-phosphate
  modified_base 9: mod_base = OTHER; note = 2'-O-methyluridine-3'-phosphate
  modified_base 10: mod_base = OTHER; note = 2'-O-methyladenosine-3'-phosphate
  modified_base 11: mod_base = OTHER; note = 2'-O-methyladenosine-3'-phosphate
  modified_base 12: mod_base = OTHER; note = 2'-O-methyladenosine-3'-phosphate
  modified_base 13: mod_base = OTHER; note = 2'-O-methyladenosine-3'-phosphate
  modified_base 14: mod_base = OTHER; note = 2'-deoxy-2'-fluorouridine-3'-phosphate
  modified_base 15: mod_base = OTHER; note = 2'-O-methylcytidine-3'-phosphate
  modified_base 16: mod_base = OTHER; note = 2'-deoxy-2'-fluorouridine-3'-phosphate
  modified_base 17: mod_base = OTHER; note = 2'-O-methyluridine-3'-phosphate
  modified_base 18: mod_base = OTHER; note = 2'-O-methylguanosine-3'-phosphate
  modified_base 19: mod_base = OTHER; note = 2'-O-methyluridine-3'-phosphate
  modified_base 20: mod_base = OTHER; note = 2'-O-methyluridine-3'-phosphate
  modified_base 21: mod_base = OTHER; note = 2'-O-methyladenosine-3'-phosphate
  modified_base 22: mod_base = OTHER; note = 2'-O-methyladenosine-3'-phosphate
  modified_base 23: mod_base = OTHER; note = 2'-O-methylguanosine
tgagaacttaaaatcttgttaag

SEQ ID NO: 5759 - RNA, 23 nt, synthetic construct
  source 1..23: mol_type = other RNA
  modified_base 1: mod_base = OTHER; note = 2'-O-methyluridine-3'-phosphate 5'-(E)-Vinylphosphonate
  modified_base 2: mod_base = OTHER; note = 2'-deoxy-2'-fluorocytidine-3'-phosphate
  modified_base 3: mod_base = OTHER; note = 2'-O-methyladenosine-3'-phosphate
  modified_base 4: mod_base = OTHER; note = 2'-O-methylguanosine-3'-phosphate
  modified_base 5: mod_base = OTHER; note = 2'-O-methyladenosine-3'-phosphate
  modified_base 6: mod_base = OTHER; note = 2'-deoxy-2'-fluoroguanosine-3'-phosphate
  modified_base 7: mod_base = OTHER; note = 2'-O-methyladenosine-3'-phosphate
  modified_base 8: mod_base = OTHER; note = 2'-O-methyladenosine-3'-phosphate
  modified_base 9: mod_base = OTHER; note = 2'-O-methylcytidine-3'-phosphate
  modified_base 10: mod_base = OTHER; note = 2'-O-methyluridine-3'-phosphate
  modified_base 11: mod_base = OTHER; note = 2'-O-methyluridine-3'-phosphate
  modified_base 12: mod_base = OTHER; note = 2'-O-methyladenosine-3'-phosphate
  modified_base 13: mod_base = OTHER; note = 2'-O-methyladenosine-3'-phosphate
  modified_base 14: mod_base = OTHER; note = 2'-deoxy-2'-fluoroadenosine-3'-phosphate
  modified_base 15: mod_base = OTHER; note = 2'-O-methyladenosine-3'-phosphate
  modified_base 16: mod_base = OTHER; note = 2'-deoxy-2'-fluorouridine-3'-phosphate
  modified_base 17: mod_base = OTHER; note = 2'-O-methylcytidine-3'-phosphate
  modified_base 18: mod_base = OTHER; note = 2'-O-methyluridine-3'-phosphate
  modified_base 19: mod_base = OTHER; note = 2'-O-methyluridine-3'-phosphate
  modified_base 20: mod_base = OTHER; note = 2'-O-methylguanosine-3'-phosphate
  modified_base 21: mod_base = OTHER; note = 2'-O-methyluridine-3'-phosphate
  modified_base 22: mod_base = OTHER; note = 2'-O-methyluridine-3'-phosphate
  modified_base 23: mod_base = OTHER; note = 2'-O-methyladenosine
tcagagaacttaaaatcttgtta

SEQ ID NO: 5760 - RNA, 23 nt, synthetic construct
  source 1..23: mol_type = other RNA
  modified_base 1: mod_base = OTHER; note = 2'-O-methyluridine-3'-phosphate 5'-(E)-Vinylphosphonate
  modified_base 2: mod_base = OTHER; note = 2'-deoxy-2'-fluoroadenosine-3'-phosphate
  modified_base 3: mod_base = OTHER; note = 2'-O-methyladenosine-3'-phosphate
  modified_base 4: mod_base = OTHER; note = 2'-O-methylcytidine-3'-phosphate
  modified_base 5: mod_base = OTHER; note = 2'-O-methylcytidine-3'-phosphate
  modified_base 6: mod_base = OTHER; note = 2'-deoxy-2'-fluorouridine-3'-phosphate
  modified_base 7: mod_base = OTHER; note = 2'-O-methylcytidine-3'-phosphate
  modified_base 8: mod_base = OTHER; note = 2'-O-methyluridine-3'-phosphate
  modified_base 9: mod_base = OTHER; note = 2'-O-methyluridine-3'-phosphate
  modified_base 10: mod_base = OTHER; note = 2'-O-methyladenosine-3'-phosphate
  modified_base 11: mod_base = OTHER; note = 2'-O-methyluridine-3'-phosphate
  modified_base 12: mod_base = OTHER; note = 2'-O-methyladenosine-3'-phosphate
  modified_base 13: mod_base = OTHER; note = 2'-O-methylcytidine-3'-phosphate
  modified_base 14: mod_base = OTHER; note = 2'-deoxy-2'-fluoroadenosine-3'-phosphate
  modified_base 15: mod_base = OTHER; note = 2'-O-methylguanosine-3'-phosphate
  modified_base 16: mod_base = OTHER; note = 2'-deoxy-2'-fluoroadenosine-3'-phosphate
  modified_base 17: mod_base = OTHER; note = 2'-O-methylguanosine-3'-phosphate
  modified_base 18: mod_base = OTHER; note = 2'-O-methyladenosine-3'-phosphate
  modified_base 19: mod_base = OTHER; note = 2'-O-methyladenosine-3'-phosphate
  modified_base 20: mod_base = OTHER; note = 2'-O-methylcytidine-3'-phosphate
  modified_base 21: mod_base = OTHER; note = 2'-O-methyluridine-3'-phosphate
  modified_base 22: mod_base = OTHER; note = 2'-O-methyluridine-3'-phosphate
  modified_base 23: mod_base = OTHER; note = 2'-O-methyladenosine
taacctcttatacagagaactta

SEQ ID NO: 5761 - RNA, 23 nt, synthetic construct
  source 1..23: mol_type = other RNA
  modified_base 1: mod_base = OTHER; note = 2'-O-methyluridine-3'-phosphate 5'-(E)-Vinylphosphonate
  modified_base 2: mod_base = OTHER; note = 2'-deoxy-2'-fluorouridine-3'-phosphate
  modified_base 3: mod_base = OTHER; note = 2'-O-methylguanosine-3'-phosphate
  modified_base 4: mod_base = OTHER; note = 2'-O-methyladenosine-3'-phosphate
  modified_base 5: mod_base = OTHER; note = 2'-O-methylguanosine-3'-phosphate
  modified_base 6: mod_base = OTHER; note = 2'-deoxy-2'-fluoroguanosine-3'-phosphate
  modified_base 7: mod_base = OTHER; note = 2'-O-methyluridine-3'-phosphate
  modified_base 8: mod_base = OTHER; note = 2'-O-methylguanosine-3'-phosphate
  modified_base 9: mod_base = OTHER; note = 2'-O-methyladenosine-3'-phosphate
  modified_base 10: mod_base = OTHER; note = 2'-O-methyladenosine-3'-phosphate
  modified_base 11: mod_base = OTHER; note = 2'-O-methyladenosine-3'-phosphate
  modified_base 12: mod_base = OTHER; note = 2'-O-methylcytidine-3'-phosphate
  modified_base 13: mod_base = OTHER; note = 2'-O-methylcytidine-3'-phosphate
  modified_base 14: mod_base = OTHER; note = 2'-deoxy-2'-fluorouridine-3'-phosphate
  modified_base 15: mod_base = OTHER; note = 2'-O-methylcytidine-3'-phosphate
  modified_base 16: mod_base = OTHER; note = 2'-deoxy-2'-fluorouridine-3'-phosphate
  modified_base 17: mod_base = OTHER; note = 2'-O-methyluridine-3'-phosphate
  modified_base 18: mod_base = OTHER; note = 2'-O-methyladenosine-3'-phosphate
  modified_base 19: mod_base = OTHER; note = 2'-O-methyluridine-3'-phosphate
  modified_base 20: mod_base = OTHER; note = 2'-O-methyladenosine-3'-phosphate
  modified_base 21: mod_base = OTHER; note = 2'-O-methylcytidine-3'-phosphate
  modified_base 22: mod_base = OTHER; note = 2'-O-methyladenosine-3'-phosphate
  modified_base 23: mod_base = OTHER; note = 2'-O-methylguanosine
ttgaggtgaaacctcttatacag

SEQ ID NO: 5762 - RNA, 23 nt, synthetic construct
  source 1..23: mol_type = other RNA
  modified_base 1: mod_base = OTHER; note = 2'-O-methyluridine-3'-phosphate 5'-(E)-Vinylphosphonate
  modified_base 2: mod_base = OTHER; note = 2'-deoxy-2'-fluoroadenosine-3'-phosphate
  modified_base 3: mod_base = OTHER; note = 2'-O-methyladenosine-3'-phosphate
  modified_base 4: mod_base = OTHER; note = 2'-O-methyluridine-3'-phosphate
  modified_base 5: mod_base = OTHER; note = 2'-O-methyladenosine-3'-phosphate
  modified_base 6: mod_base = OTHER; note = 2'-deoxy-2'-fluorocytidine-3'-phosphate
  modified_base 7: mod_base = OTHER; note = 2'-O-methyluridine-3'-phosphate
  modified_base 8: mod_base = OTHER; note = 2'-O-methylcytidine-3'-phosphate
  modified_base 9: mod_base = OTHER; note = 2'-O-methyluridine-3'-phosphate
  modified_base 10: mod_base = OTHER; note = 2'-O-methyladenosine-3'-phosphate
  modified_base 11: mod_base = OTHER; note = 2'-O-methyluridine-3'-phosphate
  modified_base 12: mod_base = OTHER; note = 2'-O-methyladenosine-3'-phosphate
  modified_base 13: mod_base = OTHER; note = 2'-O-methylguanosine-3'-phosphate
  modified_base 14: mod_base = OTHER; note = 2'-deoxy-2'-fluorouridine-3'-phosphate
  modified_base 15: mod_base = OTHER; note = 2'-O-methylguanosine-3'-phosphate
  modified_base 16: mod_base = OTHER; note = 2'-deoxy-2'-fluorocytidine-3'-phosphate
  modified_base 17: mod_base = OTHER; note = 2'-O-methylcytidine-3'-phosphate
  modified_base 18: mod_base = OTHER; note = 2'-O-methyladenosine-3'-phosphate
  modified_base 19: mod_base = OTHER; note = 2'-O-methyladenosine-3'-phosphate
  modified_base 20: mod_base = OTHER; note = 2'-O-methyladenosine-3'-phosphate
  modified_base 21: mod_base = OTHER; note = 2'-O-methyluridine-3'-phosphate
  modified_base 22: mod_base = OTHER; note = 2'-O-methylguanosine-3'-phosphate
  modified_base 23: mod_base = OTHER; note = 2'-O-methyladenosine
taatactctatagtgccaaatga

SEQ ID NO: 5763 - RNA, 23 nt, synthetic construct
  source 1..23: mol_type = other RNA
  modified_base 1: mod_base = OTHER; note = 2'-O-methyluridine-3'-phosphate 5'-(E)-Vinylphosphonate
  modified_base 2: mod_base = OTHER; note = 2'-deoxy-2'-fluoroadenosine-3'-phosphate
  modified_base 3: mod_base = OTHER; note = 2'-O-methyladenosine-3'-phosphate
  modified_base 4: mod_base = OTHER; note = 2'-O-methyladenosine-3'-phosphate
  modified_base 5: mod_base = OTHER; note = 2'-O-methyluridine-3'-phosphate
  modified_base 6: mod_base = OTHER; note = 2'-deoxy-2'-fluoroadenosine-3'-phosphate
  modified_base 7: mod_base = OTHER; note = 2'-O-methylcytidine-3'-phosphate
  modified_base 8: mod_base = OTHER; note = 2'-O-methyluridine-3'-phosphate
  modified_base 9: mod_base = OTHER; note = 2'-O-methylcytidine-3'-phosphate
  modified_base 10: mod_base = OTHER; note = 2'-O-methyluridine-3'-phosphate
  modified_base 11: mod_base = OTHER; note = 2'-O-methyladenosine-3'-phosphate
  modified_base 12: mod_base = OTHER; note = 2'-O-methyluridine-3'-phosphate
  modified_base 13: mod_base = OTHER; note = 2'-O-methyladenosine-3'-phosphate
  modified_base 14: mod_base = OTHER; note = 2'-deoxy-2'-fluoroguanosine-3'-phosphate
  modified_base 15: mod_base = OTHER; note = 2'-O-methyluridine-3'-phosphate
  modified_base 16: mod_base = OTHER; note = 2'-deoxy-2'-fluoroguanosine-3'-phosphate
  modified_base 17: mod_base = OTHER; note = 2'-O-methylcytidine-3'-phosphate
  modified_base 18: mod_base = OTHER; note = 2'-O-methylcytidine-3'-phosphate
  modified_base 19: mod_base = OTHER; note = 2'-O-methyladenosine-3'-phosphate
  modified_base 20: mod_base = OTHER; note = 2'-O-methyladenosine-3'-phosphate
  modified_base 21: mod_base = OTHER; note = 2'-O-methyladenosine-3'-phosphate
  modified_base 22: mod_base = OTHER; note = 2'-O-methyluridine-3'-phosphate
  modified_base 23: mod_base = OTHER; note = 2'-O-methylguanosine
taaatactctatagtgccaaatg

SEQ ID NO: 5764 - RNA, 23 nt, synthetic construct
  source 1..23: mol_type = other RNA
  modified_base 1: mod_base = OTHER; note = 2'-O-methyluridine-3'-phosphate 5'-(E)-Vinylphosphonate
  modified_base 2: mod_base = OTHER; note = 2'-deoxy-2'-fluorocytidine-3'-phosphate
  modified_base 3: mod_base = OTHER; note = 2'-O-methyladenosine-3'-phosphate
  modified_base 4: mod_base = OTHER; note = 2'-O-methyladenosine-3'-phosphate
  modified_base 5: mod_base = OTHER; note = 2'-O-methyladenosine-3'-phosphate
  modified_base 6: mod_base = OTHER; note = 2'-deoxy-2'-fluorouridine-3'-phosphate
  modified_base 7: mod_base = OTHER; note = 2'-O-methyladenosine-3'-phosphate
  modified_base 8: mod_base = OTHER; note = 2'-O-methylcytidine-3'-phosphate
  modified_base 9: mod_base = OTHER; note = 2'-O-methyluridine-3'-phosphate
  modified_base 10: mod_base = OTHER; note = 2'-O-methylcytidine-3'-phosphate
  modified_base 11: mod_base = OTHER; note = 2'-O-methyluridine-3'-phosphate
  modified_base 12: mod_base = OTHER; note = 2'-O-methyladenosine-3'-phosphate
  modified_base 13: mod_base = OTHER; note = 2'-O-methyluridine-3'-phosphate
  modified_base 14: mod_base = OTHER; note = 2'-deoxy-2'-fluoroadenosine-3'-phosphate
  modified_base 15: mod_base = OTHER; note = 2'-O-methylguanosine-3'-phosphate
  modified_base 16: mod_base = OTHER; note = 2'-deoxy-2'-fluorouridine-3'-phosphate
  modified_base 17: mod_base = OTHER; note = 2'-O-methylguanosine-3'-phosphate
  modified_base 18: mod_base = OTHER; note = 2'-O-methylcytidine-3'-phosphate
  modified_base 19: mod_base = OTHER; note = 2'-O-methylcytidine-3'-phosphate
  modified_base 20: mod_base = OTHER; note = 2'-O-methyladenosine-3'-phosphate
  modified_base 21: mod_base = OTHER; note = 2'-O-methyladenosine-3'-phosphate
  modified_base 22: mod_base = OTHER; note = 2'-O-methyladenosine-3'-phosphate
  modified_base 23: mod_base = OTHER; note = 2'-O-methyluridine
tcaaatactctatagtgccaaat

SEQ ID NO: 5765 - RNA, 23 nt, synthetic construct
  source 1..23: mol_type = other RNA
  modified_base 1: mod_base = OTHER; note = 2'-O-methyluridine-3'-phosphate 5'-(E)-Vinylphosphonate
  modified_base 2: mod_base = OTHER; note = 2'-deoxy-2'-fluoroadenosine-3'-phosphate
  modified_base 3: mod_base = OTHER; note = 2'-O-methylcytidine-3'-phosphate
  modified_base 4: mod_base = OTHER; note = 2'-O-methyladenosine-3'-phosphate
  modified_base 5: mod_base = OTHER; note = 2'-O-methyladenosine-3'-phosphate
  modified_base 6: mod_base = OTHER; note = 2'-deoxy-2'-fluoroadenosine-3'-phosphate
  modified_base 7: mod_base = OTHER; note = 2'-O-methyluridine-3'-phosphate
  modified_base 8: mod_base = OTHER; note = 2'-O-methyladenosine-3'-phosphate
  modified_base 9: mod_base = OTHER; note = 2'-O-methylcytidine-3'-phosphate
  modified_base 10: mod_base = OTHER; note = 2'-O-methyluridine-3'-phosphate
  modified_base 11: mod_base = OTHER; note = 2'-O-methylcytidine-3'-phosphate
  modified_base 12: mod_base = OTHER; note = 2'-O-methyluridine-3'-phosphate
  modified_base 13: mod_base = OTHER; note = 2'-O-methyladenosine-3'-phosphate
  modified_base 14: mod_base = OTHER; note = 2'-deoxy-2'-fluorouridine-3'-phosphate
  modified_base 15: mod_base = OTHER; note = 2'-O-methyladenosine-3'-phosphate
  modified_base 16: mod_base = OTHER; note = 2'-deoxy-2'-fluoroguanosine-3'-phosphate
  modified_base 17: mod_base = OTHER; note = 2'-O-methyluridine-3'-phosphate
  modified_base 18: mod_base = OTHER; note = 2'-O-methylguanosine-3'-phosphate
  modified_base 19: mod_base = OTHER; note = 2'-O-methylcytidine-3'-phosphate
  modified_base 20: mod_base = OTHER; note = 2'-O-methylcytidine-3'-phosphate
  modified_base 21: mod_base = OTHER; note = 2'-O-methyladenosine-3'-phosphate
  modified_base 22: mod_base = OTHER; note = 2'-O-methyladenosine-3'-phosphate
  modified_base 23: mod_base = OTHER; note = 2'-O-methyladenosine
tacaaatactctatagtgccaaa

SEQ ID NO: 5766 - RNA, 23 nt, synthetic construct
  source 1..23: mol_type = other RNA
  modified_base 1: mod_base = OTHER; note = 2'-O-methyluridine-3'-phosphate 5'-(E)-Vinylphosphonate
  modified_base 2: mod_base = OTHER; note = 2'-deoxy-2'-fluoroadenosine-3'-phosphate
  modified_base 3: mod_base = OTHER; note = 2'-O-methyladenosine-3'-phosphate
  modified_base 4: mod_base = OTHER; note = 2'-O-methylcytidine-3'-phosphate
  modified_base 5: mod_base = OTHER; note = 2'-O-methyladenosine-3'-phosphate
  modified_base 6: mod_base = OTHER; note = 2'-deoxy-2'-fluoroadenosine-3'-phosphate
  modified_base 7: mod_base = OTHER; note = 2'-O-methyladenosine-3'-phosphate
  modified_base 8: mod_base = OTHER; note = 2'-O-methyluridine-3'-phosphate
  modified_base 9: mod_base = OTHER; note = 2'-O-methyladenosine-3'-phosphate
  modified_base 10: mod_base = OTHER; note = 2'-O-methylcytidine-3'-phosphate
  modified_base 11: mod_base = OTHER; note = 2'-O-methyluridine-3'-phosphate
  modified_base 12: mod_base = OTHER; note = 2'-O-methylcytidine-3'-phosphate
  modified_base 13: mod_base = OTHER; note = 2'-O-methyluridine-3'-phosphate
  modified_base 14: mod_base = OTHER; note = 2'-deoxy-2'-fluoroadenosine-3'-phosphate
  modified_base 15: mod_base = OTHER; note = 2'-O-methyluridine-3'-phosphate
  modified_base 16: mod_base = OTHER; note = 2'-deoxy-2'-fluoroadenosine-3'-phosphate
  modified_base 17: mod_base = OTHER; note = 2'-O-methylguanosine-3'-phosphate
  modified_base 18: mod_base = OTHER; note = 2'-O-methyluridine-3'-phosphate
  modified_base 19: mod_base = OTHER; note = 2'-O-methylguanosine-3'-phosphate
  modified_base 20: mod_base = OTHER; note = 2'-O-methylcytidine-3'-phosphate
  modified_base 21: mod_base = OTHER; note = 2'-O-methylcytidine-3'-phosphate
  modified_base 22: mod_base = OTHER; note = 2'-O-methyladenosine-3'-phosphate
  modified_base 23: mod_base = OTHER; note = 2'-O-methyladenosine
taacaaatactctatagtgccaa

SEQ ID NO: 5767 - RNA, 23 nt, synthetic construct
  source 1..23: mol_type = other RNA
  modified_base 1: mod_base = OTHER; note = 2'-O-methyluridine-3'-phosphate 5'-(E)-Vinylphosphonate
  modified_base 2: mod_base = OTHER; note = 2'-deoxy-2'-fluorouridine-3'-phosphate
  modified_base 3: mod_base = OTHER; note = 2'-O-methyladenosine-3'-phosphate
  modified_base 4: mod_base = OTHER; note = 2'-O-methyladenosine-3'-phosphate
  modified_base 5: mod_base = OTHER; note = 2'-O-methylcytidine-3'-phosphate
  modified_base 6: mod_base = OTHER; note = 2'-deoxy-2'-fluoroadenosine-3'-phosphate
  modified_base 7: mod_base = OTHER; note = 2'-O-methyladenosine-3'-phosphate
  modified_base 8: mod_base = OTHER; note = 2'-O-methyladenosine-3'-phosphate
  modified_base 9: mod_base = OTHER; note = 2'-O-methyluridine-3'-phosphate
  modified_base 10: mod_base = OTHER; note = 2'-O-methyladenosine-3'-phosphate
  modified_base 11: mod_base = OTHER; note = 2'-O-methylcytidine-3'-phosphate
  modified_base 12: mod_base = OTHER; note = 2'-O-methyluridine-3'-phosphate
  modified_base 13: mod_base = OTHER; note = 2'-O-methylcytidine-3'-phosphate
  modified_base 14: mod_base = OTHER; note = 2'-deoxy-2'-fluorouridine-3'-phosphate
  modified_base 15: mod_base = OTHER; note = 2'-O-methyladenosine-3'-phosphate
  modified_base 16: mod_base = OTHER; note = 2'-deoxy-2'-fluorouridine-3'-phosphate
  modified_base 17: mod_base = OTHER; note = 2'-O-methyladenosine-3'-phosphate
  modified_base 18: mod_base = OTHER; note = 2'-O-methylguanosine-3'-phosphate
  modified_base 19: mod_base = OTHER; note = 2'-O-methyluridine-3'-phosphate
  modified_base 20: mod_base = OTHER; note = 2'-O-methylguanosine-3'-phosphate
  modified_base 21: mod_base = OTHER; note = 2'-O-methylcytidine-3'-phosphate
  modified_base 22: mod_base = OTHER; note = 2'-O-methylcytidine-3'-phosphate
  modified_base 23: mod_base = OTHER; note = 2'-O-methyladenosine
ttaacaaatactctatagtgcca

SEQ ID NO: 5768 - RNA, 23 nt, synthetic construct
  source 1..23: mol_type = other RNA
  modified_base 1: mod_base = OTHER; note = 2'-O-methyluridine-3'-phosphate 5'-(E)-Vinylphosphonate
  modified_base 2: mod_base = OTHER; note = 2'-deoxy-2'-fluorouridine-3'-phosphate
  modified_base 3: mod_base = OTHER; note = 2'-O-methyluridine-3'-phosphate
  modified_base 4: mod_base = OTHER; note = 2'-O-methyladenosine-3'-phosphate
  modified_base 5: mod_base = OTHER; note = 2'-O-methyladenosine-3'-phosphate
  modified_base 6: mod_base = OTHER; note = 2'-deoxy-2'-fluorocytidine-3'-phosphate
  modified_base 7: mod_base = OTHER; note = 2'-O-methyladenosine-3'-phosphate
  modified_base 8: mod_base = OTHER; note = 2'-O-methyladenosine-3'-phosphate
  modified_base 9: mod_base = OTHER; note = 2'-O-methyladenosine-3'-phosphate
  modified_base 10: mod_base = OTHER; note = 2'-O-methyluridine-3'-phosphate
  modified_base 11: mod_base = OTHER; note = 2'-O-methyladenosine-3'-phosphate
  modified_base 12: mod_base = OTHER; note = 2'-O-methylcytidine-3'-phosphate
  modified_base 13: mod_base = OTHER; note = 2'-O-methyluridine-3'-phosphate
  modified_base 14: mod_base = OTHER; note = 2'-deoxy-2'-fluorocytidine-3'-phosphate
  modified_base 15: mod_base = OTHER; note = 2'-O-methyluridine-3'-phosphate
  modified_base 16: mod_base = OTHER; note = 2'-deoxy-2'-fluoroadenosine-3'-phosphate
  modified_base 17: mod_base = OTHER; note = 2'-O-methyluridine-3'-phosphate
  modified_base 18: mod_base = OTHER; note = 2'-O-methyladenosine-3'-phosphate
  modified_base 19: mod_base = OTHER; note = 2'-O-methylguanosine-3'-phosphate
  modified_base 20: mod_base = OTHER; note = 2'-O-methyluridine-3'-phosphate
  modified_base 21: mod_base = OTHER; note = 2'-O-methylguanosine-3'-phosphate
  modified_base 22: mod_base = OTHER; note = 2'-O-methylcytidine-3'-phosphate
  modified_base 23: mod_base = OTHER; note = 2'-O-methylcytidine
tttaacaaatactctatagtgcc

SEQ ID NO: 5769 - RNA, 23 nt, synthetic construct
  source 1..23: mol_type = other RNA
  modified_base 1: mod_base = OTHER; note = 2'-O-methyluridine-3'-phosphate 5'-(E)-Vinylphosphonate
  modified_base 2: mod_base = OTHER; note = 2'-deoxy-2'-fluoroadenosine-3'-phosphate
  modified_base 3: mod_base = OTHER; note = 2'-O-methyluridine-3'-phosphate
  modified_base 4: mod_base = OTHER; note = 2'-O-methyluridine-3'-phosphate
  modified_base 5: mod_base = OTHER; note = 2'-O-methyladenosine-3'-phosphate
  modified_base 6: mod_base = OTHER; note = 2'-deoxy-2'-fluoroadenosine-3'-phosphate
  modified_base 7: mod_base = OTHER; note = 2'-O-methylcytidine-3'-phosphate
  modified_base 8: mod_base = OTHER; note = 2'-O-methyladenosine-3'-phosphate
  modified_base 9: mod_base = OTHER; note = 2'-O-methyladenosine-3'-phosphate
  modified_base 10: mod_base = OTHER; note = 2'-O-methyladenosine-3'-phosphate
  modified_base 11: mod_base = OTHER; note = 2'-O-methyluridine-3'-phosphate
  modified_base 12: mod_base = OTHER; note = 2'-O-methyladenosine-3'-phosphate
  modified_base 13: mod_base = OTHER; note = 2'-O-methylcytidine-3'-phosphate
  modified_base 14: mod_base = OTHER; note = 2'-deoxy-2'-fluorouridine-3'-phosphate
  modified_base 15: mod_base = OTHER; note = 2'-O-methylcytidine-3'-phosphate
  modified_base 16: mod_base = OTHER; note = 2'-deoxy-2'-fluorouridine-3'-phosphate
  modified_base 17: mod_base = OTHER; note = 2'-O-methyladenosine-3'-phosphate
  modified_base 18: mod_base = OTHER; note = 2'-O-methyluridine-3'-phosphate
  modified_base 19: mod_base = OTHER; note = 2'-O-methyladenosine-3'-phosphate
  modified_base 20: mod_base = OTHER; note = 2'-O-methylguanosine-3'-phosphate
  modified_base 21: mod_base = OTHER; note = 2'-O-methyluridine-3'-phosphate
  modified_base 22: mod_base = OTHER; note = 2'-O-methylguanosine-3'-phosphate
  modified_base 23: mod_base = OTHER; note = 2'-O-methylcytidine
tattaacaaatactctatagtgc

SEQ ID NO: 5770 - RNA, 23 nt, synthetic construct
  source 1..23: mol_type = other RNA
  modified_base 1: mod_base = OTHER; note = 2'-O-methyluridine-3'-phosphate 5'-(E)-Vinylphosphonate
  modified_base 2: mod_base = OTHER; note = 2'-deoxy-2'-fluorocytidine-3'-phosphate
  modified_base 3: mod_base = OTHER; note = 2'-O-methyladenosine-3'-phosphate
  modified_base 4: mod_base = OTHER; note = 2'-O-methyluridine-3'-phosphate
  modified_base 5: mod_base = OTHER; note = 2'-O-methyluridine-3'-phosphate
  modified_base 6: mod_base = OTHER; note = 2'-deoxy-2'-fluoroadenosine-3'-phosphate
  modified_base 7: mod_base = OTHER; note = 2'-O-methyladenosine-3'-phosphate
  modified_base 8: mod_base = OTHER; note = 2'-O-methylcytidine-3'-phosphate
  modified_base 9: mod_base = OTHER; note = 2'-O-methyladenosine-3'-phosphate
  modified_base 10: mod_base = OTHER; note = 2'-O-methyladenosine-3'-phosphate
  modified_base 11: mod_base = OTHER; note = 2'-O-methyladenosine-3'-phosphate
  modified_base 12: mod_base = OTHER; note = 2'-O-methyluridine-3'-phosphate
  modified_base 13: mod_base = OTHER; note = 2'-O-methyladenosine-3'-phosphate
  modified_base 14: mod_base = OTHER; note = 2'-deoxy-2'-fluorocytidine-3'-phosphate
  modified_base 15: mod_base = OTHER; note = 2'-O-methyluridine-3'-phosphate
  modified_base 16: mod_base = OTHER; note = 2'-deoxy-2'-fluorocytidine-3'-phosphate
  modified_base 17: mod_base = OTHER; note = 2'-O-methyluridine-3'-phosphate
  modified_base 18: mod_base = OTHER; note = 2'-O-methyladenosine-3'-phosphate
  modified_base 19: mod_base = OTHER; note = 2'-O-methyluridine-3'-phosphate
  modified_base 20: mod_base = OTHER; note = 2'-O-methyladenosine-3'-phosphate
  modified_base 21: mod_base = OTHER; note = 2'-O-methylguanosine-3'-phosphate
  modified_base 22: mod_base = OTHER; note = 2'-O-methyluridine-3'-phosphate
  modified_base 23: mod_base = OTHER; note = 2'-O-methylguanosine
tcattaacaaatactctatagtg

SEQ ID NO: 5771 - RNA, 23 nt, synthetic construct
  source 1..23: mol_type = other RNA
  modified_base 1: mod_base = OTHER; note = 2'-O-methyluridine-3'-phosphate 5'-(E)-Vinylphosphonate
  modified_base 2: mod_base = OTHER; note = 2'-deoxy-2'-fluorocytidine-3'-phosphate
  modified_base 3: mod_base = OTHER; note = 2'-O-methylcytidine-3'-phosphate
  modified_base 4: mod_base = OTHER; note = 2'-O-methyladenosine-3'-phosphate
  modified_base 5: mod_base = OTHER; note = 2'-O-methyluridine-3'-phosphate
  modified_base 6: mod_base = OTHER; note = 2'-deoxy-2'-fluorouridine-3'-phosphate
  modified_base 7: mod_base = OTHER; note = 2'-O-methyladenosine-3'-phosphate
  modified_base 8: mod_base = OTHER; note = 2'-O-methyladenosine-3'-phosphate
  modified_base 9: mod_base = OTHER; note = 2'-O-methylcytidine-3'-phosphate
  modified_base 10: mod_base = OTHER; note = 2'-O-methyladenosine-3'-phosphate
  modified_base 11: mod_base = OTHER; note = 2'-O-methyladenosine-3'-phosphate
  modified_base 12: mod_base = OTHER; note = 2'-O-methyladenosine-3'-phosphate
  modified_base 13: mod_base = OTHER; note = 2'-O-methyluridine-3'-phosphate
  modified_base 14: mod_base = OTHER; note = 2'-deoxy-2'-fluoroadenosine-3'-phosphate
  modified_base 15: mod_base = OTHER; note = 2'-O-methylcytidine-3'-phosphate
  modified_base 16: mod_base = OTHER; note = 2'-deoxy-2'-fluorouridine-3'-phosphate
  modified_base 17: mod_base = OTHER; note = 2'-O-methylcytidine-3'-phosphate
  modified_base 18: mod_base = OTHER; note = 2'-O-methyluridine-3'-phosphate
  modified_base 19: mod_base = OTHER; note = 2'-O-methyladenosine-3'-phosphate
  modified_base 20: mod_base = OTHER; note = 2'-O-methyluridine-3'-phosphate
  modified_base 21: mod_base = OTHER; note = 2'-O-methyladenosine-3'-phosphate
  modified_base 22: mod_base = OTHER; note = 2'-O-methylguanosine-3'-phosphate
  modified_base 23: mod_base = OTHER; note = 2'-O-methyluridine
tccattaacaaatactctatagt

SEQ ID NO: 5772 - RNA, 23 nt, synthetic construct
  source 1..23: mol_type = other RNA
  modified_base 1: mod_base = OTHER; note = 2'-O-methyluridine-3'-phosphate 5'-(E)-Vinylphosphonate
  modified_base 2: mod_base = OTHER; note = 2'-deoxy-2'-fluoroguanosine-3'-phosphate
  modified_base 3: mod_base = OTHER; note = 2'-O-methylcytidine-3'-phosphate
  modified_base 4: mod_base = OTHER; note = 2'-O-methylcytidine-3'-phosphate
  modified_base 5: mod_base = OTHER; note = 2'-O-methyladenosine-3'-phosphate
  modified_base 6: mod_base = OTHER; note = 2'-deoxy-2'-fluorouridine-3'-phosphate
  modified_base 7: mod_base = OTHER; note = 2'-O-methyluridine-3'-phosphate
  modified_base 8: mod_base = OTHER; note = 2'-O-methyladenosine-3'-phosphate
  modified_base 9: mod_base = OTHER; note = 2'-O-methyladenosine-3'-phosphate
  modified_base 10: mod_base = OTHER; note = 2'-O-methylcytidine-3'-phosphate
  modified_base 11: mod_base = OTHER; note = 2'-O-methyladenosine-3'-phosphate
  modified_base 12: mod_base = OTHER; note = 2'-O-methyladenosine-3'-phosphate
  modified_base 13: mod_base = OTHER; note = 2'-O-methyladenosine-3'-phosphate
  modified_base 14: mod_base = OTHER; note = 2'-deoxy-2'-fluorouridine-3'-phosphate
  modified_base 15: mod_base = OTHER; note = 2'-O-methyladenosine-3'-phosphate
  modified_base 16: mod_base = OTHER; note = 2'-deoxy-2'-fluorocytidine-3'-phosphate
  modified_base 17: mod_base = OTHER; note = 2'-O-methyluridine-3'-phosphate
  modified_base 18: mod_base = OTHER; note = 2'-O-methylcytidine-3'-phosphate
  modified_base 19: mod_base = OTHER; note = 2'-O-methyluridine-3'-phosphate
  modified_base 20: mod_base = OTHER; note = 2'-O-methyladenosine-3'-phosphate
  modified_base 21: mod_base = OTHER; note = 2'-O-methyluridine-3'-phosphate
  modified_base 22: mod_base = OTHER; note = 2'-O-methyladenosine-3'-phosphate
  modified_base 23: mod_base = OTHER; note = 2'-O-methylguanosine
tgccattaacaaatactctatag

SEQ ID NO: 5773 - RNA, 23 nt, synthetic construct
  source 1..23: mol_type = other RNA
  modified_base 1: mod_base = OTHER; note = 2'-O-methyluridine-3'-phosphate 5'-(E)-Vinylphosphonate
  modified_base 2: mod_base = OTHER; note = 2'-deoxy-2'-fluorouridine-3'-phosphate
  modified_base 3: mod_base = OTHER; note = 2'-O-methylguanosine-3'-phosphate
  modified_base 4: mod_base = OTHER; note = 2'-O-methylcytidine-3'-phosphate
  modified_base 5: mod_base = OTHER; note = 2'-O-methylcytidine-3'-phosphate
  modified_base 6: mod_base = OTHER; note = 2'-deoxy-2'-fluoroadenosine-3'-phosphate
  modified_base 7: mod_base = OTHER; note = 2'-O-methyluridine-3'-phosphate
  modified_base 8: mod_base = OTHER; note = 2'-O-methyluridine-3'-phosphate
  modified_base 9: mod_base = OTHER; note = 2'-O-methyladenosine-3'-phosphate
  modified_base 10: mod_base = OTHER; note = 2'-O-methyladenosine-3'-phosphate
  modified_base 11: mod_base = OTHER; note = 2'-O-methylcytidine-3'-phosphate
  modified_base 12: mod_base = OTHER; note = 2'-O-methyladenosine-3'-phosphate
  modified_base 13: mod_base = OTHER; note = 2'-O-methyladenosine-3'-phosphate
  modified_base 14: mod_base = OTHER; note = 2'-deoxy-2'-fluoroadenosine-3'-phosphate
  modified_base 15: mod_base = OTHER; note = 2'-O-methyluridine-3'-phosphate
  modified_base 16: mod_base = OTHER; note = 2'-deoxy-2'-fluoroadenosine-3'-phosphate
  modified_base 17: mod_base = OTHER; note = 2'-O-methylcytidine-3'-phosphate
  modified_base 18: mod_base = OTHER; note = 2'-O-methyluridine-3'-phosphate
  modified_base 19: mod_base = OTHER; note = 2'-O-methylcytidine-3'-phosphate
  modified_base 20: mod_base = OTHER; note = 2'-O-methyluridine-3'-phosphate
  modified_base 21: mod_base = OTHER; note = 2'-O-methyladenosine-3'-phosphate
  modified_base 22: mod_base = OTHER; note = 2'-O-methyluridine-3'-phosphate
  modified_base 23: mod_base = OTHER; note = 2'-O-methyladenosine
ttgccattaacaaatactctata

SEQ ID NO: 5774 - RNA, 23 nt, synthetic construct
  source 1..23: mol_type = other RNA
  modified_base 1: mod_base = OTHER; note = 2'-O-methyluridine-3'-phosphate 5'-(E)-Vinylphosphonate
  modified_base 2: mod_base = OTHER; note = 2'-deoxy-2'-fluorocytidine-3'-phosphate
  modified_base 3: mod_base = OTHER; note = 2'-O-methyluridine-3'-phosphate
  modified_base 4: mod_base = OTHER; note = 2'-O-methylguanosine-3'-phosphate
  modified_base 5: mod_base = OTHER; note = 2'-O-methylcytidine-3'-phosphate
  modified_base 6: mod_base = OTHER; note = 2'-deoxy-2'-fluorocytidine-3'-phosphate
  modified_base 7: mod_base = OTHER; note = 2'-O-methyladenosine-3'-phosphate
  modified_base 8: mod_base = OTHER; note = 2'-O-methyluridine-3'-phosphate
  modified_base 9: mod_base = OTHER; note = 2'-O-methyluridine-3'-phosphate
  modified_base 10: mod_base = OTHER; note = 2'-O-methyladenosine-3'-phosphate
  modified_base 11: mod_base = OTHER; note = 2'-O-methyladenosine-3'-phosphate
  modified_base 12: mod_base = OTHER; note = 2'-O-methylcytidine-3'-phosphate
  modified_base 13: mod_base = OTHER; note = 2'-O-methyladenosine-3'-phosphate
  modified_base 14: mod_base = OTHER; note = 2'-deoxy-2'-fluoroadenosine-3'-phosphate
  modified_base 15: mod_base = OTHER; note = 2'-O-methyladenosine-3'-phosphate
  modified_base 16: mod_base = OTHER; note = 2'-deoxy-2'-fluorouridine-3'-phosphate
  modified_base 17: mod_base = OTHER; note = 2'-O-methyladenosine-3'-phosphate
  modified_base 18: mod_base = OTHER; note = 2'-O-methylcytidine-3'-phosphate
  modified_base 19: mod_base = OTHER; note = 2'-O-methyluridine-3'-phosphate
  modified_base 20: mod_base = OTHER; note = 2'-O-methylcytidine-3'-phosphate
  modified_base 21: mod_base = OTHER; note = 2'-O-methyluridine-3'-phosphate
  modified_base 22: mod_base = OTHER; note = 2'-O-methyladenosine-3'-phosphate
  modified_base 23: mod_base = OTHER; note = 2'-O-methyluridine
tctgccattaacaaatactctat

SEQ ID NO: 5775 - RNA, 23 nt, synthetic construct
  source 1..23: mol_type = other RNA
  modified_base 1: mod_base = OTHER; note = 2'-O-methyluridine-3'-phosphate 5'-(E)-Vinylphosphonate
  modified_base 2: mod_base = OTHER; note = 2'-deoxy-2'-fluorouridine-3'-phosphate
  modified_base 3: mod_base = OTHER; note = 2'-O-methylcytidine-3'-phosphate
  modified_base 4: mod_base = OTHER; note = 2'-O-methyluridine-3'-phosphate
  modified_base 5: mod_base = OTHER; note = 2'-O-methylguanosine-3'-phosphate
  modified_base 6: mod_base = OTHER; note = 2'-deoxy-2'-fluorocytidine-3'-phosphate
  modified_base 7: mod_base = OTHER; note = 2'-O-methylcytidine-3'-phosphate
  modified_base 8: mod_base = OTHER; note = 2'-O-methyladenosine-3'-phosphate
  modified_base 9: mod_base = OTHER; note = 2'-O-methyluridine-3'-phosphate
  modified_base 10: mod_base = OTHER; note = 2'-O-methyluridine-3'-phosphate
  modified_base 11: mod_base = OTHER; note = 2'-O-methyladenosine-3'-phosphate
  modified_base 12: mod_base = OTHER; note = 2'-O-methyladenosine-3'-phosphate
  modified_base 13: mod_base = OTHER; note = 2'-O-methylcytidine-3'-phosphate
  modified_base 14: mod_base = OTHER; note = 2'-deoxy-2'-fluoroadenosine-3'-phosphate
  modified_base 15: mod_base = OTHER; note = 2'-O-methyladenosine-3'-phosphate
  modified_base 16: mod_base = OTHER; note = 2'-deoxy-2'-fluoroadenosine-3'-phosphate
  modified_base 17: mod_base = OTHER; note = 2'-O-methyluridine-3'-phosphate
  modified_base 18: mod_base = OTHER; note = 2'-O-methyladenosine-3'-phosphate
  modified_base 19: mod_base = OTHER; note = 2'-O-methylcytidine-3'-phosphate
  modified_base 20: mod_base = OTHER; note = 2'-O-methyluridine-3'-phosphate
  modified_base 21: mod_base = OTHER; note = 2'-O-methylcytidine-3'-phosphate
  modified_base 22: mod_base = OTHER; note = 2'-O-methyluridine-3'-phosphate
  modified_base 23: mod_base = OTHER; note = 2'-O-methyladenosine
ttctgccattaacaaatactcta

SEQ ID NO: 5776 - RNA, 23 nt, synthetic construct
  source 1..23: mol_type = other RNA
  modified_base 1: mod_base = OTHER; note = 2'-O-methyluridine-3'-phosphate 5'-(E)-Vinylphosphonate
  modified_base 2: mod_base = OTHER; note = 2'-deoxy-2'-fluoroadenosine-3'-phosphate
  modified_base 3: mod_base = OTHER; note = 2'-O-methyladenosine-3'-phosphate
  modified_base 4: mod_base = OTHER; note = 2'-O-methyladenosine-3'-phosphate
  modified_base 5: mod_base = OTHER; note = 2'-O-methyladenosine-3'-phosphate
  modified_base 6: mod_base = OTHER; note = 2'-deoxy-2'-fluoroguanosine-3'-phosphate
  modified_base 7: mod_base = OTHER; note = 2'-O-methyladenosine-3'-phosphate
  modified_base 8: mod_base = OTHER; note = 2'-O-methyladenosine-3'-phosphate
  modified_base 9: mod_base = OTHER; note = 2'-O-methyladenosine-3'-phosphate
  modified_base 10: mod_base = OTHER; note = 2'-O-methyladenosine-3'-phosphate
  modified_base 11: mod_base = OTHER; note = 2'-O-methyladenosine-3'-phosphate
  modified_base 12: mod_base = OTHER; note = 2'-O-methyluridine-3'-phosphate
  modified_base 13: mod_base = OTHER; note = 2'-O-methylcytidine-3'-phosphate
  modified_base 14: mod_base = OTHER; note = 2'-deoxy-2'-fluoroadenosine-3'-phosphate
  modified_base 15: mod_base = OTHER; note = 2'-O-methyluridine-3'-phosphate
  modified_base 16: mod_base = OTHER; note = 2'-deoxy-2'-fluorocytidine-3'-phosphate
  modified_base 17: mod_base = OTHER; note = 2'-O-methyluridine-3'-phosphate
  modified_base 18: mod_base = OTHER; note = 2'-O-methylcytidine-3'-phosphate
  modified_base 19: mod_base = OTHER; note = 2'-O-methyluridine-3'-phosphate
  modified_base 20: mod_base = OTHER; note = 2'-O-methylguanosine-3'-phosphate
  modified_base 21: mod_base = OTHER; note = 2'-O-methylcytidine-3'-phosphate
  modified_base 22: mod_base = OTHER; note = 2'-O-methylcytidine-3'-phosphate
  modified_base 23: mod_base = OTHER; note = 2'-O-methyladenosine
taaaagaaaaatcatctctgcca

SEQ ID NO: 5777 - RNA, 23 nt, synthetic construct
  source 1..23: mol_type = other RNA
  modified_base 1: mod_base = OTHER; note = 2'-O-methyluridine-3'-phosphate 5'-(E)-Vinylphosphonate
  modified_base 2: mod_base = OTHER; note = 2'-deoxy-2'-fluorouridine-3'-phosphate
  modified_base 3: mod_base = OTHER; note = 2'-O-methyladenosine-3'-phosphate
  modified_base 4: mod_base = OTHER; note = 2'-O-methyladenosine-3'-phosphate
  modified_base 5: mod_base = OTHER; note = 2'-O-methyladenosine-3'-phosphate
  modified_base 6: mod_base = OTHER; note = 2'-deoxy-2'-fluoroadenosine-3'-phosphate
  modified_base 7: mod_base = OTHER; note = 2'-O-methylguanosine-3'-phosphate
  modified_base 8: mod_base = OTHER; note = 2'-O-methyladenosine-3'-phosphate
  modified_base 9: mod_base = OTHER; note = 2'-O-methyladenosine-3'-phosphate
  modified_base 10: mod_base = OTHER; note = 2'-O-methyladenosine-3'-phosphate
  modified_base 11: mod_base = OTHER; note = 2'-O-methyladenosine-3'-phosphate
  modified_base 12: mod_base = OTHER; note = 2'-O-methyladenosine-3'-phosphate
  modified_base 13: mod_base = OTHER; note = 2'-O-methyluridine-3'-phosphate
  modified_base 14: mod_base = OTHER; note = 2'-deoxy-2'-fluorocytidine-3'-phosphate
  modified_base 15: mod_base = OTHER; note = 2'-O-methyladenosine-3'-phosphate
  modified_base 16: mod_base = OTHER; note = 2'-deoxy-2'-fluorouridine-3'-phosphate
  modified_base 17: mod_base = OTHER; note = 2'-O-methylcytidine-3'-phosphate
  modified_base 18: mod_base = OTHER; note = 2'-O-methyluridine-3'-phosphate
  modified_base 19: mod_base = OTHER; note = 2'-O-methylcytidine-3'-phosphate
  modified_base 20: mod_base = OTHER; note = 2'-O-methyluridine-3'-phosphate
  modified_base 21: mod_base = OTHER; note = 2'-O-methylguanosine-3'-phosphate
  modified_base 22: mod_base = OTHER; note = 2'-O-methylcytidine-3'-phosphate
  modified_base 23: mod_base = OTHER; note = 2'-O-methylcytidine
ttaaaagaaaaatcatctctgcc

SEQ ID NO: 5778 - RNA, 23 nt, synthetic construct
  source 1..23: mol_type = other RNA
  modified_base 1: mod_base = OTHER; note = 2'-O-methyluridine-3'-phosphate 5'-(E)-Vinylphosphonate
  modified_base 2: mod_base = OTHER; note = 2'-deoxy-2'-fluorouridine-3'-phosphate
  modified_base 3: mod_base = OTHER; note = 2'-O-methyluridine-3'-phosphate
  modified_base 4: mod_base = OTHER; note = 2'-O-methyladenosine-3'-phosphate
  modified_base 5: mod_base = OTHER; note = 2'-O-methyladenosine-3'-phosphate
  modified_base 6: mod_base = OTHER; note = 2'-deoxy-2'-fluoroadenosine-3'-phosphate
  modified_base 7: mod_base = OTHER; note = 2'-O-methyladenosine-3'-phosphate
  modified_base 8: mod_base = OTHER; note = 2'-O-methylguanosine-3'-phosphate
  modified_base 9: mod_base = OTHER; note = 2'-O-methyladenosine-3'-phosphate
  modified_base 10: mod_base = OTHER; note = 2'-O-methyladenosine-3'-phosphate
  modified_base 11: mod_base = OTHER; note = 2'-O-methyladenosine-3'-phosphate
  modified_base 12: mod_base = OTHER; note = 2'-O-methyladenosine-3'-phosphate
  modified_base 13: mod_base = OTHER; note = 2'-O-methyladenosine-3'-phosphate
  modified_base 14: mod_base = OTHER; note = 2'-deoxy-2'-fluorouridine-3'-phosphate
  modified_base 15: mod_base = OTHER; note = 2'-O-methylcytidine-3'-phosphate
  modified_base 16: mod_base = OTHER; note = 2'-deoxy-2'-fluoroadenosine-3'-phosphate
  modified_base 17: mod_base = OTHER; note = 2'-O-methyluridine-3'-phosphate
  modified_base 18: mod_base = OTHER; note = 2'-O-methylcytidine-3'-phosphate
  modified_base 19: mod_base = OTHER; note = 2'-O-methyluridine-3'-phosphate
  modified_base 20: mod_base = OTHER; note = 2'-O-methylcytidine-3'-phosphate
  modified_base 21: mod_base = OTHER; note = 2'-O-methyluridine-3'-phosphate
  modified_base 22: mod_base = OTHER; note = 2'-O-methylguanosine-3'-phosphate
  modified_base 23: mod_base = OTHER; note = 2'-O-methylcytidine
tttaaaagaaaaatcatctctgc

SEQ ID NO: 5779 - RNA, 23 nt, synthetic construct
  source 1..23: mol_type = other RNA
  modified_base 1: mod_base = OTHER; note = 2'-O-methyluridine-3'-phosphate 5'-(E)-Vinylphosphonate
  modified_base 2: mod_base = OTHER; note = 2'-deoxy-2'-fluoroadenosine-3'-phosphate
  modified_base 3: mod_base = OTHER; note = 2'-O-methyluridine-3'-phosphate
  modified_base 4: mod_base = OTHER; note = 2'-O-methyladenosine-3'-phosphate
  modified_base 5: mod_base = OTHER; note = 2'-O-methylcytidine-3'-phosphate
  modified_base 6: mod_base = OTHER; note = 2'-deoxy-2'-fluoroadenosine-3'-phosphate
  modified_base 7: mod_base = OTHER; note = 2'-O-methyladenosine-3'-phosphate
  modified_base 8: mod_base = OTHER; note = 2'-O-methyladenosine-3'-phosphate
  modified_base 9: mod_base = OTHER; note = 2'-O-methyluridine-3'-phosphate
  modified_base 10: mod_base = OTHER; note = 2'-O-methyladenosine-3'-phosphate
  modified_base 11: mod_base = OTHER; note = 2'-O-methyladenosine-3'-phosphate
  modified_base 12: mod_base = OTHER; note = 2'-O-methylcytidine-3'-phosphate
  modified_base 13: mod_base = OTHER; note = 2'-O-methyladenosine-3'-phosphate
  modified_base 14: mod_base = OTHER; note = 2'-deoxy-2'-fluoroguanosine-3'-phosphate
  modified_base 15: mod_base = OTHER; note = 2'-O-methylcytidine-3'-phosphate
  modified_base 16: mod_base = OTHER; note = 2'-deoxy-2'-fluorouridine-3'-phosphate
  modified_base 17: mod_base = OTHER; note = 2'-O-methyladenosine-3'-phosphate
  modified_base 18: mod_base = OTHER; note = 2'-O-methylguanosine-3'-phosphate
  modified_base 19: mod_base = OTHER; note = 2'-O-methyluridine-3'-phosphate
  modified_base 20: mod_base = OTHER; note = 2'-O-methylcytidine-3'-phosphate
  modified_base 21: mod_base = OTHER; note = 2'-O-methyluridine-3'-phosphate
  modified_base 22: mod_base = OTHER; note = 2'-O-methyluridine-3'-phosphate
  modified_base 23: mod_base = OTHER; note = 2'-O-methyluridine
tatacaaataacagctagtcttt

SEQ ID NO: 5780 - RNA, 23 nt, synthetic construct
  source 1..23: mol_type = other RNA
  modified_base 1: mod_base = OTHER; note = 2'-O-methyluridine-3'-phosphate 5'-(E)-Vinylphosphonate
  modified_base 2: mod_base = OTHER; note = 2'-deoxy-2'-fluoroguanosine-3'-phosphate
  modified_base 3: mod_base = OTHER; note = 2'-O-methyladenosine-3'-phosphate
  modified_base 4: mod_base = OTHER; note = 2'-O-methylcytidine-3'-phosphate
  modified_base 5: mod_base = OTHER; note = 2'-O-methyladenosine-3'-phosphate
  modified_base 6: mod_base = OTHER; note = 2'-deoxy-2'-fluorouridine-3'-phosphate
  modified_base 7: mod_base = OTHER; note = 2'-O-methyluridine-3'-phosphate
  modified_base 8: mod_base = OTHER; note = 2'-O-methylcytidine-3'-phosphate
  modified_base 9: mod_base = OTHER; note = 2'-O-methyluridine-3'-phosphate
  modified_base 10: mod_base = OTHER; note = 2'-O-methyluridine-3'-phosphate
  modified_base 11: mod_base = OTHER; note = 2'-O-methyluridine-3'-phosphate
  modified_base 12: mod_base = OTHER; note = 2'-O-methyladenosine-3'-phosphate
  modified_base 13: mod_base = OTHER; note = 2'-O-methyluridine-3'-phosphate
  modified_base 14: mod_base = OTHER; note = 2'-deoxy-2'-fluoroadenosine-3'-phosphate
  modified_base 15: mod_base = OTHER; note = 2'-O-methyluridine-3'-phosphate
  modified_base 16: mod_base = OTHER; note = 2'-deoxy-2'-fluoroguanosine-3'-phosphate
  modified_base 17: mod_base = OTHER; note = 2'-O-methyluridine-3'-phosphate
  modified_base 18: mod_base = OTHER; note = 2'-O-methyluridine-3'-phosphate
  modified_base 19: mod_base = OTHER; note = 2'-O-methyladenosine-3'-phosphate
  modified_base 20: mod_base = OTHER; note = 2'-O-methylguanosine-3'-phosphate
  modified_base 21: mod_base = OTHER; note = 2'-O-methylcytidine-3'-phosphate
  modified_base 22: mod_base = OTHER; note = 2'-O-methyluridine-3'-phosphate
  modified_base 23: mod_base = OTHER; note = 2'-O-methyladenosine
tgacattctttatatgttagcta

SEQ ID NO: 5781 - RNA, 23 nt, synthetic construct
  source 1..23: mol_type = other RNA
  modified_base 1: mod_base = OTHER; note = 2'-O-methyluridine-3'-phosphate 5'-(E)-Vinylphosphonate
  modified_base 2: mod_base = OTHER; note = 2'-deoxy-2'-fluoroadenosine-3'-phosphate
  modified_base 3: mod_base = OTHER; note = 2'-O-methyladenosine-3'-phosphate
  modified_base 4: mod_base = OTHER; note = 2'-O-methylguanosine-3'-phosphate
  modified_base 5: mod_base = OTHER; note = 2'-O-methylcytidine-3'-phosphate
  modified_base 6: mod_base = OTHER; note = 2'-deoxy-2'-fluoroadenosine-3'-phosphate
  modified_base 7: mod_base = OTHER; note = 2'-O-methyladenosine-3'-phosphate
  modified_base 8: mod_base = OTHER; note = 2'-O-methyladenosine-3'-phosphate
  modified_base 9: mod_base = OTHER; note = 2'-O-methyladenosine-3'-phosphate
  modified_base 10: mod_base = OTHER; note = 2'-O-methylguanosine-3'-phosphate
  modified_base 11: mod_base = OTHER; note = 2'-O-methyluridine-3'-phosphate
  modified_base 12: mod_base = OTHER; note = 2'-O-methyladenosine-3'-phosphate
  modified_base 13: mod_base = OTHER; note = 2'-O-methylguanosine-3'-phosphate
  modified_base 14: mod_base = OTHER; note = 2'-deoxy-2'-fluoroadenosine-3'-phosphate
  modified_base 15: mod_base = OTHER; note = 2'-O-methylcytidine-3'-phosphate
  modified_base 16: mod_base = OTHER; note = 2'-deoxy-2'-fluoroadenosine-3'-phosphate
  modified_base 17: mod_base = OTHER; note = 2'-O-methyluridine-3'-phosphate
  modified_base 18: mod_base = OTHER; note = 2'-O-methyluridine-3'-phosphate
  modified_base 19: mod_base = OTHER; note = 2'-O-methylcytidine-3'-phosphate
  modified_base 20: mod_base = OTHER; note = 2'-O-methyluridine-3'-phosphate
  modified_base 21: mod_base = OTHER; note = 2'-O-methyluridine-3'-phosphate
  modified_base 22: mod_base = OTHER; note = 2'-O-methyluridine-3'-phosphate
  modified_base 23: mod_base = OTHER; note = 2'-O-methyladenosine
taagcaaaagtagacattcttta

SEQ ID NO: 5782 - RNA, 23 nt, synthetic construct
  source 1..23: mol_type = other RNA
  modified_base 1: mod_base = OTHER; note = 2'-O-methyluridine-3'-phosphate 5'-(E)-Vinylphosphonate
  modified_base 2: mod_base = OTHER; note = 2'-deoxy-2'-fluorouridine-3'-phosphate
  modified_base 3: mod_base = OTHER; note = 2'-O-methyluridine-3'-phosphate
  modified_base 4: mod_base = OTHER; note = 2'-O-methyladenosine-3'-phosphate
  modified_base 5: mod_base = OTHER; note = 2'-O-methyladenosine-3'-phosphate
  modified_base 6: mod_base = OTHER; note = 2'-deoxy-2'-fluoroadenosine-3'-phosphate
  modified_base 7: mod_base = OTHER; note = 2'-O-methylguanosine-3'-phosphate
  modified_base 8: mod_base = OTHER; note = 2'-O-methylcytidine-3'-phosphate
  modified_base 9: mod_base = OTHER; note = 2'-O-methyladenosine-3'-phosphate
  modified_base 10: mod_base = OTHER; note = 2'-O-methyladenosine-3'-phosphate
  modified_base 11: mod_base = OTHER; note = 2'-O-methyladenosine-3'-phosphate
  modified_base 12: mod_base = OTHER; note = 2'-O-methyladenosine-3'-phosphate
  modified_base 13: mod_base = OTHER; note = 2'-O-methylguanosine-3'-phosphate
  modified_base 14: mod_base = OTHER; note = 2'-deoxy-2'-fluorouridine-3'-phosphate
  modified_base 15: mod_base = OTHER; note = 2'-O-methyladenosine-3'-phosphate
  modified_base 16: mod_base = OTHER; note = 2'-deoxy-2'-fluoroguanosine-3'-phosphate
  modified_base 17: mod_base = OTHER; note = 2'-O-methyladenosine-3'-phosphate
  modified_base 18: mod_base = OTHER; note = 2'-O-methylcytidine-3'-phosphate
  modified_base 19: mod_base = OTHER; note = 2'-O-methyladenosine-3'-phosphate
  modified_base 20: mod_base = OTHER; note = 2'-O-methyluridine-3'-phosphate
  modified_base 21: mod_base = OTHER; note = 2'-O-methyluridine-3'-phosphate
  modified_base 22: mod_base = OTHER; note = 2'-O-methylcytidine-3'-phosphate
  modified_base 23: mod_base = OTHER; note = 2'-O-methyluridine
tttaaagcaaaagtagacattct

SEQ ID NO: 5783 - RNA, 23 nt, synthetic construct
  source 1..23: mol_type = other RNA
  modified_base 1: mod_base = OTHER; note = 2'-O-methyluridine-3'-phosphate 5'-(E)-Vinylphosphonate
  modified_base 2: mod_base = OTHER; note = 2'-deoxy-2'-fluorocytidine-3'-phosphate
  modified_base 3: mod_base = OTHER; note = 2'-O-methyluridine-3'-phosphate
  modified_base 4: mod_base = OTHER; note = 2'-O-methyladenosine-3'-phosphate
  modified_base 5: mod_base = OTHER; note = 2'-O-methyladenosine-3'-phosphate
  modified_base 6: mod_base = OTHER; note = 2'-deoxy-2'-fluorouridine-3'-phosphate
  modified_base 7: mod_base = OTHER; note = 2'-O-methyladenosine-3'-phosphate
  modified_base 8: mod_base = OTHER; note = 2'-O-methylguanosine-3'-phosphate
  modified_base 9: mod_base = OTHER; note = 2'-O-methylcytidine-3'-phosphate
  modified_base 10: mod_base = OTHER; note = 2'-O-methyladenosine-3'-phosphate
  modified_base 11: mod_base = OTHER; note = 2'-O-methyluridine-3'-phosphate
  modified_base 12: mod_base = OTHER; note = 2'-O-methyladenosine-3'-phosphate
  modified_base 13: mod_base = OTHER; note = 2'-O-methyladenosine-3'-phosphate
  modified_base 14: mod_base = OTHER; note = 2'-deoxy-2'-fluorouridine-3'-phosphate
  modified_base 15: mod_base = OTHER; note = 2'-O-methylguanosine-3'-phosphate
  modified_base 16: mod_base = OTHER; note = 2'-deoxy-2'-fluoroguanosine-3'-phosphate
  modified_base 17: mod_base = OTHER; note = 2'-O-methylcytidine-3'-phosphate
  modified_base 18: mod_base = OTHER; note = 2'-O-methyluridine-3'-phosphate
  modified_base 19: mod_base = OTHER; note = 2'-O-methyluridine-3'-phosphate
  modified_base 20: mod_base = OTHER; note = 2'-O-methyladenosine-3'-phosphate
  modified_base 21: mod_base = OTHER; note = 2'-O-methylguanosine-3'-phosphate
  modified_base 22: mod_base = OTHER; note = 2'-O-methyluridine-3'-phosphate
  modified_base 23: mod_base = OTHER; note = 2'-O-methyluridine
tctaatagcataatggcttagtt

SEQ ID NO: 5784 - RNA, 23 nt, synthetic construct
  source 1..23: mol_type = other RNA
  modified_base 1: mod_base = OTHER; note = 2'-O-methyluridine-3'-phosphate 5'-(E)-Vinylphosphonate
  modified_base 2: mod_base = OTHER; note = 2'-deoxy-2'-fluoroadenosine-3'-phosphate
  modified_base 3: mod_base = OTHER; note = 2'-O-methyladenosine-3'-phosphate
  modified_base 4: mod_base = OTHER; note = 2'-O-methyladenosine-3'-phosphate
  modified_base 5: mod_base = OTHER; note = 2'-O-methyluridine-3'-phosphate
  modified_base 6: mod_base = OTHER; note = 2'-deoxy-2'-fluoroadenosine-3'-phosphate
  modified_base 7: mod_base = OTHER; note = 2'-O-methylguanosine-3'-phosphate
  modified_base 8: mod_base = OTHER; note = 2'-O-methylguanosine-3'-phosphate
  modified_base 9: mod_base = OTHER; note = 2'-O-methylguanosine-3'-phosphate
  modified_base 10: mod_base = OTHER; note = 2'-O-methyladenosine-3'-phosphate
  modified_base 11: mod_base = OTHER; note = 2'-O-methyluridine-3'-phosphate
  modified_base 12: mod_base = OTHER; note = 2'-O-methyluridine-3'-phosphate
  modified_base 13: mod_base = OTHER; note = 2'-O-methylguanosine-3'-phosphate
  modified_base 14: mod_base = OTHER; note = 2'-deoxy-2'-fluorouridine-3'-phosphate
  modified_base 15: mod_base = OTHER; note = 2'-O-methyluridine-3'-phosphate
  modified_base 16: mod_base = OTHER; note = 2'-deoxy-2'-fluoroadenosine-3'-phosphate
  modified_base 17: mod_base = OTHER; note = 2'-O-methylcytidine-3'-phosphate
  modified_base 18: mod_base = OTHER; note = 2'-O-methylcytidine-3'-phosphate
  modified_base 19: mod_base = OTHER; note = 2'-O-methyluridine-3'-phosphate
  modified_base 20: mod_base = OTHER; note = 2'-O-methyladenosine-3'-phosphate
  modified_base 21: mod_base = OTHER; note = 2'-O-methyladenosine-3'-phosphate
  modified_base 22: mod_base = OTHER; note = 2'-O-methyluridine-3'-phosphate
  modified_base 23: mod_base = OTHER; note = 2'-O-methyluridine
taaatagggattgttacctaatt

SEQ ID NO: 5785 - RNA, 23 nt, synthetic construct
  source 1..23: mol_type = other RNA
  modified_base 1: mod_base = OTHER; note = 2'-O-methyluridine-3'-phosphate 5'-(E)-Vinylphosphonate
  modified_base 2: mod_base = OTHER; note = 2'-deoxy-2'-fluoroadenosine-3'-phosphate
  modified_base 3: mod_base = OTHER; note = 2'-O-methyladenosine-3'-phosphate
  modified_base 4: mod_base = OTHER; note = 2'-O-methyladenosine-3'-phosphate
  modified_base 5: mod_base = OTHER; note = 2'-O-methyladenosine-3'-phosphate
  modified_base 6: mod_base = OTHER; note = 2'-deoxy-2'-fluorouridine-3'-phosphate
  modified_base 7: mod_base = OTHER; note = 2'-O-methyladenosine-3'-phosphate
  modified_base 8: mod_base = OTHER; note = 2'-O-methylguanosine-3'-phosphate
  modified_base 9: mod_base = OTHER; note = 2'-O-methylguanosine-3'-phosphate
  modified_base 10: mod_base = OTHER; note = 2'-O-methylguanosine-3'-phosphate
  modified_base 11: mod_base = OTHER; note = 2'-O-methyladenosine-3'-phosphate
  modified_base 12: mod_base = OTHER; note = 2'-O-methyluridine-3'-phosphate
  modified_base 13: mod_base = OTHER; note = 2'-O-methyluridine-3'-phosphate
  modified_base 14: mod_base = OTHER; note = 2'-deoxy-2'-fluoroguanosine-3'-phosphate
  modified_base 15: mod_base = OTHER; note = 2'-O-methyluridine-3'-phosphate
  modified_base 16: mod_base = OTHER; note = 2'-deoxy-2'-fluorouridine-3'-phosphate
  modified_base 17: mod_base = OTHER; note = 2'-O-methyladenosine-3'-phosphate
  modified_base 18: mod_base = OTHER; note = 2'-O-methylcytidine-3'-phosphate
  modified_base 19: mod_base = OTHER; note = 2'-O-methylcytidine-3'-phosphate
  modified_base 20: mod_base = OTHER; note = 2'-O-methyluridine-3'-phosphate
  modified_base 21: mod_base = OTHER; note = 2'-O-methyladenosine-3'-phosphate
  modified_base 22: mod_base = OTHER; note = 2'-O-methyladenosine-3'-phosphate
  modified_base 23: mod_base = OTHER; note = 2'-O-methyluridine
taaaatagggattgttacctaat

SEQ ID NO: 5786 - RNA, 23 nt, synthetic construct
  source 1..23: mol_type = other RNA
  modified_base 1: mod_base = OTHER; note = 2'-O-methyluridine-3'-phosphate 5'-(E)-Vinylphosphonate
  modified_base 2: mod_base = OTHER; note = 2'-deoxy-2'-fluorouridine-3'-phosphate
  modified_base 3: mod_base = OTHER; note = 2'-O-methyladenosine-3'-phosphate
  modified_base 4: mod_base = OTHER; note = 2'-O-methyladenosine-3'-phosphate
  modified_base 5: mod_base = OTHER; note = 2'-O-methyladenosine-3'-phosphate
  modified_base 6: mod_base = OTHER; note = 2'-deoxy-2'-fluoroadenosine-3'-phosphate
  modified_base 7: mod_base = OTHER; note = 2'-O-methyluridine-3'-phosphate
  modified_base 8: mod_base = OTHER; note = 2'-O-methyladenosine-3'-phosphate
  modified_base 9: mod_base = OTHER; note = 2'-O-methylguanosine-3'-phosphate
  modified_base 10: mod_base = OTHER; note = 2'-O-methylguanosine-3'-phosphate
  modified_base 11: mod_base = OTHER; note = 2'-O-methylguanosine-3'-phosphate
  modified_base 12: mod_base = OTHER; note = 2'-O-methyladenosine-3'-phosphate
  modified_base 13: mod_base = OTHER; note = 2'-O-methyluridine-3'-phosphate
  modified_base 14: mod_base = OTHER; note = 2'-deoxy-2'-fluorouridine-3'-phosphate
  modified_base 15: mod_base = OTHER; note = 2'-O-methylguanosine-3'-phosphate
  modified_base 16: mod_base = OTHER; note = 2'-deoxy-2'-fluorouridine-3'-phosphate
  modified_base 17: mod_base = OTHER; note = 2'-O-methyluridine-3'-phosphate
  modified_base 18: mod_base = OTHER; note = 2'-O-methyladenosine-3'-phosphate
  modified_base 19: mod_base = OTHER; note = 2'-O-methylcytidine-3'-phosphate
  modified_base 20: mod_base = OTHER; note = 2'-O-methylcytidine-3'-phosphate
  modified_base 21: mod_base = OTHER; note = 2'-O-methyluridine-3'-phosphate
  modified_base 22: mod_base = OTHER; note = 2'-O-methyladenosine-3'-phosphate
  modified_base 23: mod_base = OTHER; note = 2'-O-methyladenosine
ttaaaatagggattgttacctaa

SEQ ID NO: 5787 - RNA, 23 nt, synthetic construct
  source 1..23: mol_type = other RNA
  modified_base 1: mod_base = OTHER; note = 2'-O-methyluridine-3'-phosphate 5'-(E)-Vinylphosphonate
  modified_base 2: mod_base = OTHER; note = 2'-deoxy-2'-fluorouridine-3'-phosphate
  modified_base 3: mod_base = OTHER; note = 2'-O-methyluridine-3'-phosphate
  modified_base 4: mod_base = OTHER; note = 2'-O-methyladenosine-3'-phosphate
  modified_base 5: mod_base = OTHER; note = 2'-O-methyladenosine-3'-phosphate
  modified_base 6: mod_base = OTHER; note = 2'-deoxy-2'-fluoroadenosine-3'-phosphate
  modified_base 7: mod_base = OTHER; note = 2'-O-methyladenosine-3'-phosphate
  modified_base 8: mod_base = OTHER; note = 2'-O-methyluridine-3'-phosphate
  modified_base 9: mod_base = OTHER; note = 2'-O-methyladenosine-3'-phosphate
  modified_base 10: mod_base = OTHER; note = 2'-O-methylguanosine-3'-phosphate
  modified_base 11: mod_base = OTHER; note = 2'-O-methylguanosine-3'-phosphate
  modified_base 12: mod_base = OTHER; note = 2'-O-methylguanosine-3'-phosphate
  modified_base 13: mod_base = OTHER; note = 2'-O-methyladenosine-3'-phosphate
  modified_base 14: mod_base = OTHER; note = 2'-deoxy-2'-fluorouridine-3'-phosphate
  modified_base 15: mod_base = OTHER; note = 2'-O-methyluridine-3'-phosphate
  modified_base 16: mod_base = OTHER; note = 2'-deoxy-2'-fluoroguanosine-3'-phosphate
  modified_base 17: mod_base = OTHER; note = 2'-O-methyluridine-3'-phosphate
  modified_base 18: mod_base = OTHER; note = 2'-O-methyluridine-3'-phosphate
  modified_base 19: mod_base = OTHER; note = 2'-O-methyladenosine-3'-phosphate
  modified_base 20: mod_base = OTHER; note = 2'-O-methylcytidine-3'-phosphate
  modified_base 21: mod_base = OTHER; note = 2'-O-methylcytidine-3'-phosphate
  modified_base 22: mod_base = OTHER; note = 2'-O-methyluridine-3'-phosphate
  modified_base 23: mod_base = OTHER; note = 2'-O-methyladenosine
tttaaaatagggattgttaccta

SEQ ID NO: 5788 - RNA, 23 nt, synthetic construct
  source 1..23: mol_type = other RNA
  modified_base 1: mod_base = OTHER; note = 2'-O-methyluridine-3'-phosphate 5'-(E)-Vinylphosphonate
  modified_base 2: mod_base = OTHER; note = 2'-deoxy-2'-fluorouridine-3'-phosphate
  modified_base 3: mod_base = OTHER; note = 2'-O-methyluridine-3'-phosphate
  modified_base 4: mod_base = OTHER; note = 2'-O-methyluridine-3'-phosphate
  modified_base 5: mod_base = OTHER; note = 2'-O-methyladenosine-3'-phosphate
  modified_base 6: mod_base = OTHER; note = 2'-deoxy-2'-fluoroadenosine-3'-phosphate
  modified_base 7: mod_base = OTHER; note = 2'-O-methyladenosine-3'-phosphate
  modified_base 8: mod_base = OTHER; note = 2'-O-methyladenosine-3'-phosphate
  modified_base 9: mod_base = OTHER; note = 2'-O-methyluridine-3'-phosphate
  modified_base 10: mod_base = OTHER; note = 2'-O-methyladenosine-3'-phosphate
  modified_base 11: mod_base = OTHER; note = 2'-O-methylguanosine-3'-phosphate
  modified_base 12: mod_base = OTHER; note = 2'-O-methylguanosine-3'-phosphate
  modified_base 13: mod_base = OTHER; note = 2'-O-methylguanosine-3'-phosphate
  modified_base 14: mod_base = OTHER; note = 2'-deoxy-2'-fluoroadenosine-3'-phosphate
  modified_base 15: mod_base = OTHER; note = 2'-O-methyluridine-3'-phosphate
  modified_base 16: mod_base = OTHER; note = 2'-deoxy-2'-fluorouridine-3'-phosphate
  modified_base 17: mod_base = OTHER; note = 2'-O-methylguanosine-3'-phosphate
  modified_base 18: mod_base = OTHER; note = 2'-O-methyluridine-3'-phosphate
  modified_base 19: mod_base = OTHER; note = 2'-O-methyluridine-3'-phosphate
  modified_base 20: mod_base = OTHER; note = 2'-O-methyladenosine-3'-phosphate
  modified_base 21: mod_base = OTHER; note = 2'-O-methylcytidine-3'-phosphate
  modified_base 22: mod_base = OTHER; note = 2'-O-methylcytidine-3'-phosphate
  modified_base 23: mod_base = OTHER; note = 2'-O-methyluridine
ttttaaaatagggattgttacct

SEQ ID NO: 5789 - RNA, 23 nt, synthetic construct
  source 1..23: mol_type = other RNA
  modified_base 1: mod_base = OTHER; note = 2'-O-methyluridine-3'-phosphate 5'-(E)-Vinylphosphonate
  modified_base 2: mod_base = OTHER; note = 2'-deoxy-2'-fluorouridine-3'-phosphate
  modified_base 3: mod_base = OTHER; note = 2'-O-methyluridine-3'-phosphate
  modified_base 4: mod_base = OTHER; note = 2'-O-methyluridine-3'-phosphate
  modified_base 5: mod_base = OTHER; note = 2'-O-methyluridine-3'-phosphate
  modified_base 6: mod_base = OTHER; note = 2'-deoxy-2'-fluoroadenosine-3'-phosphate
  modified_base 7: mod_base = OTHER; note = 2'-O-methyladenosine-3'-phosphate
  modified_base 8: mod_base = OTHER; note = 2'-O-methyladenosine-3'-phosphate
  modified_base 9: mod_base = OTHER; note = 2'-O-methyladenosine-3'-phosphate
  modified_base 10: mod_base = OTHER; note = 2'-O-methyluridine-3'-phosphate
  modified_base 11: mod_base = OTHER; note = 2'-O-methyladenosine-3'-phosphate
  modified_base 12: mod_base = OTHER; note = 2'-O-methylguanosine-3'-phosphate
  modified_base 13: mod_base = OTHER; note = 2'-O-methylguanosine-3'-phosphate
  modified_base 14: mod_base = OTHER; note = 2'-deoxy-2'-fluoroguanosine-3'-phosphate
  modified_base 15: mod_base = OTHER; note = 2'-O-methyladenosine-3'-phosphate
  modified_base 16: mod_base = OTHER; note = 2'-deoxy-2'-fluorouridine-3'-phosphate
  modified_base 17: mod_base = OTHER; note = 2'-O-methyluridine-3'-phosphate
  modified_base 18: mod_base = OTHER; note = 2'-O-methylguanosine-3'-phosphate
  modified_base 19: mod_base = OTHER; note = 2'-O-methyluridine-3'-phosphate
  modified_base 20: mod_base = OTHER; note = 2'-O-methyluridine-3'-phosphate
  modified_base 21: mod_base = OTHER; note = 2'-O-methyladenosine-3'-phosphate
  modified_base 22: mod_base = OTHER; note = 2'-O-methylcytidine-3'-phosphate
  modified_base 23: mod_base = OTHER; note = 2'-O-methylcytidine
tttttaaaatagggattgttacc

SEQ ID NO: 5790 - RNA, 23 nt, synthetic construct
  source 1..23: mol_type = other RNA
  modified_base 1: mod_base = OTHER; note = 2'-O-methyluridine-3'-phosphate 5'-(E)-Vinylphosphonate
  modified_base 2: mod_base = OTHER; note = 2'-deoxy-2'-fluoroguanosine-3'-phosphate
  modified_base 3: mod_base = OTHER; note = 2'-O-methylguanosine-3'-phosphate
  modified_base 4: mod_base = OTHER; note = 2'-O-methyladenosine-3'-phosphate
  modified_base 5: mod_base = OTHER; note = 2'-O-methyladenosine-3'-phosphate
  modified_base 6: mod_base = OTHER; note = 2'-deoxy-2'-fluorouridine-3'-phosphate
  modified_base 7: mod_base = OTHER; note = 2'-O-methyluridine-3'-phosphate
  modified_base 8: mod_base = OTHER; note = 2'-O-methyluridine-3'-phosphate
  modified_base 9: mod_base = OTHER; note = 2'-O-methyluridine-3'-phosphate
  modified_base 10: mod_base = OTHER; note = 2'-O-methyladenosine-3'-phosphate
  modified_base 11: mod_base = OTHER; note = 2'-O-methyladenosine-3'-phosphate
  modified_base 12: mod_base = OTHER; note = 2'-O-methyladenosine-3'-phosphate
  modified_base 13: mod_base = OTHER; note = 2'-O-methyladenosine-3'-phosphate
  modified_base 14: mod_base = OTHER; note = 2'-deoxy-2'-fluorouridine-3'-phosphate
  modified_base 15: mod_base = OTHER; note = 2'-O-methyladenosine-3'-phosphate
  modified_base 16: mod_base = OTHER; note = 2'-deoxy-2'-fluoroguanosine-3'-phosphate
  modified_base 17: mod_base = OTHER; note = 2'-O-methylguanosine-3'-phosphate
  modified_base 18: mod_base = OTHER; note = 2'-O-methylguanosine-3'-phosphate
  modified_base 19: mod_base = OTHER; note = 2'-O-methyladenosine-3'-phosphate
  modified_base 20: mod_base = OTHER; note = 2'-O-methyluridine-3'-phosphate
  modified_base 21: mod_base = OTHER; note = 2'-O-methyluridine-3'-phosphate
  modified_base 22: mod_base = OTHER; note = 2'-O-methylguanosine-3'-phosphate
  modified_base 23: mod_base = OTHER; note = 2'-O-methyluridine
tggaattttaaaatagggattgt

SEQ ID NO: 5791 - RNA, 23 nt, synthetic construct
  source 1..23: mol_type = other RNA
  modified_base 1: mod_base = OTHER; note = 2'-O-methyluridine-3'-phosphate 5'-(E)-Vinylphosphonate
  modified_base 2: mod_base = OTHER; note = 2'-deoxy-2'-fluoroguanosine-3'-phosphate
  modified_base 3: mod_base = OTHER; note = 2'-O-methylguanosine-3'-phosphate
  modified_base 4: mod_base = OTHER; note = 2'-O-methylcytidine-3'-phosphate
  modified_base 5: mod_base = OTHER; note = 2'-O-methyladenosine-3'-phosphate
  modified_base 6: mod_base = OTHER; note = 2'-deoxy-2'-fluoroguanosine-3'-phosphate
  modified_base 7: mod_base = OTHER; note = 2'-O-methyluridine-3'-phosphate
  modified_base 8: mod_base = OTHER; note = 2'-O-methyluridine-3'-phosphate
  modified_base 9: mod_base = OTHER; note = 2'-O-methylcytidine-3'-phosphate
  modified_base 10: mod_base = OTHER; note = 2'-O-methyluridine-3'-phosphate
  modified_base 11: mod_base = OTHER; note = 2'-O-methyladenosine-3'-phosphate
  modified_base 12: mod_base = OTHER; note = 2'-O-methyluridine-3'-phosphate
  modified_base 13: mod_base = OTHER; note = 2'-O-methyluridine-3'-phosphate
  modified_base 14: mod_base = OTHER; note = 2'-deoxy-2'-fluoroadenosine-3'-phosphate
  modified_base 15: mod_base = OTHER; note = 2'-O-methyluridine-3'-phosphate
  modified_base 16: mod_base = OTHER; note = 2'-deoxy-2'-fluorouridine-3'-phosphate
  modified_base 17: mod_base = OTHER; note = 2'-O-methylguanosine-3'-phosphate
  modified_base 18: mod_base = OTHER; note = 2'-O-methyluridine-3'-phosphate
  modified_base 19: mod_base = OTHER; note = 2'-O-methyluridine-3'-phosphate
  modified_base 20: mod_base = OTHER; note = 2'-O-methyladenosine-3'-phosphate
  modified_base 21: mod_base = OTHER; note = 2'-O-methylguanosine-3'-phosphate
  modified_base 22: mod_base = OTHER; note = 2'-O-methylguanosine-3'-phosphate
  modified_base 23: mod_base = OTHER; note = 2'-O-methylguanosine
tggcagttctattattgttaggg

SEQ ID NO: 5792 - RNA, 23 nt, synthetic construct
  source 1..23: mol_type = other RNA
  modified_base 1: mod_base = OTHER; note = 2'-O-methyluridine-3'-phosphate 5'-(E)-Vinylphosphonate
  modified_base 2: mod_base = OTHER; note = 2'-deoxy-2'-fluorouridine-3'-phosphate
  modified_base 3: mod_base = OTHER; note = 2'-O-methylguanosine-3'-phosphate
  modified_base 4: mod_base = OTHER; note = 2'-O-methylguanosine-3'-phosphate
  modified_base 5: mod_base = OTHER; note = 2'-O-methylcytidine-3'-phosphate
  modified_base 6: mod_base = OTHER; note = 2'-deoxy-2'-fluoroadenosine-3'-phosphate
  modified_base 7: mod_base = OTHER; note = 2'-O-methylguanosine-3'-phosphate
  modified_base 8: mod_base = OTHER; note = 2'-O-methyluridine-3'-phosphate
  modified_base 9: mod_base = OTHER; note = 2'-O-methyluridine-3'-phosphate
  modified_base 10: mod_base = OTHER; note = 2'-O-methylcytidine-3'-phosphate
  modified_base 11: mod_base = OTHER; note = 2'-O-methyluridine-3'-phosphate
  modified_base 12: mod_base = OTHER; note = 2'-O-methyladenosine-3'-phosphate
  modified_base 13: mod_base = OTHER; note = 2'-O-methyluridine-3'-phosphate
  modified_base 14: mod_base = OTHER; note = 2'-deoxy-2'-fluorouridine-3'-phosphate
  modified_base 15: mod_base = OTHER; note = 2'-O-methyladenosine-3'-phosphate
  modified_base 16: mod_base = OTHER; note = 2'-deoxy-2'-fluorouridine-3'-phosphate
  modified_base 17: mod_base = OTHER; note = 2'-O-methyluridine-3'-phosphate
  modified_base 18: mod_base = OTHER; note = 2'-O-methylguanosine-3'-phosphate
  modified_base 19: mod_base = OTHER; note = 2'-O-methyluridine-3'-phosphate
  modified_base 20: mod_base = OTHER; note = 2'-O-methyluridine-3'-phosphate
  modified_base 21: mod_base = OTHER; note = 2'-O-methyladenosine-3'-phosphate
  modified_base 22: mod_base = OTHER; note = 2'-O-methylguanosine-3'-phosphate
  modified_base 23: mod_base = OTHER; note = 2'-O-methylguanosine
ttggcagttctattattgttagg

SEQ ID NO: 5793 - RNA, 23 nt, synthetic construct
  source 1..23: mol_type = other RNA
  modified_base 1: mod_base = OTHER; note = 2'-O-methyluridine-3'-phosphate 5'-(E)-Vinylphosphonate
  modified_base 2: mod_base = OTHER; note = 2'-deoxy-2'-fluoroguanosine-3'-phosphate
  modified_base 3: mod_base = OTHER; note = 2'-O-methylcytidine-3'-phosphate
  modified_base 4: mod_base = OTHER; note = 2'-O-methyluridine-3'-phosphate
  modified_base 5: mod_base = OTHER; note = 2'-O-methylguanosine-3'-phosphate
  modified_base 6: mod_base = OTHER; note = 2'-deoxy-2'-fluoroguanosine-3'-phosphate
  modified_base 7: mod_base = OTHER; note = 2'-O-methylcytidine-3'-phosphate
  modified_base 8: mod_base = OTHER; note = 2'-O-methyladenosine-3'-phosphate
  modified_base 9: mod_base = OTHER; note = 2'-O-methylguanosine-3'-phosphate
  modified_base 10: mod_base = OTHER; note = 2'-O-methyluridine-3'-phosphate
  modified_base 11: mod_base = OTHER; note = 2'-O-methyluridine-3'-phosphate
  modified_base 12: mod_base = OTHER; note = 2'-O-methylcytidine-3'-phosphate
  modified_base 13: mod_base = OTHER; note = 2'-O-methyluridine-3'-phosphate
  modified_base 14: mod_base = OTHER; note = 2'-deoxy-2'-fluoroadenosine-3'-phosphate
  modified_base 15: mod_base = OTHER; note = 2'-O-methyluridine-3'-phosphate
  modified_base 16: mod_base = OTHER; note = 2'-deoxy-2'-fluorouridine-3'-phosphate
  modified_base 17: mod_base = OTHER; note = 2'-O-methyladenosine-3'-phosphate
  modified_base 18: mod_base = OTHER; note = 2'-O-methyluridine-3'-phosphate
  modified_base 19: mod_base = OTHER; note = 2'-O-methyluridine-3'-phosphate
  modified_base 20: mod_base = OTHER; note = 2'-O-methylguanosine-3'-phosphate
  modified_base 21: mod_base = OTHER; note = 2'-O-methyluridine-3'-phosphate
  modified_base 22: mod_base = OTHER; note = 2'-O-methyluridine-3'-phosphate
  modified_base 23: mod_base = OTHER; note = 2'-O-methyladenosine
tgctggcagttctattattgtta

SEQ ID NO: 5794 - RNA, 23 nt, synthetic construct
  source 1..23: mol_type = other RNA
  modified_base 1: mod_base = OTHER; note = 2'-O-methyluridine-3'-phosphate 5'-(E)-Vinylphosphonate
  modified_base 2: mod_base = OTHER; note = 2'-deoxy-2'-fluoroadenosine-3'-phosphate
  modified_base 3: mod_base = OTHER; note = 2'-O-methylguanosine-3'-phosphate
  modified_base 4: mod_base = OTHER; note = 2'-O-methyladenosine-3'-phosphate
  modified_base 5: mod_base = OTHER; note = 2'-O-methyladenosine-3'-phosphate
  modified_base 6: mod_base = OTHER; note = 2'-deoxy-2'-fluoroadenosine-3'-phosphate
  modified_base 7: mod_base = OTHER; note = 2'-O-methyladenosine-3'-phosphate
  modified_base 8: mod_base = OTHER; note = 2'-O-methylguanosine-3'-phosphate
  modified_base 9: mod_base = OTHER; note = 2'-O-methyluridine-3'-phosphate
  modified_base 10: mod_base = OTHER; note = 2'-O-methyladenosine-3'-phosphate
  modified_base 11: mod_base = OTHER; note = 2'-O-methyluridine-3'-phosphate
  modified_base 12: mod_base = OTHER; note = 2'-O-methylguanosine-3'-phosphate
  modified_base 13: mod_base = OTHER; note = 2'-O-methylcytidine-3'-phosphate
  modified_base 14: mod_base = OTHER; note = 2'-deoxy-2'-fluorouridine-3'-phosphate
  modified_base 15: mod_base = OTHER; note = 2'-O-methylguanosine-3'-phosphate
  modified_base 16: mod_base = OTHER; note = 2'-deoxy-2'-fluoroguanosine-3'-phosphate
  modified_base 17: mod_base = OTHER; note = 2'-O-methylcytidine-3'-phosphate
  modified_base 18: mod_base = OTHER; note = 2'-O-methyladenosine-3'-phosphate
  modified_base 19: mod_base = OTHER; note = 2'-O-methylguanosine-3'-phosphate
  modified_base 20: mod_base = OTHER; note = 2'-O-methyluridine-3'-phosphate
  modified_base 21: mod_base = OTHER; note = 2'-O-methyluridine-3'-phosphate
  modified_base 22: mod_base = OTHER; note = 2'-O-methylcytidine-3'-phosphate
  modified_base 23: mod_base = OTHER; note = 2'-O-methyluridine
tagaaaagtatgctggcagttct

SEQ ID NO: 5795 - RNA, 23 nt, synthetic construct
  source 1..23: mol_type = other RNA
  modified_base 1: mod_base = OTHER; note = 2'-O-methyluridine-3'-phosphate 5'-(E)-Vinylphosphonate
  modified_base 2: mod_base = OTHER; note = 2'-deoxy-2'-fluoroguanosine-3'-phosphate
  modified_base 3: mod_base = OTHER; note = 2'-O-methyladenosine-3'-phosphate
  modified_base 4: mod_base = OTHER; note = 2'-O-methylguanosine-3'-phosphate
  modified_base 5: mod_base = OTHER; note = 2'-O-methyladenosine-3'-phosphate
  modified_base 6: mod_base = OTHER; note = 2'-deoxy-2'-fluoroadenosine-3'-phosphate
  modified_base 7: mod_base = OTHER; note = 2'-O-methyladenosine-3'-phosphate
  modified_base 8: mod_base = OTHER; note = 2'-O-methyladenosine-3'-phosphate
  modified_base 9: mod_base = OTHER; note = 2'-O-methylguanosine-3'-phosphate
  modified_base 10: mod_base = OTHER; note = 2'-O-methyluridine-3'-phosphate
  modified_base 11: mod_base = OTHER; note = 2'-O-methyladenosine-3'-phosphate
  modified_base 12: mod_base = OTHER; note = 2'-O-methyluridine-3'-phosphate
  modified_base 13: mod_base = OTHER; note = 2'-O-methylguanosine-3'-phosphate
  modified_base 14: mod_base = OTHER; note = 2'-deoxy-2'-fluorocytidine-3'-phosphate
  modified_base 15: mod_base = OTHER; note = 2'-O-methyluridine-3'-phosphate
  modified_base 16: mod_base = OTHER; note = 2'-deoxy-2'-fluoroguanosine-3'-phosphate
  modified_base 17: mod_base = OTHER; note = 2'-O-methylguanosine-3'-phosphate
  modified_base 18: mod_base = OTHER; note = 2'-O-methylcytidine-3'-phosphate
  modified_base 19: mod_base = OTHER; note = 2'-O-methyladenosine-3'-phosphate
  modified_base 20: mod_base = OTHER; note = 2'-O-methylguanosine-3'-phosphate
  modified_base 21: mod_base = OTHER; note = 2'-O-methyluridine-3'-phosphate
  modified_base 22: mod_base = OTHER; note = 2'-O-methyluridine-3'-phosphate
  modified_base 23: mod_base = OTHER; note = 2'-O-methylcytidine
tgagaaaagtatgctggcagttc

SEQ ID NO: 5796 - RNA, 23 nt, synthetic construct
  source 1..23: mol_type = other RNA
  modified_base 1: mod_base = OTHER; note = 2'-O-methyluridine-3'-phosphate 5'-(E)-Vinylphosphonate
  modified_base 2: mod_base = OTHER; note = 2'-deoxy-2'-fluoroadenosine-3'-phosphate
  modified_base 3: mod_base = OTHER; note = 2'-O-methylguanosine-3'-phosphate
  modified_base 4: mod_base = OTHER; note = 2'-O-methyladenosine-3'-phosphate
  modified_base 5: mod_base = OTHER; note = 2'-O-methylguanosine-3'-phosphate
  modified_base 6: mod_base = OTHER; note = 2'-deoxy-2'-fluoroadenosine-3'-phosphate
  modified_base 7: mod_base = OTHER; note = 2'-O-methyladenosine-3'-phosphate
  modified_base 8: mod_base = OTHER; note = 2'-O-methyladenosine-3'-phosphate
  modified_base 9: mod_base = OTHER; note = 2'-O-methyladenosine-3'-phosphate
  modified_base 10: mod_base = OTHER; note = 2'-O-methylguanosine-3'-phosphate
  modified_base 11: mod_base = OTHER; note = 2'-O-methyluridine-3'-phosphate
  modified_base 12: mod_base = OTHER; note = 2'-O-methyladenosine-3'-phosphate
  modified_base 13: mod_base = OTHER; note = 2'-O-methyluridine-3'-phosphate
  modified_base 14: mod_base = OTHER; note = 2'-deoxy-2'-fluoroguanosine-3'-phosphate
  modified_base 15: mod_base = OTHER; note = 2'-O-methylcytidine-3'-phosphate
  modified_base 16: mod_base = OTHER; note = 2'-deoxy-2'-fluorouridine-3'-phosphate
  modified_base 17: mod_base = OTHER; note = 2'-O-methylguanosine-3'-phosphate
  modified_base 18: mod_base = OTHER; note = 2'-O-methylguanosine-3'-phosphate
  modified_base 19: mod_base = OTHER; note = 2'-O-methylcytidine-3'-phosphate
  modified_base 20: mod_base = OTHER; note = 2'-O-methyladenosine-3'-phosphate
  modified_base 21: mod_base = OTHER; note = 2'-O-methylguanosine-3'-phosphate
  modified_base 22: mod_base = OTHER; note = 2'-O-methyluridine-3'-phosphate
  modified_base 23: mod_base = OTHER; note = 2'-O-methyluridine
tagagaaaagtatgctggcagtt

SEQ ID NO: 5797 - RNA, 23 nt, synthetic construct
  source 1..23: mol_type = other RNA
  modified_base 1: mod_base = OTHER; note = 2'-O-methyluridine-3'-phosphate 5'-(E)-Vinylphosphonate
  modified_base 2: mod_base = OTHER; note = 2'-deoxy-2'-fluoroadenosine-3'-phosphate
  modified_base 3: mod_base = OTHER; note = 2'-O-methyladenosine-3'-phosphate
  modified_base 4: mod_base = OTHER; note = 2'-O-methylguanosine-3'-phosphate
  modified_base 5: mod_base = OTHER; note = 2'-O-methyladenosine-3'-phosphate
  modified_base 6: mod_base = OTHER; note = 2'-deoxy-2'-fluoroguanosine-3'-phosphate
  modified_base 7: mod_base = OTHER; note = 2'-O-methyladenosine-3'-phosphate
  modified_base 8: mod_base = OTHER; note = 2'-O-methyladenosine-3'-phosphate
  modified_base 9: mod_base = OTHER; note = 2'-O-methyladenosine-3'-phosphate
  modified_base 10: mod_base = OTHER; note = 2'-O-methyladenosine-3'-phosphate
  modified_base 11: mod_base = OTHER; note = 2'-O-methylguanosine-3'-phosphate
  modified_base 12: mod_base = OTHER; note = 2'-O-methyluridine-3'-phosphate
  modified_base 13: mod_base = OTHER; note = 2'-O-methyladenosine-3'-phosphate
  modified_base 14: mod_base = OTHER; note = 2'-deoxy-2'-fluorouridine-3'-phosphate
  modified_base 15: mod_base = OTHER; note = 2'-O-methylguanosine-3'-phosphate
  modified_base 16: mod_base = OTHER; note = 2'-deoxy-2'-fluorocytidine-3'-phosphate
  modified_base 17: mod_base = OTHER; note = 2'-O-methyluridine-3'-phosphate
  modified_base 18: mod_base = OTHER; note = 2'-O-methylguanosine-3'-phosphate
  modified_base 19: mod_base = OTHER; note = 2'-O-methylguanosine-3'-phosphate
  modified_base 20: mod_base = OTHER; note = 2'-O-methylcytidine-3'-phosphate
  modified_base 21: mod_base = OTHER; note = 2'-O-methyladenosine-3'-phosphate
  modified_base 22: mod_base = OTHER; note = 2'-O-methylguanosine-3'-phosphate
  modified_base 23: mod_base = OTHER; note = 2'-O-methyluridine
taagagaaaagtatgctggcagt

SEQ ID NO: 5798 - RNA, 23 nt, synthetic construct
  source 1..23: mol_type = other RNA
  modified_base 1: mod_base = OTHER; note = 2'-O-methyluridine-3'-phosphate 5'-(E)-Vinylphosphonate
  modified_base 2: mod_base = OTHER; note = 2'-deoxy-2'-fluoroadenosine-3'-phosphate
  modified_base 3: mod_base = OTHER; note = 2'-O-methyladenosine-3'-phosphate
  modified_base 4: mod_base = OTHER; note = 2'-O-methyladenosine-3'-phosphate
  modified_base 5: mod_base = OTHER; note = 2'-O-methylguanosine-3'-phosphate
  modified_base 6: mod_base = OTHER; note = 2'-deoxy-2'-fluoroadenosine-3'-phosphate
  modified_base 7: mod_base = OTHER; note = 2'-O-methylguanosine-3'-phosphate
  modified_base 8: mod_base = OTHER; note = 2'-O-methyladenosine-3'-phosphate
  modified_base 9: mod_base = OTHER; note = 2'-O-methyladenosine-3'-phosphate
  modified_base 10: mod_base = OTHER; note = 2'-O-methyladenosine-3'-phosphate
  modified_base 11: mod_base = OTHER; note = 2'-O-methyladenosine-3'-phosphate
  modified_base 12: mod_base = OTHER; note = 2'-O-methylguanosine-3'-phosphate
  modified_base 13: mod_base = OTHER; note = 2'-O-methyluridine-3'-phosphate
  modified_base 14: mod_base = OTHER; note = 2'-deoxy-2'-fluoroadenosine-3'-phosphate
  modified_base 15: mod_base = OTHER; note = 2'-O-methyluridine-3'-phosphate
  modified_base 16: mod_base = OTHER; note = 2'-deoxy-2'-fluoroguanosine-3'-phosphate
  modified_base 17: mod_base = OTHER; note = 2'-O-methylcytidine-3'-phosphate
  modified_base 18: mod_base = OTHER; note = 2'-O-methyluridine-3'-phosphate
  modified_base 19: mod_base = OTHER; note = 2'-O-methylguanosine-3'-phosphate
  modified_base 20: mod_base = OTHER; note = 2'-O-methylguanosine-3'-phosphate
  modified_base 21: mod_base = OTHER; note = 2'-O-methylcytidine-3'-phosphate
  modified_base 22: mod_base = OTHER; note = 2'-O-methyladenosine-3'-phosphate
  modified_base 23: mod_base = OTHER; note = 2'-O-methylguanosine
taaagagaaaagtatgctggcag

SEQ ID NO: 5799 - RNA, 23 nt, synthetic construct
  source 1..23: mol_type = other RNA
  modified_base 1: mod_base = OTHER; note = 2'-O-methyluridine-3'-phosphate 5'-(E)-Vinylphosphonate
  modified_base 2: mod_base = OTHER; note = 2'-deoxy-2'-fluoroguanosine-3'-phosphate
  modified_base 3: mod_base = OTHER; note = 2'-O-methyladenosine-3'-phosphate
  modified_base 4: mod_base = OTHER; note = 2'-O-methyladenosine-3'-phosphate
  modified_base 5: mod_base = OTHER; note = 2'-O-methyladenosine-3'-phosphate
  modified_base 6: mod_base = OTHER; note = 2'-deoxy-2'-fluoroguanosine-3'-phosphate
  modified_base 7: mod_base = OTHER; note = 2'-O-methyladenosine-3'-phosphate
  modified_base 8: mod_base = OTHER; note = 2'-O-methylguanosine-3'-phosphate
  modified_base 9: mod_base = OTHER; note = 2'-O-methyladenosine-3'-phosphate
  modified_base 10: mod_base = OTHER; note = 2'-O-methyladenosine-3'-phosphate
  modified_base 11: mod_base = OTHER; note = 2'-O-methyladenosine-3'-phosphate
  modified_base 12: mod_base = OTHER; note = 2'-O-methyladenosine-3'-phosphate
  modified_base 13: mod_base = OTHER; note = 2'-O-methylguanosine-3'-phosphate
  modified_base 14: mod_base = OTHER; note = 2'-deoxy-2'-fluorouridine-3'-phosphate
  modified_base 15: mod_base = OTHER; note = 2'-O-methyladenosine-3'-phosphate
  modified_base 16: mod_base = OTHER; note = 2'-deoxy-2'-fluorouridine-3'-phosphate
  modified_base 17: mod_base = OTHER; note = 2'-O-methylguanosine-3'-phosphate
  modified_base 18: mod_base = OTHER; note = 2'-O-methylcytidine-3'-phosphate
  modified_base 19: mod_base = OTHER; note = 2'-O-methyluridine-3'-phosphate
  modified_base 20: mod_base = OTHER; note = 2'-O-methylguanosine-3'-phosphate
  modified_base 21: mod_base = OTHER; note = 2'-O-methylguanosine-3'-phosphate
  modified_base 22: mod_base = OTHER; note = 2'-O-methylcytidine-3'-phosphate
  modified_base 23: mod_base = OTHER; note = 2'-O-methyladenosine
tgaaagagaaaagtatgctggca

SEQ ID NO: 5800 - RNA, 23 nt, synthetic construct
  source 1..23: mol_type = other RNA
  modified_base 1: mod_base = OTHER; note = 2'-O-methyluridine-3'-phosphate 5'-(E)-Vinylphosphonate
  modified_base 2: mod_base = OTHER; note = 2'-deoxy-2'-fluorouridine-3'-phosphate
  modified_base 3: mod_base = OTHER; note = 2'-O-methylguanosine-3'-phosphate
  modified_base 4: mod_base = OTHER; note = 2'-O-methyladenosine-3'-phosphate
  modified_base 5: mod_base = OTHER; note = 2'-O-methyladenosine-3'-phosphate
  modified_base 6: mod_base = OTHER; note = 2'-deoxy-2'-fluoroadenosine-3'-phosphate
  modified_base 7: mod_base = OTHER; note = 2'-O-methylguanosine-3'-phosphate
  modified_base 8: mod_base = OTHER; note = 2'-O-methyladenosine-3'-phosphate
  modified_base 9: mod_base = OTHER; note = 2'-O-methylguanosine-3'-phosphate
  modified_base 10: mod_base = OTHER; note = 2'-O-methyladenosine-3'-phosphate
  modified_base 11: mod_base = OTHER; note = 2'-O-methyladenosine-3'-phosphate
  modified_base 12: mod_base = OTHER; note = 2'-O-methyladenosine-3'-phosphate
  modified_base 13: mod_base = OTHER; note = 2'-O-methyladenosine-3'-phosphate
  modified_base 14: mod_base = OTHER; note = 2'-deoxy-2'-fluoroguanosine-3'-phosphate
  modified_base 15: mod_base = OTHER; note = 2'-O-methyluridine-3'-phosphate
  modified_base 16: mod_base = OTHER; note = 2'-deoxy-2'-fluoroadenosine-3'-phosphate
  modified_base 17: mod_base = OTHER; note = 2'-O-methyluridine-3'-phosphate
  modified_base 18: mod_base = OTHER; note = 2'-O-methylguanosine-3'-phosphate
  modified_base 19: mod_base = OTHER; note = 2'-O-methylcytidine-3'-phosphate
  modified_base 20: mod_base = OTHER; note = 2'-O-methyluridine-3'-phosphate
  modified_base 21: mod_base = OTHER; note = 2'-O-methylguanosine-3'-phosphate
  modified_base 22: mod_base = OTHER; note = 2'-O-methylguanosine-3'-phosphate
  modified_base 23: mod_base = OTHER; note = 2'-O-methylcytidine
ttgaaagagaaaagtatgctggc

SEQ ID NO: 5801 - RNA, 23 nt, synthetic construct
  source 1..23: mol_type = other RNA
  modified_base 1: mod_base = OTHER; note = 2'-O-methyluridine-3'-phosphate 5'-(E)-Vinylphosphonate
  modified_base 2: mod_base = OTHER; note = 2'-deoxy-2'-fluorocytidine-3'-phosphate
  modified_base 3: mod_base = OTHER; note = 2'-O-methyluridine-3'-phosphate
  modified_base 4: mod_base = OTHER; note = 2'-O-methylguanosine-3'-phosphate
  modified_base 5: mod_base = OTHER; note = 2'-O-methyladenosine-3'-phosphate
  modified_base 6: mod_base = OTHER; note = 2'-deoxy-2'-fluoroadenosine-3'-phosphate
  modified_base 7: mod_base = OTHER; note = 2'-O-methyladenosine-3'-phosphate
  modified_base 8: mod_base = OTHER; note = 2'-O-methylguanosine-3'-phosphate
  modified_base 9: mod_base = OTHER; note = 2'-O-methyladenosine-3'-phosphate
  modified_base 10: mod_base = OTHER; note = 2'-O-methylguanosine-3'-phosphate
  modified_base 11: mod_base = OTHER; note = 2'-O-methyladenosine-3'-phosphate
  modified_base 12: mod_base = OTHER; note = 2'-O-methyladenosine-3'-phosphate
  modified_base 13: mod_base = OTHER; note = 2'-O-methyladenosine-3'-phosphate
  modified_base 14: mod_base = OTHER; note = 2'-deoxy-2'-fluoroadenosine-3'-phosphate
  modified_base 15: mod_base = OTHER; note = 2'-O-methylguanosine-3'-phosphate
  modified_base 16: mod_base = OTHER; note = 2'-deoxy-2'-fluorouridine-3'-phosphate
  modified_base 17: mod_base = OTHER; note = 2'-O-methyladenosine-3'-phosphate
  modified_base 18: mod_base = OTHER; note = 2'-O-methyluridine-3'-phosphate
  modified_base 19: mod_base = OTHER; note = 2'-O-methylguanosine-3'-phosphate
  modified_base 20: mod_base = OTHER; note = 2'-O-methylcytidine-3'-phosphate
  modified_base 21: mod_base = OTHER; note = 2'-O-methyluridine-3'-phosphate
  modified_base 22: mod_base = OTHER; note = 2'-O-methylguanosine-3'-phosphate
  modified_base 23: mod_base = OTHER; note = 2'-O-methylguanosine
tctgaaagagaaaagtatgctgg

SEQ ID NO: 5802 - RNA, 23 nt, synthetic construct
  source 1..23: mol_type = other RNA
  modified_base 1: mod_base = OTHER; note = 2'-O-methyluridine-3'-phosphate 5'-(E)-Vinylphosphonate
  modified_base 2: mod_base = OTHER; note = 2'-deoxy-2'-fluoroadenosine-3'-phosphate
  modified_base 3: mod_base = OTHER; note = 2'-O-methylcytidine-3'-phosphate
  modified_base 4: mod_base = OTHER; note = 2'-O-methyluridine-3'-phosphate
  modified_base 5: mod_base = OTHER; note = 2'-O-methylguanosine-3'-phosphate
  modified_base 6: mod_base = OTHER; note = 2'-deoxy-2'-fluoroadenosine-3'-phosphate
  modified_base 7: mod_base = OTHER; note = 2'-O-methyladenosine-3'-phosphate
  modified_base 8: mod_base = OTHER; note = 2'-O-methyladenosine-3'-phosphate
  modified_base 9: mod_base = OTHER; note = 2'-O-methylguanosine-3'-phosphate
  modified_base 10: mod_base = OTHER; note = 2'-O-methyladenosine-3'-phosphate
  modified_base 11: mod_base = OTHER; note = 2'-O-methylguanosine-3'-phosphate
  modified_base 12: mod_base = OTHER; note = 2'-O-methyladenosine-3'-phosphate
  modified_base 13: mod_base = OTHER; note = 2'-O-methyladenosine-3'-phosphate
  modified_base 14: mod_base = OTHER; note = 2'-deoxy-2'-fluoroadenosine-3'-phosphate
  modified_base 15: mod_base = OTHER; note = 2'-O-methyladenosine-3'-phosphate
  modified_base 16: mod_base = OTHER; note = 2'-deoxy-2'-fluoroguanosine-3'-phosphate
  modified_base 17: mod_base = OTHER; note = 2'-O-methyluridine-3'-phosphate
  modified_base 18: mod_base = OTHER; note = 2'-O-methyladenosine-3'-phosphate
  modified_base 19: mod_base = OTHER; note = 2'-O-methyluridine-3'-phosphate
  modified_base 20: mod_base = OTHER; note = 2'-O-methylguanosine-3'-phosphate
  modified_base 21: mod_base = OTHER; note = 2'-O-methylcytidine-3'-phosphate
  modified_base 22: mod_base = OTHER; note = 2'-O-methyluridine-3'-phosphate
  modified_base 23: mod_base = OTHER; note = 2'-O-methylguanosine
tactgaaagagaaaagtatgctg

SEQ ID NO: 5803 - RNA, 23 nt, synthetic construct
  source 1..23: mol_type = other RNA
  modified_base 1: mod_base = OTHER; note = 2'-O-methyluridine-3'-phosphate 5'-(E)-Vinylphosphonate
  modified_base 2: mod_base = OTHER; note = 2'-deoxy-2'-fluoroadenosine-3'-phosphate
  modified_base 3: mod_base = OTHER; note = 2'-O-methyladenosine-3'-phosphate
  modified_base 4: mod_base = OTHER; note = 2'-O-methylcytidine-3'-phosphate
  modified_base 5: mod_base = OTHER; note = 2'-O-methyluridine-3'-phosphate
  modified_base 6: mod_base = OTHER; note = 2'-deoxy-2'-fluoroguanosine-3'-phosphate
  modified_base 7: mod_base = OTHER; note = 2'-O-methyladenosine-3'-phosphate
  modified_base 8: mod_base = OTHER; note = 2'-O-methyladenosine-3'-phosphate
  modified_base 9: mod_base = OTHER; note = 2'-O-methyladenosine-3'-phosphate
  modified_base 10: mod_base = OTHER; note = 2'-O-methylguanosine-3'-phosphate
  modified_base 11: mod_base = OTHER; note = 2'-O-methyladenosine-3'-phosphate
  modified_base 12: mod_base = OTHER; note = 2'-O-methylguanosine-3'-phosphate
  modified_base 13: mod_base = OTHER; note = 2'-O-methyladenosine-3'-phosphate
  modified_base 14: mod_base = OTHER; note = 2'-deoxy-2'-fluoroadenosine-3'-phosphate
  modified_base 15: mod_base = OTHER; note = 2'-O-methyladenosine-3'-phosphate
  modified_base 16: mod_base = OTHER; note = 2'-deoxy-2'-fluoroadenosine-3'-phosphate
  modified_base 17: mod_base = OTHER; note = 2'-O-methylguanosine-3'-phosphate
  modified_base 18: mod_base = OTHER; note = 2'-O-methyluridine-3'-phosphate
  modified_base 19: mod_base = OTHER; note = 2'-O-methyladenosine-3'-phosphate
  modified_base 20: mod_base = OTHER; note = 2'-O-methyluridine-3'-phosphate
  modified_base 21: mod_base = OTHER; note = 2'-O-methylguanosine-3'-phosphate
  modified_base 22: mod_base = OTHER; note = 2'-O-methylcytidine-3'-phosphate
  modified_base 23: mod_base = OTHER; note = 2'-O-methyluridine
taactgaaagagaaaagtatgct

SEQ ID NO: 5804 - RNA, 23 nt, synthetic construct
  source 1..23: mol_type = other RNA
  modified_base 1: mod_base = OTHER; note = 2'-O-methyluridine-3'-phosphate 5'-(E)-Vinylphosphonate
  modified_base 2: mod_base = OTHER; note = 2'-deoxy-2'-fluorocytidine-3'-phosphate
  modified_base 3: mod_base = OTHER; note = 2'-O-methyladenosine-3'-phosphate
  modified_base 4: mod_base = OTHER; note = 2'-O-methyladenosine-3'-phosphate
  modified_base 5: mod_base = OTHER; note = 2'-O-methylcytidine-3'-phosphate
  modified_base 6: mod_base = OTHER; note = 2'-deoxy-2'-fluorouridine-3'-phosphate
  modified_base 7: mod_base = OTHER; note = 2'-O-methylguanosine-3'-phosphate
  modified_base 8: mod_base = OTHER; note = 2'-O-methyladenosine-3'-phosphate
  modified_base 9: mod_base = OTHER; note = 2'-O-methyladenosine-3'-phosphate
  modified_base 10: mod_base = OTHER; note = 2'-O-methyladenosine-3'-phosphate
  modified_base 11: mod_base = OTHER; note = 2'-O-methylguanosine-3'-phosphate
  modified_base 12: mod_base = OTHER; note = 2'-O-methyladenosine-3'-phosphate
  modified_base 13: mod_base = OTHER; note = 2'-O-methylguanosine-3'-phosphate
  modified_base 14: mod_base = OTHER; note = 2'-deoxy-2'-fluoroadenosine-3'-phosphate
  modified_base 15: mod_base = OTHER; note = 2'-O-methyladenosine-3'-phosphate
  modified_base 16: mod_base = OTHER; note = 2'-deoxy-2'-fluoroadenosine-3'-phosphate
  modified_base 17: mod_base = OTHER; note = 2'-O-methyladenosine-3'-phosphate
  modified_base 18: mod_base = OTHER; note = 2'-O-methylguanosine-3'-phosphate
  modified_base 19: mod_base = OTHER; note = 2'-O-methyluridine-3'-phosphate
  modified_base 20: mod_base = OTHER; note = 2'-O-methyladenosine-3'-phosphate
  modified_base 21: mod_base = OTHER; note = 2'-O-methyluridine-3'-phosphate
  modified_base 22: mod_base = OTHER; note = 2'-O-methylguanosine-3'-phosphate
  modified_base 23: mod_base = OTHER; note = 2'-O-methylcytidine
tcaactgaaagagaaaagtatgc

SEQ ID NO: 5805 - RNA, 23 nt, synthetic construct
  source 1..23: mol_type = other RNA
  modified_base 1: mod_base = OTHER; note = 2'-O-methyluridine-3'-phosphate 5'-(E)-Vinylphosphonate
  modified_base 2: mod_base = OTHER; note = 2'-deoxy-2'-fluoroadenosine-3'-phosphate
  modified_base 3: mod_base = OTHER; note = 2'-O-methylcytidine-3'-phosphate
  modified_base 4: mod_base = OTHER; note = 2'-O-methyladenosine-3'-phosphate
  modified_base 5: mod_base = OTHER; note = 2'-O-methyladenosine-3'-phosphate
  modified_base 6: mod_base = OTHER; note = 2'-deoxy-2'-fluorocytidine-3'-phosphate
  modified_base 7: mod_base = OTHER; note = 2'-O-methyluridine-3'-phosphate
  modified_base 8: mod_base = OTHER; note = 2'-O-methylguanosine-3'-phosphate
  modified_base 9: mod_base = OTHER; note = 2'-O-methyladenosine-3'-phosphate
  modified_base 10: mod_base = OTHER; note = 2'-O-methyladenosine-3'-phosphate
  modified_base 11: mod_base = OTHER; note = 2'-O-methyladenosine-3'-phosphate
  modified_base 12: mod_base = OTHER; note = 2'-O-methylguanosine-3'-phosphate
  modified_base 13: mod_base = OTHER; note = 2'-O-methyladenosine-3'-phosphate
  modified_base 14: mod_base = OTHER; note = 2'-deoxy-2'-fluoroguanosine-3'-phosphate
  modified_base 15: mod_base = OTHER; note = 2'-O-methyladenosine-3'-phosphate
  modified_base 16: mod_base = OTHER; note = 2'-deoxy-2'-fluoroadenosine-3'-phosphate
  modified_base 17: mod_base = OTHER; note = 2'-O-methyladenosine-3'-phosphate
  modified_base 18: mod_base = OTHER; note = 2'-O-methyladenosine-3'-phosphate
  modified_base 19: mod_base = OTHER; note = 2'-O-methylguanosine-3'-phosphate
  modified_base 20: mod_base = OTHER; note = 2'-O-methyluridine-3'-phosphate
  modified_base 21: mod_base = OTHER; note = 2'-O-methyladenosine-3'-phosphate
  modified_base 22: mod_base = OTHER; note = 2'-O-methyluridine-3'-phosphate
  modified_base 23: mod_base = OTHER; note = 2'-O-methylguanosine
tacaactgaaagagaaaagtatg

SEQ ID NO: 5806 - RNA, 23 nt, synthetic construct
  source 1..23: mol_type = other RNA
  modified_base 1: mod_base = OTHER; note = 2'-O-methyluridine-3'-phosphate 5'-(E)-Vinylphosphonate
  modified_base 2: mod_base = OTHER; note = 2'-deoxy-2'-fluorouridine-3'-phosphate
  modified_base 3: mod_base = OTHER; note = 2'-O-methyladenosine-3'-phosphate
  modified_base 4: mod_base = OTHER; note = 2'-O-methylcytidine-3'-phosphate
  modified_base 5: mod_base = OTHER; note = 2'-O-methyladenosine-3'-phosphate
  modified_base 6: mod_base = OTHER; note = 2'-deoxy-2'-fluoroadenosine-3'-phosphate
  modified_base 7: mod_base = OTHER; note = 2'-O-methylcytidine-3'-phosphate
  modified_base 8: mod_base = OTHER; note = 2'-O-methyluridine-3'-phosphate
  modified_base 9: mod_base = OTHER; note = 2'-O-methylguanosine-3'-phosphate
  modified_base 10: mod_base = OTHER; note = 2'-O-methyladenosine-3'-phosphate
  modified_base 11: mod_base = OTHER; note = 2'-O-methyladenosine-3'-phosphate
  modified_base 12: mod_base = OTHER; note = 2'-O-methyladenosine-3'-phosphate
  modified_base 13: mod_base = OTHER; note = 2'-O-methylguanosine-3'-phosphate
  modified_base 14: mod_base = OTHER; note = 2'-deoxy-2'-fluoroadenosine-3'-phosphate
  modified_base 15: mod_base = OTHER; note = 2'-O-methylguanosine-3'-phosphate
  modified_base 16: mod_base = OTHER; note = 2'-deoxy-2'-fluoroadenosine-3'-phosphate
  modified_base 17: mod_base = OTHER; note = 2'-O-methyladenosine-3'-phosphate
  modified_base 18: mod_base = OTHER; note = 2'-O-methyladenosine-3'-phosphate
  modified_base 19: mod_base = OTHER; note = 2'-O-methyladenosine-3'-phosphate
  modified_base 20: mod_base = OTHER; note = 2'-O-methylguanosine-3'-phosphate
  modified_base 21: mod_base = OTHER; note = 2'-O-methyluridine-3'-phosphate
  modified_base 22: mod_base = OTHER; note = 2'-O-methyladenosine-3'-phosphate
  modified_base 23: mod_base = OTHER; note = 2'-O-methyluridine
ttacaactgaaagagaaaagtat

SEQ ID NO: 5807 - RNA, 23 nt, synthetic construct
  source 1..23: mol_type = other RNA
  modified_base 1: mod_base = OTHER; note = 2'-O-methyluridine-3'-phosphate 5'-(E)-Vinylphosphonate
  modified_base 2: mod_base = OTHER; note = 2'-deoxy-2'-fluoroadenosine-3'-phosphate
  modified_base 3: mod_base = OTHER; note = 2'-O-methyluridine-3'-phosphate
  modified_base 4: mod_base = OTHER; note = 2'-O-methylguanosine-3'-phosphate
  modified_base 5: mod_base = OTHER; note = 2'-O-methyluridine-3'-phosphate
  modified_base 6: mod_base = OTHER; note = 2'-deoxy-2'-fluoroadenosine-3'-phosphate
  modified_base 7: mod_base = OTHER; note = 2'-O-methyluridine-3'-phosphate
  modified_base 8: mod_base = OTHER; note = 2'-O-methyluridine-3'-phosphate
  modified_base 9: mod_base = OTHER; note = 2'-O-methylcytidine-3'-phosphate
  modified_base 10: mod_base = OTHER; note = 2'-O-methyladenosine-3'-phosphate
  modified_base 11: mod_base = OTHER; note = 2'-O-methyluridine-3'-phosphate
  modified_base 12: mod_base = OTHER; note = 2'-O-methylcytidine-3'-phosphate
  modified_base 13: mod_base = OTHER; note = 2'-O-methyluridine-3'-phosphate
  modified_base 14: mod_base = OTHER; note = 2'-deoxy-2'-fluoroadenosine-3'-phosphate
  modified_base 15: mod_base = OTHER; note = 2'-O-methylcytidine-3'-phosphate
  modified_base 16: mod_base = OTHER; note = 2'-deoxy-2'-fluoroadenosine-3'-phosphate
  modified_base 17: mod_base = OTHER; note = 2'-O-methyladenosine-3'-phosphate
  modified_base 18: mod_base = OTHER; note = 2'-O-methylcytidine-3'-phosphate
  modified_base 19: mod_base = OTHER; note = 2'-O-methyluridine-3'-phosphate
  modified_base 20: mod_base = OTHER; note = 2'-O-methylguanosine-3'-phosphate
  modified_base 21: mod_base = OTHER; note = 2'-O-methyladenosine-3'-phosphate
  modified_base 22: mod_base = OTHER; note = 2'-O-methyladenosine-3'-phosphate
  modified_base 23: mod_base = OTHER; note = 2'-O-methyladenosine
tatgtattcatctacaactgaaa

SEQ ID NO: 5808 - RNA, 23 nt, synthetic construct
  source 1..23: mol_type = other RNA
  modified_base 1: mod_base = OTHER; note = 2'-O-methyluridine-3'-phosphate 5'-(E)-Vinylphosphonate
  modified_base 2: mod_base = OTHER; note = 2'-deoxy-2'-fluoroadenosine-3'-phosphate
  modified_base 3: mod_base = OTHER; note = 2'-O-methyladenosine-3'-phosphate
  modified_base 4: mod_base = OTHER; note = 2'-O-methyluridine-3'-phosphate
  modified_base 5: mod_base = OTHER; note = 2'-O-methylguanosine-3'-phosphate
  modified_base 6: mod_base = OTHER; note = 2'-deoxy-2'-fluorouridine-3'-phosphate
  modified_base 7: mod_base = OTHER; note = 2'-O-methyladenosine-3'-phosphate
  modified_base 8: mod_base = OTHER; note = 2'-O-methyluridine-3'-phosphate
  modified_base 9: mod_base = OTHER; note = 2'-O-methyluridine-3'-phosphate
  modified_base 10: mod_base = OTHER; note = 2'-O-methylcytidine-3'-phosphate
  modified_base 11: mod_base = OTHER; note = 2'-O-methyladenosine-3'-phosphate
  modified_base 12: mod_base = OTHER; note = 2'-O-methyluridine-3'-phosphate
  modified_base 13: mod_base = OTHER; note = 2'-O-methylcytidine-3'-phosphate
  modified_base 14: mod_base = OTHER; note = 2'-deoxy-2'-fluorouridine-3'-phosphate
  modified_base 15: mod_base = OTHER; note = 2'-O-methyladenosine-3'-phosphate
  modified_base 16: mod_base = OTHER; note = 2'-deoxy-2'-fluorocytidine-3'-phosphate
  modified_base 17: mod_base = OTHER; note = 2'-O-methyladenosine-3'-phosphate
  modified_base 18: mod_base = OTHER; note = 2'-O-methyladenosine-3'-phosphate
  modified_base 19: mod_base = OTHER; note = 2'-O-methylcytidine-3'-phosphate
  modified_base 20: mod_base = OTHER; note = 2'-O-methyluridine-3'-phosphate
  modified_base 21: mod_base = OTHER; note = 2'-O-methylguanosine-3'-phosphate
  modified_base 22: mod_base = OTHER; note = 2'-O-methyladenosine-3'-phosphate
  modified_base 23: mod_base = OTHER; note = 2'-O-methyladenosine
taatgtattcatctacaactgaa

SEQ ID NO: 5809 - RNA, 23 nt, synthetic construct
  source 1..23: mol_type = other RNA
  modified_base 1: mod_base = OTHER; note = 2'-O-methyluridine-3'-phosphate 5'-(E)-Vinylphosphonate
  modified_base 2: mod_base = OTHER; note = 2'-deoxy-2'-fluoroadenosine-3'-phosphate
  modified_base 3: mod_base = OTHER; note = 2'-O-methyladenosine-3'-phosphate
  modified_base 4: mod_base = OTHER; note = 2'-O-methyluridine-3'-phosphate
  modified_base 5: mod_base = OTHER; note = 2'-O-methyladenosine-3'-phosphate
  modified_base 6: mod_base = OTHER; note = 2'-deoxy-2'-fluorocytidine-3'-phosphate
  modified_base 7: mod_base = OTHER; note = 2'-O-methyladenosine-3'-phosphate
  modified_base 8: mod_base = OTHER; note = 2'-O-methylguanosine-3'-phosphate
  modified_base 9: mod_base = OTHER; note = 2'-O-methyluridine-3'-phosphate
  modified_base 10: mod_base = OTHER; note = 2'-O-methylcytidine-3'-phosphate
  modified_base 11: mod_base = OTHER; note = 2'-O-methyladenosine-3'-phosphate
  modified_base 12: mod_base = OTHER; note = 2'-O-methylcytidine-3'-phosphate
  modified_base 13: mod_base = OTHER; note = 2'-O-methyladenosine-3'-phosphate
  modified_base 14: mod_base = OTHER; note = 2'-deoxy-2'-fluorouridine-3'-phosphate
  modified_base 15: mod_base = OTHER; note = 2'-O-methylcytidine-3'-phosphate
  modified_base 16: mod_base = OTHER; note = 2'-deoxy-2'-fluorouridine-3'-phosphate
  modified_base 17: mod_base = OTHER; note = 2'-O-methylguanosine-3'-phosphate
  modified_base 18: mod_base = OTHER; note = 2'-O-methyladenosine-3'-phosphate
  modified_base 19: mod_base = OTHER; note = 2'-O-methyladenosine-3'-phosphate
  modified_base 20: mod_base = OTHER; note = 2'-O-methyladenosine-3'-phosphate
  modified_base 21: mod_base = OTHER; note = 2'-O-methyladenosine-3'-phosphate
  modified_base 22: mod_base = OTHER; note = 2'-O-methyluridine-3'-phosphate
  modified_base 23: mod_base = OTHER; note = 2'-O-methyladenosine
taatacagtcacatctgaaaata

SEQ ID NO: 5810 - RNA, 23 nt, synthetic construct
  source 1..23: mol_type = other RNA
  modified_base 1: mod_base = OTHER; note = 2'-O-methyluridine-3'-phosphate 5'-(E)-Vinylphosphonate
  modified_base 2: mod_base = OTHER; note = 2'-deoxy-2'-fluoroadenosine-3'-phosphate
  modified_base 3: mod_base = OTHER; note = 2'-O-methyladenosine-3'-phosphate
  modified_base 4: mod_base = OTHER; note = 2'-O-methyladenosine-3'-phosphate
  modified_base 5: mod_base = OTHER; note = 2'-O-methyluridine-3'-phosphate
  modified_base 6: mod_base = OTHER; note = 2'-deoxy-2'-fluoroadenosine-3'-phosphate
  modified_base 7: mod_base = OTHER; note = 2'-O-methylcytidine-3'-phosphate
  modified_base 8: mod_base = OTHER; note = 2'-O-methyladenosine-3'-phosphate
  modified_base 9: mod_base = OTHER; note = 2'-O-methylguanosine-3'-phosphate
  modified_base 10: mod_base = OTHER; note = 2'-O-methyluridine-3'-phosphate
  modified_base 11: mod_base = OTHER; note = 2'-O-methylcytidine-3'-phosphate
  modified_base 12: mod_base = OTHER; note = 2'-O-methyladenosine-3'-phosphate
  modified_base 13: mod_base = OTHER; note = 2'-O-methylcytidine-3'-phosphate
  modified_base 14: mod_base = OTHER; note = 2'-deoxy-2'-fluoroadenosine-3'-phosphate
  modified_base 15: mod_base = OTHER; note = 2'-O-methyluridine-3'-phosphate
  modified_base 16: mod_base = OTHER; note = 2'-deoxy-2'-fluorocytidine-3'-phosphate
  modified_base 17: mod_base = OTHER; note = 2'-O-methyluridine-3'-phosphate
  modified_base 18: mod_base = OTHER; note = 2'-O-methylguanosine-3'-phosphate
  modified_base 19: mod_base = OTHER; note = 2'-O-methyladenosine-3'-phosphate
  modified_base 20: mod_base = OTHER; note = 2'-O-methyladenosine-3'-phosphate
  modified_base 21: mod_base = OTHER; note = 2'-O-methyladenosine-3'-phosphate
  modified_base 22: mod_base = OTHER; note = 2'-O-methyladenosine-3'-phosphate
  modified_base 23: mod_base = OTHER; note = 2'-O-methyluridine
taaatacagtcacatctgaaaat

SEQ ID NO: 5811 - RNA, 23 nt, synthetic construct
  source 1..23: mol_type = other RNA
  modified_base 1: mod_base = OTHER; note = 2'-O-methyluridine-3'-phosphate 5'-(E)-Vinylphosphonate
  modified_base 2: mod_base = OTHER; note = 2'-deoxy-2'-fluoroguanosine-3'-phosphate
  modified_base 3: mod_base = OTHER; note = 2'-O-methyladenosine-3'-phosphate
  modified_base 4: mod_base = OTHER; note = 2'-O-methyladenosine-3'-phosphate
  modified_base 5: mod_base = OTHER; note = 2'-O-methyladenosine-3'-phosphate
  modified_base 6: mod_base = OTHER; note = 2'-deoxy-2'-fluorouridine-3'-phosphate
  modified_base 7: mod_base = OTHER; note = 2'-O-methyladenosine-3'-phosphate
  modified_base 8: mod_base = OTHER; note = 2'-O-methylcytidine-3'-phosphate
  modified_base 9: mod_base = OTHER; note = 2'-O-methyladenosine-3'-phosphate
  modified_base 10: mod_base = OTHER; note = 2'-O-methylguanosine-3'-phosphate
  modified_base 11: mod_base = OTHER; note = 2'-O-methyluridine-3'-phosphate
  modified_base 12: mod_base = OTHER; note = 2'-O-methylcytidine-3'-phosphate
  modified_base 13: mod_base = OTHER; note = 2'-O-methyladenosine-3'-phosphate
  modified_base 14: mod_base = OTHER; note = 2'-deoxy-2'-fluorocytidine-3'-phosphate
  modified_base 15: mod_base = OTHER; note = 2'-O-methyladenosine-3'-phosphate
  modified_base 16: mod_base = OTHER; note = 2'-deoxy-2'-fluorouridine-3'-phosphate
  modified_base 17: mod_base = OTHER; note = 2'-O-methylcytidine-3'-phosphate
  modified_base 18: mod_base = OTHER; note = 2'-O-methyluridine-3'-phosphate
  modified_base 19: mod_base = OTHER; note = 2'-O-methylguanosine-3'-phosphate
  modified_base 20: mod_base = OTHER; note = 2'-O-methyladenosine-3'-phosphate
  modified_base 21: mod_base = OTHER; note = 2'-O-methyladenosine-3'-phosphate
  modified_base 22: mod_base = OTHER; note = 2'-O-methyladenosine-3'-phosphate
  modified_base 23: mod_base = OTHER; note = 2'-O-methyladenosine
tgaaatacagtcacatctgaaaa

SEQ ID NO: 5812 - RNA, 23 nt, synthetic construct
  source 1..23: mol_type = other RNA
  modified_base 1: mod_base = OTHER; note = 2'-O-methyluridine-3'-phosphate 5'-(E)-Vinylphosphonate
  modified_base 2: mod_base = OTHER; note = 2'-deoxy-2'-fluoroguanosine-3'-phosphate
  modified_base 3: mod_base = OTHER; note = 2'-O-methylguanosine-3'-phosphate
  modified_base 4: mod_base = OTHER; note = 2'-O-methyladenosine-3'-phosphate
  modified_base 5: mod_base = OTHER; note = 2'-O-methyladenosine-3'-phosphate
  modified_base 6: mod_base = OTHER; note = 2'-deoxy-2'-fluoroadenosine-3'-phosphate
  modified_base 7: mod_base = OTHER; note = 2'-O-methyluridine-3'-phosphate
  modified_base 8: mod_base = OTHER; note = 2'-O-methyladenosine-3'-phosphate
  modified_base 9: mod_base = OTHER; note = 2'-O-methylcytidine-3'-phosphate
  modified_base 10: mod_base = OTHER; note = 2'-O-methyladenosine-3'-phosphate
  modified_base 11: mod_base = OTHER; note = 2'-O-methylguanosine-3'-phosphate
  modified_base 12: mod_base = OTHER; note = 2'-O-methyluridine-3'-phosphate
  modified_base 13: mod_base = OTHER; note = 2'-O-methylcytidine-3'-phosphate
  modified_base 14: mod_base = OTHER; note = 2'-deoxy-2'-fluoroadenosine-3'-phosphate
  modified_base 15: mod_base = OTHER; note = 2'-O-methylcytidine-3'-phosphate
  modified_base 16: mod_base = OTHER; note = 2'-deoxy-2'-fluoroadenosine-3'-phosphate
  modified_base 17: mod_base = OTHER; note = 2'-O-methyluridine-3'-phosphate
  modified_base 18: mod_base = OTHER; note = 2'-O-methylcytidine-3'-phosphate
  modified_base 19: mod_base = OTHER; note = 2'-O-methyluridine-3'-phosphate
  modified_base 20: mod_base = OTHER; note = 2'-O-methylguanosine-3'-phosphate
  modified_base 21: mod_base = OTHER; note = 2'-O-methyladenosine-3'-phosphate
  modified_base 22: mod_base = OTHER; note = 2'-O-methyladenosine-3'-phosphate
  modified_base 23: mod_base = OTHER; note = 2'-O-methyladenosine
tggaaatacagtcacatctgaaa

SEQ ID NO: 5813 - RNA, 23 nt, synthetic construct
  source 1..23: mol_type = other RNA
  modified_base 1: mod_base = OTHER; note = 2'-O-methyluridine-3'-phosphate 5'-(E)-Vinylphosphonate
  modified_base 2: mod_base = OTHER; note = 2'-deoxy-2'-fluoroadenosine-3'-phosphate
  modified_base 3: mod_base = OTHER; note = 2'-O-methylguanosine-3'-phosphate
  modified_base 4: mod_base = OTHER; note = 2'-O-methylguanosine-3'-phosphate
  modified_base 5: mod_base = OTHER; note = 2'-O-methyladenosine-3'-phosphate
  modified_base 6: mod_base = OTHER; note = 2'-deoxy-2'-fluoroadenosine-3'-phosphate
  modified_base 7: mod_base = OTHER; note = 2'-O-methyladenosine-3'-phosphate
  modified_base 8: mod_base = OTHER; note = 2'-O-methyluridine-3'-phosphate
  modified_base 9: mod_base = OTHER; note = 2'-O-methyladenosine-3'-phosphate
  modified_base 10: mod_base = OTHER; note = 2'-O-methylcytidine-3'-phosphate
  modified_base 11: mod_base = OTHER; note = 2'-O-methyladenosine-3'-phosphate
  modified_base 12: mod_base = OTHER; note = 2'-O-methylguanosine-3'-phosphate
  modified_base 13: mod_base = OTHER; note = 2'-O-methyluridine-3'-phosphate
  modified_base 14: mod_base = OTHER; note = 2'-deoxy-2'-fluorocytidine-3'-phosphate
  modified_base 15: mod_base = OTHER; note = 2'-O-methyladenosine-3'-phosphate
  modified_base 16: mod_base = OTHER; note = 2'-deoxy-2'-fluorocytidine-3'-phosphate
  modified_base 17: mod_base = OTHER; note = 2'-O-methyladenosine-3'-phosphate
  modified_base 18: mod_base = OTHER; note = 2'-O-methyluridine-3'-phosphate
  modified_base 19: mod_base = OTHER; note = 2'-O-methylcytidine-3'-phosphate
  modified_base 20: mod_base = OTHER; note = 2'-O-methyluridine-3'-phosphate
  modified_base 21: mod_base = OTHER; note = 2'-O-methylguanosine-3'-phosphate
  modified_base 22: mod_base = OTHER; note = 2'-O-methyladenosine-3'-phosphate
  modified_base 23: mod_base = OTHER; note = 2'-O-methyladenosine
taggaaatacagtcacatctgaa

SEQ ID NO: 5814 - RNA, 23 nt, synthetic construct
  source 1..23: mol_type = other RNA
  modified_base 1: mod_base = OTHER; note = 2'-O-methyluridine-3'-phosphate 5'-(E)-Vinylphosphonate
  modified_base 2: mod_base = OTHER; note = 2'-deoxy-2'-fluorocytidine-3'-phosphate
  modified_base 3: mod_base = OTHER; note = 2'-O-methyladenosine-3'-phosphate
  modified_base 4: mod_base = OTHER; note = 2'-O-methylguanosine-3'-phosphate
  modified_base 5: mod_base = OTHER; note = 2'-O-methylguanosine-3'-phosphate
  modified_base 6: mod_base = OTHER; note = 2'-deoxy-2'-fluoroadenosine-3'-phosphate
  modified_base 7: mod_base = OTHER; note = 2'-O-methyladenosine-3'-phosphate
  modified_base 8: mod_base = OTHER; note = 2'-O-methyladenosine-3'-phosphate
  modified_base 9: mod_base = OTHER; note = 2'-O-methyluridine-3'-phosphate
  modified_base 10: mod_base = OTHER; note = 2'-O-methyladenosine-3'-phosphate
  modified_base 11: mod_base = OTHER; note = 2'-O-methylcytidine-3'-phosphate
  modified_base 12: mod_base = OTHER; note = 2'-O-methyladenosine-3'-phosphate
  modified_base 13: mod_base = OTHER; note = 2'-O-methylguanosine-3'-phosphate
  modified_base 14: mod_base = OTHER; note = 2'-deoxy-2'-fluorouridine-3'-phosphate
  modified_base 15: mod_base = OTHER; note = 2'-O-methylcytidine-3'-phosphate
  modified_base 16: mod_base = OTHER; note = 2'-deoxy-2'-fluoroadenosine-3'-phosphate
  modified_base 17: mod_base = OTHER; note = 2'-O-methylcytidine-3'-phosphate
  modified_base 18: mod_base = OTHER; note = 2'-O-methyladenosine-3'-phosphate
  modified_base 19: mod_base = OTHER; note = 2'-O-methyluridine-3'-phosphate
  modified_base 20: mod_base = OTHER; note = 2'-O-methylcytidine-3'-phosphate
  modified_base 21: mod_base = OTHER; note = 2'-O-methyluridine-3'-phosphate
  modified_base 22: mod_base = OTHER; note = 2'-O-methylguanosine-3'-phosphate
  modified_base 23: mod_base = OTHER; note = 2'-O-methyladenosine
tcaggaaatacagtcacatctga

SEQ ID NO: 5815 - RNA, 23 nt, synthetic construct
  source 1..23: mol_type = other RNA
  modified_base 1: mod_base = OTHER; note = 2'-O-methyluridine-3'-phosphate 5'-(E)-Vinylphosphonate
  modified_base 2: mod_base = OTHER; note = 2'-deoxy-2'-fluorouridine-3'-phosphate
  modified_base 3: mod_base = OTHER; note = 2'-O-methylcytidine-3'-phosphate
  modified_base 4: mod_base = OTHER; note = 2'-O-methyladenosine-3'-phosphate
  modified_base 5: mod_base = OTHER; note = 2'-O-methylguanosine-3'-phosphate
  modified_base 6: mod_base = OTHER; note = 2'-deoxy-2'-fluoroguanosine-3'-phosphate
  modified_base 7: mod_base = OTHER; note = 2'-O-methyladenosine-3'-phosphate
  modified_base 8: mod_base = OTHER; note = 2'-O-methyladenosine-3'-phosphate
  modified_base 9: mod_base = OTHER; note = 2'-O-methyladenosine-3'-phosphate
  modified_base 10: mod_base = OTHER; note = 2'-O-methyluridine-3'-phosphate
  modified_base 11: mod_base = OTHER; note = 2'-O-methyladenosine-3'-phosphate
  modified_base 12: mod_base = OTHER; note = 2'-O-methylcytidine-3'-phosphate
  modified_base 13: mod_base = OTHER; note = 2'-O-methyladenosine-3'-phosphate
  modified_base 14: mod_base = OTHER; note = 2'-deoxy-2'-fluoroguanosine-3'-phosphate
  modified_base 15: mod_base = OTHER; note = 2'-O-methyluridine-3'-phosphate
  modified_base 16: mod_base = OTHER; note = 2'-deoxy-2'-fluorocytidine-3'-phosphate
  modified_base 17: mod_base = OTHER; note = 2'-O-methyladenosine-3'-phosphate
  modified_base 18: mod_base = OTHER; note = 2'-O-methylcytidine-3'-phosphate
  modified_base 19: mod_base = OTHER; note = 2'-O-methyladenosine-3'-phosphate
  modified_base 20: mod_base = OTHER; note = 2'-O-methyluridine-3'-phosphate
  modified_base 21: mod_base = OTHER; note = 2'-O-methylcytidine-3'-phosphate
  modified_base 22: mod_base = OTHER; note = 2'-O-methyluridine-3'-phosphate
  modified_base 23: mod_base = OTHER; note = 2'-O-methylguanosine
ttcaggaaatacagtcacatctg

SEQ ID NO: 5816 - RNA, 23 nt, synthetic construct
  source 1..23: mol_type = other RNA
  modified_base 1: mod_base = OTHER; note = 2'-O-methyluridine-3'-phosphate 5'-(E)-Vinylphosphonate
  modified_base 2: mod_base = OTHER; note = 2'-deoxy-2'-fluoroadenosine-3'-phosphate
  modified_base 3: mod_base = OTHER; note = 2'-O-methyluridine-3'-phosphate
  modified_base 4: mod_base = OTHER; note = 2'-O-methylcytidine-3'-phosphate
  modified_base 5: mod_base = OTHER; note = 2'-O-methyladenosine-3'-phosphate
  modified_base 6: mod_base = OTHER; note = 2'-deoxy-2'-fluoroguanosine-3'-phosphate
  modified_base 7: mod_base = OTHER; note = 2'-O-methylguanosine-3'-phosphate
  modified_base 8: mod_base = OTHER; note = 2'-O-methyladenosine-3'-phosphate
  modified_base 9: mod_base = OTHER; note = 2'-O-methyladenosine-3'-phosphate
  modified_base 10: mod_base = OTHER; note = 2'-O-methyladenosine-3'-phosphate
  modified_base 11: mod_base = OTHER; note = 2'-O-methyluridine-3'-phosphate
  modified_base 12: mod_base = OTHER; note = 2'-O-methyladenosine-3'-phosphate
  modified_base 13: mod_base = OTHER; note = 2'-O-methylcytidine-3'-phosphate
  modified_base 14: mod_base = OTHER; note = 2'-deoxy-2'-fluoroadenosine-3'-phosphate
  modified_base 15: mod_base = OTHER; note = 2'-O-methylguanosine-3'-phosphate
  modified_base 16: mod_base = OTHER; note = 2'-deoxy-2'-fluorouridine-3'-phosphate
  modified_base 17: mod_base = OTHER; note = 2'-O-methylcytidine-3'-phosphate
  modified_base 18: mod_base = OTHER; note = 2'-O-methyladenosine-3'-phosphate
  modified_base 19: mod_base = OTHER; note = 2'-O-methylcytidine-3'-phosphate
  modified_base 20: mod_base = OTHER; note = 2'-O-methyladenosine-3'-phosphate
  modified_base 21: mod_base = OTHER; note = 2'-O-methyluridine-3'-phosphate
  modified_base 22: mod_base = OTHER; note = 2'-O-methylcytidine-3'-phosphate
  modified_base 23: mod_base = OTHER; note = 2'-O-methyluridine
tatcaggaaatacagtcacatct

SEQ ID NO: 5817 - RNA, 23 nt, synthetic construct
  source 1..23: mol_type = other RNA
  modified_base 1: mod_base = OTHER; note = 2'-O-methyluridine-3'-phosphate 5'-(E)-Vinylphosphonate
  modified_base 2: mod_base = OTHER; note = 2'-deoxy-2'-fluoroguanosine-3'-phosphate
  modified_base 3: mod_base = OTHER; note = 2'-O-methyladenosine-3'-phosphate
  modified_base 4: mod_base = OTHER; note = 2'-O-methyluridine-3'-phosphate
  modified_base 5: mod_base = OTHER; note = 2'-O-methylcytidine-3'-phosphate
  modified_base 6: mod_base = OTHER; note = 2'-deoxy-2'-fluoroadenosine-3'-phosphate
  modified_base 7: mod_base = OTHER; note = 2'-O-methylguanosine-3'-phosphate
  modified_base 8: mod_base = OTHER; note = 2'-O-methylguanosine-3'-phosphate
  modified_base 9: mod_base = OTHER; note = 2'-O-methyladenosine-3'-phosphate
  modified_base 10: mod_base = OTHER; note = 2'-O-methyladenosine-3'-phosphate
  modified_base 11: mod_base = OTHER; note = 2'-O-methyladenosine-3'-phosphate
  modified_base 12: mod_base = OTHER; note = 2'-O-methyluridine-3'-phosphate
  modified_base 13: mod_base = OTHER; note = 2'-O-methyladenosine-3'-phosphate
  modified_base 14: mod_base = OTHER; note = 2'-deoxy-2'-fluorocytidine-3'-phosphate
  modified_base 15: mod_base = OTHER; note = 2'-O-methyladenosine-3'-phosphate
  modified_base 16: mod_base = OTHER; note = 2'-deoxy-2'-fluoroguanosine-3'-phosphate
  modified_base 17: mod_base = OTHER; note = 2'-O-methyluridine-3'-phosphate
  modified_base 18: mod_base = OTHER; note = 2'-O-methylcytidine-3'-phosphate
  modified_base 19: mod_base = OTHER; note = 2'-O-methyladenosine-3'-phosphate
  modified_base 20: mod_base = OTHER; note = 2'-O-methylcytidine-3'-phosphate
  modified_base 21: mod_base = OTHER; note = 2'-O-methyladenosine-3'-phosphate
  modified_base 22: mod_base = OTHER; note = 2'-O-methyluridine-3'-phosphate
  modified_base 23: mod_base = OTHER; note = 2'-O-methylcytidine
tgatcaggaaatacagtcacatc

SEQ ID NO: 5818 - RNA, 23 nt, synthetic construct
  source 1..23: mol_type = other RNA
  modified_base 1: mod_base = OTHER; note = 2'-O-methyluridine-3'-phosphate 5'-(E)-Vinylphosphonate
  modified_base 2: mod_base = OTHER; note = 2'-deoxy-2'-fluorouridine-3'-phosphate
  modified_base 3: mod_base = OTHER; note = 2'-O-methylguanosine-3'-phosphate
  modified_base 4: mod_base = OTHER; note = 2'-O-methyladenosine-3'-phosphate
  modified_base 5: mod_base = OTHER; note = 2'-O-methyluridine-3'-phosphate
  modified_base 6: mod_base = OTHER; note = 2'-deoxy-2'-fluorocytidine-3'-phosphate
  modified_base 7: mod_base = OTHER; note = 2'-O-methyladenosine-3'-phosphate
  modified_base 8: mod_base = OTHER; note = 2'-O-methylguanosine-3'-phosphate
  modified_base 9: mod_base = OTHER; note = 2'-O-methylguanosine-3'-phosphate
  modified_base 10: mod_base = OTHER; note = 2'-O-methyladenosine-3'-phosphate
  modified_base 11: mod_base = OTHER; note = 2'-O-methyladenosine-3'-phosphate
  modified_base 12: mod_base = OTHER; note = 2'-O-methyladenosine-3'-phosphate
  modified_base 13: mod_base = OTHER; note = 2'-O-methyluridine-3'-phosphate
  modified_base 14: mod_base = OTHER; note = 2'-deoxy-2'-fluoroadenosine-3'-phosphate
  modified_base 15: mod_base = OTHER; note = 2'-O-methylcytidine-3'-phosphate
  modified_base 16: mod_base = OTHER; note = 2'-deoxy-2'-fluoroadenosine-3'-phosphate
  modified_base 17: mod_base = OTHER; note = 2'-O-methylguanosine-3'-phosphate
  modified_base 18: mod_base = OTHER; note = 2'-O-methyluridine-3'-phosphate
  modified_base 19: mod_base = OTHER; note = 2'-O-methylcytidine-3'-phosphate
  modified_base 20: mod_base = OTHER; note = 2'-O-methyladenosine-3'-phosphate
  modified_base 21: mod_base = OTHER; note = 2'-O-methylcytidine-3'-phosphate
  modified_base 22: mod_base = OTHER; note = 2'-O-methyladenosine-3'-phosphate
  modified_base 23: mod_base = OTHER; note = 2'-O-methyluridine
ttgatcaggaaatacagtcacat

SEQ ID NO: 5819 - RNA, 23 nt, synthetic construct
  source 1..23: mol_type = other RNA
  modified_base 1: mod_base = OTHER; note = 2'-O-methyluridine-3'-phosphate 5'-(E)-Vinylphosphonate
  modified_base 2: mod_base = OTHER; note = 2'-deoxy-2'-fluoroadenosine-3'-phosphate
  modified_base 3: mod_base = OTHER; note = 2'-O-methyluridine-3'-phosphate
  modified_base 4: mod_base = OTHER; note = 2'-O-methylguanosine-3'-phosphate
  modified_base 5: mod_base = OTHER; note = 2'-O-methyladenosine-3'-phosphate
  modified_base 6: mod_base = OTHER; note = 2'-deoxy-2'-fluorouridine-3'-phosphate
  modified_base 7: mod_base = OTHER; note = 2'-O-methylcytidine-3'-phosphate
  modified_base 8: mod_base = OTHER; note = 2'-O-methyladenosine-3'-phosphate
  modified_base 9: mod_base = OTHER; note = 2'-O-methylguanosine-3'-phosphate
  modified_base 10: mod_base = OTHER; note = 2'-O-methylguanosine-3'-phosphate
  modified_base 11: mod_base = OTHER; note = 2'-O-methyladenosine-3'-phosphate
  modified_base 12: mod_base = OTHER; note = 2'-O-methyladenosine-3'-phosphate
  modified_base 13: mod_base = OTHER; note = 2'-O-methyladenosine-3'-phosphate
  modified_base 14: mod_base = OTHER; note = 2'-deoxy-2'-fluorouridine-3'-phosphate
  modified_base 15: mod_base = OTHER; note = 2'-O-methyladenosine-3'-phosphate
  modified_base 16: mod_base = OTHER; note = 2'-deoxy-2'-fluorocytidine-3'-phosphate
  modified_base 17: mod_base = OTHER; note = 2'-O-methyladenosine-3'-phosphate
  modified_base 18: mod_base = OTHER; note = 2'-O-methylguanosine-3'-phosphate
  modified_base 19: mod_base = OTHER; note = 2'-O-methyluridine-3'-phosphate
  modified_base 20: mod_base = OTHER; note = 2'-O-methylcytidine-3'-phosphate
  modified_base 21: mod_base = OTHER; note = 2'-O-methyladenosine-3'-phosphate
  modified_base 22: mod_base = OTHER; note = 2'-O-methylcytidine-3'-phosphate
  modified_base 23: mod_base = OTHER; note = 2'-O-methyladenosine
tatgatcaggaaatacagtcaca

SEQ ID NO: 5820 - RNA, 23 nt, synthetic construct
  source 1..23: mol_type = other RNA
  modified_base 1: mod_base = OTHER; note = 2'-O-methyluridine-3'-phosphate 5'-(E)-Vinylphosphonate
  modified_base 2: mod_base = OTHER; note = 2'-deoxy-2'-fluoroadenosine-3'-phosphate
  modified_base 3: mod_base = OTHER; note = 2'-O-methyladenosine-3'-phosphate
  modified_base 4: mod_base = OTHER; note = 2'-O-methyluridine-3'-phosphate
  modified_base 5: mod_base = OTHER; note = 2'-O-methylguanosine-3'-phosphate
  modified_base 6: mod_base = OTHER; note = 2'-deoxy-2'-fluoroadenosine-3'-phosphate
  modified_base 7: mod_base = OTHER; note = 2'-O-methyluridine-3'-phosphate
  modified_base 8: mod_base = OTHER; note = 2'-O-methylcytidine-3'-phosphate
  modified_base 9: mod_base = OTHER; note = 2'-O-methyladenosine-3'-phosphate
  modified_base 10: mod_base = OTHER; note = 2'-O-methylguanosine-3'-phosphate
  modified_base 11: mod_base = OTHER; note = 2'-O-methylguanosine-3'-phosphate
  modified_base 12: mod_base = OTHER; note = 2'-O-methyladenosine-3'-phosphate
  modified_base 13: mod_base = OTHER; note = 2'-O-methyladenosine-3'-phosphate
  modified_base 14: mod_base = OTHER; note = 2'-deoxy-2'-fluoroadenosine-3'-phosphate
  modified_base 15: mod_base = OTHER; note = 2'-O-methyluridine-3'-phosphate
  modified_base 16: mod_base = OTHER; note = 2'-deoxy-2'-fluoroadenosine-3'-phosphate
  modified_base 17: mod_base = OTHER; note = 2'-O-methylcytidine-3'-phosphate
  modified_base 18: mod_base = OTHER; note = 2'-O-methyladenosine-3'-phosphate
  modified_base 19: mod_base = OTHER; note = 2'-O-methylguanosine-3'-phosphate
  modified_base 20: mod_base = OTHER; note = 2'-O-methyluridine-3'-phosphate
  modified_base 21: mod_base = OTHER; note = 2'-O-methylcytidine-3'-phosphate
  modified_base 22: mod_base = OTHER; note = 2'-O-methyladenosine-3'-phosphate
  modified_base 23: mod_base = OTHER; note = 2'-O-methylcytidine
taatgatcaggaaatacagtcac

SEQ ID NO: 5821 - RNA, 23 nt, synthetic construct
  source 1..23: mol_type = other RNA
  modified_base 1: mod_base = OTHER; note = 2'-O-methyluridine-3'-phosphate 5'-(E)-Vinylphosphonate
  modified_base 2: mod_base = OTHER; note = 2'-deoxy-2'-fluorocytidine-3'-phosphate
  modified_base 3: mod_base = OTHER; note = 2'-O-methyladenosine-3'-phosphate
  modified_base 4: mod_base = OTHER; note = 2'-O-methyladenosine-3'-phosphate
  modified_base 5: mod_base = OTHER; note = 2'-O-methyluridine-3'-phosphate
  modified_base 6: mod_base = OTHER; note = 2'-deoxy-2'-fluoroguanosine-3'-phosphate
  modified_base 7: mod_base = OTHER; note = 2'-O-methyladenosine-3'-phosphate
  modified_base 8: mod_base = OTHER; note = 2'-O-methyluridine-3'-phosphate
  modified_base 9: mod_base = OTHER; note = 2'-O-methylcytidine-3'-phosphate
  modified_base 10: mod_base = OTHER; note = 2'-O-methyladenosine-3'-phosphate
  modified_base 11: mod_base = OTHER; note = 2'-O-methylguanosine-3'-phosphate
  modified_base 12: mod_base = OTHER; note = 2'-O-methylguanosine-3'-phosphate
  modified_base 13: mod_base = OTHER; note = 2'-O-methyladenosine-3'-phosphate
  modified_base 14: mod_base = OTHER; note = 2'-deoxy-2'-fluoroadenosine-3'-phosphate
  modified_base 15: mod_base = OTHER; note = 2'-O-methyladenosine-3'-phosphate
  modified_base 16: mod_base = OTHER; note = 2'-deoxy-2'-fluorouridine-3'-phosphate
  modified_base 17: mod_base = OTHER; note = 2'-O-methyladenosine-3'-phosphate
  modified_base 18: mod_base = OTHER; note = 2'-O-methylcytidine-3'-phosphate
  modified_base 19: mod_base = OTHER; note = 2'-O-methyladenosine-3'-phosphate
  modified_base 20: mod_base = OTHER; note = 2'-O-methylguanosine-3'-phosphate
  modified_base 21: mod_base = OTHER; note = 2'-O-methyluridine-3'-phosphate
  modified_base 22: mod_base = OTHER; note = 2'-O-methylcytidine-3'-phosphate
  modified_base 23: mod_base = OTHER; note = 2'-O-methyladenosine
tcaatgatcaggaaatacagtca

SEQ ID NO: 5822 - RNA, 23 nt, synthetic construct
  source 1..23: mol_type = other RNA
  modified_base 1: mod_base = OTHER; note = 2'-O-methyluridine-3'-phosphate 5'-(E)-Vinylphosphonate
  modified_base 2: mod_base = OTHER; note = 2'-deoxy-2'-fluorocytidine-3'-phosphate
  modified_base 3: mod_base = OTHER; note = 2'-O-methylcytidine-3'-phosphate
  modified_base 4: mod_base = OTHER; note = 2'-O-methyladenosine-3'-phosphate
  modified_base 5: mod_base = OTHER; note = 2'-O-methyladenosine-3'-phosphate
  modified_base 6: mod_base = OTHER; note = 2'-deoxy-2'-fluorouridine-3'-phosphate
  modified_base 7: mod_base = OTHER; note = 2'-O-methylguanosine-3'-phosphate
  modified_base 8: mod_base = OTHER; note = 2'-O-methyladenosine-3'-phosphate
  modified_base 9: mod_base = OTHER; note = 2'-O-methyluridine-3'-phosphate
  modified_base 10: mod_base = OTHER; note = 2'-O-methylcytidine-3'-phosphate
  modified_base 11: mod_base = OTHER; note = 2'-O-methyladenosine-3'-phosphate
  modified_base 12: mod_base = OTHER; note = 2'-O-methylguanosine-3'-phosphate
  modified_base 13: mod_base = OTHER; note = 2'-O-methylguanosine-3'-phosphate
  modified_base 14: mod_base = OTHER; note = 2'-deoxy-2'-fluoroadenosine-3'-phosphate
  modified_base 15: mod_base = OTHER; note = 2'-O-methyladenosine-3'-phosphate
  modified_base 16: mod_base = OTHER; note = 2'-deoxy-2'-fluoroadenosine-3'-phosphate
  modified_base 17: mod_base = OTHER; note = 2'-O-methyluridine-3'-phosphate
  modified_base 18: mod_base = OTHER; note = 2'-O-methyladenosine-3'-phosphate
  modified_base 19: mod_base = OTHER; note = 2'-O-methylcytidine-3'-phosphate
  modified_base 20: mod_base = OTHER; note = 2'-O-methyladenosine-3'-phosphate
  modified_base 21: mod_base = OTHER; note = 2'-O-methylguanosine-3'-phosphate
  modified_base 22: mod_base = OTHER; note = 2'-O-methyluridine-3'-phosphate
  modified_base 23: mod_base = OTHER; note = 2'-O-methylcytidine
tccaatgatcaggaaatacagtc

SEQ ID NO: 5823 - RNA, 23 nt, synthetic construct
  source 1..23: mol_type = other RNA
  modified_base 1: mod_base = OTHER; note = 2'-O-methyluridine-3'-phosphate 5'-(E)-Vinylphosphonate
  modified_base 2: mod_base = OTHER; note = 2'-deoxy-2'-fluoroadenosine-3'-phosphate
  modified_base 3: mod_base = OTHER; note = 2'-O-methylcytidine-3'-phosphate
  modified_base 4: mod_base = OTHER; note = 2'-O-methylcytidine-3'-phosphate
  modified_base 5: mod_base = OTHER; note = 2'-O-methyladenosine-3'-phosphate
  modified_base 6: mod_base = OTHER; note = 2'-deoxy-2'-fluoroadenosine-3'-phosphate
  modified_base 7: mod_base = OTHER; note = 2'-O-methyluridine-3'-phosphate
  modified_base 8: mod_base = OTHER; note = 2'-O-methylguanosine-3'-phosphate
  modified_base 9: mod_base = OTHER; note = 2'-O-methyladenosine-3'-phosphate
  modified_base 10: mod_base = OTHER; note = 2'-O-methyluridine-3'-phosphate
  modified_base 11: mod_base = OTHER; note = 2'-O-methylcytidine-3'-phosphate
  modified_base 12: mod_base = OTHER; note = 2'-O-methyladenosine-3'-phosphate
  modified_base 13: mod_base = OTHER; note = 2'-O-methylguanosine-3'-phosphate
  modified_base 14: mod_base = OTHER; note = 2'-deoxy-2'-fluoroguanosine-3'-phosphate
  modified_base 15: mod_base = OTHER; note = 2'-O-methyladenosine-3'-phosphate
  modified_base 16: mod_base = OTHER; note = 2'-deoxy-2'-fluoroadenosine-3'-phosphate
  modified_base 17: mod_base = OTHER; note = 2'-O-methyladenosine-3'-phosphate
  modified_base 18: mod_base = OTHER; note = 2'-O-methyluridine-3'-phosphate
  modified_base 19: mod_base = OTHER; note = 2'-O-methyladenosine-3'-phosphate
  modified_base 20: mod_base = OTHER; note = 2'-O-methylcytidine-3'-phosphate
  modified_base 21: mod_base = OTHER; note = 2'-O-methyladenosine-3'-phosphate
  modified_base 22: mod_base = OTHER; note = 2'-O-methylguanosine-3'-phosphate
  modified_base 23: mod_base = OTHER; note = 2'-O-methyluridine
taccaatgatcaggaaatacagt

SEQ ID NO: 5824 - RNA, 23 nt, synthetic construct
  source 1..23: mol_type = other RNA
  modified_base 1: mod_base = OTHER; note = 2'-O-methyluridine-3'-phosphate 5'-(E)-Vinylphosphonate
  modified_base 2: mod_base = OTHER; note = 2'-deoxy-2'-fluoroguanosine-3'-phosphate
  modified_base 3: mod_base = OTHER; note = 2'-O-methyladenosine-3'-phosphate
  modified_base 4: mod_base = OTHER; note = 2'-O-methylcytidine-3'-phosphate
  modified_base 5: mod_base = OTHER; note = 2'-O-methylcytidine-3'-phosphate
  modified_base 6: mod_base = OTHER; note = 2'-deoxy-2'-fluoroadenosine-3'-phosphate
  modified_base 7: mod_base = OTHER; note = 2'-O-methyladenosine-3'-phosphate
  modified_base 8: mod_base = OTHER; note = 2'-O-methyluridine-3'-phosphate
  modified_base 9: mod_base = OTHER; note = 2'-O-methylguanosine-3'-phosphate
  modified_base 10: mod_base = OTHER; note = 2'-O-methyladenosine-3'-phosphate
  modified_base 11: mod_base = OTHER; note = 2'-O-methyluridine-3'-phosphate
  modified_base 12: mod_base = OTHER; note = 2'-O-methylcytidine-3'-phosphate
  modified_base 13: mod_base = OTHER; note = 2'-O-methyladenosine-3'-phosphate
  modified_base 14: mod_base = OTHER; note = 2'-deoxy-2'-fluoroguanosine-3'-phosphate
  modified_base 15: mod_base = OTHER; note = 2'-O-methylguanosine-3'-phosphate
  modified_base 16: mod_base = OTHER; note = 2'-deoxy-2'-fluoroadenosine-3'-phosphate
  modified_base 17: mod_base = OTHER; note = 2'-O-methyladenosine-3'-phosphate
  modified_base 18: mod_base = OTHER; note = 2'-O-methyladenosine-3'-phosphate
  modified_base 19: mod_base = OTHER; note = 2'-O-methyluridine-3'-phosphate
  modified_base 20: mod_base = OTHER; note = 2'-O-methyladenosine-3'-phosphate
  modified_base 21: mod_base = OTHER; note = 2'-O-methylcytidine-3'-phosphate
  modified_base 22: mod_base = OTHER; note = 2'-O-methyladenosine-3'-phosphate
  modified_base 23: mod_base = OTHER; note = 2'-O-methylguanosine
tgaccaatgatcaggaaatacag

SEQ ID NO: 5825 - RNA, 23 nt, synthetic construct
  source 1..23: mol_type = other RNA
  modified_base 1: mod_base = OTHER; note = 2'-O-methyluridine-3'-phosphate 5'-(E)-Vinylphosphonate
  modified_base 2: mod_base = OTHER; note = 2'-deoxy-2'-fluorouridine-3'-phosphate
  modified_base 3: mod_base = OTHER; note = 2'-O-methylguanosine-3'-phosphate
  modified_base 4: mod_base = OTHER; note = 2'-O-methylguanosine-3'-phosphate
  modified_base 5: mod_base = OTHER; note = 2'-O-methylguanosine-3'-phosphate
  modified_base 6: mod_base = OTHER; note = 2'-deoxy-2'-fluorouridine-3'-phosphate
  modified_base 7: mod_base = OTHER; note = 2'-O-methyladenosine-3'-phosphate
  modified_base 8: mod_base = OTHER; note = 2'-O-methyluridine-3'-phosphate
  modified_base 9: mod_base = OTHER; note = 2'-O-methyladenosine-3'-phosphate
  modified_base 10: mod_base = OTHER; note = 2'-O-methyladenosine-3'-phosphate
  modified_base 11: mod_base = OTHER; note = 2'-O-methylguanosine-3'-phosphate
  modified_base 12: mod_base = OTHER; note = 2'-O-methylguanosine-3'-phosphate
  modified_base 13: mod_base = OTHER; note = 2'-O-methylguanosine-3'-phosphate
  modified_base 14: mod_base = OTHER; note = 2'-deoxy-2'-fluorouridine-3'-phosphate
  modified_base 15: mod_base = OTHER; note = 2'-O-methyladenosine-3'-phosphate
  modified_base 16: mod_base = OTHER; note = 2'-deoxy-2'-fluoroadenosine-3'-phosphate
  modified_base 17: mod_base = OTHER; note = 2'-O-methyluridine-3'-phosphate
  modified_base 18: mod_base = OTHER; note = 2'-O-methylcytidine-3'-phosphate
  modified_base 19: mod_base = OTHER; note = 2'-O-methyluridine-3'-phosphate
  modified_base 20: mod_base = OTHER; note = 2'-O-methylcytidine-3'-phosphate
  modified_base 21: mod_base = OTHER; note = 2'-O-methylcytidine-3'-phosphate
  modified_base 22: mod_base = OTHER; note = 2'-O-methyluridine-3'-phosphate
  modified_base 23: mod_base = OTHER; note = 2'-O-methyladenosine
ttgggtataagggtaatctccta

SEQ ID NO: 5826 - RNA, 23 nt, synthetic construct
  source 1..23: mol_type = other RNA
  modified_base 1: mod_base = OTHER; note = 2'-O-methyluridine-3'-phosphate 5'-(E)-Vinylphosphonate
  modified_base 2: mod_base = OTHER; note = 2'-deoxy-2'-fluoroadenosine-3'-phosphate
  modified_base 3: mod_base = OTHER; note = 2'-O-methylguanosine-3'-phosphate
  modified_base 4: mod_base = OTHER; note = 2'-O-methyluridine-3'-phosphate
  modified_base 5: mod_base = OTHER; note = 2'-O-methyluridine-3'-phosphate
  modified_base 6: mod_base = OTHER; note = 2'-deoxy-2'-fluoroguanosine-3'-phosphate
  modified_base 7: mod_base = OTHER; note = 2'-O-methylguanosine-3'-phosphate
  modified_base 8: mod_base = OTHER; note = 2'-O-methyladenosine-3'-phosphate
  modified_base 9: mod_base = OTHER; note = 2'-O-methyluridine-3'-phosphate
  modified_base 10: mod_base = OTHER; note = 2'-O-methyluridine-3'-phosphate
  modified_base 11: mod_base = OTHER; note = 2'-O-methyluridine-3'-phosphate
  modified_base 12: mod_base = OTHER; note = 2'-O-methyluridine-3'-phosphate
  modified_base 13: mod_base = OTHER; note = 2'-O-methyladenosine-3'-phosphate
  modified_base 14: mod_base = OTHER; note = 2'-deoxy-2'-fluoroguanosine-3'-phosphate
  modified_base 15: mod_base = OTHER; note = 2'-O-methylcytidine-3'-phosphate
  modified_base 16: mod_base = OTHER; note = 2'-deoxy-2'-fluorocytidine-3'-phosphate
  modified_base 17: mod_base = OTHER; note = 2'-O-methylcytidine-3'-phosphate
  modified_base 18: mod_base = OTHER; note = 2'-O-methylguanosine-3'-phosphate
  modified_base 19: mod_base = OTHER; note = 2'-O-methylcytidine-3'-phosphate
  modified_base 20: mod_base = OTHER; note = 2'-O-methyladenosine-3'-phosphate
  modified_base 21: mod_base = OTHER; note = 2'-O-methylcytidine-3'-phosphate
  modified_base 22: mod_base = OTHER; note = 2'-O-methylcytidine-3'-phosphate
  modified_base 23: mod_base = OTHER; note = 2'-O-methyluridine
tagttggattttagcccgcacct

SEQ ID NO: 5827 - RNA, 23 nt, synthetic construct
  source 1..23: mol_type = other RNA
  modified_base 1: mod_base = OTHER; note = 2'-O-methyluridine-3'-phosphate 5'-(E)-Vinylphosphonate
  modified_base 2: mod_base = OTHER; note = 2'-deoxy-2'-fluorocytidine-3'-phosphate
  modified_base 3: mod_base = OTHER; note = 2'-O-methyladenosine-3'-phosphate
  modified_base 4: mod_base = OTHER; note = 2'-O-methylguanosine-3'-phosphate
  modified_base 5: mod_base = OTHER; note = 2'-O-methyluridine-3'-phosphate
  modified_base 6: mod_base = OTHER; note = 2'-deoxy-2'-fluorouridine-3'-phosphate
  modified_base 7: mod_base = OTHER; note = 2'-O-methylguanosine-3'-phosphate
  modified_base 8: mod_base = OTHER; note = 2'-O-methylguanosine-3'-phosphate
  modified_base 9: mod_base = OTHER; note = 2'-O-methyladenosine-3'-phosphate
  modified_base 10: mod_base = OTHER; note = 2'-O-methyluridine-3'-phosphate
  modified_base 11: mod_base = OTHER; note = 2'-O-methyluridine-3'-phosphate
  modified_base 12: mod_base = OTHER; note = 2'-O-methyluridine-3'-phosphate
  modified_base 13: mod_base = OTHER; note = 2'-O-methyluridine-3'-phosphate
  modified_base 14: mod_base = OTHER; note = 2'-deoxy-2'-fluoroadenosine-3'-phosphate
  modified_base 15: mod_base = OTHER; note = 2'-O-methylguanosine-3'-phosphate
  modified_base 16: mod_base = OTHER; note = 2'-deoxy-2'-fluorocytidine-3'-phosphate
  modified_base 17: mod_base = OTHER; note = 2'-O-methylcytidine-3'-phosphate
  modified_base 18: mod_base = OTHER; note = 2'-O-methylcytidine-3'-phosphate
  modified_base 19: mod_base = OTHER; note = 2'-O-methylguanosine-3'-phosphate
  modified_base 20: mod_base = OTHER; note = 2'-O-methylcytidine-3'-phosphate
  modified_base 21: mod_base = OTHER; note = 2'-O-methyladenosine-3'-phosphate
  modified_base 22: mod_base = OTHER; note = 2'-O-methylcytidine-3'-phosphate
  modified_base 23: mod_base = OTHER; note = 2'-O-methylcytidine
tcagttggattttagcccgcacc

SEQ ID NO: 5828 - RNA, 23 nt, synthetic construct
  source 1..23: mol_type = other RNA
  modified_base 1: mod_base = OTHER; note = 2'-O-methyluridine-3'-phosphate 5'-(E)-Vinylphosphonate
  modified_base 2: mod_base = OTHER; note = 2'-deoxy-2'-fluoroguanosine-3'-phosphate
  modified_base 3: mod_base = OTHER; note = 2'-O-methylcytidine-3'-phosphate
  modified_base 4: mod_base = OTHER; note = 2'-O-methyladenosine-3'-phosphate
  modified_base 5: mod_base = OTHER; note = 2'-O-methylguanosine-3'-phosphate
  modified_base 6: mod_base = OTHER; note = 2'-deoxy-2'-fluorouridine-3'-phosphate
  modified_base 7: mod_base = OTHER; note = 2'-O-methyluridine-3'-phosphate
  modified_base 8: mod_base = OTHER; note = 2'-O-methylguanosine-3'-phosphate
  modified_base 9: mod_base = OTHER; note = 2'-O-methylguanosine-3'-phosphate
  modified_base 10: mod_base = OTHER; note = 2'-O-methyladenosine-3'-phosphate
  modified_base 11: mod_base = OTHER; note = 2'-O-methyluridine-3'-phosphate
  modified_base 12: mod_base = OTHER; note = 2'-O-methyluridine-3'-phosphate
  modified_base 13: mod_base = OTHER; note = 2'-O-methyluridine-3'-phosphate
  modified_base 14: mod_base = OTHER; note = 2'-deoxy-2'-fluorouridine-3'-phosphate
  modified_base 15: mod_base = OTHER; note = 2'-O-methyladenosine-3'-phosphate
  modified_base 16: mod_base = OTHER; note = 2'-deoxy-2'-fluoroguanosine-3'-phosphate
  modified_base 17: mod_base = OTHER; note = 2'-O-methylcytidine-3'-phosphate
  modified_base 18: mod_base = OTHER; note = 2'-O-methylcytidine-3'-phosphate
  modified_base 19: mod_base = OTHER; note = 2'-O-methylcytidine-3'-phosphate
  modified_base 20: mod_base = OTHER; note = 2'-O-methylguanosine-3'-phosphate
  modified_base 21: mod_base = OTHER; note = 2'-O-methylcytidine-3'-phosphate
  modified_base 22: mod_base = OTHER; note = 2'-O-methyladenosine-3'-phosphate
  modified_base 23: mod_base = OTHER; note = 2'-O-methylcytidine
tgcagttggattttagcccgcac

SEQ ID NO: 5829 - RNA, 23 nt, synthetic construct
  source 1..23: mol_type = other RNA
  modified_base 1: mod_base = OTHER; note = 2'-O-methyluridine-3'-phosphate 5'-(E)-Vinylphosphonate
  modified_base 2: mod_base = OTHER; note = 2'-deoxy-2'-fluorouridine-3'-phosphate
  modified_base 3: mod_base = OTHER; note = 2'-O-methylguanosine-3'-phosphate
  modified_base 4: mod_base = OTHER; note = 2'-O-methylcytidine-3'-phosphate
  modified_base 5: mod_base = OTHER; note = 2'-O-methyladenosine-3'-phosphate
  modified_base 6: mod_base = OTHER; note = 2'-deoxy-2'-fluoroguanosine-3'-phosphate
  modified_base 7: mod_base = OTHER; note = 2'-O-methyluridine-3'-phosphate
  modified_base 8: mod_base = OTHER; note = 2'-O-methyluridine-3'-phosphate
  modified_base 9: mod_base = OTHER; note = 2'-O-methylguanosine-3'-phosphate
  modified_base 10: mod_base = OTHER; note = 2'-O-methylguanosine-3'-phosphate
  modified_base 11: mod_base = OTHER; note = 2'-O-methyladenosine-3'-phosphate
  modified_base 12: mod_base = OTHER; note = 2'-O-methyluridine-3'-phosphate
  modified_base 13: mod_base = OTHER; note = 2'-O-methyluridine-3'-phosphate
  modified_base 14: mod_base = OTHER; note = 2'-deoxy-2'-fluorouridine-3'-phosphate
  modified_base 15: mod_base = OTHER; note = 2'-O-methyluridine-3'-phosphate
  modified_base 16: mod_base = OTHER; note = 2'-deoxy-2'-fluoroadenosine-3'-phosphate
  modified_base 17: mod_base = OTHER; note = 2'-O-methylguanosine-3'-phosphate
  modified_base 18: mod_base = OTHER; note = 2'-O-methylcytidine-3'-phosphate
  modified_base 19: mod_base = OTHER; note = 2'-O-methylcytidine-3'-phosphate
  modified_base 20: mod_base = OTHER; note = 2'-O-methylcytidine-3'-phosphate
  modified_base 21: mod_base = OTHER; note = 2'-O-methylguanosine-3'-phosphate
  modified_base 22: mod_base = OTHER; note = 2'-O-methylcytidine-3'-phosphate
  modified_base 23: mod_base = OTHER; note = 2'-O-methyladenosine
ttgcagttggattttagcccgca

SEQ ID NO: 5830 - RNA, 23 nt, synthetic construct
  source 1..23: mol_type = other RNA
  modified_base 1: mod_base = OTHER; note = 2'-O-methyluridine-3'-phosphate 5'-(E)-Vinylphosphonate
  modified_base 2: mod_base = OTHER; note = 2'-deoxy-2'-fluorouridine-3'-phosphate
  modified_base 3: mod_base = OTHER; note = 2'-O-methyluridine-3'-phosphate
  modified_base 4: mod_base = OTHER; note = 2'-O-methylguanosine-3'-phosphate
  modified_base 5: mod_base = OTHER; note = 2'-O-methylcytidine-3'-phosphate
  modified_base 6: mod_base = OTHER; note = 2'-deoxy-2'-fluoroadenosine-3'-phosphate
  modified_base 7: mod_base = OTHER; note = 2'-O-methylguanosine-3'-phosphate
  modified_base 8: mod_base = OTHER; note = 2'-O-methyluridine-3'-phosphate
  modified_base 9: mod_base = OTHER; note = 2'-O-methyluridine-3'-phosphate
  modified_base 10: mod_base = OTHER; note = 2'-O-methylguanosine-3'-phosphate
  modified_base 11: mod_base = OTHER; note = 2'-O-methylguanosine-3'-phosphate
  modified_base 12: mod_base = OTHER; note = 2'-O-methyladenosine-3'-phosphate
  modified_base 13: mod_base = OTHER; note = 2'-O-methyluridine-3'-phosphate
  modified_base 14: mod_base = OTHER; note = 2'-deoxy-2'-fluorouridine-3'-phosphate
  modified_base 15: mod_base = OTHER; note = 2'-O-methyluridine-3'-phosphate
  modified_base 16: mod_base = OTHER; note = 2'-deoxy-2'-fluorouridine-3'-phosphate
  modified_base 17: mod_base = OTHER; note = 2'-O-methyladenosine-3'-phosphate
  modified_base 18: mod_base = OTHER; note = 2'-O-methylguanosine-3'-phosphate
  modified_base 19: mod_base = OTHER; note = 2'-O-methylcytidine-3'-phosphate
  modified_base 20: mod_base = OTHER; note = 2'-O-methylcytidine-3'-phosphate
  modified_base 21: mod_base = OTHER; note = 2'-O-methylcytidine-3'-phosphate
  modified_base 22: mod_base = OTHER; note = 2'-O-methylguanosine-3'-phosphate
  modified_base 23: mod_base = OTHER; note = 2'-O-methylcytidine
tttgcagttggattttagcccgc

SEQ ID NO: 5831 - RNA, 23 nt, synthetic construct
  source 1..23: mol_type = other RNA
  modified_base 1: mod_base = OTHER; note = 2'-O-methyluridine-3'-phosphate 5'-(E)-Vinylphosphonate
  modified_base 2: mod_base = OTHER; note = 2'-deoxy-2'-fluoroadenosine-3'-phosphate
  modified_base 3: mod_base = OTHER; note = 2'-O-methyluridine-3'-phosphate
  modified_base 4: mod_base = OTHER; note = 2'-O-methyluridine-3'-phosphate
  modified_base 5: mod_base = OTHER; note = 2'-O-methylguanosine-3'-phosphate
  modified_base 6: mod_base = OTHER; note = 2'-deoxy-2'-fluorocytidine-3'-phosphate
  modified_base 7: mod_base = OTHER; note = 2'-O-methyladenosine-3'-phosphate
  modified_base 8: mod_base = OTHER; note = 2'-O-methylguanosine-3'-phosphate
  modified_base 9: mod_base = OTHER; note = 2'-O-methyluridine-3'-phosphate
  modified_base 10: mod_base = OTHER; note = 2'-O-methyluridine-3'-phosphate
  modified_base 11: mod_base = OTHER; note = 2'-O-methylguanosine-3'-phosphate
  modified_base 12: mod_base = OTHER; note = 2'-O-methylguanosine-3'-phosphate
  modified_base 13: mod_base = OTHER; note = 2'-O-methyladenosine-3'-phosphate
  modified_base 14: mod_base = OTHER; note = 2'-deoxy-2'-fluorouridine-3'-phosphate
  modified_base 15: mod_base = OTHER; note = 2'-O-methyluridine-3'-phosphate
  modified_base 16: mod_base = OTHER; note = 2'-deoxy-2'-fluorouridine-3'-phosphate
  modified_base 17: mod_base = OTHER; note = 2'-O-methyluridine-3'-phosphate
  modified_base 18: mod_base = OTHER; note = 2'-O-methyladenosine-3'-phosphate
  modified_base 19: mod_base = OTHER; note = 2'-O-methylguanosine-3'-phosphate
  modified_base 20: mod_base = OTHER; note = 2'-O-methylcytidine-3'-phosphate
  modified_base 21: mod_base = OTHER; note = 2'-O-methylcytidine-3'-phosphate
  modified_base 22: mod_base = OTHER; note = 2'-O-methylcytidine-3'-phosphate
  modified_base 23: mod_base = OTHER; note = 2'-O-methylguanosine
tattgcagttggattttagcccg

SEQ ID NO: 5832 - RNA, 23 nt, synthetic construct
  source 1..23: mol_type = other RNA
  modified_base 1: mod_base = OTHER; note = 2'-O-methyluridine-3'-phosphate 5'-(E)-Vinylphosphonate
  modified_base 2: mod_base = OTHER; note = 2'-deoxy-2'-fluoroadenosine-3'-phosphate
  modified_base 3: mod_base = OTHER; note = 2'-O-methyladenosine-3'-phosphate
  modified_base 4: mod_base = OTHER; note = 2'-O-methyluridine-3'-phosphate
  modified_base 5: mod_base = OTHER; note = 2'-O-methyluridine-3'-phosphate
  modified_base 6: mod_base = OTHER; note = 2'-deoxy-2'-fluoroguanosine-3'-phosphate
  modified_base 7: mod_base = OTHER; note = 2'-O-methylcytidine-3'-phosphate
  modified_base 8: mod_base = OTHER; note = 2'-O-methyladenosine-3'-phosphate
  modified_base 9: mod_base = OTHER; note = 2'-O-methylguanosine-3'-phosphate
  modified_base 10: mod_base = OTHER; note = 2'-O-methyluridine-3'-phosphate
  modified_base 11: mod_base = OTHER; note = 2'-O-methyluridine-3'-phosphate
  modified_base 12: mod_base = OTHER; note = 2'-O-methylguanosine-3'-phosphate
  modified_base 13: mod_base = OTHER; note = 2'-O-methylguanosine-3'-phosphate
  modified_base 14: mod_base = OTHER; note = 2'-deoxy-2'-fluoroadenosine-3'-phosphate
  modified_base 15: mod_base = OTHER; note = 2'-O-methyluridine-3'-phosphate
  modified_base 16: mod_base = OTHER; note = 2'-deoxy-2'-fluorouridine-3'-phosphate
  modified_base 17: mod_base = OTHER; note = 2'-O-methyluridine-3'-phosphate
  modified_base 18: mod_base = OTHER; note = 2'-O-methyluridine-3'-phosphate
  modified_base 19: mod_base = OTHER; note = 2'-O-methyladenosine-3'-phosphate
  modified_base 20: mod_base = OTHER; note = 2'-O-methylguanosine-3'-phosphate
  modified_base 21: mod_base = OTHER; note = 2'-O-methylcytidine-3'-phosphate
  modified_base 22: mod_base = OTHER; note = 2'-O-methylcytidine-3'-phosphate
  modified_base 23: mod_base = OTHER; note = 2'-O-methylcytidine
taattgcagttggattttagccc

SEQ ID NO: 5833 - RNA, 23 nt, synthetic construct
  source 1..23: mol_type = other RNA
  modified_base 1: mod_base = OTHER; note = 2'-O-methyluridine-3'-phosphate 5'-(E)-Vinylphosphonate
  modified_base 2: mod_base = OTHER; note = 2'-deoxy-2'-fluorocytidine-3'-phosphate
  modified_base 3: mod_base = OTHER; note = 2'-O-methyladenosine-3'-phosphate
  modified_base 4: mod_base = OTHER; note = 2'-O-methyladenosine-3'-phosphate
  modified_base 5: mod_base = OTHER; note = 2'-O-methyluridine-3'-phosphate
  modified_base 6: mod_base = OTHER; note = 2'-deoxy-2'-fluorouridine-3'-phosphate
  modified_base 7: mod_base = OTHER; note = 2'-O-methylguanosine-3'-phosphate
  modified_base 8: mod_base = OTHER; note = 2'-O-methylcytidine-3'-phosphate
  modified_base 9: mod_base = OTHER; note = 2'-O-methyladenosine-3'-phosphate
  modified_base 10: mod_base = OTHER; note = 2'-O-methylguanosine-3'-phosphate
  modified_base 11: mod_base = OTHER; note = 2'-O-methyluridine-3'-phosphate
  modified_base 12: mod_base = OTHER; note = 2'-O-methyluridine-3'-phosphate
  modified_base 13: mod_base = OTHER; note = 2'-O-methylguanosine-3'-phosphate
  modified_base 14: mod_base = OTHER; note = 2'-deoxy-2'-fluoroguanosine-3'-phosphate
  modified_base 15: mod_base = OTHER; note = 2'-O-methyladenosine-3'-phosphate
  modified_base 16: mod_base = OTHER; note = 2'-deoxy-2'-fluorouridine-3'-phosphate
  modified_base 17: mod_base = OTHER; note = 2'-O-methyluridine-3'-phosphate
  modified_base 18: mod_base = OTHER; note = 2'-O-methyluridine-3'-phosphate
  modified_base 19: mod_base = OTHER; note = 2'-O-methyluridine-3'-phosphate
  modified_base 20: mod_base = OTHER; note = 2'-O-methyladenosine-3'-phosphate
  modified_base 21: mod_base = OTHER; note = 2'-O-methylguanosine-3'-phosphate
  modified_base 22: mod_base = OTHER; note = 2'-O-methylcytidine-3'-phosphate
  modified_base 23: mod_base = OTHER; note = 2'-O-methylcytidine
tcaattgcagttggattttagcc

SEQ ID NO: 5834 - RNA, 23 nt, synthetic construct
  source 1..23: mol_type = other RNA
  modified_base 1: mod_base = OTHER; note = 2'-O-methyluridine-3'-phosphate 5'-(E)-Vinylphosphonate
  modified_base 2: mod_base = OTHER; note = 2'-deoxy-2'-fluorocytidine-3'-phosphate
  modified_base 3: mod_base = OTHER; note = 2'-O-methylcytidine-3'-phosphate
  modified_base 4: mod_base = OTHER; note = 2'-O-methyladenosine-3'-phosphate
  modified_base 5: mod_base = OTHER; note = 2'-O-methyladenosine-3'-phosphate
  modified_base 6: mod_base = OTHER; note = 2'-deoxy-2'-fluorouridine-3'-phosphate
  modified_base 7: mod_base = OTHER; note = 2'-O-methyluridine-3'-phosphate
  modified_base 8: mod_base = OTHER; note = 2'-O-methylguanosine-3'-phosphate
  modified_base 9: mod_base = OTHER; note = 2'-O-methylcytidine-3'-phosphate
  modified_base 10: mod_base = OTHER; note = 2'-O-methyladenosine-3'-phosphate
  modified_base 11: mod_base = OTHER; note = 2'-O-methylguanosine-3'-phosphate
  modified_base 12: mod_base = OTHER; note = 2'-O-methyluridine-3'-phosphate
  modified_base 13: mod_base = OTHER; note = 2'-O-methyluridine-3'-phosphate
  modified_base 14: mod_base = OTHER; note = 2'-deoxy-2'-fluoroguanosine-3'-phosphate
  modified_base 15: mod_base = OTHER; note = 2'-O-methylguanosine-3'-phosphate
  modified_base 16: mod_base = OTHER; note = 2'-deoxy-2'-fluoroadenosine-3'-phosphate
  modified_base 17: mod_base = OTHER; note = 2'-O-methyluridine-3'-phosphate
  modified_base 18: mod_base = OTHER; note = 2'-O-methyluridine-3'-phosphate
  modified_base 19: mod_base = OTHER; note = 2'-O-methyluridine-3'-phosphate
  modified_base 20: mod_base = OTHER; note = 2'-O-methyluridine-3'-phosphate
  modified_base 21: mod_base = OTHER; note = 2'-O-methyladenosine-3'-phosphate
  modified_base 22: mod_base = OTHER; note = 2'-O-methylguanosine-3'-phosphate
  modified_base 23: mod_base = OTHER; note = 2'-O-methylcytidine
tccaattgcagttggattttagc

SEQ ID NO: 5835 - RNA, 23 nt, synthetic construct
  source 1..23: mol_type = other RNA
  modified_base 1: mod_base = OTHER; note = 2'-O-methyluridine-3'-phosphate 5'-(E)-Vinylphosphonate
  modified_base 2: mod_base = OTHER; note = 2'-deoxy-2'-fluoroguanosine-3'-phosphate
  modified_base 3: mod_base = OTHER; note = 2'-O-methylcytidine-3'-phosphate
  modified_base 4: mod_base = OTHER; note = 2'-O-methylcytidine-3'-phosphate
  modified_base 5: mod_base = OTHER; note = 2'-O-methyladenosine-3'-phosphate
  modified_base 6: mod_base = OTHER; note = 2'-deoxy-2'-fluoroadenosine-3'-phosphate
  modified_base 7: mod_base = OTHER; note = 2'-O-methyluridine-3'-phosphate
  modified_base 8: mod_base = OTHER; note = 2'-O-methyluridine-3'-phosphate
  modified_base 9: mod_base = OTHER; note = 2'-O-methylguanosine-3'-phosphate
  modified_base 10: mod_base = OTHER; note = 2'-O-methylcytidine-3'-phosphate
  modified_base 11: mod_base = OTHER; note = 2'-O-methyladenosine-3'-phosphate
  modified_base 12: mod_base = OTHER; note = 2'-O-methylguanosine-3'-phosphate
  modified_base 13: mod_base = OTHER; note = 2'-O-methyluridine-3'-phosphate
  modified_base 14: mod_base = OTHER; note = 2'-deoxy-2'-fluorouridine-3'-phosphate
  modified_base 15: mod_base = OTHER; note = 2'-O-methylguanosine-3'-phosphate
  modified_base 16: mod_base = OTHER; note = 2'-deoxy-2'-fluoroguanosine-3'-phosphate
  modified_base 17: mod_base = OTHER; note = 2'-O-methyladenosine-3'-phosphate
  modified_base 18: mod_base = OTHER; note = 2'-O-methyluridine-3'-phosphate
  modified_base 19: mod_base = OTHER; note = 2'-O-methyluridine-3'-phosphate
  modified_base 20: mod_base = OTHER; note = 2'-O-methyluridine-3'-phosphate
  modified_base 21: mod_base = OTHER; note = 2'-O-methyluridine-3'-phosphate
  modified_base 22: mod_base = OTHER; note = 2'-O-methyladenosine-3'-phosphate
  modified_base 23: mod_base = OTHER; note = 2'-O-methylguanosine
tgccaattgcagttggattttag

SEQ ID NO: 5836 - RNA, 23 nt, synthetic construct
  source 1..23: mol_type = other RNA
  modified_base 1: mod_base = OTHER; note = 2'-O-methyluridine-3'-phosphate 5'-(E)-Vinylphosphonate
  modified_base 2: mod_base = OTHER; note = 2'-deoxy-2'-fluoroadenosine-3'-phosphate
  modified_base 3: mod_base = OTHER; note = 2'-O-methylguanosine-3'-phosphate
  modified_base 4: mod_base = OTHER; note = 2'-O-methylcytidine-3'-phosphate
  modified_base 5: mod_base = OTHER; note = 2'-O-methylcytidine-3'-phosphate
  modified_base 6: mod_base = OTHER; note = 2'-deoxy-2'-fluoroadenosine-3'-phosphate
  modified_base 7: mod_base = OTHER; note = 2'-O-methyladenosine-3'-phosphate
  modified_base 8: mod_base = OTHER; note = 2'-O-methyluridine-3'-phosphate
  modified_base 9: mod_base = OTHER; note = 2'-O-methyluridine-3'-phosphate
  modified_base 10: mod_base = OTHER; note = 2'-O-methylguanosine-3'-phosphate
  modified_base 11: mod_base = OTHER; note = 2'-O-methylcytidine-3'-phosphate
  modified_base 12: mod_base = OTHER; note = 2'-O-methyladenosine-3'-phosphate
  modified_base 13: mod_base = OTHER; note = 2'-O-methylguanosine-3'-phosphate
  modified_base 14: mod_base = OTHER; note = 2'-deoxy-2'-fluorouridine-3'-phosphate
  modified_base 15: mod_base = OTHER; note = 2'-O-methyluridine-3'-phosphate
  modified_base 16: mod_base = OTHER; note = 2'-deoxy-2'-fluoroguanosine-3'-phosphate
  modified_base 17: mod_base = OTHER; note = 2'-O-methylguanosine-3'-phosphate
  modified_base 18: mod_base = OTHER; note = 2'-O-methyladenosine-3'-phosphate
  modified_base 19: mod_base = OTHER; note = 2'-O-methyluridine-3'-phosphate
  modified_base 20: mod_base = OTHER; note = 2'-O-methyluridine-3'-phosphate
  modified_base 21: mod_base = OTHER; note = 2'-O-methyluridine-3'-phosphate
  modified_base 22: mod_base = OTHER; note = 2'-O-methyluridine-3'-phosphate
  modified_base 23: mod_base = OTHER; note = 2'-O-methyladenosine
tagccaattgcagttggatttta

SEQ ID NO: 5837 - RNA, 23 nt, synthetic construct
  source 1..23: mol_type = other RNA
  modified_base 1: mod_base = OTHER; note = 2'-O-methyluridine-3'-phosphate 5'-(E)-Vinylphosphonate
  modified_base 2: mod_base = OTHER; note = 2'-deoxy-2'-fluoroguanosine-3'-phosphate
  modified_base 3: mod_base = OTHER; note = 2'-O-methyladenosine-3'-phosphate
  modified_base 4: mod_base = OTHER; note = 2'-O-methylguanosine-3'-phosphate
  modified_base 5: mod_base = OTHER; note = 2'-O-methylcytidine-3'-phosphate
  modified_base 6: mod_base = OTHER; note = 2'-deoxy-2'-fluorocytidine-3'-phosphate
  modified_base 7: mod_base = OTHER; note = 2'-O-methyladenosine-3'-phosphate
  modified_base 8: mod_base = OTHER; note = 2'-O-methyladenosine-3'-phosphate
  modified_base 9: mod_base = OTHER; note = 2'-O-methyluridine-3'-phosphate
  modified_base 10: mod_base = OTHER; note = 2'-O-methyluridine-3'-phosphate
  modified_base 11: mod_base = OTHER; note = 2'-O-methylguanosine-3'-phosphate
  modified_base 12: mod_base = OTHER; note = 2'-O-methylcytidine-3'-phosphate
  modified_base 13: mod_base = OTHER; note = 2'-O-methyladenosine-3'-phosphate
  modified_base 14: mod_base = OTHER; note = 2'-deoxy-2'-fluoroguanosine-3'-phosphate
  modified_base 15: mod_base = OTHER; note = 2'-O-methyluridine-3'-phosphate
  modified_base 16: mod_base = OTHER; note = 2'-deoxy-2'-fluorouridine-3'-phosphate
  modified_base 17: mod_base = OTHER; note = 2'-O-methylguanosine-3'-phosphate
  modified_base 18: mod_base = OTHER; note = 2'-O-methylguanosine-3'-phosphate
  modified_base 19: mod_base = OTHER; note = 2'-O-methyladenosine-3'-phosphate
  modified_base 20: mod_base = OTHER; note = 2'-O-methyluridine-3'-phosphate
  modified_base 21: mod_base = OTHER; note = 2'-O-methyluridine-3'-phosphate
  modified_base 22: mod_base = OTHER; note = 2'-O-methyluridine-3'-phosphate
  modified_base 23: mod_base = OTHER; note = 2'-O-methyluridine
tgagccaattgcagttggatttt

SEQ ID NO: 5838 - RNA, 23 nt, synthetic construct
  source 1..23: mol_type = other RNA
  modified_base 1: mod_base = OTHER; note = 2'-O-methyluridine-3'-phosphate 5'-(E)-Vinylphosphonate
  modified_base 2: mod_base = OTHER; note = 2'-deoxy-2'-fluoroguanosine-3'-phosphate
  modified_base 3: mod_base = OTHER; note = 2'-O-methylguanosine-3'-phosphate
  modified_base 4: mod_base = OTHER; note = 2'-O-methyladenosine-3'-phosphate
  modified_base 5: mod_base = OTHER; note = 2'-O-methylguanosine-3'-phosphate
  modified_base 6: mod_base = OTHER; note = 2'-deoxy-2'-fluorocytidine-3'-phosphate
  modified_base 7: mod_base = OTHER; note = 2'-O-methylcytidine-3'-phosphate
  modified_base 8: mod_base = OTHER; note = 2'-O-methyladenosine-3'-phosphate
  modified_base 9: mod_base = OTHER; note = 2'-O-methyladenosine-3'-phosphate
  modified_base 10: mod_base = OTHER; note = 2'-O-methyluridine-3'-phosphate
  modified_base 11: mod_base = OTHER; note = 2'-O-methyluridine-3'-phosphate
  modified_base 12: mod_base = OTHER; note = 2'-O-methylguanosine-3'-phosphate
  modified_base 13: mod_base = OTHER; note = 2'-O-methylcytidine-3'-phosphate
  modified_base 14: mod_base = OTHER; note = 2'-deoxy-2'-fluoroadenosine-3'-phosphate
  modified_base 15: mod_base = OTHER; note = 2'-O-methylguanosine-3'-phosphate
  modified_base 16: mod_base = OTHER; note = 2'-deoxy-2'-fluorouridine-3'-phosphate
  modified_base 17: mod_base = OTHER; note = 2'-O-methyluridine-3'-phosphate
  modified_base 18: mod_base = OTHER; note = 2'-O-methylguanosine-3'-phosphate
  modified_base 19: mod_base = OTHER; note = 2'-O-methylguanosine-3'-phosphate
  modified_base 20: mod_base = OTHER; note = 2'-O-methyladenosine-3'-phosphate
  modified_base 21: mod_base = OTHER; note = 2'-O-methyluridine-3'-phosphate
  modified_base 22: mod_base = OTHER; note = 2'-O-methyluridine-3'-phosphate
  modified_base 23: mod_base = OTHER; note = 2'-O-methyluridine
tggagccaattgcagttggattt

SEQ ID NO: 5839 - RNA, 23 nt, synthetic construct
  source 1..23: mol_type = other RNA
  modified_base 1: mod_base = OTHER; note = 2'-O-methyluridine-3'-phosphate 5'-(E)-Vinylphosphonate
  modified_base 2: mod_base = OTHER; note = 2'-deoxy-2'-fluoroguanosine-3'-phosphate
  modified_base 3: mod_base = OTHER; note = 2'-O-methylguanosine-3'-phosphate
  modified_base 4: mod_base = OTHER; note = 2'-O-methylguanosine-3'-phosphate
  modified_base 5: mod_base = OTHER; note = 2'-O-methyladenosine-3'-phosphate
  modified_base 6: mod_base = OTHER; note = 2'-deoxy-2'-fluoroguanosine-3'-phosphate
  modified_base 7: mod_base = OTHER; note = 2'-O-methylcytidine-3'-phosphate
  modified_base 8: mod_base = OTHER; note = 2'-O-methylcytidine-3'-phosphate
  modified_base 9: mod_base = OTHER; note = 2'-O-methyladenosine-3'-phosphate
  modified_base 10: mod_base = OTHER; note = 2'-O-methyladenosine-3'-phosphate
  modified_base 11: mod_base = OTHER; note = 2'-O-methyluridine-3'-phosphate
  modified_base 12: mod_base = OTHER; note = 2'-O-methyluridine-3'-phosphate
  modified_base 13: mod_base = OTHER; note = 2'-O-methylguanosine-3'-phosphate
  modified_base 14: mod_base = OTHER; note = 2'-deoxy-2'-fluorocytidine-3'-phosphate
  modified_base 15: mod_base = OTHER; note = 2'-O-methyladenosine-3'-phosphate
  modified_base 16: mod_base = OTHER; note = 2'-deoxy-2'-fluoroguanosine-3'-phosphate
  modified_base 17: mod_base = OTHER; note = 2'-O-methyluridine-3'-phosphate
  modified_base 18: mod_base = OTHER; note = 2'-O-methyluridine-3'-phosphate
  modified_base 19: mod_base = OTHER; note = 2'-O-methylguanosine-3'-phosphate
  modified_base 20: mod_base = OTHER; note = 2'-O-methylguanosine-3'-phosphate
  modified_base 21: mod_base = OTHER; note = 2'-O-methyladenosine-3'-phosphate
  modified_base 22: mod_base = OTHER; note = 2'-O-methyluridine-3'-phosphate
  modified_base 23: mod_base = OTHER; note = 2'-O-methyluridine
tgggagccaattgcagttggatt

SEQ ID NO: 5840 - RNA, 23 nt, synthetic construct
  source 1..23: mol_type = other RNA
  modified_base 1: mod_base = OTHER; note = 2'-O-methyluridine-3'-phosphate 5'-(E)-Vinylphosphonate
  modified_base 2: mod_base = OTHER; note = 2'-deoxy-2'-fluoroadenosine-3'-phosphate
  modified_base 3: mod_base = OTHER; note = 2'-O-methyladenosine-3'-phosphate
  modified_base 4: mod_base = OTHER; note = 2'-O-methylguanosine-3'-phosphate
  modified_base 5: mod_base = OTHER; note = 2'-O-methylcytidine-3'-phosphate
  modified_base 6: mod_base = OTHER; note = 2'-deoxy-2'-fluorocytidine-3'-phosphate
  modified_base 7: mod_base = OTHER; note = 2'-O-methyladenosine-3'-phosphate
  modified_base 8: mod_base = OTHER; note = 2'-O-methyladenosine-3'-phosphate
  modified_base 9: mod_base = OTHER; note = 2'-O-methyluridine-3'-phosphate
  modified_base 10: mod_base = OTHER; note = 2'-O-methyladenosine-3'-phosphate
  modified_base 11: mod_base = OTHER; note = 2'-O-methyladenosine-3'-phosphate
  modified_base 12: mod_base = OTHER; note = 2'-O-methylguanosine-3'-phosphate
  modified_base 13: mod_base = OTHER; note = 2'-O-methyladenosine-3'-phosphate
  modified_base 14: mod_base = OTHER; note = 2'-deoxy-2'-fluorouridine-3'-phosphate
  modified_base 15: mod_base = OTHER; note = 2'-O-methylguanosine-3'-phosphate
  modified_base 16: mod_base = OTHER; note = 2'-deoxy-2'-fluorocytidine-3'-phosphate
  modified_base 17: mod_base = OTHER; note = 2'-O-methyluridine-3'-phosphate
  modified_base 18: mod_base = OTHER; note = 2'-O-methyluridine-3'-phosphate
  modified_base 19: mod_base = OTHER; note = 2'-O-methylcytidine-3'-phosphate
  modified_base 20: mod_base = OTHER; note = 2'-O-methyluridine-3'-phosphate
  modified_base 21: mod_base = OTHER; note = 2'-O-methylcytidine-3'-phosphate
  modified_base 22: mod_base = OTHER; note = 2'-O-methyluridine-3'-phosphate
  modified_base 23: mod_base = OTHER; note = 2'-O-methylguanosine
taagccaataagatgcttctctg

SEQ ID NO: 5841 - RNA, 23 nt, synthetic construct
  source 1..23: mol_type = other RNA
  modified_base 1: mod_base = OTHER; note = 2'-O-methyluridine-3'-phosphate 5'-(E)-Vinylphosphonate
  modified_base 2: mod_base = OTHER; note = 2'-deoxy-2'-fluorouridine-3'-phosphate
  modified_base 3: mod_base = OTHER; note = 2'-O-methyladenosine-3'-phosphate
  modified_base 4: mod_base = OTHER; note = 2'-O-methyluridine-3'-phosphate
  modified_base 5: mod_base = OTHER; note = 2'-O-methyladenosine-3'-phosphate
  modified_base 6: mod_base = OTHER; note = 2'-deoxy-2'-fluoroadenosine-3'-phosphate
  modified_base 7: mod_base = OTHER; note = 2'-O-methylguanosine-3'-phosphate
  modified_base 8: mod_base = OTHER; note = 2'-O-methylcytidine-3'-phosphate
  modified_base 9: mod_base = OTHER; note = 2'-O-methylcytidine-3'-phosphate
  modified_base 10: mod_base = OTHER; note = 2'-O-methyladenosine-3'-phosphate
  modified_base 11: mod_base = OTHER; note = 2'-O-methyladenosine-3'-phosphate
  modified_base 12: mod_base = OTHER; note = 2'-O-methyluridine-3'-phosphate
  modified_base 13: mod_base = OTHER; note = 2'-O-methyladenosine-3'-phosphate
  modified_base 14: mod_base = OTHER; note = 2'-deoxy-2'-fluoroadenosine-3'-phosphate
  modified_base 15: mod_base = OTHER; note = 2'-O-methylguanosine-3'-phosphate
  modified_base 16: mod_base = OTHER; note = 2'-deoxy-2'-fluoroadenosine-3'-phosphate
  modified_base 17: mod_base = OTHER; note = 2'-O-methyluridine-3'-phosphate
  modified_base 18: mod_base = OTHER; note = 2'-O-methylguanosine-3'-phosphate
  modified_base 19: mod_base = OTHER; note = 2'-O-methylcytidine-3'-phosphate
  modified_base 20: mod_base = OTHER; note = 2'-O-methyluridine-3'-phosphate
  modified_base 21: mod_base = OTHER; note = 2'-O-methyluridine-3'-phosphate
  modified_base 22: mod_base = OTHER; note = 2'-O-methylcytidine-3'-phosphate
  modified_base 23: mod_base = OTHER; note = 2'-O-methyluridine
ttataagccaataagatgcttct

SEQ ID NO: 5842 - RNA, 23 nt, synthetic construct
  source 1..23: mol_type = other RNA
  modified_base 1: mod_base = OTHER; note = 2'-O-methyluridine-3'-phosphate 5'-(E)-Vinylphosphonate
  modified_base 2: mod_base = OTHER; note = 2'-deoxy-2'-fluoroadenosine-3'-phosphate
  modified_base 3: mod_base = OTHER; note = 2'-O-methyluridine-3'-phosphate
  modified_base 4: mod_base = OTHER; note = 2'-O-methyladenosine-3'-phosphate
  modified_base 5: mod_base = OTHER; note = 2'-O-methyluridine-3'-phosphate
  modified_base 6: mod_base = OTHER; note = 2'-deoxy-2'-fluoroadenosine-3'-phosphate
  modified_base 7: mod_base = OTHER; note = 2'-O-methyladenosine-3'-phosphate
  modified_base 8: mod_base = OTHER; note = 2'-O-methylguanosine-3'-phosphate
  modified_base 9: mod_base = OTHER; note = 2'-O-methylcytidine-3'-phosphate
  modified_base 10: mod_base = OTHER; note = 2'-O-methylcytidine-3'-phosphate
  modified_base 11: mod_base = OTHER; note = 2'-O-methyladenosine-3'-phosphate
  modified_base 12: mod_base = OTHER; note = 2'-O-methyladenosine-3'-phosphate
  modified_base 13: mod_base = OTHER; note = 2'-O-methyluridine-3'-phosphate
  modified_base 14: mod_base = OTHER; note = 2'-deoxy-2'-fluoroadenosine-3'-phosphate
  modified_base 15: mod_base = OTHER; note = 2'-O-methyladenosine-3'-phosphate
  modified_base 16: mod_base = OTHER; note = 2'-deoxy-2'-fluoroguanosine-3'-phosphate
  modified_base 17: mod_base = OTHER; note = 2'-O-methyladenosine-3'-phosphate
  modified_base 18: mod_base = OTHER; note = 2'-O-methyluridine-3'-phosphate
  modified_base 19: mod_base = OTHER; note = 2'-O-methylguanosine-3'-phosphate
  modified_base 20: mod_base = OTHER; note = 2'-O-methylcytidine-3'-phosphate
  modified_base 21: mod_base = OTHER; note = 2'-O-methyluridine-3'-phosphate
  modified_base 22: mod_base = OTHER; note = 2'-O-methyluridine-3'-phosphate
  modified_base 23: mod_base = OTHER; note = 2'-O-methylcytidine
tatataagccaataagatgcttc

SEQ ID NO: 5843 - RNA, 23 nt, synthetic construct
  source 1..23: mol_type = other RNA
  modified_base 1: mod_base = OTHER; note = 2'-O-methyluridine-3'-phosphate 5'-(E)-Vinylphosphonate
  modified_base 2: mod_base = OTHER; note = 2'-deoxy-2'-fluorouridine-3'-phosphate
  modified_base 3: mod_base = OTHER; note = 2'-O-methylcytidine-3'-phosphate
  modified_base 4: mod_base = OTHER; note = 2'-O-methyluridine-3'-phosphate
  modified_base 5: mod_base = OTHER; note = 2'-O-methylcytidine-3'-phosphate
  modified_base 6: mod_base = OTHER; note = 2'-deoxy-2'-fluoroadenosine-3'-phosphate
  modified_base 7: mod_base = OTHER; note = 2'-O-methyluridine-3'-phosphate
  modified_base 8: mod_base = OTHER; note = 2'-O-methyluridine-3'-phosphate
  modified_base 9: mod_base = OTHER; note = 2'-O-methyluridine-3'-phosphate
  modified_base 10: mod_base = OTHER; note = 2'-O-methyluridine-3'-phosphate
  modified_base 11: mod_base = OTHER; note = 2'-O-methylcytidine-3'-phosphate
  modified_base 12: mod_base = OTHER; note = 2'-O-methyluridine-3'-phosphate
  modified_base 13: mod_base = OTHER; note = 2'-O-methylguanosine-3'-phosphate
  modified_base 14: mod_base = OTHER; note = 2'-deoxy-2'-fluoroadenosine-3'-phosphate
  modified_base 15: mod_base = OTHER; note = 2'-O-methyladenosine-3'-phosphate
  modified_base 16: mod_base = OTHER; note = 2'-deoxy-2'-fluoroguanosine-3'-phosphate
  modified_base 17: mod_base = OTHER; note = 2'-O-methyladenosine-3'-phosphate
  modified_base 18: mod_base = OTHER; note = 2'-O-methyluridine-3'-phosphate
  modified_base 19: mod_base = OTHER; note = 2'-O-methylguanosine-3'-phosphate
  modified_base 20: mod_base = OTHER; note = 2'-O-methyluridine-3'-phosphate
  modified_base 21: mod_base = OTHER; note = 2'-O-methyladenosine-3'-phosphate
  modified_base 22: mod_base = OTHER; note = 2'-O-methyluridine-3'-phosphate
  modified_base 23: mod_base = OTHER; note = 2'-O-methyladenosine
ttctcattttctgaagatgtata

SEQ ID NO: 5844 - RNA, 23 nt, synthetic construct
  source 1..23: mol_type = other RNA
  modified_base 1: mod_base = OTHER; note = 2'-O-methyluridine-3'-phosphate 5'-(E)-Vinylphosphonate
  modified_base 2: mod_base = OTHER; note = 2'-deoxy-2'-fluorouridine-3'-phosphate
  modified_base 3: mod_base = OTHER; note = 2'-O-methyluridine-3'-phosphate
  modified_base 4: mod_base = OTHER; note = 2'-O-methylcytidine-3'-phosphate
  modified_base 5: mod_base = OTHER; note = 2'-O-methyluridine-3'-phosphate
  modified_base 6: mod_base = OTHER; note = 2'-deoxy-2'-fluorocytidine-3'-phosphate
  modified_base 7: mod_base = OTHER; note = 2'-O-methyladenosine-3'-phosphate
  modified_base 8: mod_base = OTHER; note = 2'-O-methyluridine-3'-phosphate
  modified_base 9: mod_base = OTHER; note = 2'-O-methyluridine-3'-phosphate
  modified_base 10: mod_base = OTHER; note = 2'-O-methyluridine-3'-phosphate
  modified_base 11: mod_base = OTHER; note = 2'-O-methyluridine-3'-phosphate
  modified_base 12: mod_base = OTHER; note = 2'-O-methylcytidine-3'-phosphate
  modified_base 13: mod_base = OTHER; note = 2'-O-methyluridine-3'-phosphate
  modified_base 14: mod_base = OTHER; note = 2'-deoxy-2'-fluoroguanosine-3'-phosphate
  modified_base 15: mod_base = OTHER; note = 2'-O-methyladenosine-3'-phosphate
  modified_base 16: mod_base = OTHER; note = 2'-deoxy-2'-fluoroadenosine-3'-phosphate
  modified_base 17: mod_base = OTHER; note = 2'-O-methylguanosine-3'-phosphate
  modified_base 18: mod_base = OTHER; note = 2'-O-methyladenosine-3'-phosphate
  modified_base 19: mod_base = OTHER; note = 2'-O-methyluridine-3'-phosphate
  modified_base 20: mod_base = OTHER; note = 2'-O-methylguanosine-3'-phosphate
  modified_base 21: mod_base = OTHER; note = 2'-O-methyluridine-3'-phosphate
  modified_base 22: mod_base = OTHER; note = 2'-O-methyladenosine-3'-phosphate
  modified_base 23: mod_base = OTHER; note = 2'-O-methyluridine
tttctcattttctgaagatgtat

SEQ ID NO: 5845 - RNA, 23 nt, synthetic construct
  source 1..23: mol_type = other RNA
  modified_base 1: mod_base = OTHER; note = 2'-O-methyluridine-3'-phosphate 5'-(E)-Vinylphosphonate
  modified_base 2: mod_base = OTHER; note = 2'-deoxy-2'-fluoroadenosine-3'-phosphate
  modified_base 3: mod_base = OTHER; note = 2'-O-methyluridine-3'-phosphate
  modified_base 4: mod_base = OTHER; note = 2'-O-methyluridine-3'-phosphate
  modified_base 5: mod_base = OTHER; note = 2'-O-methylcytidine-3'-phosphate
  modified_base 6: mod_base = OTHER; note = 2'-deoxy-2'-fluorouridine-3'-phosphate
  modified_base 7: mod_base = OTHER; note = 2'-O-methylcytidine-3'-phosphate
  modified_base 8: mod_base = OTHER; note = 2'-O-methyladenosine-3'-phosphate
  modified_base 9: mod_base = OTHER; note = 2'-O-methyluridine-3'-phosphate
  modified_base 10: mod_base = OTHER; note = 2'-O-methyluridine-3'-phosphate
  modified_base 11: mod_base = OTHER; note = 2'-O-methyluridine-3'-phosphate
  modified_base 12: mod_base = OTHER; note = 2'-O-methyluridine-3'-phosphate
  modified_base 13: mod_base = OTHER; note = 2'-O-methylcytidine-3'-phosphate
  modified_base 14: mod_base = OTHER; note = 2'-deoxy-2'-fluorouridine-3'-phosphate
  modified_base 15: mod_base = OTHER; note = 2'-O-methylguanosine-3'-phosphate
  modified_base 16: mod_base = OTHER; note = 2'-deoxy-2'-fluoroadenosine-3'-phosphate
  modified_base 17: mod_base = OTHER; note = 2'-O-methyladenosine-3'-phosphate
  modified_base 18: mod_base = OTHER; note = 2'-O-methylguanosine-3'-phosphate
  modified_base 19: mod_base = OTHER; note = 2'-O-methyladenosine-3'-phosphate
  modified_base 20: mod_base = OTHER; note = 2'-O-methyluridine-3'-phosphate
  modified_base 21: mod_base = OTHER; note = 2'-O-methylguanosine-3'-phosphate
  modified_base 22: mod_base = OTHER; note = 2'-O-methyluridine-3'-phosphate
  modified_base 23: mod_base = OTHER; note = 2'-O-methyladenosine
tattctcattttctgaagatgta

SEQ ID NO: 5846 - RNA, 23 nt, synthetic construct
  source 1..23: mol_type = other RNA
  modified_base 1: mod_base = OTHER; note = 2'-O-methyluridine-3'-phosphate 5'-(E)-Vinylphosphonate
  modified_base 2: mod_base = OTHER; note = 2'-deoxy-2'-fluoroadenosine-3'-phosphate
  modified_base 3: mod_base = OTHER; note = 2'-O-methyladenosine-3'-phosphate
  modified_base 4: mod_base = OTHER; note = 2'-O-methyluridine-3'-phosphate
  modified_base 5: mod_base = OTHER; note = 2'-O-methyluridine-3'-phosphate
  modified_base 6: mod_base = OTHER; note = 2'-deoxy-2'-fluorocytidine-3'-phosphate
  modified_base 7: mod_base = OTHER; note = 2'-O-methyluridine-3'-phosphate
  modified_base 8: mod_base = OTHER; note = 2'-O-methylcytidine-3'-phosphate
  modified_base 9: mod_base = OTHER; note = 2'-O-methyladenosine-3'-phosphate
  modified_base 10: mod_base = OTHER; note = 2'-O-methyluridine-3'-phosphate
  modified_base 11: mod_base = OTHER; note = 2'-O-methyluridine-3'-phosphate
  modified_base 12: mod_base = OTHER; note = 2'-O-methyluridine-3'-phosphate
  modified_base 13: mod_base = OTHER; note = 2'-O-methyluridine-3'-phosphate
  modified_base 14: mod_base = OTHER; note = 2'-deoxy-2'-fluorocytidine-3'-phosphate
  modified_base 15: mod_base = OTHER; note = 2'-O-methyluridine-3'-phosphate
  modified_base 16: mod_base = OTHER; note = 2'-deoxy-2'-fluoroguanosine-3'-phosphate
  modified_base 17: mod_base = OTHER; note = 2'-O-methyladenosine-3'-phosphate
  modified_base 18: mod_base = OTHER; note = 2'-O-methyladenosine-3'-phosphate
  modified_base 19: mod_base = OTHER; note = 2'-O-methylguanosine-3'-phosphate
  modified_base 20: mod_base = OTHER; note = 2'-O-methyladenosine-3'-phosphate
  modified_base 21: mod_base = OTHER; note = 2'-O-methyluridine-3'-phosphate
  modified_base 22: mod_base = OTHER; note = 2'-O-methylguanosine-3'-phosphate
  modified_base 23: mod_base = OTHER; note = 2'-O-methyluridine
taattctcattttctgaagatgt

SEQ ID NO: 5847 - RNA, 23 nt, synthetic construct
  source 1..23: mol_type = other RNA
  modified_base 1: mod_base = OTHER; note = 2'-O-methyluridine-3'-phosphate 5'-(E)-Vinylphosphonate
  modified_base 2: mod_base = OTHER; note = 2'-deoxy-2'-fluorouridine-3'-phosphate
  modified_base 3: mod_base = OTHER; note = 2'-O-methyladenosine-3'-phosphate
  modified_base 4: mod_base = OTHER; note = 2'-O-methyladenosine-3'-phosphate
  modified_base 5: mod_base = OTHER; note = 2'-O-methyluridine-3'-phosphate
  modified_base 6: mod_base = OTHER; note = 2'-deoxy-2'-fluorouridine-3'-phosphate
  modified_base 7: mod_base = OTHER; note = 2'-O-methylcytidine-3'-phosphate
  modified_base 8: mod_base = OTHER; note = 2'-O-methyluridine-3'-phosphate
  modified_base 9: mod_base = OTHER; note = 2'-O-methylcytidine-3'-phosphate
  modified_base 10: mod_base = OTHER; note = 2'-O-methyladenosine-3'-phosphate
  modified_base 11: mod_base = OTHER; note = 2'-O-methyluridine-3'-phosphate
  modified_base 12: mod_base = OTHER; note = 2'-O-methyluridine-3'-phosphate
  modified_base 13: mod_base = OTHER; note = 2'-O-methyluridine-3'-phosphate
  modified_base 14: mod_base = OTHER; note = 2'-deoxy-2'-fluorouridine-3'-phosphate
  modified_base 15: mod_base = OTHER; note = 2'-O-methylcytidine-3'-phosphate
  modified_base 16: mod_base = OTHER; note = 2'-deoxy-2'-fluorouridine-3'-phosphate
  modified_base 17: mod_base = OTHER; note = 2'-O-methylguanosine-3'-phosphate
  modified_base 18: mod_base = OTHER; note = 2'-O-methyladenosine-3'-phosphate
  modified_base 19: mod_base = OTHER; note = 2'-O-methyladenosine-3'-phosphate
  modified_base 20: mod_base = OTHER; note = 2'-O-methylguanosine-3'-phosphate
  modified_base 21: mod_base = OTHER; note = 2'-O-methyladenosine-3'-phosphate
  modified_base 22: mod_base = OTHER; note = 2'-O-methyluridine-3'-phosphate
  modified_base 23: mod_base = OTHER; note = 2'-O-methylguanosine
ttaattctcattttctgaagatg

SEQ ID NO: 5848 - RNA, 23 nt, synthetic construct
  source 1..23: mol_type = other RNA
  modified_base 1: mod_base = OTHER; note = 2'-O-methyluridine-3'-phosphate 5'-(E)-Vinylphosphonate
  modified_base 2: mod_base = OTHER; note = 2'-deoxy-2'-fluoroadenosine-3'-phosphate
  modified_base 3: mod_base = OTHER; note = 2'-O-methyladenosine-3'-phosphate
  modified_base 4: mod_base = OTHER; note = 2'-O-methylguanosine-3'-phosphate
  modified_base 5: mod_base = OTHER; note = 2'-O-methyluridine-3'-phosphate
  modified_base 6: mod_base = OTHER; note = 2'-deoxy-2'-fluorouridine-3'-phosphate
  modified_base 7: mod_base = OTHER; note = 2'-O-methylcytidine-3'-phosphate
  modified_base 8: mod_base = OTHER; note = 2'-O-methyluridine-3'-phosphate
  modified_base 9: mod_base = OTHER; note = 2'-O-methyluridine-3'-phosphate
  modified_base 10: mod_base = OTHER; note = 2'-O-methyluridine-3'-phosphate
  modified_base 11: mod_base = OTHER; note = 2'-O-methylguanosine-3'-phosphate
  modified_base 12: mod_base = OTHER; note = 2'-O-methyluridine-3'-phosphate
  modified_base 13: mod_base = OTHER; note = 2'-O-methyluridine-3'-phosphate
  modified_base 14: mod_base = OTHER; note = 2'-deoxy-2'-fluorocytidine-3'-phosphate
  modified_base 15: mod_base = OTHER; note = 2'-O-methyladenosine-3'-phosphate
  modified_base 16: mod_base = OTHER; note = 2'-deoxy-2'-fluoroadenosine-3'-phosphate
  modified_base 17: mod_base = OTHER; note = 2'-O-methyluridine-3'-phosphate
  modified_base 18: mod_base = OTHER; note = 2'-O-methylcytidine-3'-phosphate
  modified_base 19: mod_base = OTHER; note = 2'-O-methyluridine-3'-phosphate
  modified_base 20: mod_base = OTHER; note = 2'-O-methylguanosine-3'-phosphate
  modified_base 21: mod_base = OTHER; note = 2'-O-methyluridine-3'-phosphate
  modified_base 22: mod_base = OTHER; note = 2'-O-methyladenosine-3'-phosphate
  modified_base 23: mod_base = OTHER; note = 2'-O-methylguanosine
taagttctttgttcaatctgtag

SEQ ID NO: 5849 - RNA, 23 nt, synthetic construct
  source 1..23: mol_type = other RNA
  modified_base 1: mod_base = OTHER; note = 2'-O-methyluridine-3'-phosphate 5'-(E)-Vinylphosphonate
  modified_base 2: mod_base = OTHER; note = 2'-deoxy-2'-fluorouridine-3'-phosphate
  modified_base 3: mod_base = OTHER; note = 2'-O-methyladenosine-3'-phosphate
  modified_base 4: mod_base = OTHER; note = 2'-O-methyladenosine-3'-phosphate
  modified_base 5: mod_base = OTHER; note = 2'-O-methylguanosine-3'-phosphate
  modified_base 6: mod_base = OTHER; note = 2'-deoxy-2'-fluorouridine-3'-phosphate
  modified_base 7: mod_base = OTHER; note = 2'-O-methyluridine-3'-phosphate
  modified_base 8: mod_base = OTHER; note = 2'-O-methylcytidine-3'-phosphate
  modified_base 9: mod_base = OTHER; note = 2'-O-methyluridine-3'-phosphate
  modified_base 10: mod_base = OTHER; note = 2'-O-methyluridine-3'-phosphate
  modified_base 11: mod_base = OTHER; note = 2'-O-methyluridine-3'-phosphate
  modified_base 12: mod_base = OTHER; note = 2'-O-methylguanosine-3'-phosphate
  modified_base 13: mod_base = OTHER; note = 2'-O-methyluridine-3'-phosphate
  modified_base 14: mod_base = OTHER; note = 2'-deoxy-2'-fluorouridine-3'-phosphate
  modified_base 15: mod_base = OTHER; note = 2'-O-methylcytidine-3'-phosphate
  modified_base 16: mod_base = OTHER; note = 2'-deoxy-2'-fluoroadenosine-3'-phosphate
  modified_base 17: mod_base = OTHER; note = 2'-O-methyladenosine-3'-phosphate
  modified_base 18: mod_base = OTHER; note = 2'-O-methyluridine-3'-phosphate
  modified_base 19: mod_base = OTHER; note = 2'-O-methylcytidine-3'-phosphate
  modified_base 20: mod_base = OTHER; note = 2'-O-methyluridine-3'-phosphate
  modified_base 21: mod_base = OTHER; note = 2'-O-methylguanosine-3'-phosphate
  modified_base 22: mod_base = OTHER; note = 2'-O-methyluridine-3'-phosphate
  modified_base 23: mod_base = OTHER; note = 2'-O-methyladenosine
ttaagttctttgttcaatctgta

SEQ ID NO: 5850 - RNA, 23 nt, synthetic construct
  source 1..23: mol_type = other RNA
  modified_base 1: mod_base = OTHER; note = 2'-O-methyluridine-3'-phosphate 5'-(E)-Vinylphosphonate
  modified_base 2: mod_base = OTHER; note = 2'-deoxy-2'-fluorocytidine-3'-phosphate
  modified_base 3: mod_base = OTHER; note = 2'-O-methyluridine-3'-phosphate
  modified_base 4: mod_base = OTHER; note = 2'-O-methyladenosine-3'-phosphate
  modified_base 5: mod_base = OTHER; note = 2'-O-methyladenosine-3'-phosphate
  modified_base 6: mod_base = OTHER; note = 2'-deoxy-2'-fluoroguanosine-3'-phosphate
  modified_base 7: mod_base = OTHER; note = 2'-O-methyluridine-3'-phosphate
  modified_base 8: mod_base = OTHER; note = 2'-O-methyluridine-3'-phosphate
  modified_base 9: mod_base = OTHER; note = 2'-O-methylcytidine-3'-phosphate
  modified_base 10: mod_base = OTHER; note = 2'-O-methyluridine-3'-phosphate
  modified_base 11: mod_base = OTHER; note = 2'-O-methyluridine-3'-phosphate
  modified_base 12: mod_base = OTHER; note = 2'-O-methyluridine-3'-phosphate
  modified_base 13: mod_base = OTHER; note = 2'-O-methylguanosine-3'-phosphate
  modified_base 14: mod_base = OTHER; note = 2'-deoxy-2'-fluorouridine-3'-phosphate
  modified_base 15: mod_base = OTHER; note = 2'-O-methyluridine-3'-phosphate
  modified_base 16: mod_base = OTHER; note = 2'-deoxy-2'-fluorocytidine-3'-phosphate
  modified_base 17: mod_base = OTHER; note = 2'-O-methyladenosine-3'-phosphate
  modified_base 18: mod_base = OTHER; note = 2'-O-methyladenosine-3'-phosphate
  modified_base 19: mod_base = OTHER; note = 2'-O-methyluridine-3'-phosphate
  modified_base 20: mod_base = OTHER; note = 2'-O-methylcytidine-3'-phosphate
  modified_base 21: mod_base = OTHER; note = 2'-O-methyluridine-3'-phosphate
  modified_base 22: mod_base = OTHER; note = 2'-O-methylguanosine-3'-phosphate
  modified_base 23: mod_base = OTHER; note = 2'-O-methyluridine
tctaagttctttgttcaatctgt

SEQ ID NO: 5851 - RNA, 23 nt, synthetic construct
  source 1..23: mol_type = other RNA
  modified_base 1: mod_base = OTHER; note = 2'-O-methyluridine-3'-phosphate 5'-(E)-Vinylphosphonate
  modified_base 2: mod_base = OTHER; note = 2'-deoxy-2'-fluorouridine-3'-phosphate
  modified_base 3: mod_base = OTHER; note = 2'-O-methylcytidine-3'-phosphate
  modified_base 4: mod_base = OTHER; note = 2'-O-methyluridine-3'-phosphate
  modified_base 5: mod_base = OTHER; note = 2'-O-methyladenosine-3'-phosphate
  modified_base 6: mod_base = OTHER; note = 2'-deoxy-2'-fluoroadenosine-3'-phosphate
  modified_base 7: mod_base = OTHER; note = 2'-O-methylguanosine-3'-phosphate
  modified_base 8: mod_base = OTHER; note = 2'-O-methyluridine-3'-phosphate
  modified_base 9: mod_base = OTHER; note = 2'-O-methyluridine-3'-phosphate
  modified_base 10: mod_base = OTHER; note = 2'-O-methylcytidine-3'-phosphate
  modified_base 11: mod_base = OTHER; note = 2'-O-methyluridine-3'-phosphate
  modified_base 12: mod_base = OTHER; note = 2'-O-methyluridine-3'-phosphate
  modified_base 13: mod_base = OTHER; note = 2'-O-methyluridine-3'-phosphate
  modified_base 14: mod_base = OTHER; note = 2'-deoxy-2'-fluoroguanosine-3'-phosphate
  modified_base 15: mod_base = OTHER; note = 2'-O-methyluridine-3'-phosphate
  modified_base 16: mod_base = OTHER; note = 2'-deoxy-2'-fluorouridine-3'-phosphate
  modified_base 17: mod_base = OTHER; note = 2'-O-methylcytidine-3'-phosphate
  modified_base 18: mod_base = OTHER; note = 2'-O-methyladenosine-3'-phosphate
  modified_base 19: mod_base = OTHER; note = 2'-O-methyladenosine-3'-phosphate
  modified_base 20: mod_base = OTHER; note = 2'-O-methyluridine-3'-phosphate
  modified_base 21: mod_base = OTHER; note = 2'-O-methylcytidine-3'-phosphate
  modified_base 22: mod_base = OTHER; note = 2'-O-methyluridine-3'-phosphate
  modified_base 23: mod_base = OTHER; note = 2'-O-methylguanosine
ttctaagttctttgttcaatctg

SEQ ID NO: 5852 - RNA, 23 nt, synthetic construct
  source 1..23: mol_type = other RNA
  modified_base 1: mod_base = OTHER; note = 2'-O-methyluridine-3'-phosphate 5'-(E)-Vinylphosphonate
  modified_base 2: mod_base = OTHER; note = 2'-deoxy-2'-fluorouridine-3'-phosphate
  modified_base 3: mod_base = OTHER; note = 2'-O-methyluridine-3'-phosphate
  modified_base 4: mod_base = OTHER; note = 2'-O-methylcytidine-3'-phosphate
  modified_base 5: mod_base = OTHER; note = 2'-O-methyluridine-3'-phosphate
  modified_base 6: mod_base = OTHER; note = 2'-deoxy-2'-fluoroadenosine-3'-phosphate
  modified_base 7: mod_base = OTHER; note = 2'-O-methyladenosine-3'-phosphate
  modified_base 8: mod_base = OTHER; note = 2'-O-methylguanosine-3'-phosphate
  modified_base 9: mod_base = OTHER; note = 2'-O-methyluridine-3'-phosphate
  modified_base 10: mod_base = OTHER; note = 2'-O-methyluridine-3'-phosphate
  modified_base 11: mod_base = OTHER; note = 2'-O-methylcytidine-3'-phosphate
  modified_base 12: mod_base = OTHER; note = 2'-O-methyluridine-3'-phosphate
  modified_base 13: mod_base = OTHER; note = 2'-O-methyluridine-3'-phosphate
  modified_base 14: mod_base = OTHER; note = 2'-deoxy-2'-fluorouridine-3'-phosphate
  modified_base 15: mod_base = OTHER; note = 2'-O-methylguanosine-3'-phosphate
  modified_base 16: mod_base = OTHER; note = 2'-deoxy-2'-fluorouridine-3'-phosphate
  modified_base 17: mod_base = OTHER; note = 2'-O-methyluridine-3'-phosphate
  modified_base 18: mod_base = OTHER; note = 2'-O-methylcytidine-3'-phosphate
  modified_base 19: mod_base = OTHER; note = 2'-O-methyladenosine-3'-phosphate
  modified_base 20: mod_base = OTHER; note = 2'-O-methyladenosine-3'-phosphate
  modified_base 21: mod_base = OTHER; note = 2'-O-methyluridine-3'-phosphate
  modified_base 22: mod_base = OTHER; note = 2'-O-methylcytidine-3'-phosphate
  modified_base 23: mod_base = OTHER; note = 2'-O-methyluridine
tttctaagttctttgttcaatct

SEQ ID NO: 5853 - RNA, 23 nt, synthetic construct
  source 1..23: mol_type = other RNA
  modified_base 1: mod_base = OTHER; note = 2'-O-methyluridine-3'-phosphate 5'-(E)-Vinylphosphonate
  modified_base 2: mod_base = OTHER; note = 2'-deoxy-2'-fluorocytidine-3'-phosphate
  modified_base 3: mod_base = OTHER; note = 2'-O-methyluridine-3'-phosphate
  modified_base 4: mod_base = OTHER; note = 2'-O-methyluridine-3'-phosphate
  modified_base 5: mod_base = OTHER; note = 2'-O-methylcytidine-3'-phosphate
  modified_base 6: mod_base = OTHER; note = 2'-deoxy-2'-fluorouridine-3'-phosphate
  modified_base 7: mod_base = OTHER; note = 2'-O-methyladenosine-3'-phosphate
  modified_base 8: mod_base = OTHER; note = 2'-O-methyladenosine-3'-phosphate
  modified_base 9: mod_base = OTHER; note = 2'-O-methylguanosine-3'-phosphate
  modified_base 10: mod_base = OTHER; note = 2'-O-methyluridine-3'-phosphate
  modified_base 11: mod_base = OTHER; note = 2'-O-methyluridine-3'-phosphate
  modified_base 12: mod_base = OTHER; note = 2'-O-methylcytidine-3'-phosphate
  modified_base 13: mod_base = OTHER; note = 2'-O-methyluridine-3'-phosphate
  modified_base 14: mod_base = OTHER; note = 2'-deoxy-2'-fluorouridine-3'-phosphate
  modified_base 15: mod_base = OTHER; note = 2'-O-methyluridine-3'-phosphate
  modified_base 16: mod_base = OTHER; note = 2'-deoxy-2'-fluoroguanosine-3'-phosphate
  modified_base 17: mod_base = OTHER; note = 2'-O-methyluridine-3'-phosphate
  modified_base 18: mod_base = OTHER; note = 2'-O-methyluridine-3'-phosphate
  modified_base 19: mod_base = OTHER; note = 2'-O-methylcytidine-3'-phosphate
  modified_base 20: mod_base = OTHER; note = 2'-O-methyladenosine-3'-phosphate
  modified_base 21: mod_base = OTHER; note = 2'-O-methyladenosine-3'-phosphate
  modified_base 22: mod_base = OTHER; note = 2'-O-methyluridine-3'-phosphate
  modified_base 23: mod_base = OTHER; note = 2'-O-methylcytidine
tcttctaagttctttgttcaatc

SEQ ID NO: 5854 - RNA, 23 nt, synthetic construct
  source 1..23: mol_type = other RNA
  modified_base 1: mod_base = OTHER; note = 2'-O-methyluridine-3'-phosphate 5'-(E)-Vinylphosphonate
  modified_base 2: mod_base = OTHER; note = 2'-deoxy-2'-fluorocytidine-3'-phosphate
  modified_base 3: mod_base = OTHER; note = 2'-O-methyladenosine-3'-phosphate
  modified_base 4: mod_base = OTHER; note = 2'-O-methyladenosine-3'-phosphate
  modified_base 5: mod_base = OTHER; note = 2'-O-methyluridine-3'-phosphate
  modified_base 6: mod_base = OTHER; note = 2'-deoxy-2'-fluorouridine-3'-phosphate
  modified_base 7: mod_base = OTHER; note = 2'-O-methyluridine-3'-phosphate
  modified_base 8: mod_base = OTHER; note = 2'-O-methylcytidine-3'-phosphate
  modified_base 9: mod_base = OTHER; note = 2'-O-methyluridine-3'-phosphate
  modified_base 10: mod_base = OTHER; note = 2'-O-methylcytidine-3'-phosphate
  modified_base 11: mod_base = OTHER; note = 2'-O-methyluridine-3'-phosphate
  modified_base 12: mod_base = OTHER; note = 2'-O-methyluridine-3'-phosphate
  modified_base 13: mod_base = OTHER; note = 2'-O-methylcytidine-3'-phosphate
  modified_base 14: mod_base = OTHER; note = 2'-deoxy-2'-fluorouridine-3'-phosphate
  modified_base 15: mod_base = OTHER; note = 2'-O-methylcytidine-3'-phosphate
  modified_base 16: mod_base = OTHER; note = 2'-deoxy-2'-fluorouridine-3'-phosphate
  modified_base 17: mod_base = OTHER; note = 2'-O-methylcytidine-3'-phosphate
  modified_base 18: mod_base = OTHER; note = 2'-O-methyladenosine-3'-phosphate
  modified_base 19: mod_base = OTHER; note = 2'-O-methylguanosine-3'-phosphate
  modified_base 20: mod_base = OTHER; note = 2'-O-methylguanosine-3'-phosphate
  modified_base 21: mod_base = OTHER; note = 2'-O-methyladenosine-3'-phosphate
  modified_base 22: mod_base = OTHER; note = 2'-O-methyladenosine-3'-phosphate
  modified_base 23: mod_base = OTHER; note = 2'-O-methyluridine
tcaatttctcttctctcaggaat

SEQ ID NO: 5855 - RNA, 23 nt, synthetic construct
  source 1..23: mol_type = other RNA
  modified_base 1: mod_base = OTHER; note = 2'-O-methyluridine-3'-phosphate 5'-(E)-Vinylphosphonate
  modified_base 2: mod_base = OTHER; note = 2'-deoxy-2'-fluorouridine-3'-phosphate
  modified_base 3: mod_base = OTHER; note = 2'-O-methylcytidine-3'-phosphate
  modified_base 4: mod_base = OTHER; note = 2'-O-methyladenosine-3'-phosphate
  modified_base 5: mod_base = OTHER; note = 2'-O-methyladenosine-3'-phosphate
  modified_base 6: mod_base = OTHER; note = 2'-deoxy-2'-fluorouridine-3'-phosphate
  modified_base 7: mod_base = OTHER; note = 2'-O-methyluridine-3'-phosphate
  modified_base 8: mod_base = OTHER; note = 2'-O-methyluridine-3'-phosphate
  modified_base 9: mod_base = OTHER; note = 2'-O-methylcytidine-3'-phosphate
  modified_base 10: mod_base = OTHER; note = 2'-O-methyluridine-3'-phosphate
  modified_base 11: mod_base = OTHER; note = 2'-O-methylcytidine-3'-phosphate
  modified_base 12: mod_base = OTHER; note = 2'-O-methyluridine-3'-phosphate
  modified_base 13: mod_base = OTHER; note = 2'-O-methyluridine-3'-phosphate
  modified_base 14: mod_base = OTHER; note = 2'-deoxy-2'-fluorocytidine-3'-phosphate
  modified_base 15: mod_base = OTHER; note = 2'-O-methyluridine-3'-phosphate
  modified_base 16: mod_base = OTHER; note = 2'-deoxy-2'-fluorocytidine-3'-phosphate
  modified_base 17: mod_base = OTHER; note = 2'-O-methyluridine-3'-phosphate
  modified_base 18: mod_base = OTHER; note = 2'-O-methylcytidine-3'-phosphate
  modified_base 19: mod_base = OTHER; note = 2'-O-methyladenosine-3'-phosphate
  modified_base 20: mod_base = OTHER; note = 2'-O-methylguanosine-3'-phosphate
  modified_base 21: mod_base = OTHER; note = 2'-O-methylguanosine-3'-phosphate
  modified_base 22: mod_base = OTHER; note = 2'-O-methyladenosine-3'-phosphate
  modified_base 23: mod_base = OTHER; note = 2'-O-methyladenosine
ttcaatttctcttctctcaggaa

SEQ ID NO: 5856 - RNA, 23 nt, synthetic construct
  source 1..23: mol_type = other RNA
  modified_base 1: mod_base = OTHER; note = 2'-O-methyluridine-3'-phosphate 5'-(E)-Vinylphosphonate
  modified_base 2: mod_base = OTHER; note = 2'-deoxy-2'-fluoroadenosine-3'-phosphate
  modified_base 3: mod_base = OTHER; note = 2'-O-methyluridine-3'-phosphate
  modified_base 4: mod_base = OTHER; note = 2'-O-methylcytidine-3'-phosphate
  modified_base 5: mod_base = OTHER; note = 2'-O-methyladenosine-3'-phosphate
  modified_base 6: mod_base = OTHER; note = 2'-deoxy-2'-fluoroadenosine-3'-phosphate
  modified_base 7: mod_base = OTHER; note = 2'-O-methyluridine-3'-phosphate
  modified_base 8: mod_base = OTHER; note = 2'-O-methyluridine-3'-phosphate
  modified_base 9: mod_base = OTHER; note = 2'-O-methyluridine-3'-phosphate
  modified_base 10: mod_base = OTHER; note = 2'-O-methylcytidine-3'-phosphate
  modified_base 11: mod_base = OTHER; note = 2'-O-methyluridine-3'-phosphate
  modified_base 12: mod_base = OTHER; note = 2'-O-methylcytidine-3'-phosphate
  modified_base 13: mod_base = OTHER; note = 2'-O-methyluridine-3'-phosphate
  modified_base 14: mod_base = OTHER; note = 2'-deoxy-2'-fluorouridine-3'-phosphate
  modified_base 15: mod_base = OTHER; note = 2'-O-methylcytidine-3'-phosphate
  modified_base 16: mod_base = OTHER; note = 2'-deoxy-2'-fluorouridine-3'-phosphate
  modified_base 17: mod_base = OTHER; note = 2'-O-methylcytidine-3'-phosphate
  modified_base 18: mod_base = OTHER; note = 2'-O-methyluridine-3'-phosphate
  modified_base 19: mod_base = OTHER; note = 2'-O-methylcytidine-3'-phosphate
  modified_base 20: mod_base = OTHER; note = 2'-O-methyladenosine-3'-phosphate
  modified_base 21: mod_base = OTHER; note = 2'-O-methylguanosine-3'-phosphate
  modified_base 22: mod_base = OTHER; note = 2'-O-methylguanosine-3'-phosphate
  modified_base 23: mod_base = OTHER; note = 2'-O-methyladenosine
tatcaatttctcttctctcagga

SEQ ID NO: 5857 - RNA, 23 nt, synthetic construct
  source 1..23: mol_type = other RNA
  modified_base 1: mod_base = OTHER; note = 2'-O-methyluridine-3'-phosphate 5'-(E)-Vinylphosphonate
  modified_base 2: mod_base = OTHER; note = 2'-deoxy-2'-fluoroadenosine-3'-phosphate
  modified_base 3: mod_base = OTHER; note = 2'-O-methyladenosine-3'-phosphate
  modified_base 4: mod_base = OTHER; note = 2'-O-methyluridine-3'-phosphate
  modified_base 5: mod_base = OTHER; note = 2'-O-methylcytidine-3'-phosphate
  modified_base 6: mod_base = OTHER; note = 2'-deoxy-2'-fluoroadenosine-3'-phosphate
  modified_base 7: mod_base = OTHER; note = 2'-O-methyladenosine-3'-phosphate
  modified_base 8: mod_base = OTHER; note = 2'-O-methyluridine-3'-phosphate
  modified_base 9: mod_base = OTHER; note = 2'-O-methyluridine-3'-phosphate
  modified_base 10: mod_base = OTHER; note = 2'-O-methyluridine-3'-phosphate
  modified_base 11: mod_base = OTHER; note = 2'-O-methylcytidine-3'-phosphate
  modified_base 12: mod_base = OTHER; note = 2'-O-methyluridine-3'-phosphate
  modified_base 13: mod_base = OTHER; note = 2'-O-methylcytidine-3'-phosphate
  modified_base 14: mod_base = OTHER; note = 2'-deoxy-2'-fluorouridine-3'-phosphate
  modified_base 15: mod_base = OTHER; note = 2'-O-methyluridine-3'-phosphate
  modified_base 16: mod_base = OTHER; note = 2'-deoxy-2'-fluorocytidine-3'-phosphate
  modified_base 17: mod_base = OTHER; note = 2'-O-methyluridine-3'-phosphate
  modified_base 18: mod_base = OTHER; note = 2'-O-methylcytidine-3'-phosphate
  modified_base 19: mod_base = OTHER; note = 2'-O-methyluridine-3'-phosphate
  modified_base 20: mod_base = OTHER; note = 2'-O-methylcytidine-3'-phosphate
  modified_base 21: mod_base = OTHER; note = 2'-O-methyladenosine-3'-phosphate
  modified_base 22: mod_base = OTHER; note = 2'-O-methylguanosine-3'-phosphate
  modified_base 23: mod_base = OTHER; note = 2'-O-methylguanosine
taatcaatttctcttctctcagg

SEQ ID NO: 5858 - RNA, 23 nt, synthetic construct
  source 1..23: mol_type = other RNA
  modified_base 1: mod_base = OTHER; note = 2'-O-methyluridine-3'-phosphate 5'-(E)-Vinylphosphonate
  modified_base 2: mod_base = OTHER; note = 2'-deoxy-2'-fluorocytidine-3'-phosphate
  modified_base 3: mod_base = OTHER; note = 2'-O-methyladenosine-3'-phosphate
  modified_base 4: mod_base = OTHER; note = 2'-O-methyladenosine-3'-phosphate
  modified_base 5: mod_base = OTHER; note = 2'-O-methyluridine-3'-phosphate
  modified_base 6: mod_base = OTHER; note = 2'-deoxy-2'-fluorocytidine-3'-phosphate
  modified_base 7: mod_base = OTHER; note = 2'-O-methyladenosine-3'-phosphate
  modified_base 8: mod_base = OTHER; note = 2'-O-methyladenosine-3'-phosphate
  modified_base 9: mod_base = OTHER; note = 2'-O-methyluridine-3'-phosphate
  modified_base 10: mod_base = OTHER; note = 2'-O-methyluridine-3'-phosphate
  modified_base 11: mod_base = OTHER; note = 2'-O-methyluridine-3'-phosphate
  modified_base 12: mod_base = OTHER; note = 2'-O-methylcytidine-3'-phosphate
  modified_base 13: mod_base = OTHER; note = 2'-O-methyluridine-3'-phosphate
  modified_base 14: mod_base = OTHER; note = 2'-deoxy-2'-fluorocytidine-3'-phosphate
  modified_base 15: mod_base = OTHER; note = 2'-O-methyluridine-3'-phosphate
  modified_base 16: mod_base = OTHER; note = 2'-deoxy-2'-fluorouridine-3'-phosphate
  modified_base 17: mod_base = OTHER; note = 2'-O-methylcytidine-3'-phosphate
  modified_base 18: mod_base = OTHER; note = 2'-O-methyluridine-3'-phosphate
  modified_base 19: mod_base = OTHER; note = 2'-O-methylcytidine-3'-phosphate
  modified_base 20: mod_base = OTHER; note = 2'-O-methyluridine-3'-phosphate
  modified_base 21: mod_base = OTHER; note = 2'-O-methylcytidine-3'-phosphate
  modified_base 22: mod_base = OTHER; note = 2'-O-methyladenosine-3'-phosphate
  modified_base 23: mod_base = OTHER; note = 2'-O-methylguanosine
tcaatcaatttctcttctctcag

SEQ ID NO: 5859 - RNA, 23 nt, synthetic construct
  source 1..23: mol_type = other RNA
  modified_base 1: mod_base = OTHER; note = 2'-O-methyluridine-3'-phosphate 5'-(E)-Vinylphosphonate
  modified_base 2: mod_base = OTHER; note = 2'-deoxy-2'-fluoroadenosine-3'-phosphate
  modified_base 3: mod_base = OTHER; note = 2'-O-methylcytidine-3'-phosphate
  modified_base 4: mod_base = OTHER; note = 2'-O-methyladenosine-3'-phosphate
  modified_base 5: mod_base = OTHER; note = 2'-O-methyladenosine-3'-phosphate
  modified_base 6: mod_base = OTHER; note = 2'-deoxy-2'-fluorouridine-3'-phosphate
  modified_base 7: mod_base = OTHER; note = 2'-O-methylcytidine-3'-phosphate
  modified_base 8: mod_base = OTHER; note = 2'-O-methyladenosine-3'-phosphate
  modified_base 9: mod_base = OTHER; note = 2'-O-methyladenosine-3'-phosphate
  modified_base 10: mod_base = OTHER; note = 2'-O-methyluridine-3'-phosphate
  modified_base 11: mod_base = OTHER; note = 2'-O-methyluridine-3'-phosphate
  modified_base 12: mod_base = OTHER; note = 2'-O-methyluridine-3'-phosphate
  modified_base 13: mod_base = OTHER; note = 2'-O-methylcytidine-3'-phosphate
  modified_base 14: mod_base = OTHER; note = 2'-deoxy-2'-fluorouridine-3'-phosphate
  modified_base 15: mod_base = OTHER; note = 2'-O-methylcytidine-3'-phosphate
  modified_base 16: mod_base = OTHER; note = 2'-deoxy-2'-fluorouridine-3'-phosphate
  modified_base 17: mod_base = OTHER; note = 2'-O-methyluridine-3'-phosphate
  modified_base 18: mod_base = OTHER; note = 2'-O-methylcytidine-3'-phosphate
  modified_base 19: mod_base = OTHER; note = 2'-O-methyluridine-3'-phosphate
  modified_base 20: mod_base = OTHER; note = 2'-O-methylcytidine-3'-phosphate
  modified_base 21: mod_base = OTHER; note = 2'-O-methyluridine-3'-phosphate
  modified_base 22: mod_base = OTHER; note = 2'-O-methylcytidine-3'-phosphate
  modified_base 23: mod_base = OTHER; note = 2'-O-methyladenosine
tacaatcaatttctcttctctca

SEQ ID NO: 5860 - RNA, 23 nt, synthetic construct
  source 1..23: mol_type = other RNA
  modified_base 1: mod_base = OTHER; note = 2'-O-methyluridine-3'-phosphate 5'-(E)-Vinylphosphonate
  modified_base 2: mod_base = OTHER; note = 2'-deoxy-2'-fluoroadenosine-3'-phosphate
  modified_base 3: mod_base = OTHER; note = 2'-O-methyladenosine-3'-phosphate
  modified_base 4: mod_base = OTHER; note = 2'-O-methylcytidine-3'-phosphate
  modified_base 5: mod_base = OTHER; note = 2'-O-methyladenosine-3'-phosphate
  modified_base 6: mod_base = OTHER; note = 2'-deoxy-2'-fluoroadenosine-3'-phosphate
  modified_base 7: mod_base = OTHER; note = 2'-O-methyluridine-3'-phosphate
  modified_base 8: mod_base = OTHER; note = 2'-O-methylcytidine-3'-phosphate
  modified_base 9: mod_base = OTHER; note = 2'-O-methyladenosine-3'-phosphate
  modified_base 10: mod_base = OTHER; note = 2'-O-methyladenosine-3'-phosphate
  modified_base 11: mod_base = OTHER; note = 2'-O-methyluridine-3'-phosphate
  modified_base 12: mod_base = OTHER; note = 2'-O-methyluridine-3'-phosphate
  modified_base 13: mod_base = OTHER; note = 2'-O-methyluridine-3'-phosphate
  modified_base 14: mod_base = OTHER; note = 2'-deoxy-2'-fluorocytidine-3'-phosphate
  modified_base 15: mod_base = OTHER; note = 2'-O-methyluridine-3'-phosphate
  modified_base 16: mod_base = OTHER; note = 2'-deoxy-2'-fluorocytidine-3'-phosphate
  modified_base 17: mod_base = OTHER; note = 2'-O-methyluridine-3'-phosphate
  modified_base 18: mod_base = OTHER; note = 2'-O-methyluridine-3'-phosphate
  modified_base 19: mod_base = OTHER; note = 2'-O-methylcytidine-3'-phosphate
  modified_base 20: mod_base = OTHER; note = 2'-O-methyluridine-3'-phosphate
  modified_base 21: mod_base = OTHER; note = 2'-O-methylcytidine-3'-phosphate
  modified_base 22: mod_base = OTHER; note = 2'-O-methyluridine-3'-phosphate
  modified_base 23: mod_base = OTHER; note = 2'-O-methylcytidine
taacaatcaatttctcttctctc

SEQ ID NO: 5861 - RNA, 23 nt, synthetic construct
  source 1..23: mol_type = other RNA
  modified_base 1: mod_base = OTHER; note = 2'-O-methyluridine-3'-phosphate 5'-(E)-Vinylphosphonate
  modified_base 2: mod_base = OTHER; note = 2'-deoxy-2'-fluoroadenosine-3'-phosphate
  modified_base 3: mod_base = OTHER; note = 2'-O-methyladenosine-3'-phosphate
  modified_base 4: mod_base = OTHER; note = 2'-O-methyladenosine-3'-phosphate
  modified_base 5: mod_base = OTHER; note = 2'-O-methylcytidine-3'-phosphate
  modified_base 6: mod_base = OTHER; note = 2'-deoxy-2'-fluoroadenosine-3'-phosphate
  modified_base 7: mod_base = OTHER; note = 2'-O-methyladenosine-3'-phosphate
  modified_base 8: mod_base = OTHER; note = 2'-O-methyluridine-3'-phosphate
  modified_base 9: mod_base = OTHER; note = 2'-O-methylcytidine-3'-phosphate
  modified_base 10: mod_base = OTHER; note = 2'-O-methyladenosine-3'-phosphate
  modified_base 11: mod_base = OTHER; note = 2'-O-methyladenosine-3'-phosphate
  modified_base 12: mod_base = OTHER; note = 2'-O-methyluridine-3'-phosphate
  modified_base 13: mod_base = OTHER; note = 2'-O-methyluridine-3'-phosphate
  modified_base 14: mod_base = OTHER; note = 2'-deoxy-2'-fluorouridine-3'-phosphate
  modified_base 15: mod_base = OTHER; note = 2'-O-methylcytidine-3'-phosphate
  modified_base 16: mod_base = OTHER; note = 2'-deoxy-2'-fluorouridine-3'-phosphate
  modified_base 17: mod_base = OTHER; note = 2'-O-methylcytidine-3'-phosphate
  modified_base 18: mod_base = OTHER; note = 2'-O-methyluridine-3'-phosphate
  modified_base 19: mod_base = OTHER; note = 2'-O-methyluridine-3'-phosphate
  modified_base 20: mod_base = OTHER; note = 2'-O-methylcytidine-3'-phosphate
  modified_base 21: mod_base = OTHER; note = 2'-O-methyluridine-3'-phosphate
  modified_base 22: mod_base = OTHER; note = 2'-O-methylcytidine-3'-phosphate
  modified_base 23: mod_base = OTHER; note = 2'-O-methyluridine
taaacaatcaatttctcttctct

SEQ ID NO: 5862 - RNA, 23 nt, synthetic construct
  source 1..23: mol_type = other RNA
  modified_base 1: mod_base = OTHER; note = 2'-O-methyluridine-3'-phosphate 5'-(E)-Vinylphosphonate
  modified_base 2: mod_base = OTHER; note = 2'-deoxy-2'-fluorouridine-3'-phosphate
  modified_base 3: mod_base = OTHER; note = 2'-O-methyladenosine-3'-phosphate
  modified_base 4: mod_base = OTHER; note = 2'-O-methyladenosine-3'-phosphate
  modified_base 5: mod_base = OTHER; note = 2'-O-methyladenosine-3'-phosphate
  modified_base 6: mod_base = OTHER; note = 2'-deoxy-2'-fluorocytidine-3'-phosphate
  modified_base 7: mod_base = OTHER; note = 2'-O-methyladenosine-3'-phosphate
  modified_base 8: mod_base = OTHER; note = 2'-O-methyladenosine-3'-phosphate
  modified_base 9: mod_base = OTHER; note = 2'-O-methyluridine-3'-phosphate
  modified_base 10: mod_base = OTHER; note = 2'-O-methylcytidine-3'-phosphate
  modified_base 11: mod_base = OTHER; note = 2'-O-methyladenosine-3'-phosphate
  modified_base 12: mod_base = OTHER; note = 2'-O-methyladenosine-3'-phosphate
  modified_base 13: mod_base = OTHER; note = 2'-O-methyluridine-3'-phosphate
  modified_base 14: mod_base = OTHER; note = 2'-deoxy-2'-fluorouridine-3'-phosphate
  modified_base 15: mod_base = OTHER; note = 2'-O-methyluridine-3'-phosphate
  modified_base 16: mod_base = OTHER; note = 2'-deoxy-2'-fluorocytidine-3'-phosphate
  modified_base 17: mod_base = OTHER; note = 2'-O-methyluridine-3'-phosphate
  modified_base 18: mod_base = OTHER; note = 2'-O-methylcytidine-3'-phosphate
  modified_base 19: mod_base = OTHER; note = 2'-O-methyluridine-3'-phosphate
  modified_base 20: mod_base = OTHER; note = 2'-O-methyluridine-3'-phosphate
  modified_base 21: mod_base = OTHER; note = 2'-O-methylcytidine-3'-phosphate
  modified_base 22: mod_base = OTHER; note = 2'-O-methyluridine-3'-phosphate
  modified_base 23: mod_base = OTHER; note = 2'-O-methylcytidine
ttaaacaatcaatttctcttctc

SEQ ID NO: 5863 - RNA, 23 nt, synthetic construct
  source 1..23: mol_type = other RNA
  modified_base 1: mod_base = OTHER; note = 2'-O-methyluridine-3'-phosphate 5'-(E)-Vinylphosphonate
  modified_base 2: mod_base = OTHER; note = 2'-deoxy-2'-fluoroguanosine-3'-phosphate
  modified_base 3: mod_base = OTHER; note = 2'-O-methyladenosine-3'-phosphate
  modified_base 4: mod_base = OTHER; note = 2'-O-methyluridine-3'-phosphate
  modified_base 5: mod_base = OTHER; note = 2'-O-methyladenosine-3'-phosphate
  modified_base 6: mod_base = OTHER; note = 2'-deoxy-2'-fluoroadenosine-3'-phosphate
  modified_base 7: mod_base = OTHER; note = 2'-O-methyladenosine-3'-phosphate
  modified_base 8: mod_base = OTHER; note = 2'-O-methylcytidine-3'-phosphate
  modified_base 9: mod_base = OTHER; note = 2'-O-methyladenosine-3'-phosphate
  modified_base 10: mod_base = OTHER; note = 2'-O-methyladenosine-3'-phosphate
  modified_base 11: mod_base = OTHER; note = 2'-O-methyluridine-3'-phosphate
  modified_base 12: mod_base = OTHER; note = 2'-O-methylcytidine-3'-phosphate
  modified_base 13: mod_base = OTHER; note = 2'-O-methyladenosine-3'-phosphate
  modified_base 14: mod_base = OTHER; note = 2'-deoxy-2'-fluoroadenosine-3'-phosphate
  modified_base 15: mod_base = OTHER; note = 2'-O-methyluridine-3'-phosphate
  modified_base 16: mod_base = OTHER; note = 2'-deoxy-2'-fluorouridine-3'-phosphate
  modified_base 17: mod_base = OTHER; note = 2'-O-methyluridine-3'-phosphate
  modified_base 18: mod_base = OTHER; note = 2'-O-methylcytidine-3'-phosphate
  modified_base 19: mod_base = OTHER; note = 2'-O-methyluridine-3'-phosphate
  modified_base 20: mod_base = OTHER; note = 2'-O-methylcytidine-3'-phosphate
  modified_base 21: mod_base = OTHER; note = 2'-O-methyluridine-3'-phosphate
  modified_base 22: mod_base = OTHER; note = 2'-O-methyluridine-3'-phosphate
  modified_base 23: mod_base = OTHER; note = 2'-O-methylcytidine
tgataaacaatcaatttctcttc

SEQ ID NO: 5864 - RNA, 23 nt, synthetic construct
  source 1..23: mol_type = other RNA
  modified_base 1: mod_base = OTHER; note = 2'-O-methyluridine-3'-phosphate 5'-(E)-Vinylphosphonate
  modified_base 2: mod_base = OTHER; note = 2'-deoxy-2'-fluoroguanosine-3'-phosphate
  modified_base 3: mod_base = OTHER; note = 2'-O-methyluridine-3'-phosphate
  modified_base 4: mod_base = OTHER; note = 2'-O-methyluridine-3'-phosphate
  modified_base 5: mod_base = OTHER; note = 2'-O-methylguanosine-3'-phosphate
  modified_base 6: mod_base = OTHER; note = 2'-deoxy-2'-fluoroadenosine-3'-phosphate
  modified_base 7: mod_base = OTHER; note = 2'-O-methyladenosine-3'-phosphate
  modified_base 8: mod_base = OTHER; note = 2'-O-methyladenosine-3'-phosphate
  modified_base 9: mod_base = OTHER; note = 2'-O-methyladenosine-3'-phosphate
  modified_base 10: mod_base = OTHER; note = 2'-O-methyladenosine-3'-phosphate
  modified_base 11: mod_base = OTHER; note = 2'-O-methyluridine-3'-phosphate
  modified_base 12: mod_base = OTHER; note = 2'-O-methyluridine-3'-phosphate
  modified_base 13: mod_base = OTHER; note = 2'-O-methyladenosine-3'-phosphate
  modified_base 14: mod_base = OTHER; note = 2'-deoxy-2'-fluoroadenosine-3'-phosphate
  modified_base 15: mod_base = OTHER; note = 2'-O-methyladenosine-3'-phosphate
  modified_base 16: mod_base = OTHER; note = 2'-deoxy-2'-fluorocytidine-3'-phosphate
  modified_base 17: mod_base = OTHER; note = 2'-O-methylcytidine-3'-phosphate
  modified_base 18: mod_base = OTHER; note = 2'-O-methyladenosine-3'-phosphate
  modified_base 19: mod_base = OTHER; note = 2'-O-methyladenosine-3'-phosphate
  modified_base 20: mod_base = OTHER; note = 2'-O-methylcytidine-3'-phosphate
  modified_base 21: mod_base = OTHER; note = 2'-O-methyladenosine-3'-phosphate
  modified_base 22: mod_base = OTHER; note = 2'-O-methyluridine-3'-phosphate
  modified_base 23: mod_base = OTHER; note = 2'-O-methylguanosine
tgttgaaaaattaaaccaacatg

SEQ ID NO: 5865 - RNA, 23 nt, synthetic construct
  source 1..23: mol_type = other RNA
  modified_base 1: mod_base = OTHER; note = 2'-O-methyluridine-3'-phosphate 5'-(E)-Vinylphosphonate
  modified_base 2: mod_base = OTHER; note = 2'-deoxy-2'-fluoroguanosine-3'-phosphate
  modified_base 3: mod_base = OTHER; note = 2'-O-methylguanosine-3'-phosphate
  modified_base 4: mod_base = OTHER; note = 2'-O-methyluridine-3'-phosphate
  modified_base 5: mod_base = OTHER; note = 2'-O-methyluridine-3'-phosphate
  modified_base 6: mod_base = OTHER; note = 2'-deoxy-2'-fluoroguanosine-3'-phosphate
  modified_base 7: mod_base = OTHER; note = 2'-O-methyladenosine-3'-phosphate
  modified_base 8: mod_base = OTHER; note = 2'-O-methyladenosine-3'-phosphate
  modified_base 9: mod_base = OTHER; note = 2'-O-methyladenosine-3'-phosphate
  modified_base 10: mod_base = OTHER; note = 2'-O-methyladenosine-3'-phosphate
  modified_base 11: mod_base = OTHER; note = 2'-O-methyladenosine-3'-phosphate
  modified_base 12: mod_base = OTHER; note = 2'-O-methyluridine-3'-phosphate
  modified_base 13: mod_base = OTHER; note = 2'-O-methyluridine-3'-phosphate
  modified_base 14: mod_base = OTHER; note = 2'-deoxy-2'-fluoroadenosine-3'-phosphate
  modified_base 15: mod_base = OTHER; note = 2'-O-methyladenosine-3'-phosphate
  modified_base 16: mod_base = OTHER; note = 2'-deoxy-2'-fluoroadenosine-3'-phosphate
  modified_base 17: mod_base = OTHER; note = 2'-O-methylcytidine-3'-phosphate
  modified_base 18: mod_base = OTHER; note = 2'-O-methylcytidine-3'-phosphate
  modified_base 19: mod_base = OTHER; note = 2'-O-methyladenosine-3'-phosphate
  modified_base 20: mod_base = OTHER; note = 2'-O-methyladenosine-3'-phosphate
  modified_base 21: mod_base = OTHER; note = 2'-O-methylcytidine-3'-phosphate
  modified_base 22: mod_base = OTHER; note = 2'-O-methyladenosine-3'-phosphate
  modified_base 23: mod_base = OTHER; note = 2'-O-methyluridine
tggttgaaaaattaaaccaacat

SEQ ID NO: 5866 - RNA, 23 nt, synthetic construct
  source 1..23: mol_type = other RNA
  modified_base 1: mod_base = OTHER; note = 2'-O-methyluridine-3'-phosphate 5'-(E)-Vinylphosphonate
  modified_base 2: mod_base = OTHER; note = 2'-deoxy-2'-fluoroguanosine-3'-phosphate
  modified_base 3: mod_base = OTHER; note = 2'-O-methylguanosine-3'-phosphate
  modified_base 4: mod_base = OTHER; note = 2'-O-methylguanosine-3'-phosphate
  modified_base 5: mod_base = OTHER; note = 2'-O-methyluridine-3'-phosphate
  modified_base 6: mod_base = OTHER; note = 2'-deoxy-2'-fluorouridine-3'-phosphate
  modified_base 7: mod_base = OTHER; note = 2'-O-methylguanosine-3'-phosphate
  modified_base 8: mod_base = OTHER; note = 2'-O-methyladenosine-3'-phosphate
  modified_base 9: mod_base = OTHER; note = 2'-O-methyladenosine-3'-phosphate
  modified_base 10: mod_base = OTHER; note = 2'-O-methyladenosine-3'-phosphate
  modified_base 11: mod_base = OTHER; note = 2'-O-methyladenosine-3'-phosphate
  modified_base 12: mod_base = OTHER; note = 2'-O-methyladenosine-3'-phosphate
  modified_base 13: mod_base = OTHER; note = 2'-O-methyluridine-3'-phosphate
  modified_base 14: mod_base = OTHER; note = 2'-deoxy-2'-fluorouridine-3'-phosphate
  modified_base 15: mod_base = OTHER; note = 2'-O-methyladenosine-3'-phosphate
  modified_base 16: mod_base = OTHER; note = 2'-deoxy-2'-fluoroadenosine-3'-phosphate
  modified_base 17: mod_base = OTHER; note = 2'-O-methyladenosine-3'-phosphate
  modified_base 18: mod_base = OTHER; note = 2'-O-methylcytidine-3'-phosphate
  modified_base 19: mod_base = OTHER; note = 2'-O-methylcytidine-3'-phosphate
  modified_base 20: mod_base = OTHER; note = 2'-O-methyladenosine-3'-phosphate
  modified_base 21: mod_base = OTHER; note = 2'-O-methyladenosine-3'-phosphate
  modified_base 22: mod_base = OTHER; note = 2'-O-methylcytidine-3'-phosphate
  modified_base 23: mod_base = OTHER; note = 2'-O-methyladenosine
tgggttgaaaaattaaaccaaca

SEQ ID NO: 5867 - RNA, 23 nt, synthetic construct
  source 1..23: mol_type = other RNA
  modified_base 1: mod_base = OTHER; note = 2'-O-methyluridine-3'-phosphate 5'-(E)-Vinylphosphonate
  modified_base 2: mod_base = OTHER; note = 2'-deoxy-2'-fluorouridine-3'-phosphate
  modified_base 3: mod_base = OTHER; note = 2'-O-methylguanosine-3'-phosphate
  modified_base 4: mod_base = OTHER; note = 2'-O-methylguanosine-3'-phosphate
  modified_base 5: mod_base = OTHER; note = 2'-O-methylguanosine-3'-phosphate
  modified_base 6: mod_base = OTHER; note = 2'-deoxy-2'-fluorouridine-3'-phosphate
  modified_base 7: mod_base = OTHER; note = 2'-O-methyluridine-3'-phosphate
  modified_base 8: mod_base = OTHER; note = 2'-O-methylguanosine-3'-phosphate
  modified_base 9: mod_base = OTHER; note = 2'-O-methyladenosine-3'-phosphate
  modified_base 10: mod_base = OTHER; note = 2'-O-methyladenosine-3'-phosphate
  modified_base 11: mod_base = OTHER; note = 2'-O-methyladenosine-3'-phosphate
  modified_base 12: mod_base = OTHER; note = 2'-O-methyladenosine-3'-phosphate
  modified_base 13: mod_base = OTHER; note = 2'-O-methyladenosine-3'-phosphate
  modified_base 14: mod_base = OTHER; note = 2'-deoxy-2'-fluorouridine-3'-phosphate
  modified_base 15: mod_base = OTHER; note = 2'-O-methyluridine-3'-phosphate
  modified_base 16: mod_base = OTHER; note = 2'-deoxy-2'-fluoroadenosine-3'-phosphate
  modified_base 17: mod_base = OTHER; note = 2'-O-methyladenosine-3'-phosphate
  modified_base 18: mod_base = OTHER; note = 2'-O-methyladenosine-3'-phosphate
  modified_base 19: mod_base = OTHER; note = 2'-O-methylcytidine-3'-phosphate
  modified_base 20: mod_base = OTHER; note = 2'-O-methylcytidine-3'-phosphate
  modified_base 21: mod_base = OTHER; note = 2'-O-methyladenosine-3'-phosphate
  modified_base 22: mod_base = OTHER; note = 2'-O-methyladenosine-3'-phosphate
  modified_base 23: mod_base = OTHER; note = 2'-O-methylcytidine
ttgggttgaaaaattaaaccaac

SEQ ID NO: 5868 - RNA, 23 nt, synthetic construct
  source 1..23: mol_type = other RNA
  modified_base 1: mod_base = OTHER; note = 2'-O-methyluridine-3'-phosphate 5'-(E)-Vinylphosphonate
  modified_base 2: mod_base = OTHER; note = 2'-deoxy-2'-fluoroadenosine-3'-phosphate
  modified_base 3: mod_base = OTHER; note = 2'-O-methyladenosine-3'-phosphate
  modified_base 4: mod_base = OTHER; note = 2'-O-methyluridine-3'-phosphate
  modified_base 5: mod_base = OTHER; note = 2'-O-methylguanosine-3'-phosphate
  modified_base 6: mod_base = OTHER; note = 2'-deoxy-2'-fluoroadenosine-3'-phosphate
  modified_base 7: mod_base = OTHER; note = 2'-O-methyladenosine-3'-phosphate
  modified_base 8: mod_base = OTHER; note = 2'-O-methyladenosine-3'-phosphate
  modified_base 9: mod_base = OTHER; note = 2'-O-methyladenosine-3'-phosphate
  modified_base 10: mod_base = OTHER; note = 2'-O-methylcytidine-3'-phosphate
  modified_base 11: mod_base = OTHER; note = 2'-O-methyluridine-3'-phosphate
  modified_base 12: mod_base = OTHER; note = 2'-O-methylguanosine-3'-phosphate
  modified_base 13: mod_base = OTHER; note = 2'-O-methyluridine-3'-phosphate
  modified_base 14: mod_base = OTHER; note = 2'-deoxy-2'-fluoroadenosine-3'-phosphate
  modified_base 15: mod_base = OTHER; note = 2'-O-methyluridine-3'-phosphate
  modified_base 16: mod_base = OTHER; note = 2'-deoxy-2'-fluoroguanosine-3'-phosphate
  modified_base 17: mod_base = OTHER; note = 2'-O-methylguanosine-3'-phosphate
  modified_base 18: mod_base = OTHER; note = 2'-O-methyladenosine-3'-phosphate
  modified_base 19: mod_base = OTHER; note = 2'-O-methylcytidine-3'-phosphate
  modified_base 20: mod_base = OTHER; note = 2'-O-methylguanosine-3'-phosphate
  modified_base 21: mod_base = OTHER; note = 2'-O-methyladenosine-3'-phosphate
  modified_base 22: mod_base = OTHER; note = 2'-O-methyluridine-3'-phosphate
  modified_base 23: mod_base = OTHER; note = 2'-O-methyladenosine
taatgaaaactgtatggacgata

SEQ ID NO: 5869 - RNA, 23 nt, synthetic construct
  source 1..23: mol_type = other RNA
  modified_base 1: mod_base = OTHER; note = 2'-O-methyluridine-3'-phosphate 5'-(E)-Vinylphosphonate
  modified_base 2: mod_base = OTHER; note = 2'-deoxy-2'-fluoroguanosine-3'-phosphate
  modified_base 3: mod_base = OTHER; note = 2'-O-methyladenosine-3'-phosphate
  modified_base 4: mod_base = OTHER; note = 2'-O-methyladenosine-3'-phosphate
  modified_base 5: mod_base = OTHER; note = 2'-O-methyluridine-3'-phosphate
  modified_base 6: mod_base = OTHER; note = 2'-deoxy-2'-fluoroguanosine-3'-phosphate
  modified_base 7: mod_base = OTHER; note = 2'-O-methyladenosine-3'-phosphate
  modified_base 8: mod_base = OTHER; note = 2'-O-methyladenosine-3'-phosphate
  modified_base 9: mod_base = OTHER; note = 2'-O-methyladenosine-3'-phosphate
  modified_base 10: mod_base = OTHER; note = 2'-O-methyladenosine-3'-phosphate
  modified_base 11: mod_base = OTHER; note = 2'-O-methylcytidine-3'-phosphate
  modified_base 12: mod_base = OTHER; note = 2'-O-methyluridine-3'-phosphate
  modified_base 13: mod_base = OTHER; note = 2'-O-methylguanosine-3'-phosphate
  modified_base 14: mod_base = OTHER; note = 2'-deoxy-2'-fluorouridine-3'-phosphate
  modified_base 15: mod_base = OTHER; note = 2'-O-methyladenosine-3'-phosphate
  modified_base 16: mod_base = OTHER; note = 2'-deoxy-2'-fluorouridine-3'-phosphate
  modified_base 17: mod_base = OTHER; note = 2'-O-methylguanosine-3'-phosphate
  modified_base 18: mod_base = OTHER; note = 2'-O-methylguanosine-3'-phosphate
  modified_base 19: mod_base = OTHER; note = 2'-O-methyladenosine-3'-phosphate
  modified_base 20: mod_base = OTHER; note = 2'-O-methylcytidine-3'-phosphate
  modified_base 21: mod_base = OTHER; note = 2'-O-methylguanosine-3'-phosphate
  modified_base 22: mod_base = OTHER; note = 2'-O-methyladenosine-3'-phosphate
  modified_base 23: mod_base = OTHER; note = 2'-O-methyluridine
tgaatgaaaactgtatggacgat

SEQ ID NO: 5870 - RNA, 23 nt, synthetic construct
  source 1..23: mol_type = other RNA
  modified_base 1: mod_base = OTHER; note = 2'-O-methyluridine-3'-phosphate 5'-(E)-Vinylphosphonate
  modified_base 2: mod_base = OTHER; note = 2'-deoxy-2'-fluoroadenosine-3'-phosphate
  modified_base 3: mod_base = OTHER; note = 2'-O-methylguanosine-3'-phosphate
  modified_base 4: mod_base = OTHER; note = 2'-O-methyladenosine-3'-phosphate
  modified_base 5: mod_base = OTHER; note = 2'-O-methyladenosine-3'-phosphate
  modified_base 6: mod_base = OTHER; note = 2'-deoxy-2'-fluorouridine-3'-phosphate
  modified_base 7: mod_base = OTHER; note = 2'-O-methylguanosine-3'-phosphate
  modified_base 8: mod_base = OTHER; note = 2'-O-methyladenosine-3'-phosphate
  modified_base 9: mod_base = OTHER; note = 2'-O-methyladenosine-3'-phosphate
  modified_base 10: mod_base = OTHER; note = 2'-O-methyladenosine-3'-phosphate
  modified_base 11: mod_base = OTHER; note = 2'-O-methyladenosine-3'-phosphate
  modified_base 12: mod_base = OTHER; note = 2'-O-methylcytidine-3'-phosphate
  modified_base 13: mod_base = OTHER; note = 2'-O-methyluridine-3'-phosphate
  modified_base 14: mod_base = OTHER; note = 2'-deoxy-2'-fluoroguanosine-3'-phosphate
  modified_base 15: mod_base = OTHER; note = 2'-O-methyluridine-3'-phosphate
  modified_base 16: mod_base = OTHER; note = 2'-deoxy-2'-fluoroadenosine-3'-phosphate
  modified_base 17: mod_base = OTHER; note = 2'-O-methyluridine-3'-phosphate
  modified_base 18: mod_base = OTHER; note = 2'-O-methylguanosine-3'-phosphate
  modified_base 19: mod_base = OTHER; note = 2'-O-methylguanosine-3'-phosphate
  modified_base 20: mod_base = OTHER; note = 2'-O-methyladenosine-3'-phosphate
  modified_base 21: mod_base = OTHER; note = 2'-O-methylcytidine-3'-phosphate
  modified_base 22: mod_base = OTHER; note = 2'-O-methylguanosine-3'-phosphate
  modified_base 23: mod_base = OTHER; note = 2'-O-methyladenosine
tagaatgaaaactgtatggacga

SEQ ID NO: 5871 - RNA, 23 nt, synthetic construct
  source 1..23: mol_type = other RNA
  modified_base 1: mod_base = OTHER; note = 2'-O-methyluridine-3'-phosphate 5'-(E)-Vinylphosphonate
  modified_base 2: mod_base = OTHER; note = 2'-deoxy-2'-fluorouridine-3'-phosphate
  modified_base 3: mod_base = OTHER; note = 2'-O-methyladenosine-3'-phosphate
  modified_base 4: mod_base = OTHER; note = 2'-O-methylguanosine-3'-phosphate
  modified_base 5: mod_base = OTHER; note = 2'-O-methyladenosine-3'-phosphate
  modified_base 6: mod_base = OTHER; note = 2'-deoxy-2'-fluoroadenosine-3'-phosphate
  modified_base 7: mod_base = OTHER; note = 2'-O-methyluridine-3'-phosphate
  modified_base 8: mod_base = OTHER; note = 2'-O-methylguanosine-3'-phosphate
  modified_base 9: mod_base = OTHER; note = 2'-O-methyladenosine-3'-phosphate
  modified_base 10: mod_base = OTHER; note = 2'-O-methyladenosine-3'-phosphate
  modified_base 11: mod_base = OTHER; note = 2'-O-methyladenosine-3'-phosphate
  modified_base 12: mod_base = OTHER; note = 2'-O-methyladenosine-3'-phosphate
  modified_base 13: mod_base = OTHER; note = 2'-O-methylcytidine-3'-phosphate
  modified_base 14: mod_base = OTHER; note = 2'-deoxy-2'-fluorouridine-3'-phosphate
  modified_base 15: mod_base = OTHER; note = 2'-O-methylguanosine-3'-phosphate
  modified_base 16: mod_base = OTHER; note = 2'-deoxy-2'-fluorouridine-3'-phosphate
  modified_base 17: mod_base = OTHER; note = 2'-O-methyladenosine-3'-phosphate
  modified_base 18: mod_base = OTHER; note = 2'-O-methyluridine-3'-phosphate
  modified_base 19: mod_base = OTHER; note = 2'-O-methylguanosine-3'-phosphate
  modified_base 20: mod_base = OTHER; note = 2'-O-methylguanosine-3'-phosphate
  modified_base 21: mod_base = OTHER; note = 2'-O-methyladenosine-3'-phosphate
  modified_base 22: mod_base = OTHER; note = 2'-O-methylcytidine-3'-phosphate
  modified_base 23: mod_base = OTHER; note = 2'-O-methylguanosine
ttagaatgaaaactgtatggacg

SEQ ID NO: 5872 - RNA, 23 nt, synthetic construct
  source 1..23: mol_type = other RNA
  modified_base 1: mod_base = OTHER; note = 2'-O-methyluridine-3'-phosphate 5'-(E)-Vinylphosphonate
  modified_base 2: mod_base = OTHER; note = 2'-deoxy-2'-fluoroadenosine-3'-phosphate
  modified_base 3: mod_base = OTHER; note = 2'-O-methyluridine-3'-phosphate
  modified_base 4: mod_base = OTHER; note = 2'-O-methyladenosine-3'-phosphate
  modified_base 5: mod_base = OTHER; note = 2'-O-methylguanosine-3'-phosphate
  modified_base 6: mod_base = OTHER; note = 2'-deoxy-2'-fluoroadenosine-3'-phosphate
  modified_base 7: mod_base = OTHER; note = 2'-O-methyladenosine-3'-phosphate
  modified_base 8: mod_base = OTHER; note = 2'-O-methyluridine-3'-phosphate
  modified_base 9: mod_base = OTHER; note = 2'-O-methylguanosine-3'-phosphate
  modified_base 10: mod_base = OTHER; note = 2'-O-methyladenosine-3'-phosphate
  modified_base 11: mod_base = OTHER; note = 2'-O-methyladenosine-3'-phosphate
  modified_base 12: mod_base = OTHER; note = 2'-O-methyladenosine-3'-phosphate
  modified_base 13: mod_base = OTHER; note = 2'-O-methyladenosine-3'-phosphate
  modified_base 14: mod_base = OTHER; note = 2'-deoxy-2'-fluorocytidine-3'-phosphate
  modified_base 15: mod_base = OTHER; note = 2'-O-methyluridine-3'-phosphate
  modified_base 16: mod_base = OTHER; note = 2'-deoxy-2'-fluoroguanosine-3'-phosphate
  modified_base 17: mod_base = OTHER; note = 2'-O-methyluridine-3'-phosphate
  modified_base 18: mod_base = OTHER; note = 2'-O-methyladenosine-3'-phosphate
  modified_base 19: mod_base = OTHER; note = 2'-O-methyluridine-3'-phosphate
  modified_base 20: mod_base = OTHER; note = 2'-O-methylguanosine-3'-phosphate
  modified_base 21: mod_base = OTHER; note = 2'-O-methylguanosine-3'-phosphate
  modified_base 22: mod_base = OTHER; note = 2'-O-methyladenosine-3'-phosphate
  modified_base 23: mod_base = OTHER; note = 2'-O-methylcytidine
tatagaatgaaaactgtatggac

SEQ ID NO: 5873 - RNA, 23 nt, synthetic construct
  source 1..23: mol_type = other RNA
  modified_base 1: mod_base = OTHER; note = 2'-O-methyluridine-3'-phosphate 5'-(E)-Vinylphosphonate
  modified_base 2: mod_base = OTHER; note = 2'-deoxy-2'-fluorocytidine-3'-phosphate
  modified_base 3: mod_base = OTHER; note = 2'-O-methyladenosine-3'-phosphate
  modified_base 4: mod_base = OTHER; note = 2'-O-methyluridine-3'-phosphate
  modified_base 5: mod_base = OTHER; note = 2'-O-methyladenosine-3'-phosphate
  modified_base 6: mod_base = OTHER; note = 2'-deoxy-2'-fluoroguanosine-3'-phosphate
  modified_base 7: mod_base = OTHER; note = 2'-O-methyladenosine-3'-phosphate
  modified_base 8: mod_base = OTHER; note = 2'-O-methyladenosine-3'-phosphate
  modified_base 9: mod_base = OTHER; note = 2'-O-methyluridine-3'-phosphate
  modified_base 10: mod_base = OTHER; note = 2'-O-methylguanosine-3'-phosphate
  modified_base 11: mod_base = OTHER; note = 2'-O-methyladenosine-3'-phosphate
  modified_base 12: mod_base = OTHER; note = 2'-O-methyladenosine-3'-phosphate
  modified_base 13: mod_base = OTHER; note = 2'-O-methyladenosine-3'-phosphate
  modified_base 14: mod_base = OTHER; note = 2'-deoxy-2'-fluoroadenosine-3'-phosphate
  modified_base 15: mod_base = OTHER; note = 2'-O-methylcytidine-3'-phosphate
  modified_base 16: mod_base = OTHER; note = 2'-deoxy-2'-fluorouridine-3'-phosphate
  modified_base 17: mod_base = OTHER; note = 2'-O-methylguanosine-3'-phosphate
  modified_base 18: mod_base = OTHER; note = 2'-O-methyluridine-3'-phosphate
  modified_base 19: mod_base = OTHER; note = 2'-O-methyladenosine-3'-phosphate
  modified_base 20: mod_base = OTHER; note = 2'-O-methyluridine-3'-phosphate
  modified_base 21: mod_base = OTHER; note = 2'-O-methylguanosine-3'-phosphate
  modified_base 22: mod_base = OTHER; note = 2'-O-methylguanosine-3'-phosphate
  modified_base 23: mod_base = OTHER; note = 2'-O-methyladenosine
tcatagaatgaaaactgtatgga

SEQ ID NO: 5874 - RNA, 23 nt, synthetic construct
  source 1..23: mol_type = other RNA
  modified_base 1: mod_base = OTHER; note = 2'-O-methyluridine-3'-phosphate 5'-(E)-Vinylphosphonate
  modified_base 2: mod_base = OTHER; note = 2'-deoxy-2'-fluoroguanosine-3'-phosphate
  modified_base 3: mod_base = OTHER; note = 2'-O-methylcytidine-3'-phosphate
  modified_base 4: mod_base = OTHER; note = 2'-O-methyladenosine-3'-phosphate
  modified_base 5: mod_base = OTHER; note = 2'-O-methyluridine-3'-phosphate
  modified_base 6: mod_base = OTHER; note = 2'-deoxy-2'-fluoroadenosine-3'-phosphate
  modified_base 7: mod_base = OTHER; note = 2'-O-methylguanosine-3'-phosphate
  modified_base 8: mod_base = OTHER; note = 2'-O-methyladenosine-3'-phosphate
  modified_base 9: mod_base = OTHER; note = 2'-O-methyladenosine-3'-phosphate
  modified_base 10: mod_base = OTHER; note = 2'-O-methyluridine-3'-phosphate
  modified_base 11: mod_base = OTHER; note = 2'-O-methylguanosine-3'-phosphate
  modified_base 12: mod_base = OTHER; note = 2'-O-methyladenosine-3'-phosphate
  modified_base 13: mod_base = OTHER; note = 2'-O-methyladenosine-3'-phosphate
  modified_base 14: mod_base = OTHER; note = 2'-deoxy-2'-fluoroadenosine-3'-phosphate
  modified_base 15: mod_base = OTHER; note = 2'-O-methyladenosine-3'-phosphate
  modified_base 16: mod_base = OTHER; note = 2'-deoxy-2'-fluorocytidine-3'-phosphate
  modified_base 17: mod_base = OTHER; note = 2'-O-methyluridine-3'-phosphate
  modified_base 18: mod_base = OTHER; note = 2'-O-methylguanosine-3'-phosphate
  modified_base 19: mod_base = OTHER; note = 2'-O-methyluridine-3'-phosphate
  modified_base 20: mod_base = OTHER; note = 2'-O-methyladenosine-3'-phosphate
  modified_base 21: mod_base = OTHER; note = 2'-O-methyluridine-3'-phosphate
  modified_base 22: mod_base = OTHER; note = 2'-O-methylguanosine-3'-phosphate
  modified_base 23: mod_base = OTHER; note = 2'-O-methylguanosine
tgcatagaatgaaaactgtatgg

SEQ ID NO: 5875 - RNA, 23 nt, synthetic construct
  source 1..23: mol_type = other RNA
  modified_base 1: mod_base = OTHER; note = 2'-O-methyluridine-3'-phosphate 5'-(E)-Vinylphosphonate
  modified_base 2: mod_base = OTHER; note = 2'-deoxy-2'-fluorouridine-3'-phosphate
  modified_base 3: mod_base = OTHER; note = 2'-O-methylguanosine-3'-phosphate
  modified_base 4: mod_base = OTHER; note = 2'-O-methylcytidine-3'-phosphate
  modified_base 5: mod_base = OTHER; note = 2'-O-methyladenosine-3'-phosphate
  modified_base 6: mod_base = OTHER; note = 2'-deoxy-2'-fluorouridine-3'-phosphate
  modified_base 7: mod_base = OTHER; note = 2'-O-methyladenosine-3'-phosphate
  modified_base 8: mod_base = OTHER; note = 2'-O-methylguanosine-3'-phosphate
  modified_base 9: mod_base = OTHER; note = 2'-O-methyladenosine-3'-phosphate
  modified_base 10: mod_base = OTHER; note = 2'-O-methyladenosine-3'-phosphate
  modified_base 11: mod_base = OTHER; note = 2'-O-methyluridine-3'-phosphate
  modified_base 12: mod_base = OTHER; note = 2'-O-methylguanosine-3'-phosphate
  modified_base 13: mod_base = OTHER; note = 2'-O-methyladenosine-3'-phosphate
  modified_base 14: mod_base = OTHER; note = 2'-deoxy-2'-fluoroadenosine-3'-phosphate
  modified_base 15: mod_base = OTHER; note = 2'-O-methyladenosine-3'-phosphate
  modified_base 16: mod_base = OTHER; note = 2'-deoxy-2'-fluoroadenosine-3'-phosphate
  modified_base 17: mod_base = OTHER; note = 2'-O-methylcytidine-3'-phosphate
  modified_base 18: mod_base = OTHER; note = 2'-O-methyluridine-3'-phosphate
  modified_base 19: mod_base = OTHER; note = 2'-O-methylguanosine-3'-phosphate
  modified_base 20: mod_base = OTHER; note = 2'-O-methyluridine-3'-phosphate
  modified_base 21: mod_base = OTHER; note = 2'-O-methyladenosine-3'-phosphate
  modified_base 22: mod_base = OTHER; note = 2'-O-methyluridine-3'-phosphate
  modified_base 23: mod_base = OTHER; note = 2'-O-methylguanosine
ttgcatagaatgaaaactgtatg

SEQ ID NO: 5876 - RNA, 23 nt, synthetic construct
  source 1..23: mol_type = other RNA
  modified_base 1: mod_base = OTHER; note = 2'-O-methyluridine-3'-phosphate 5'-(E)-Vinylphosphonate
  modified_base 2: mod_base = OTHER; note = 2'-deoxy-2'-fluoroadenosine-3'-phosphate
  modified_base 3: mod_base = OTHER; note = 2'-O-methyluridine-3'-phosphate
  modified_base 4: mod_base = OTHER; note = 2'-O-methylguanosine-3'-phosphate
  modified_base 5: mod_base = OTHER; note = 2'-O-methylcytidine-3'-phosphate
  modified_base 6: mod_base = OTHER; note = 2'-deoxy-2'-fluoroadenosine-3'-phosphate
  modified_base 7: mod_base = OTHER; note = 2'-O-methyluridine-3'-phosphate
  modified_base 8: mod_base = OTHER; note = 2'-O-methyladenosine-3'-phosphate
  modified_base 9: mod_base = OTHER; note = 2'-O-methylguanosine-3'-phosphate
  modified_base 10: mod_base = OTHER; note = 2'-O-methyladenosine-3'-phosphate
  modified_base 11: mod_base = OTHER; note = 2'-O-methyladenosine-3'-phosphate
  modified_base 12: mod_base = OTHER; note = 2'-O-methyluridine-3'-phosphate
  modified_base 13: mod_base = OTHER; note = 2'-O-methylguanosine-3'-phosphate
  modified_base 14: mod_base = OTHER; note = 2'-deoxy-2'-fluoroadenosine-3'-phosphate
  modified_base 15: mod_base = OTHER; note = 2'-O-methyladenosine-3'-phosphate
  modified_base 16: mod_base = OTHER; note = 2'-deoxy-2'-fluoroadenosine-3'-phosphate
  modified_base 17: mod_base = OTHER; note = 2'-O-methyladenosine-3'-phosphate
  modified_base 18: mod_base = OTHER; note = 2'-O-methylcytidine-3'-phosphate
  modified_base 19: mod_base = OTHER; note = 2'-O-methyluridine-3'-phosphate
  modified_base 20: mod_base = OTHER; note = 2'-O-methylguanosine-3'-phosphate
  modified_base 21: mod_base = OTHER; note = 2'-O-methyluridine-3'-phosphate
  modified_base 22: mod_base = OTHER; note = 2'-O-methyladenosine-3'-phosphate
  modified_base 23: mod_base = OTHER; note = 2'-O-methyluridine
tatgcatagaatgaaaactgtat

SEQ ID NO: 5877 - RNA, 23 nt, synthetic construct
  source 1..23: mol_type = other RNA
  modified_base 1: mod_base = OTHER; note = 2'-O-methyluridine-3'-phosphate 5'-(E)-Vinylphosphonate
  modified_base 2: mod_base = OTHER; note = 2'-deoxy-2'-fluorocytidine-3'-phosphate
  modified_base 3: mod_base = OTHER; note = 2'-O-methyladenosine-3'-phosphate
  modified_base 4: mod_base = OTHER; note = 2'-O-methyluridine-3'-phosphate
  modified_base 5: mod_base = OTHER; note = 2'-O-methylguanosine-3'-phosphate
  modified_base 6: mod_base = OTHER; note = 2'-deoxy-2'-fluorocytidine-3'-phosphate
  modified_base 7: mod_base = OTHER; note = 2'-O-methyladenosine-3'-phosphate
  modified_base 8: mod_base = OTHER; note = 2'-O-methyluridine-3'-phosphate
  modified_base 9: mod_base = OTHER; note = 2'-O-methyladenosine-3'-phosphate
  modified_base 10: mod_base = OTHER; note = 2'-O-methylguanosine-3'-phosphate
  modified_base 11: mod_base = OTHER; note = 2'-O-methyladenosine-3'-phosphate
  modified_base 12: mod_base = OTHER; note = 2'-O-methyladenosine-3'-phosphate
  modified_base 13: mod_base = OTHER; note = 2'-O-methyluridine-3'-phosphate
  modified_base 14: mod_base = OTHER; note = 2'-deoxy-2'-fluoroguanosine-3'-phosphate
  modified_base 15: mod_base = OTHER; note = 2'-O-methyladenosine-3'-phosphate
  modified_base 16: mod_base = OTHER; note = 2'-deoxy-2'-fluoroadenosine-3'-phosphate
  modified_base 17: mod_base = OTHER; note = 2'-O-methyladenosine-3'-phosphate
  modified_base 18: mod_base = OTHER; note = 2'-O-methyladenosine-3'-phosphate
  modified_base 19: mod_base = OTHER; note = 2'-O-methylcytidine-3'-phosphate
  modified_base 20: mod_base = OTHER; note = 2'-O-methyluridine-3'-phosphate
  modified_base 21: mod_base = OTHER; note = 2'-O-methylguanosine-3'-phosphate
  modified_base 22: mod_base = OTHER; note = 2'-O-methyluridine-3'-phosphate
  modified_base 23: mod_base = OTHER; note = 2'-O-methyladenosine
tcatgcatagaatgaaaactgta

SEQ ID NO: 5878 - RNA, 23 nt, synthetic construct
  source 1..23: mol_type = other RNA
  modified_base 1: mod_base = OTHER; note = 2'-O-methyluridine-3'-phosphate 5'-(E)-Vinylphosphonate
  modified_base 2: mod_base = OTHER; note = 2'-deoxy-2'-fluorocytidine-3'-phosphate
  modified_base 3: mod_base = OTHER; note = 2'-O-methylcytidine-3'-phosphate
  modified_base 4: mod_base = OTHER; note = 2'-O-methyladenosine-3'-phosphate
  modified_base 5: mod_base = OTHER; note = 2'-O-methyluridine-3'-phosphate
  modified_base 6: mod_base = OTHER; note = 2'-deoxy-2'-fluoroguanosine-3'-phosphate
  modified_base 7: mod_base = OTHER; note = 2'-O-methylcytidine-3'-phosphate
  modified_base 8: mod_base = OTHER; note = 2'-O-methyladenosine-3'-phosphate
  modified_base 9: mod_base = OTHER; note = 2'-O-methyluridine-3'-phosphate
  modified_base 10: mod_base = OTHER; note = 2'-O-methyladenosine-3'-phosphate
  modified_base 11: mod_base = OTHER; note = 2'-O-methylguanosine-3'-phosphate
  modified_base 12: mod_base = OTHER; note = 2'-O-methyladenosine-3'-phosphate
  modified_base 13: mod_base = OTHER; note = 2'-O-methyladenosine-3'-phosphate
  modified_base 14: mod_base = OTHER; note = 2'-deoxy-2'-fluorouridine-3'-phosphate
  modified_base 15: mod_base = OTHER; note = 2'-O-methylguanosine-3'-phosphate
  modified_base 16: mod_base = OTHER; note = 2'-deoxy-2'-fluoroadenosine-3'-phosphate
  modified_base 17: mod_base = OTHER; note = 2'-O-methyladenosine-3'-phosphate
  modified_base 18: mod_base = OTHER; note = 2'-O-methyladenosine-3'-phosphate
  modified_base 19: mod_base = OTHER; note = 2'-O-methyladenosine-3'-phosphate
  modified_base 20: mod_base = OTHER; note = 2'-O-methylcytidine-3'-phosphate
  modified_base 21: mod_base = OTHER; note = 2'-O-methyluridine-3'-phosphate
  modified_base 22: mod_base = OTHER; note = 2'-O-methylguanosine-3'-phosphate
  modified_base 23: mod_base = OTHER; note = 2'-O-methyluridine
tccatgcatagaatgaaaactgt

SEQ ID NO: 5879 - RNA, 23 nt, synthetic construct
  source 1..23: mol_type = other RNA
  modified_base 1: mod_base = OTHER; note = 2'-O-methyluridine-3'-phosphate 5'-(E)-Vinylphosphonate
  modified_base 2: mod_base = OTHER; note = 2'-deoxy-2'-fluoroadenosine-3'-phosphate
  modified_base 3: mod_base = OTHER; note = 2'-O-methyladenosine-3'-phosphate
  modified_base 4: mod_base = OTHER; note = 2'-O-methyladenosine-3'-phosphate
  modified_base 5: mod_base = OTHER; note = 2'-O-methyladenosine-3'-phosphate
  modified_base 6: mod_base = OTHER; note = 2'-deoxy-2'-fluorouridine-3'-phosphate
  modified_base 7: mod_base = OTHER; note = 2'-O-methyluridine-3'-phosphate
  modified_base 8: mod_base = OTHER; note = 2'-O-methyluridine-3'-phosphate
  modified_base 9: mod_base = OTHER; note = 2'-O-methyladenosine-3'-phosphate
  modified_base 10: mod_base = OTHER; note = 2'-O-methylguanosine-3'-phosphate
  modified_base 11: mod_base = OTHER; note = 2'-O-methylguanosine-3'-phosphate
  modified_base 12: mod_base = OTHER; note = 2'-O-methylcytidine-3'-phosphate
  modified_base 13: mod_base = OTHER; note = 2'-O-methyladenosine-3'-phosphate
  modified_base 14: mod_base = OTHER; note = 2'-deoxy-2'-fluorocytidine-3'-phosphate
  modified_base 15: mod_base = OTHER; note = 2'-O-methyladenosine-3'-phosphate
  modified_base 16: mod_base = OTHER; note = 2'-deoxy-2'-fluorocytidine-3'-phosphate
  modified_base 17: mod_base = OTHER; note = 2'-O-methyladenosine-3'-phosphate
  modified_base 18: mod_base = OTHER; note = 2'-O-methyladenosine-3'-phosphate
  modified_base 19: mod_base = OTHER; note = 2'-O-methyluridine-3'-phosphate
  modified_base 20: mod_base = OTHER; note = 2'-O-methylcytidine-3'-phosphate
  modified_base 21: mod_base = OTHER; note = 2'-O-methylcytidine-3'-phosphate
  modified_base 22: mod_base = OTHER; note = 2'-O-methyluridine-3'-phosphate
  modified_base 23: mod_base = OTHER; note = 2'-O-methylcytidine
taaaatttaggcacacaatcctc

SEQ ID NO: 5880 - RNA, 23 nt, synthetic construct
  source 1..23: mol_type = other RNA
  modified_base 1: mod_base = OTHER; note = 2'-O-methyluridine-3'-phosphate 5'-(E)-Vinylphosphonate
  modified_base 2: mod_base = OTHER; note = 2'-deoxy-2'-fluorouridine-3'-phosphate
  modified_base 3: mod_base = OTHER; note = 2'-O-methylguanosine-3'-phosphate
  modified_base 4: mod_base = OTHER; note = 2'-O-methyluridine-3'-phosphate
  modified_base 5: mod_base = OTHER; note = 2'-O-methyluridine-3'-phosphate
  modified_base 6: mod_base = OTHER; note = 2'-deoxy-2'-fluoroadenosine-3'-phosphate
  modified_base 7: mod_base = OTHER; note = 2'-O-methylguanosine-3'-phosphate
  modified_base 8: mod_base = OTHER; note = 2'-O-methyladenosine-3'-phosphate
  modified_base 9: mod_base = OTHER; note = 2'-O-methylcytidine-3'-phosphate
  modified_base 10: mod_base = OTHER; note = 2'-O-methyladenosine-3'-phosphate
  modified_base 11: mod_base = OTHER; note = 2'-O-methyladenosine-3'-phosphate
  modified_base 12: mod_base = OTHER; note = 2'-O-methyladenosine-3'-phosphate
  modified_base 13: mod_base = OTHER; note = 2'-O-methyladenosine-3'-phosphate
  modified_base 14: mod_base = OTHER; note = 2'-deoxy-2'-fluorouridine-3'-phosphate
  modified_base 15: mod_base = OTHER; note = 2'-O-methyluridine-3'-phosphate
  modified_base 16: mod_base = OTHER; note = 2'-deoxy-2'-fluorouridine-3'-phosphate
  modified_base 17: mod_base = OTHER; note = 2'-O-methyladenosine-3'-phosphate
  modified_base 18: mod_base = OTHER; note = 2'-O-methylguanosine-3'-phosphate
  modified_base 19: mod_base = OTHER; note = 2'-O-methylguanosine-3'-phosphate
  modified_base 20: mod_base = OTHER; note = 2'-O-methylcytidine-3'-phosphate
  modified_base 21: mod_base = OTHER; note = 2'-O-methyladenosine-3'-phosphate
  modified_base 22: mod_base = OTHER; note = 2'-O-methylcytidine-3'-phosphate
  modified_base 23: mod_base = OTHER; note = 2'-O-methyladenosine
ttgttagacaaaatttaggcaca

SEQ ID NO: 5881 - RNA, 23 nt, synthetic construct
  source 1..23: mol_type = other RNA
  modified_base 1: mod_base = OTHER; note = 2'-O-methyluridine-3'-phosphate 5'-(E)-Vinylphosphonate
  modified_base 2: mod_base = OTHER; note = 2'-deoxy-2'-fluoroadenosine-3'-phosphate
  modified_base 3: mod_base = OTHER; note = 2'-O-methyluridine-3'-phosphate
  modified_base 4: mod_base = OTHER; note = 2'-O-methyluridine-3'-phosphate
  modified_base 5: mod_base = OTHER; note = 2'-O-methyluridine-3'-phosphate
  modified_base 6: mod_base = OTHER; note = 2'-deoxy-2'-fluoroguanosine-3'-phosphate
  modified_base 7: mod_base = OTHER; note = 2'-O-methyluridine-3'-phosphate
  modified_base 8: mod_base = OTHER; note = 2'-O-methyluridine-3'-phosphate
  modified_base 9: mod_base = OTHER; note = 2'-O-methyladenosine-3'-phosphate
  modified_base 10: mod_base = OTHER; note = 2'-O-methylguanosine-3'-phosphate
  modified_base 11: mod_base = OTHER; note = 2'-O-methyladenosine-3'-phosphate
  modified_base 12: mod_base = OTHER; note = 2'-O-methylcytidine-3'-phosphate
  modified_base 13: mod_base = OTHER; note = 2'-O-methyladenosine-3'-phosphate
  modified_base 14: mod_base = OTHER; note = 2'-deoxy-2'-fluoroadenosine-3'-phosphate
  modified_base 15: mod_base = OTHER; note = 2'-O-methyladenosine-3'-phosphate
  modified_base 16: mod_base = OTHER; note = 2'-deoxy-2'-fluoroadenosine-3'-phosphate
  modified_base 17: mod_base = OTHER; note = 2'-O-methyluridine-3'-phosphate
  modified_base 18: mod_base = OTHER; note = 2'-O-methyluridine-3'-phosphate
  modified_base 19: mod_base = OTHER; note = 2'-O-methyluridine-3'-phosphate
  modified_base 20: mod_base = OTHER; note = 2'-O-methyladenosine-3'-phosphate
  modified_base 21: mod_base = OTHER; note = 2'-O-methylguanosine-3'-phosphate
  modified_base 22: mod_base = OTHER; note = 2'-O-methylguanosine-3'-phosphate
  modified_base 23: mod_base = OTHER; note = 2'-O-methylcytidine
tatttgttagacaaaatttaggc

SEQ ID NO: 5882 - RNA, 23 nt, synthetic construct
  source 1..23: mol_type = other RNA
  modified_base 1: mod_base = OTHER; note = 2'-O-methyluridine-3'-phosphate 5'-(E)-Vinylphosphonate
  modified_base 2: mod_base = OTHER; note = 2'-deoxy-2'-fluorocytidine-3'-phosphate
  modified_base 3: mod_base = OTHER; note = 2'-O-methyladenosine-3'-phosphate
  modified_base 4: mod_base = OTHER; note = 2'-O-methyluridine-3'-phosphate
  modified_base 5: mod_base = OTHER; note = 2'-O-methyluridine-3'-phosphate
  modified_base 6: mod_base = OTHER; note = 2'-deoxy-2'-fluorouridine-3'-phosphate
  modified_base 7: mod_base = OTHER; note = 2'-O-methylguanosine-3'-phosphate
  modified_base 8: mod_base = OTHER; note = 2'-O-methyluridine-3'-phosphate
  modified_base 9: mod_base = OTHER; note = 2'-O-methyluridine-3'-phosphate
  modified_base 10: mod_base = OTHER; note = 2'-O-methyladenosine-3'-phosphate
  modified_base 11: mod_base = OTHER; note = 2'-O-methylguanosine-3'-phosphate
  modified_base 12: mod_base = OTHER; note = 2'-O-methyladenosine-3'-phosphate
  modified_base 13: mod_base = OTHER; note = 2'-O-methylcytidine-3'-phosphate
  modified_base 14: mod_base = OTHER; note = 2'-deoxy-2'-fluoroadenosine-3'-phosphate
  modified_base 15: mod_base = OTHER; note = 2'-O-methyladenosine-3'-phosphate
  modified_base 16: mod_base = OTHER; note = 2'-deoxy-2'-fluoroadenosine-3'-phosphate
  modified_base 17: mod_base = OTHER; note = 2'-O-methyladenosine-3'-phosphate
  modified_base 18: mod_base = OTHER; note = 2'-O-methyluridine-3'-phosphate
  modified_base 19: mod_base = OTHER; note = 2'-O-methyluridine-3'-phosphate
  modified_base 20: mod_base = OTHER; note = 2'-O-methyluridine-3'-phosphate
  modified_base 21: mod_base = OTHER; note = 2'-O-methyladenosine-3'-phosphate
  modified_base 22: mod_base = OTHER; note = 2'-O-methylguanosine-3'-phosphate
  modified_base 23: mod_base = OTHER; note = 2'-O-methylguanosine
tcatttgttagacaaaatttagg

SEQ ID NO: 5883 - RNA, 23 nt, synthetic construct
  source 1..23: mol_type = other RNA
  modified_base 1: mod_base = OTHER; note = 2'-O-methyluridine-3'-phosphate 5'-(E)-Vinylphosphonate
  modified_base 2: mod_base = OTHER; note = 2'-deoxy-2'-fluoroguanosine-3'-phosphate
  modified_base 3: mod_base = OTHER; note = 2'-O-methylcytidine-3'-phosphate
  modified_base 4: mod_base = OTHER; note = 2'-O-methyladenosine-3'-phosphate
  modified_base 5: mod_base = OTHER; note = 2'-O-methyluridine-3'-phosphate
  modified_base 6: mod_base = OTHER; note = 2'-deoxy-2'-fluorouridine-3'-phosphate
  modified_base 7: mod_base = OTHER; note = 2'-O-methyluridine-3'-phosphate
  modified_base 8: mod_base = OTHER; note = 2'-O-methylguanosine-3'-phosphate
  modified_base 9: mod_base = OTHER; note = 2'-O-methyluridine-3'-phosphate
  modified_base 10: mod_base = OTHER; note = 2'-O-methyluridine-3'-phosphate
  modified_base 11: mod_base = OTHER; note = 2'-O-methyladenosine-3'-phosphate
  modified_base 12: mod_base = OTHER; note = 2'-O-methylguanosine-3'-phosphate
  modified_base 13: mod_base = OTHER; note = 2'-O-methyladenosine-3'-phosphate
  modified_base 14: mod_base = OTHER; note = 2'-deoxy-2'-fluorocytidine-3'-phosphate
  modified_base 15: mod_base = OTHER; note = 2'-O-methyladenosine-3'-phosphate
  modified_base 16: mod_base = OTHER; note = 2'-deoxy-2'-fluoroadenosine-3'-phosphate
  modified_base 17: mod_base = OTHER; note = 2'-O-methyladenosine-3'-phosphate
  modified_base 18: mod_base = OTHER; note = 2'-O-methyladenosine-3'-phosphate
  modified_base 19: mod_base = OTHER; note = 2'-O-methyluridine-3'-phosphate
  modified_base 20: mod_base = OTHER; note = 2'-O-methyluridine-3'-phosphate
  modified_base 21: mod_base = OTHER; note = 2'-O-methyluridine-3'-phosphate
  modified_base 22: mod_base = OTHER; note = 2'-O-methyladenosine-3'-phosphate
  modified_base 23: mod_base = OTHER; note = 2'-O-methylguanosine
tgcatttgttagacaaaatttag

SEQ ID NO: 5884 - RNA, 23 nt, synthetic construct
  source 1..23: mol_type = other RNA
  modified_base 1: mod_base = OTHER; note = 2'-O-methyluridine-3'-phosphate 5'-(E)-Vinylphosphonate
  modified_base 2: mod_base = OTHER; note = 2'-deoxy-2'-fluorocytidine-3'-phosphate
  modified_base 3: mod_base = OTHER; note = 2'-O-methyluridine-3'-phosphate
  modified_base 4: mod_base = OTHER; note = 2'-O-methyluridine-3'-phosphate
  modified_base 5: mod_base = OTHER; note = 2'-O-methylguanosine-3'-phosphate
  modified_base 6: mod_base = OTHER; note = 2'-deoxy-2'-fluorocytidine-3'-phosphate
  modified_base 7: mod_base = OTHER; note = 2'-O-methyladenosine-3'-phosphate
  modified_base 8: mod_base = OTHER; note = 2'-O-methyluridine-3'-phosphate
  modified_base 9: mod_base = OTHER; note = 2'-O-methyluridine-3'-phosphate
  modified_base 10: mod_base = OTHER; note = 2'-O-methyluridine-3'-phosphate
  modified_base 11: mod_base = OTHER; note = 2'-O-methylguanosine-3'-phosphate
  modified_base 12: mod_base = OTHER; note = 2'-O-methyluridine-3'-phosphate
  modified_base 13: mod_base = OTHER; note = 2'-O-methyluridine-3'-phosphate
  modified_base 14: mod_base = OTHER; note = 2'-deoxy-2'-fluoroadenosine-3'-phosphate
  modified_base 15: mod_base = OTHER; note = 2'-O-methylguanosine-3'-phosphate
  modified_base 16: mod_base = OTHER; note = 2'-deoxy-2'-fluoroadenosine-3'-phosphate
  modified_base 17: mod_base = OTHER; note = 2'-O-methylcytidine-3'-phosphate
  modified_base 18: mod_base = OTHER; note = 2'-O-methyladenosine-3'-phosphate
  modified_base 19: mod_base = OTHER; note = 2'-O-methyladenosine-3'-phosphate
  modified_base 20: mod_base = OTHER; note = 2'-O-methyladenosine-3'-phosphate
  modified_base 21: mod_base = OTHER; note = 2'-O-methyladenosine-3'-phosphate
  modified_base 22: mod_base = OTHER; note = 2'-O-methyluridine-3'-phosphate
  modified_base 23: mod_base = OTHER; note = 2'-O-methyluridine
tcttgcatttgttagacaaaatt

SEQ ID NO: 5885 - RNA, 23 nt, synthetic construct
  source 1..23: mol_type = other RNA
  modified_base 1: mod_base = OTHER; note = 2'-O-methyluridine-3'-phosphate 5'-(E)-Vinylphosphonate
  modified_base 2: mod_base = OTHER; note = 2'-deoxy-2'-fluorouridine-3'-phosphate
  modified_base 3: mod_base = OTHER; note = 2'-O-methyladenosine-3'-phosphate
  modified_base 4: mod_base = OTHER; note = 2'-O-methyluridine-3'-phosphate
  modified_base 5: mod_base = OTHER; note = 2'-O-methyluridine-3'-phosphate
  modified_base 6: mod_base = OTHER; note = 2'-deoxy-2'-fluoroadenosine-3'-phosphate
  modified_base 7: mod_base = OTHER; note = 2'-O-methylguanosine-3'-phosphate
  modified_base 8: mod_base = OTHER; note = 2'-O-methyluridine-3'-phosphate
  modified_base 9: mod_base = OTHER; note = 2'-O-methyladenosine-3'-phosphate
  modified_base 10: mod_base = OTHER; note = 2'-O-methyladenosine-3'-phosphate
  modified_base 11: mod_base = OTHER; note = 2'-O-methyladenosine-3'-phosphate
  modified_base 12: mod_base = OTHER; note = 2'-O-methyluridine-3'-phosphate
  modified_base 13: mod_base = OTHER; note = 2'-O-methylguanosine-3'-phosphate
  modified_base 14: mod_base = OTHER; note = 2'-deoxy-2'-fluorouridine-3'-phosphate
  modified_base 15: mod_base = OTHER; note = 2'-O-methylcytidine-3'-phosphate
  modified_base 16: mod_base = OTHER; note = 2'-deoxy-2'-fluoroadenosine-3'-phosphate
  modified_base 17: mod_base = OTHER; note = 2'-O-methyluridine-3'-phosphate
  modified_base 18: mod_base = OTHER; note = 2'-O-methyluridine-3'-phosphate
  modified_base 19: mod_base = OTHER; note = 2'-O-methylcytidine-3'-phosphate
  modified_base 20: mod_base = OTHER; note = 2'-O-methyluridine-3'-phosphate
  modified_base 21: mod_base = OTHER; note = 2'-O-methyladenosine-3'-phosphate
  modified_base 22: mod_base = OTHER; note = 2'-O-methylcytidine-3'-phosphate
  modified_base 23: mod_base = OTHER; note = 2'-O-methylguanosine
ttattagtaaatgtcattctacg

SEQ ID NO: 5886 - RNA, 23 nt, synthetic construct
  source 1..23: mol_type = other RNA
  modified_base 1: mod_base = OTHER; note = 2'-O-methyluridine-3'-phosphate 5'-(E)-Vinylphosphonate
  modified_base 2: mod_base = OTHER; note = 2'-deoxy-2'-fluorouridine-3'-phosphate
  modified_base 3: mod_base = OTHER; note = 2'-O-methyladenosine-3'-phosphate
  modified_base 4: mod_base = OTHER; note = 2'-O-methyluridine-3'-phosphate
  modified_base 5: mod_base = OTHER; note = 2'-O-methyluridine-3'-phosphate
  modified_base 6: mod_base = OTHER; note = 2'-deoxy-2'-fluoroadenosine-3'-phosphate
  modified_base 7: mod_base = OTHER; note = 2'-O-methyluridine-3'-phosphate
  modified_base 8: mod_base = OTHER; note = 2'-O-methyluridine-3'-phosphate
  modified_base 9: mod_base = OTHER; note = 2'-O-methyluridine-3'-phosphate
  modified_base 10: mod_base = OTHER; note = 2'-O-methyladenosine-3'-phosphate
  modified_base 11: mod_base = OTHER; note = 2'-O-methylguanosine-3'-phosphate
  modified_base 12: mod_base = OTHER; note = 2'-O-methylcytidine-3'-phosphate
  modified_base 13: mod_base = OTHER; note = 2'-O-methylcytidine-3'-phosphate
  modified_base 14: mod_base = OTHER; note = 2'-deoxy-2'-fluorouridine-3'-phosphate
  modified_base 15: mod_base = OTHER; note = 2'-O-methyladenosine-3'-phosphate
  modified_base 16: mod_base = OTHER; note = 2'-deoxy-2'-fluorouridine-3'-phosphate
  modified_base 17: mod_base = OTHER; note = 2'-O-methylguanosine-3'-phosphate
  modified_base 18: mod_base = OTHER; note = 2'-O-methylguanosine-3'-phosphate
  modified_base 19: mod_base = OTHER; note = 2'-O-methyladenosine-3'-phosphate
  modified_base 20: mod_base = OTHER; note = 2'-O-methyladenosine-3'-phosphate
  modified_base 21: mod_base = OTHER; note = 2'-O-methylguanosine-3'-phosphate
  modified_base 22: mod_base = OTHER; note = 2'-O-methyladenosine-3'-phosphate
  modified_base 23: mod_base = OTHER; note = 2'-O-methyladenosine
ttattatttagcctatggaagaa

SEQ ID NO: 5887 - RNA, 23 nt, synthetic construct
  source 1..23: mol_type = other RNA
  modified_base 1: mod_base = OTHER; note = 2'-O-methyluridine-3'-phosphate 5'-(E)-Vinylphosphonate
  modified_base 2: mod_base = OTHER; note = 2'-deoxy-2'-fluorocytidine-3'-phosphate
  modified_base 3: mod_base = OTHER; note = 2'-O-methyluridine-3'-phosphate
  modified_base 4: mod_base = OTHER; note = 2'-O-methyladenosine-3'-phosphate
  modified_base 5: mod_base = OTHER; note = 2'-O-methylguanosine-3'-phosphate
  modified_base 6: mod_base = OTHER; note = 2'-deoxy-2'-fluoroadenosine-3'-phosphate
  modified_base 7: mod_base = OTHER; note = 2'-O-methyladenosine-3'-phosphate
  modified_base 8: mod_base = OTHER; note = 2'-O-methyluridine-3'-phosphate
  modified_base 9: mod_base = OTHER; note = 2'-O-methyluridine-3'-phosphate
  modified_base 10: mod_base = OTHER; note = 2'-O-methyluridine-3'-phosphate
  modified_base 11: mod_base = OTHER; note = 2'-O-methyladenosine-3'-phosphate
  modified_base 12: mod_base = OTHER; note = 2'-O-methyladenosine-3'-phosphate
  modified_base 13: mod_base = OTHER; note = 2'-O-methyluridine-3'-phosphate
  modified_base 14: mod_base = OTHER; note = 2'-deoxy-2'-fluoroadenosine-3'-phosphate
  modified_base 15: mod_base = OTHER; note = 2'-O-methyluridine-3'-phosphate
  modified_base 16: mod_base = OTHER; note = 2'-deoxy-2'-fluorouridine-3'-phosphate
  modified_base 17: mod_base = OTHER; note = 2'-O-methyluridine-3'-phosphate
  modified_base 18: mod_base = OTHER; note = 2'-O-methyluridine-3'-phosphate
  modified_base 19: mod_base = OTHER; note = 2'-O-methylguanosine-3'-phosphate
  modified_base 20: mod_base = OTHER; note = 2'-O-methylguanosine-3'-phosphate
  modified_base 21: mod_base = OTHER; note = 2'-O-methylcytidine-3'-phosphate
  modified_base 22: mod_base = OTHER; note = 2'-O-methyluridine-3'-phosphate
  modified_base 23: mod_base = OTHER; note = 2'-O-methylcytidine
tctagaatttaatattttggctc

SEQ ID NO: 5888 - RNA, 23 nt, synthetic construct
  source 1..23: mol_type = other RNA
  modified_base 1: mod_base = OTHER; note = 2'-O-methyluridine-3'-phosphate 5'-(E)-Vinylphosphonate
  modified_base 2: mod_base = OTHER; note = 2'-deoxy-2'-fluorocytidine-3'-phosphate
  modified_base 3: mod_base = OTHER; note = 2'-O-methylguanosine-3'-phosphate
  modified_base 4: mod_base = OTHER; note = 2'-O-methylguanosine-3'-phosphate
  modified_base 5: mod_base = OTHER; note = 2'-O-methyladenosine-3'-phosphate
  modified_base 6: mod_base = OTHER; note = 2'-deoxy-2'-fluoroadenosine-3'-phosphate
  modified_base 7: mod_base = OTHER; note = 2'-O-methyladenosine-3'-phosphate
  modified_base 8: mod_base = OTHER; note = 2'-O-methyladenosine-3'-phosphate
  modified_base 9: mod_base = OTHER; note = 2'-O-methylguanosine-3'-phosphate
  modified_base 10: mod_base = OTHER; note = 2'-O-methyladenosine-3'-phosphate
  modified_base 11: mod_base = OTHER; note = 2'-O-methyladenosine-3'-phosphate
  modified_base 12: mod_base = OTHER; note = 2'-O-methylcytidine-3'-phosphate
  modified_base 13: mod_base = OTHER; note = 2'-O-methyluridine-3'-phosphate
  modified_base 14: mod_base = OTHER; note = 2'-deoxy-2'-fluoroadenosine-3'-phosphate
  modified_base 15: mod_base = OTHER; note = 2'-O-methylguanosine-3'-phosphate
  modified_base 16: mod_base = OTHER; note = 2'-deoxy-2'-fluoroadenosine-3'-phosphate
  modified_base 17: mod_base = OTHER; note = 2'-O-methyladenosine-3'-phosphate
  modified_base 18: mod_base = OTHER; note = 2'-O-methyluridine-3'-phosphate
  modified_base 19: mod_base = OTHER; note = 2'-O-methyluridine-3'-phosphate
  modified_base 20: mod_base = OTHER; note = 2'-O-methyluridine-3'-phosphate
  modified_base 21: mod_base = OTHER; note = 2'-O-methyladenosine-3'-phosphate
  modified_base 22: mod_base = OTHER; note = 2'-O-methyladenosine-3'-phosphate
  modified_base 23: mod_base = OTHER; note = 2'-O-methyluridine
tcggaaaagaactagaatttaat

SEQ ID NO: 5889 - RNA, 23 nt, synthetic construct
  source 1..23: mol_type = other RNA
  modified_base 1: mod_base = OTHER; note = 2'-O-methyluridine-3'-phosphate 5'-(E)-Vinylphosphonate
  modified_base 2: mod_base = OTHER; note = 2'-deoxy-2'-fluoroguanosine-3'-phosphate
  modified_base 3: mod_base = OTHER; note = 2'-O-methylcytidine-3'-phosphate
  modified_base 4: mod_base = OTHER; note = 2'-O-methylguanosine-3'-phosphate
  modified_base 5: mod_base = OTHER; note = 2'-O-methylguanosine-3'-phosphate
  modified_base 6: mod_base = OTHER; note = 2'-deoxy-2'-fluoroadenosine-3'-phosphate
  modified_base 7: mod_base = OTHER; note = 2'-O-methyladenosine-3'-phosphate
  modified_base 8: mod_base = OTHER; note = 2'-O-methyladenosine-3'-phosphate
  modified_base 9: mod_base = OTHER; note = 2'-O-methyladenosine-3'-phosphate
  modified_base 10: mod_base = OTHER; note = 2'-O-methylguanosine-3'-phosphate
  modified_base 11: mod_base = OTHER; note = 2'-O-methyladenosine-3'-phosphate
  modified_base 12: mod_base = OTHER; note = 2'-O-methyladenosine-3'-phosphate
  modified_base 13: mod_base = OTHER; note = 2'-O-methylcytidine-3'-phosphate
  modified_base 14: mod_base = OTHER; note = 2'-deoxy-2'-fluorouridine-3'-phosphate
  modified_base 15: mod_base = OTHER; note = 2'-O-methyladenosine-3'-phosphate
  modified_base 16: mod_base = OTHER; note = 2'-deoxy-2'-fluoroguanosine-3'-phosphate
  modified_base 17: mod_base = OTHER; note = 2'-O-methyladenosine-3'-phosphate
  modified_base 18: mod_base = OTHER; note = 2'-O-methyladenosine-3'-phosphate
  modified_base 19: mod_base = OTHER; note = 2'-O-methyluridine-3'-phosphate
  modified_base 20: mod_base = OTHER; note = 2'-O-methyluridine-3'-phosphate
  modified_base 21: mod_base = OTHER; note = 2'-O-methyluridine-3'-phosphate
  modified_base 22: mod_base = OTHER; note = 2'-O-methyladenosine-3'-phosphate
  modified_base 23: mod_base = OTHER; note = 2'-O-methyladenosine
tgcggaaaagaactagaatttaa

SEQ ID NO: 5890 - RNA, 23 nt, synthetic construct
  source 1..23: mol_type = other RNA
  modified_base 1: mod_base = OTHER; note = 2'-O-methyluridine-3'-phosphate 5'-(E)-Vinylphosphonate
  modified_base 2: mod_base = OTHER; note = 2'-deoxy-2'-fluorouridine-3'-phosphate
  modified_base 3: mod_base = OTHER; note = 2'-O-methylguanosine-3'-phosphate
  modified_base 4: mod_base = OTHER; note = 2'-O-methylcytidine-3'-phosphate
  modified_base 5: mod_base = OTHER; note = 2'-O-methylguanosine-3'-phosphate
  modified_base 6: mod_base = OTHER; note = 2'-deoxy-2'-fluoroguanosine-3'-phosphate
  modified_base 7: mod_base = OTHER; note = 2'-O-methyladenosine-3'-phosphate
  modified_base 8: mod_base = OTHER; note = 2'-O-methyladenosine-3'-phosphate
  modified_base 9: mod_base = OTHER; note = 2'-O-methyladenosine-3'-phosphate
  modified_base 10: mod_base = OTHER; note = 2'-O-methyladenosine-3'-phosphate
  modified_base 11: mod_base = OTHER; note = 2'-O-methylguanosine-3'-phosphate
  modified_base 12: mod_base = OTHER; note = 2'-O-methyladenosine-3'-phosphate
  modified_base 13: mod_base = OTHER; note = 2'-O-methyladenosine-3'-phosphate
  modified_base 14: mod_base = OTHER; note = 2'-deoxy-2'-fluorocytidine-3'-phosphate
  modified_base 15: mod_base = OTHER; note = 2'-O-methyluridine-3'-phosphate
  modified_base 16: mod_base = OTHER; note = 2'-deoxy-2'-fluoroadenosine-3'-phosphate
  modified_base 17: mod_base = OTHER; note = 2'-O-methylguanosine-3'-phosphate
  modified_base 18: mod_base = OTHER; note = 2'-O-methyladenosine-3'-phosphate
  modified_base 19: mod_base = OTHER; note = 2'-O-methyladenosine-3'-phosphate
  modified_base 20: mod_base = OTHER; note = 2'-O-methyluridine-3'-phosphate
  modified_base 21: mod_base = OTHER; note = 2'-O-methyluridine-3'-phosphate
  modified_base 22: mod_base = OTHER; note = 2'-O-methyluridine-3'-phosphate
  modified_base 23: mod_base = OTHER; note = 2'-O-methyladenosine
ttgcggaaaagaactagaattta

SEQ ID NO: 5891 - RNA, 23 nt, synthetic construct
  source 1..23: mol_type = other RNA
  modified_base 1: mod_base = OTHER; note = 2'-O-methyluridine-3'-phosphate 5'-(E)-Vinylphosphonate
  modified_base 2: mod_base = OTHER; note = 2'-deoxy-2'-fluorouridine-3'-phosphate
  modified_base 3: mod_base = OTHER; note = 2'-O-methyluridine-3'-phosphate
  modified_base 4: mod_base = OTHER; note = 2'-O-methylguanosine-3'-phosphate
  modified_base 5: mod_base = OTHER; note = 2'-O-methylcytidine-3'-phosphate
  modified_base 6: mod_base = OTHER; note = 2'-deoxy-2'-fluoroguanosine-3'-phosphate
  modified_base 7: mod_base = OTHER; note = 2'-O-methylguanosine-3'-phosphate
  modified_base 8: mod_base = OTHER; note = 2'-O-methyladenosine-3'-phosphate
  modified_base 9: mod_base = OTHER; note = 2'-O-methyladenosine-3'-phosphate
  modified_base 10: mod_base = OTHER; note = 2'-O-methyladenosine-3'-phosphate
  modified_base 11: mod_base = OTHER; note = 2'-O-methyladenosine-3'-phosphate
  modified_base 12: mod_base = OTHER; note = 2'-O-methylguanosine-3'-phosphate
  modified_base 13: mod_base = OTHER; note = 2'-O-methyladenosine-3'-phosphate
  modified_base 14: mod_base = OTHER; note = 2'-deoxy-2'-fluoroadenosine-3'-phosphate
  modified_base 15: mod_base = OTHER; note = 2'-O-methylcytidine-3'-phosphate
  modified_base 16: mod_base = OTHER; note = 2'-deoxy-2'-fluorouridine-3'-phosphate
  modified_base 17: mod_base = OTHER; note = 2'-O-methyladenosine-3'-phosphate
  modified_base 18: mod_base = OTHER; note = 2'-O-methylguanosine-3'-phosphate
  modified_base 19: mod_base = OTHER; note = 2'-O-methyladenosine-3'-phosphate
  modified_base 20: mod_base = OTHER; note = 2'-O-methyladenosine-3'-phosphate
  modified_base 21: mod_base = OTHER; note = 2'-O-methyluridine-3'-phosphate
  modified_base 22: mod_base = OTHER; note = 2'-O-methyluridine-3'-phosphate
  modified_base 23: mod_base = OTHER; note = 2'-O-methyluridine
tttgcggaaaagaactagaattt

SEQ ID NO: 5892 - RNA, 23 nt, synthetic construct
  source 1..23: mol_type = other RNA
  modified_base 1: mod_base = OTHER; note = 2'-O-methyluridine-3'-phosphate 5'-(E)-Vinylphosphonate
  modified_base 2: mod_base = OTHER; note = 2'-deoxy-2'-fluoroadenosine-3'-phosphate
  modified_base 3: mod_base = OTHER; note = 2'-O-methyluridine-3'-phosphate
  modified_base 4: mod_base = OTHER; note = 2'-O-methyluridine-3'-phosphate
  modified_base 5: mod_base = OTHER; note = 2'-O-methylguanosine-3'-phosphate
  modified_base 6: mod_base = OTHER; note = 2'-deoxy-2'-fluorocytidine-3'-phosphate
  modified_base 7: mod_base = OTHER; note = 2'-O-methylguanosine-3'-phosphate
  modified_base 8: mod_base = OTHER; note = 2'-O-methylguanosine-3'-phosphate
  modified_base 9: mod_base = OTHER; note = 2'-O-methyladenosine-3'-phosphate
  modified_base 10: mod_base = OTHER; note = 2'-O-methyladenosine-3'-phosphate
  modified_base 11: mod_base = OTHER; note = 2'-O-methyladenosine-3'-phosphate
  modified_base 12: mod_base = OTHER; note = 2'-O-methyladenosine-3'-phosphate
  modified_base 13: mod_base = OTHER; note = 2'-O-methylguanosine-3'-phosphate
  modified_base 14: mod_base = OTHER; note = 2'-deoxy-2'-fluoroadenosine-3'-phosphate
  modified_base 15: mod_base = OTHER; note = 2'-O-methyladenosine-3'-phosphate
  modified_base 16: mod_base = OTHER; note = 2'-deoxy-2'-fluorocytidine-3'-phosphate
  modified_base 17: mod_base = OTHER; note = 2'-O-methyluridine-3'-phosphate
  modified_base 18: mod_base = OTHER; note = 2'-O-methyladenosine-3'-phosphate
  modified_base 19: mod_base = OTHER; note = 2'-O-methylguanosine-3'-phosphate
  modified_base 20: mod_base = OTHER; note = 2'-O-methyladenosine-3'-phosphate
  modified_base 21: mod_base = OTHER; note = 2'-O-methyladenosine-3'-phosphate
  modified_base 22: mod_base = OTHER; note = 2'-O-methyluridine-3'-phosphate
  modified_base 23: mod_base = OTHER; note = 2'-O-methyluridine
tattgcggaaaagaactagaatt

SEQ ID NO: 5893 - RNA, 23 nt, synthetic construct
  source 1..23: mol_type = other RNA
  modified_base 1: mod_base = OTHER; note = 2'-O-methyluridine-3'-phosphate 5'-(E)-Vinylphosphonate
  modified_base 2: mod_base = OTHER; note = 2'-deoxy-2'-fluorocytidine-3'-phosphate
  modified_base 3: mod_base = OTHER; note = 2'-O-methyladenosine-3'-phosphate
  modified_base 4: mod_base = OTHER; note = 2'-O-methyluridine-3'-phosphate
  modified_base 5: mod_base = OTHER; note = 2'-O-methyluridine-3'-phosphate
  modified_base 6: mod_base = OTHER; note = 2'-deoxy-2'-fluoroguanosine-3'-phosphate
  modified_base 7: mod_base = OTHER; note = 2'-O-methylcytidine-3'-phosphate
  modified_base 8: mod_base = OTHER; note = 2'-O-methylguanosine-3'-phosphate
  modified_base 9: mod_base = OTHER; note = 2'-O-methylguanosine-3'-phosphate
  modified_base 10: mod_base = OTHER; note = 2'-O-methyladenosine-3'-phosphate
  modified_base 11: mod_base = OTHER; note = 2'-O-methyladenosine-3'-phosphate
  modified_base 12: mod_base = OTHER; note = 2'-O-methyladenosine-3'-phosphate
  modified_base 13: mod_base = OTHER; note = 2'-O-methyladenosine-3'-phosphate
  modified_base 14: mod_base = OTHER; note = 2'-deoxy-2'-fluoroguanosine-3'-phosphate
  modified_base 15: mod_base = OTHER; note = 2'-O-methyladenosine-3'-phosphate
  modified_base 16: mod_base = OTHER; note = 2'-deoxy-2'-fluoroadenosine-3'-phosphate
  modified_base 17: mod_base = OTHER; note = 2'-O-methylcytidine-3'-phosphate
  modified_base 18: mod_base = OTHER; note = 2'-O-methyluridine-3'-phosphate
  modified_base 19: mod_base = OTHER; note = 2'-O-methyladenosine-3'-phosphate
  modified_base 20: mod_base = OTHER; note = 2'-O-methylguanosine-3'-phosphate
  modified_base 21: mod_base = OTHER; note = 2'-O-methyladenosine-3'-phosphate
  modified_base 22: mod_base = OTHER; note = 2'-O-methyladenosine-3'-phosphate
  modified_base 23: mod_base = OTHER; note = 2'-O-methyluridine
tcattgcggaaaagaactagaat

SEQ ID NO: 5894 - RNA, 23 nt, synthetic construct
  source 1..23: mol_type = other RNA
  modified_base 1: mod_base = OTHER; note = 2'-O-methyluridine-3'-phosphate 5'-(E)-Vinylphosphonate
  modified_base 2: mod_base = OTHER; note = 2'-deoxy-2'-fluorouridine-3'-phosphate
  modified_base 3: mod_base = OTHER; note = 2'-O-methylcytidine-3'-phosphate
  modified_base 4: mod_base = OTHER; note = 2'-O-methyladenosine-3'-phosphate
  modified_base 5: mod_base = OTHER; note = 2'-O-methyluridine-3'-phosphate
  modified_base 6: mod_base = OTHER; note = 2'-deoxy-2'-fluorouridine-3'-phosphate
  modified_base 7: mod_base = OTHER; note = 2'-O-methylguanosine-3'-phosphate
  modified_base 8: mod_base = OTHER; note = 2'-O-methylcytidine-3'-phosphate
  modified_base 9: mod_base = OTHER; note = 2'-O-methylguanosine-3'-phosphate
  modified_base 10: mod_base = OTHER; note = 2'-O-methylguanosine-3'-phosphate
  modified_base 11: mod_base = OTHER; note = 2'-O-methyladenosine-3'-phosphate
  modified_base 12: mod_base = OTHER; note = 2'-O-methyladenosine-3'-phosphate
  modified_base 13: mod_base = OTHER; note = 2'-O-methyladenosine-3'-phosphate
  modified_base 14: mod_base = OTHER; note = 2'-deoxy-2'-fluoroadenosine-3'-phosphate
  modified_base 15: mod_base = OTHER; note = 2'-O-methylguanosine-3'-phosphate
  modified_base 16: mod_base = OTHER; note = 2'-deoxy-2'-fluoroadenosine-3'-phosphate
  modified_base 17: mod_base = OTHER; note = 2'-O-methyladenosine-3'-phosphate
  modified_base 18: mod_base = OTHER; note = 2'-O-methylcytidine-3'-phosphate
  modified_base 19: mod_base = OTHER; note = 2'-O-methyluridine-3'-phosphate
  modified_base 20: mod_base = OTHER; note = 2'-O-methyladenosine-3'-phosphate
  modified_base 21: mod_base = OTHER; note = 2'-O-methylguanosine-3'-phosphate
  modified_base 22: mod_base = OTHER; note = 2'-O-methyladenosine-3'-phosphate
  modified_base 23: mod_base = OTHER; note = 2'-O-methyladenosine
ttcattgcggaaaagaactagaa

SEQ ID NO: 5895 - RNA, 23 nt, synthetic construct
  source 1..23: mol_type = other RNA
  modified_base 1: mod_base = OTHER; note = 2'-O-methyluridine-3'-phosphate 5'-(E)-Vinylphosphonate
  modified_base 2: mod_base = OTHER; note = 2'-deoxy-2'-fluoroguanosine-3'-phosphate
  modified_base 3: mod_base = OTHER; note = 2'-O-methyluridine-3'-phosphate
  modified_base 4: mod_base = OTHER; note = 2'-O-methylcytidine-3'-phosphate
  modified_base 5: mod_base = OTHER; note = 2'-O-methyladenosine-3'-phosphate
  modified_base 6: mod_base = OTHER; note = 2'-deoxy-2'-fluorouridine-3'-phosphate
  modified_base 7: mod_base = OTHER; note = 2'-O-methyluridine-3'-phosphate
  modified_base 8: mod_base = OTHER; note = 2'-O-methylguanosine-3'-phosphate
  modified_base 9: mod_base = OTHER; note = 2'-O-methylcytidine-3'-phosphate
  modified_base 10: mod_base = OTHER; note = 2'-O-methylguanosine-3'-phosphate
  modified_base 11: mod_base = OTHER; note = 2'-O-methylguanosine-3'-phosphate
  modified_base 12: mod_base = OTHER; note = 2'-O-methyladenosine-3'-phosphate
  modified_base 13: mod_base = OTHER; note = 2'-O-methyladenosine-3'-phosphate
  modified_base 14: mod_base = OTHER; note = 2'-deoxy-2'-fluoroadenosine-3'-phosphate
  modified_base 15: mod_base = OTHER; note = 2'-O-methyladenosine-3'-phosphate
  modified_base 16: mod_base = OTHER; note = 2'-deoxy-2'-fluoroguanosine-3'-phosphate
  modified_base 17: mod_base = OTHER; note = 2'-O-methyladenosine-3'-phosphate
  modified_base 18: mod_base = OTHER; note = 2'-O-methyladenosine-3'-phosphate
  modified_base 19: mod_base = OTHER; note = 2'-O-methylcytidine-3'-phosphate
  modified_base 20: mod_base = OTHER; note = 2'-O-methyluridine-3'-phosphate
  modified_base 21: mod_base = OTHER; note = 2'-O-methyladenosine-3'-phosphate
  modified_base 22: mod_base = OTHER; note = 2'-O-methylguanosine-3'-phosphate
  modified_base 23: mod_base = OTHER; note = 2'-O-methyladenosine
tgtcattgcggaaaagaactaga

SEQ ID NO: 5896 - RNA, 23 nt, synthetic construct
  source 1..23: mol_type = other RNA
  modified_base 1: mod_base = OTHER; note = 2'-O-methyluridine-3'-phosphate 5'-(E)-Vinylphosphonate
  modified_base 2: mod_base = OTHER; note = 2'-deoxy-2'-fluoroadenosine-3'-phosphate
  modified_base 3: mod_base = OTHER; note = 2'-O-methylguanosine-3'-phosphate
  modified_base 4: mod_base = OTHER; note = 2'-O-methyluridine-3'-phosphate
  modified_base 5: mod_base = OTHER; note = 2'-O-methylcytidine-3'-phosphate
  modified_base 6: mod_base = OTHER; note = 2'-deoxy-2'-fluoroadenosine-3'-phosphate
  modified_base 7: mod_base = OTHER; note = 2'-O-methyluridine-3'-phosphate
  modified_base 8: mod_base = OTHER; note = 2'-O-methyluridine-3'-phosphate
  modified_base 9: mod_base = OTHER; note = 2'-O-methylguanosine-3'-phosphate
  modified_base 10: mod_base = OTHER; note = 2'-O-methylcytidine-3'-phosphate
  modified_base 11: mod_base = OTHER; note = 2'-O-methylguanosine-3'-phosphate
  modified_base 12: mod_base = OTHER; note = 2'-O-methylguanosine-3'-phosphate
  modified_base 13: mod_base = OTHER; note = 2'-O-methyladenosine-3'-phosphate
  modified_base 14: mod_base = OTHER; note = 2'-deoxy-2'-fluoroadenosine-3'-phosphate
  modified_base 15: mod_base = OTHER; note = 2'-O-methyladenosine-3'-phosphate
  modified_base 16: mod_base = OTHER; note = 2'-deoxy-2'-fluoroadenosine-3'-phosphate
  modified_base 17: mod_base = OTHER; note = 2'-O-methylguanosine-3'-phosphate
  modified_base 18: mod_base = OTHER; note = 2'-O-methyladenosine-3'-phosphate
  modified_base 19: mod_base = OTHER; note = 2'-O-methyladenosine-3'-phosphate
  modified_base 20: mod_base = OTHER; note = 2'-O-methylcytidine-3'-phosphate
  modified_base 21: mod_base = OTHER; note = 2'-O-methyluridine-3'-phosphate
  modified_base 22: mod_base = OTHER; note = 2'-O-methyladenosine-3'-phosphate
  modified_base 23: mod_base = OTHER; note = 2'-O-methylguanosine
tagtcattgcggaaaagaactag

SEQ ID NO: 5897 - RNA, 23 nt, synthetic construct
  source 1..23: mol_type = other RNA
  modified_base 1: mod_base = OTHER; note = 2'-O-methyluridine-3'-phosphate 5'-(E)-Vinylphosphonate
  modified_base 2: mod_base = OTHER; note = 2'-deoxy-2'-fluorouridine-3'-phosphate
  modified_base 3: mod_base = OTHER; note = 2'-O-methyladenosine-3'-phosphate
  modified_base 4: mod_base = OTHER; note = 2'-O-methylguanosine-3'-phosphate
  modified_base 5: mod_base = OTHER; note = 2'-O-methyluridine-3'-phosphate
  modified_base 6: mod_base = OTHER; note = 2'-deoxy-2'-fluorocytidine-3'-phosphate
  modified_base 7: mod_base = OTHER; note = 2'-O-methyladenosine-3'-phosphate
  modified_base 8: mod_base = OTHER; note = 2'-O-methyluridine-3'-phosphate
  modified_base 9: mod_base = OTHER; note = 2'-O-methyluridine-3'-phosphate
  modified_base 10: mod_base = OTHER; note = 2'-O-methylguanosine-3'-phosphate
  modified_base 11: mod_base = OTHER; note = 2'-O-methylcytidine-3'-phosphate
  modified_base 12: mod_base = OTHER; note = 2'-O-methylguanosine-3'-phosphate
  modified_base 13: mod_base = OTHER; note = 2'-O-methylguanosine-3'-phosphate
  modified_base 14: mod_base = OTHER; note = 2'-deoxy-2'-fluoroadenosine-3'-phosphate
  modified_base 15: mod_base = OTHER; note = 2'-O-methyladenosine-3'-phosphate
  modified_base 16: mod_base = OTHER; note = 2'-deoxy-2'-fluoroadenosine-3'-phosphate
  modified_base 17: mod_base = OTHER; note = 2'-O-methyladenosine-3'-phosphate
  modified_base 18: mod_base = OTHER; note = 2'-O-methylguanosine-3'-phosphate
  modified_base 19: mod_base = OTHER; note = 2'-O-methyladenosine-3'-phosphate
  modified_base 20: mod_base = OTHER; note = 2'-O-methyladenosine-3'-phosphate
  modified_base 21: mod_base = OTHER; note = 2'-O-methylcytidine-3'-phosphate
  modified_base 22: mod_base = OTHER; note = 2'-O-methyluridine-3'-phosphate
  modified_base 23: mod_base = OTHER; note = 2'-O-methyladenosine
ttagtcattgcggaaaagaacta

SEQ ID NO: 5898 - RNA, 23 nt, synthetic construct
  source 1..23: mol_type = other RNA
  modified_base 1: mod_base = OTHER; note = 2'-O-methyluridine-3'-phosphate 5'-(E)-Vinylphosphonate
  modified_base 2: mod_base = OTHER; note = 2'-deoxy-2'-fluorocytidine-3'-phosphate
  modified_base 3: mod_base = OTHER; note = 2'-O-methyluridine-3'-phosphate
  modified_base 4: mod_base = OTHER; note = 2'-O-methyladenosine-3'-phosphate
  modified_base 5: mod_base = OTHER; note = 2'-O-methylguanosine-3'-phosphate
  modified_base 6: mod_base = OTHER; note = 2'-deoxy-2'-fluorouridine-3'-phosphate
  modified_base 7: mod_base = OTHER; note = 2'-O-methylcytidine-3'-phosphate
  modified_base 8: mod_base = OTHER; note = 2'-O-methyladenosine-3'-phosphate
  modified_base 9: mod_base = OTHER; note = 2'-O-methyluridine-3'-phosphate
  modified_base 10: mod_base = OTHER; note = 2'-O-methyluridine-3'-phosphate
  modified_base 11: mod_base = OTHER; note = 2'-O-methylguanosine-3'-phosphate
  modified_base 12: mod_base = OTHER; note = 2'-O-methylcytidine-3'-phosphate
  modified_base 13: mod_base = OTHER; note = 2'-O-methylguanosine-3'-phosphate
  modified_base 14: mod_base = OTHER; note = 2'-deoxy-2'-fluoroguanosine-3'-phosphate
  modified_base 15: mod_base = OTHER; note = 2'-O-methyladenosine-3'-phosphate
  modified_base 16: mod_base = OTHER; note = 2'-deoxy-2'-fluoroadenosine-3'-phosphate
  modified_base 17: mod_base = OTHER; note = 2'-O-methyladenosine-3'-phosphate
  modified_base 18: mod_base = OTHER; note = 2'-O-methyladenosine-3'-phosphate
  modified_base 19: mod_base = OTHER; note = 2'-O-methylguanosine-3'-phosphate
  modified_base 20: mod_base = OTHER; note = 2'-O-methyladenosine-3'-phosphate
  modified_base 21: mod_base = OTHER; note = 2'-O-methyladenosine-3'-phosphate
  modified_base 22: mod_base = OTHER; note = 2'-O-methylcytidine-3'-phosphate
  modified_base 23: mod_base = OTHER; note = 2'-O-methyluridine
tctagtcattgcggaaaagaact

SEQ ID NO: 5899 - RNA, 23 nt, synthetic construct
  source 1..23: mol_type = other RNA
  modified_base 1: mod_base = OTHER; note = 2'-O-methyluridine-3'-phosphate 5'-(E)-Vinylphosphonate
  modified_base 2: mod_base = OTHER; note = 2'-deoxy-2'-fluoroadenosine-3'-phosphate
  modified_base 3: mod_base = OTHER; note = 2'-O-methylcytidine-3'-phosphate
  modified_base 4: mod_base = OTHER; note = 2'-O-methyluridine-3'-phosphate
  modified_base 5: mod_base = OTHER; note = 2'-O-methyladenosine-3'-phosphate
  modified_base 6: mod_base = OTHER; note = 2'-deoxy-2'-fluoroguanosine-3'-phosphate
  modified_base 7: mod_base = OTHER; note = 2'-O-methyluridine-3'-phosphate
  modified_base 8: mod_base = OTHER; note = 2'-O-methylcytidine-3'-phosphate
  modified_base 9: mod_base = OTHER; note = 2'-O-methyladenosine-3'-phosphate
  modified_base 10: mod_base = OTHER; note = 2'-O-methyluridine-3'-phosphate
  modified_base 11: mod_base = OTHER; note = 2'-O-methyluridine-3'-phosphate
  modified_base 12: mod_base = OTHER; note = 2'-O-methylguanosine-3'-phosphate
  modified_base 13: mod_base = OTHER; note = 2'-O-methylcytidine-3'-phosphate
  modified_base 14: mod_base = OTHER; note = 2'-deoxy-2'-fluoroguanosine-3'-phosphate
  modified_base 15: mod_base = OTHER; note = 2'-O-methylguanosine-3'-phosphate
  modified_base 16: mod_base = OTHER; note = 2'-deoxy-2'-fluoroadenosine-3'-phosphate
  modified_base 17: mod_base = OTHER; note = 2'-O-methyladenosine-3'-phosphate
  modified_base 18: mod_base = OTHER; note = 2'-O-methyladenosine-3'-phosphate
  modified_base 19: mod_base = OTHER; note = 2'-O-methyladenosine-3'-phosphate
  modified_base 20: mod_base = OTHER; note = 2'-O-methylguanosine-3'-phosphate
  modified_base 21: mod_base = OTHER; note = 2'-O-methyladenosine-3'-phosphate
  modified_base 22: mod_base = OTHER; note = 2'-O-methyladenosine-3'-phosphate
  modified_base 23: mod_base = OTHER; note = 2'-O-methylcytidine
tactagtcattgcggaaaagaac

SEQ ID NO: 5900 - RNA, 23 nt, synthetic construct
  source 1..23: mol_type = other RNA
  modified_base 1: mod_base = OTHER; note = 2'-O-methyluridine-3'-phosphate 5'-(E)-Vinylphosphonate
  modified_base 2: mod_base = OTHER; note = 2'-deoxy-2'-fluoroguanosine-3'-phosphate
  modified_base 3: mod_base = OTHER; note = 2'-O-methyluridine-3'-phosphate
  modified_base 4: mod_base = OTHER; note = 2'-O-methyluridine-3'-phosphate
  modified_base 5: mod_base = OTHER; note = 2'-O-methyluridine-3'-phosphate
  modified_base 6: mod_base = OTHER; note = 2'-deoxy-2'-fluoroguanosine-3'-phosphate
  modified_base 7: mod_base = OTHER; note = 2'-O-methyladenosine-3'-phosphate
  modified_base 8: mod_base = OTHER; note = 2'-O-methyladenosine-3'-phosphate
  modified_base 9: mod_base = OTHER; note = 2'-O-methyluridine-3'-phosphate
  modified_base 10: mod_base = OTHER; note = 2'-O-methyladenosine-3'-phosphate
  modified_base 11: mod_base = OTHER; note = 2'-O-methyladenosine-3'-phosphate
  modified_base 12: mod_base = OTHER; note = 2'-O-methyluridine-3'-phosphate
  modified_base 13: mod_base = OTHER; note = 2'-O-methylcytidine-3'-phosphate
  modified_base 14: mod_base = OTHER; note = 2'-deoxy-2'-fluorouridine-3'-phosphate
  modified_base 15: mod_base = OTHER; note = 2'-O-methyluridine-3'-phosphate
  modified_base 16: mod_base = OTHER; note = 2'-deoxy-2'-fluorocytidine-3'-phosphate
  modified_base 17: mod_base = OTHER; note = 2'-O-methyluridine-3'-phosphate
  modified_base 18: mod_base = OTHER; note = 2'-O-methylcytidine-3'-phosphate
  modified_base 19: mod_base = OTHER; note = 2'-O-methylcytidine-3'-phosphate
  modified_base 20: mod_base = OTHER; note = 2'-O-methyladenosine-3'-phosphate
  modified_base 21: mod_base = OTHER; note = 2'-O-methylguanosine-3'-phosphate
  modified_base 22: mod_base = OTHER; note = 2'-O-methyluridine-3'-phosphate
  modified_base 23: mod_base = OTHER; note = 2'-O-methylcytidine
tgtttgaataatcttctccagtc

SEQ ID NO: 5901 - RNA, 23 nt, synthetic construct
  source 1..23: mol_type = other RNA
  modified_base 1: mod_base = OTHER; note = 2'-O-methyluridine-3'-phosphate 5'-(E)-Vinylphosphonate
  modified_base 2: mod_base = OTHER; note = 2'-deoxy-2'-fluoroadenosine-3'-phosphate
  modified_base 3: mod_base = OTHER; note = 2'-O-methyladenosine-3'-phosphate
  modified_base 4: mod_base = OTHER; note = 2'-O-methylguanosine-3'-phosphate
  modified_base 5: mod_base = OTHER; note = 2'-O-methyluridine-3'-phosphate
  modified_base 6: mod_base = OTHER; note = 2'-deoxy-2'-fluorouridine-3'-phosphate
  modified_base 7: mod_base = OTHER; note = 2'-O-methyluridine-3'-phosphate
  modified_base 8: mod_base = OTHER; note = 2'-O-methylguanosine-3'-phosphate
  modified_base 9: mod_base = OTHER; note = 2'-O-methyladenosine-3'-phosphate
  modified_base 10: mod_base = OTHER; note = 2'-O-methyladenosine-3'-phosphate
  modified_base 11: mod_base = OTHER; note = 2'-O-methyluridine-3'-phosphate
  modified_base 12: mod_base = OTHER; note = 2'-O-methyladenosine-3'-phosphate
  modified_base 13: mod_base = OTHER; note = 2'-O-methyladenosine-3'-phosphate
  modified_base 14: mod_base = OTHER; note = 2'-deoxy-2'-fluorouridine-3'-phosphate
  modified_base 15: mod_base = OTHER; note = 2'-O-methylcytidine-3'-phosphate
  modified_base 16: mod_base = OTHER; note = 2'-deoxy-2'-fluorouridine-3'-phosphate
  modified_base 17: mod_base = OTHER; note = 2'-O-methyluridine-3'-phosphate
  modified_base 18: mod_base = OTHER; note = 2'-O-methylcytidine-3'-phosphate
  modified_base 19: mod_base = OTHER; note = 2'-O-methyluridine-3'-phosphate
  modified_base 20: mod_base = OTHER; note = 2'-O-methylcytidine-3'-phosphate
  modified_base 21: mod_base = OTHER; note = 2'-O-methylcytidine-3'-phosphate
  modified_base 22: mod_base = OTHER; note = 2'-O-methyladenosine-3'-phosphate
  modified_base 23: mod_base = OTHER; note = 2'-O-methylguanosine
taagtttgaataatcttctccag

SEQ ID NO: 5902 - RNA, 23 nt, synthetic construct
  source 1..23: mol_type = other RNA
  modified_base 1: mod_base = OTHER; note = 2'-O-methyluridine-3'-phosphate 5'-(E)-Vinylphosphonate
  modified_base 2: mod_base = OTHER; note = 2'-deoxy-2'-fluoroadenosine-3'-phosphate
  modified_base 3: mod_base = OTHER; note = 2'-O-methyladenosine-3'-phosphate
  modified_base 4: mod_base = OTHER; note = 2'-O-methylcytidine-3'-phosphate
  modified_base 5: mod_base = OTHER; note = 2'-O-methylcytidine-3'-phosphate
  modified_base 6: mod_base = OTHER; note = 2'-deoxy-2'-fluorouridine-3'-phosphate
  modified_base 7: mod_base = OTHER; note = 2'-O-methylguanosine-3'-phosphate
  modified_base 8: mod_base = OTHER; note = 2'-O-methyladenosine-3'-phosphate
  modified_base 9: mod_base = OTHER; note = 2'-O-methyladenosine-3'-phosphate
  modified_base 10: mod_base = OTHER; note = 2'-O-methyladenosine-3'-phosphate
  modified_base 11: mod_base = OTHER; note = 2'-O-methylcytidine-3'-phosphate
  modified_base 12: mod_base = OTHER; note = 2'-O-methyladenosine-3'-phosphate
  modified_base 13: mod_base = OTHER; note = 2'-O-methylcytidine-3'-phosphate
  modified_base 14: mod_base = OTHER; note = 2'-deoxy-2'-fluoroadenosine-3'-phosphate
  modified_base 15: mod_base = OTHER; note = 2'-O-methylguanosine-3'-phosphate
  modified_base 16: mod_base = OTHER; note = 2'-deoxy-2'-fluoroadenosine-3'-phosphate
  modified_base 17: mod_base = OTHER; note = 2'-O-methyluridine-3'-phosphate
  modified_base 18: mod_base = OTHER; note = 2'-O-methylcytidine-3'-phosphate
  modified_base 19: mod_base = OTHER; note = 2'-O-methyladenosine-3'-phosphate
  modified_base 20: mod_base = OTHER; note = 2'-O-methyladenosine-3'-phosphate
  modified_base 21: mod_base = OTHER; note = 2'-O-methylguanosine-3'-phosphate
  modified_base 22: mod_base = OTHER; note = 2'-O-methyluridine-3'-phosphate
  modified_base 23: mod_base = OTHER; note = 2'-O-methyluridine
taacctgaaacacagatcaagtt

SEQ ID NO: 5903 - RNA, 23 nt, synthetic construct
  source 1..23: mol_type = other RNA
  modified_base 1: mod_base = OTHER; note = 2'-O-methyluridine-3'-phosphate 5'-(E)-Vinylphosphonate
  modified_base 2: mod_base = OTHER; note = 2'-deoxy-2'-fluorouridine-3'-phosphate
  modified_base 3: mod_base = OTHER; note = 2'-O-methyluridine-3'-phosphate
  modified_base 4: mod_base = OTHER; note = 2'-O-methyladenosine-3'-phosphate
  modified_base 5: mod_base = OTHER; note = 2'-O-methyladenosine-3'-phosphate
  modified_base 6: mod_base = OTHER; note = 2'-deoxy-2'-fluoroadenosine-3'-phosphate
  modified_base 7: mod_base = OTHER; note = 2'-O-methyladenosine-3'-phosphate
  modified_base 8: mod_base = OTHER; note = 2'-O-methyladenosine-3'-phosphate
  modified_base 9: mod_base = OTHER; note = 2'-O-methylcytidine-3'-phosphate
  modified_base 10: mod_base = OTHER; note = 2'-O-methylcytidine-3'-phosphate
  modified_base 11: mod_base = OTHER; note = 2'-O-methyluridine-3'-phosphate
  modified_base 12: mod_base = OTHER; note = 2'-O-methylguanosine-3'-phosphate
  modified_base 13: mod_base = OTHER; note = 2'-O-methyladenosine-3'-phosphate
  modified_base 14: mod_base = OTHER; note = 2'-deoxy-2'-fluoroadenosine-3'-phosphate
  modified_base 15: mod_base = OTHER; note = 2'-O-methyladenosine-3'-phosphate
  modified_base 16: mod_base = OTHER; note = 2'-deoxy-2'-fluorocytidine-3'-phosphate
  modified_base 17: mod_base = OTHER; note = 2'-O-methyladenosine-3'-phosphate
  modified_base 18: mod_base = OTHER; note = 2'-O-methylcytidine-3'-phosphate
  modified_base 19: mod_base = OTHER; note = 2'-O-methyladenosine-3'-phosphate
  modified_base 20: mod_base = OTHER; note = 2'-O-methylguanosine-3'-phosphate
  modified_base 21: mod_base = OTHER; note = 2'-O-methyladenosine-3'-phosphate
  modified_base 22: mod_base = OTHER; note = 2'-O-methyluridine-3'-phosphate
  modified_base 23: mod_base = OTHER; note = 2'-O-methylcytidine
tttaaaaacctgaaacacagatc

SEQ ID NO: 5904 - RNA, 23 nt, synthetic construct
  source 1..23: mol_type = other RNA
  modified_base 1: mod_base = OTHER; note = 2'-O-methyluridine-3'-phosphate 5'-(E)-Vinylphosphonate
  modified_base 2: mod_base = OTHER; note = 2'-deoxy-2'-fluorouridine-3'-phosphate
  modified_base 3: mod_base = OTHER; note = 2'-O-methyluridine-3'-phosphate
  modified_base 4: mod_base = OTHER; note = 2'-O-methyladenosine-3'-phosphate
  modified_base 5: mod_base = OTHER; note = 2'-O-methylguanosine-3'-phosphate
  modified_base 6: mod_base = OTHER; note = 2'-deoxy-2'-fluoroguanosine-3'-phosphate
  modified_base 7: mod_base = OTHER; note = 2'-O-methyladenosine-3'-phosphate
  modified_base 8: mod_base = OTHER; note = 2'-O-methylcytidine-3'-phosphate
  modified_base 9: mod_base = OTHER; note = 2'-O-methyladenosine-3'-phosphate
  modified_base 10: mod_base = OTHER; note = 2'-O-methyluridine-3'-phosphate
  modified_base 11: mod_base = OTHER; note = 2'-O-methyluridine-3'-phosphate
  modified_base 12: mod_base = OTHER; note = 2'-O-methyluridine-3'-phosphate
  modified_base 13: mod_base = OTHER; note = 2'-O-methyladenosine-3'-phosphate
  modified_base 14: mod_base = OTHER; note = 2'-deoxy-2'-fluoroadenosine-3'-phosphate
  modified_base 15: mod_base = OTHER; note = 2'-O-methyladenosine-3'-phosphate
  modified_base 16: mod_base = OTHER; note = 2'-deoxy-2'-fluoroadenosine-3'-phosphate
  modified_base 17: mod_base = OTHER; note = 2'-O-methyladenosine-3'-phosphate
  modified_base 18: mod_base = OTHER; note = 2'-O-methylcytidine-3'-phosphate
  modified_base 19: mod_base = OTHER; note = 2'-O-methylcytidine-3'-phosphate
  modified_base 20: mod_base = OTHER; note = 2'-O-methyluridine-3'-phosphate
  modified_base 21: mod_base = OTHER; note = 2'-O-methylguanosine-3'-phosphate
  modified_base 22: mod_base = OTHER; note = 2'-O-methyladenosine-3'-phosphate
  modified_base 23: mod_base = OTHER; note = 2'-O-methyladenosine
tttaggacatttaaaaacctgaa

SEQ ID NO: 5905 - RNA, 23 nt, synthetic construct
  source 1..23: mol_type = other RNA
  modified_base 1: mod_base = OTHER; note = 2'-O-methyluridine-3'-phosphate 5'-(E)-Vinylphosphonate
  modified_base 2: mod_base = OTHER; note = 2'-deoxy-2'-fluoroadenosine-3'-phosphate
  modified_base 3: mod_base = OTHER; note = 2'-O-methyladenosine-3'-phosphate
  modified_base 4: mod_base = OTHER; note = 2'-O-methylguanosine-3'-phosphate
  modified_base 5: mod_base = OTHER; note = 2'-O-methyluridine-3'-phosphate
  modified_base 6: mod_base = OTHER; note = 2'-deoxy-2'-fluorocytidine-3'-phosphate
  modified_base 7: mod_base = OTHER; note = 2'-O-methyladenosine-3'-phosphate
  modified_base 8: mod_base = OTHER; note = 2'-O-methyladenosine-3'-phosphate
  modified_base 9: mod_base = OTHER; note = 2'-O-methyluridine-3'-phosphate
  modified_base 10: mod_base = OTHER; note = 2'-O-methylcytidine-3'-phosphate
  modified_base 11: mod_base = OTHER; note = 2'-O-methylcytidine-3'-phosphate
  modified_base 12: mod_base = OTHER; note = 2'-O-methyladenosine-3'-phosphate
  modified_base 13: mod_base = OTHER; note = 2'-O-methyladenosine-3'-phosphate
  modified_base 14: mod_base = OTHER; note = 2'-deoxy-2'-fluoroadenosine-3'-phosphate
  modified_base 15: mod_base = OTHER; note = 2'-O-methyladenosine-3'-phosphate
  modified_base 16: mod_base = OTHER; note = 2'-deoxy-2'-fluorouridine-3'-phosphate
  modified_base 17: mod_base = OTHER; note = 2'-O-methyluridine-3'-phosphate
  modified_base 18: mod_base = OTHER; note = 2'-O-methylcytidine-3'-phosphate
  modified_base 19: mod_base = OTHER; note = 2'-O-methylcytidine-3'-phosphate
  modified_base 20: mod_base = OTHER; note = 2'-O-methyluridine-3'-phosphate
  modified_base 21: mod_base = OTHER; note = 2'-O-methyluridine-3'-phosphate
  modified_base 22: mod_base = OTHER; note = 2'-O-methyluridine-3'-phosphate
  modified_base 23: mod_base = OTHER; note = 2'-O-methyluridine
taagtcaatccaaaattcctttt

SEQ ID NO: 5906 - RNA, 23 nt, synthetic construct
  source 1..23: mol_type = other RNA
  modified_base 1: mod_base = OTHER; note = 2'-O-methyluridine-3'-phosphate 5'-(E)-Vinylphosphonate
  modified_base 2: mod_base = OTHER; note = 2'-deoxy-2'-fluoroadenosine-3'-phosphate
  modified_base 3: mod_base = OTHER; note = 2'-O-methyluridine-3'-phosphate
  modified_base 4: mod_base = OTHER; note = 2'-O-methyluridine-3'-phosphate
  modified_base 5: mod_base = OTHER; note = 2'-O-methyladenosine-3'-phosphate
  modified_base 6: mod_base = OTHER; note = 2'-deoxy-2'-fluoroguanosine-3'-phosphate
  modified_base 7: mod_base = OTHER; note = 2'-O-methyluridine-3'-phosphate
  modified_base 8: mod_base = OTHER; note = 2'-O-methyladenosine-3'-phosphate
  modified_base 9: mod_base = OTHER; note = 2'-O-methylcytidine-3'-phosphate
  modified_base 10: mod_base = OTHER; note = 2'-O-methyluridine-3'-phosphate
  modified_base 11: mod_base = OTHER; note = 2'-O-methyluridine-3'-phosphate
  modified_base 12: mod_base = OTHER; note = 2'-O-methyluridine-3'-phosphate
  modified_base 13: mod_base = OTHER; note = 2'-O-methylguanosine-3'-phosphate
  modified_base 14: mod_base = OTHER; note = 2'-deoxy-2'-fluoroadenosine-3'-phosphate
  modified_base 15: mod_base = OTHER; note = 2'-O-methyladenosine-3'-phosphate
  modified_base 16: mod_base = OTHER; note = 2'-deoxy-2'-fluoroadenosine-3'-phosphate
  modified_base 17: mod_base = OTHER; note = 2'-O-methylguanosine-3'-phosphate
  modified_base 18: mod_base = OTHER; note = 2'-O-methyluridine-3'-phosphate
  modified_base 19: mod_base = OTHER; note = 2'-O-methylcytidine-3'-phosphate
  modified_base 20: mod_base = OTHER; note = 2'-O-methyladenosine-3'-phosphate
  modified_base 21: mod_base = OTHER; note = 2'-O-methyladenosine-3'-phosphate
  modified_base 22: mod_base = OTHER; note = 2'-O-methyluridine-3'-phosphate
  modified_base 23: mod_base = OTHER; note = 2'-O-methylcytidine
tattagtactttgaaagtcaatc

SEQ ID NO: 5907 - RNA, 23 nt, synthetic construct
  source 1..23: mol_type = other RNA
  modified_base 1: mod_base = OTHER; note = 2'-O-methyluridine-3'-phosphate 5'-(E)-Vinylphosphonate
  modified_base 2: mod_base = OTHER; note = 2'-deoxy-2'-fluoroguanosine-3'-phosphate
  modified_base 3: mod_base = OTHER; note = 2'-O-methyluridine-3'-phosphate
  modified_base 4: mod_base = OTHER; note = 2'-O-methyladenosine-3'-phosphate
  modified_base 5: mod_base = OTHER; note = 2'-O-methyluridine-3'-phosphate
  modified_base 6: mod_base = OTHER; note = 2'-deoxy-2'-fluorouridine-3'-phosphate
  modified_base 7: mod_base = OTHER; note = 2'-O-methyladenosine-3'-phosphate
  modified_base 8: mod_base = OTHER; note = 2'-O-methylguanosine-3'-phosphate
  modified_base 9: mod_base = OTHER; note = 2'-O-methyluridine-3'-phosphate
  modified_base 10: mod_base = OTHER; note = 2'-O-methyladenosine-3'-phosphate
  modified_base 11: mod_base = OTHER; note = 2'-O-methylcytidine-3'-phosphate
  modified_base 12: mod_base = OTHER; note = 2'-O-methyluridine-3'-phosphate
  modified_base 13: mod_base = OTHER; note = 2'-O-methyluridine-3'-phosphate
  modified_base 14: mod_base = OTHER; note = 2'-deoxy-2'-fluorouridine-3'-phosphate
  modified_base 15: mod_base = OTHER; note = 2'-O-methylguanosine-3'-phosphate
  modified_base 16: mod_base = OTHER; note = 2'-deoxy-2'-fluoroadenosine-3'-phosphate
  modified_base 17: mod_base = OTHER; note = 2'-O-methyladenosine-3'-phosphate
  modified_base 18: mod_base = OTHER; note = 2'-O-methyladenosine-3'-phosphate
  modified_base 19: mod_base = OTHER; note = 2'-O-methylguanosine-3'-phosphate
  modified_base 20: mod_base = OTHER; note = 2'-O-methyluridine-3'-phosphate
  modified_base 21: mod_base = OTHER; note = 2'-O-methylcytidine-3'-phosphate
  modified_base 22: mod_base = OTHER; note = 2'-O-methyladenosine-3'-phosphate
  modified_base 23: mod_base = OTHER; note = 2'-O-methyladenosine
tgtattagtactttgaaagtcaa

SEQ ID NO: 5908 - RNA, 23 nt, synthetic construct
  source 1..23: mol_type = other RNA
  modified_base 1: mod_base = OTHER; note = 2'-O-methyluridine-3'-phosphate 5'-(E)-Vinylphosphonate
  modified_base 2: mod_base = OTHER; note = 2'-deoxy-2'-fluoroguanosine-3'-phosphate
  modified_base 3: mod_base = OTHER; note = 2'-O-methyluridine-3'-phosphate
  modified_base 4: mod_base = OTHER; note = 2'-O-methyladenosine-3'-phosphate
  modified_base 5: mod_base = OTHER; note = 2'-O-methyluridine-3'-phosphate
  modified_base 6: mod_base = OTHER; note = 2'-deoxy-2'-fluoroadenosine-3'-phosphate
  modified_base 7: mod_base = OTHER; note = 2'-O-methyladenosine-3'-phosphate
  modified_base 8: mod_base = OTHER; note = 2'-O-methylguanosine-3'-phosphate
  modified_base 9: mod_base = OTHER; note = 2'-O-methyladenosine-3'-phosphate
  modified_base 10: mod_base = OTHER; note = 2'-O-methyladenosine-3'-phosphate
  modified_base 11: mod_base = OTHER; note = 2'-O-methylguanosine-3'-phosphate
  modified_base 12: mod_base = OTHER; note = 2'-O-methyladenosine-3'-phosphate
  modified_base 13: mod_base = OTHER; note = 2'-O-methylguanosine-3'-phosphate
  modified_base 14: mod_base = OTHER; note = 2'-deoxy-2'-fluorouridine-3'-phosphate
  modified_base 15: mod_base = OTHER; note = 2'-O-methylcytidine-3'-phosphate
  modified_base 16: mod_base = OTHER; note = 2'-deoxy-2'-fluoroadenosine-3'-phosphate
  modified_base 17: mod_base = OTHER; note = 2'-O-methylcytidine-3'-phosphate
  modified_base 18: mod_base = OTHER; note = 2'-O-methylguanosine-3'-phosphate
  modified_base 19: mod_base = OTHER; note = 2'-O-methylcytidine-3'-phosphate
  modified_base 20: mod_base = OTHER; note = 2'-O-methyluridine-3'-phosphate
  modified_base 21: mod_base = OTHER; note = 2'-O-methyladenosine-3'-phosphate
  modified_base 22: mod_base = OTHER; note = 2'-O-methylcytidine-3'-phosphate
  modified_base 23: mod_base = OTHER; note = 2'-O-methylcytidine
tgtataagaagagtcacgctacc

SEQ ID NO: 5909 - RNA, 23 nt, synthetic construct
  source 1..23: mol_type = other RNA
  modified_base 1: mod_base = OTHER; note = 2'-O-methyluridine-3'-phosphate 5'-(E)-Vinylphosphonate
  modified_base 2: mod_base = OTHER; note = 2'-deoxy-2'-fluorouridine-3'-phosphate
  modified_base 3: mod_base = OTHER; note = 2'-O-methyluridine-3'-phosphate
  modified_base 4: mod_base = OTHER; note = 2'-O-methyladenosine-3'-phosphate
  modified_base 5: mod_base = OTHER; note = 2'-O-methylguanosine-3'-phosphate
  modified_base 6: mod_base = OTHER; note = 2'-deoxy-2'-fluoroguanosine-3'-phosphate
  modified_base 7: mod_base = OTHER; note = 2'-O-methyluridine-3'-phosphate
  modified_base 8: mod_base = OTHER; note = 2'-O-methyladenosine-3'-phosphate
  modified_base 9: mod_base = OTHER; note = 2'-O-methyluridine-3'-phosphate
  modified_base 10: mod_base = OTHER; note = 2'-O-methyladenosine-3'-phosphate
  modified_base 11: mod_base = OTHER; note = 2'-O-methyladenosine-3'-phosphate
  modified_base 12: mod_base = OTHER; note = 2'-O-methylguanosine-3'-phosphate
  modified_base 13: mod_base = OTHER; note = 2'-O-methyladenosine-3'-phosphate
  modified_base 14: mod_base = OTHER; note = 2'-deoxy-2'-fluoroadenosine-3'-phosphate
  modified_base 15: mod_base = OTHER; note = 2'-O-methylguanosine-3'-phosphate
  modified_base 16: mod_base = OTHER; note = 2'-deoxy-2'-fluoroadenosine-3'-phosphate
  modified_base 17: mod_base = OTHER; note = 2'-O-methylguanosine-3'-phosphate
  modified_base 18: mod_base = OTHER; note = 2'-O-methyluridine-3'-phosphate
  modified_base 19: mod_base = OTHER; note = 2'-O-methylcytidine-3'-phosphate
  modified_base 20: mod_base = OTHER; note = 2'-O-methyladenosine-3'-phosphate
  modified_base 21: mod_base = OTHER; note = 2'-O-methylcytidine-3'-phosphate
  modified_base 22: mod_base = OTHER; note = 2'-O-methylguanosine-3'-phosphate
  modified_base 23: mod_base = OTHER; note = 2'-O-methylcytidine
tttaggtataagaagagtcacgc

SEQ ID NO: 5910 - RNA, 23 nt, synthetic construct
  source 1..23: mol_type = other RNA
  modified_base 1: mod_base = OTHER; note = 2'-O-methyluridine-3'-phosphate 5'-(E)-Vinylphosphonate
  modified_base 2: mod_base = OTHER; note = 2'-deoxy-2'-fluoroadenosine-3'-phosphate
  modified_base 3: mod_base = OTHER; note = 2'-O-methylcytidine-3'-phosphate
  modified_base 4: mod_base = OTHER; note = 2'-O-methyladenosine-3'-phosphate
  modified_base 5: mod_base = OTHER; note = 2'-O-methyluridine-3'-phosphate
  modified_base 6: mod_base = OTHER; note = 2'-deoxy-2'-fluorouridine-3'-phosphate
  modified_base 7: mod_base = OTHER; note = 2'-O-methyluridine-3'-phosphate
  modified_base 8: mod_base = OTHER; note = 2'-O-methylguanosine-3'-phosphate
  modified_base 9: mod_base = OTHER; note = 2'-O-methyluridine-3'-phosphate
  modified_base 10: mod_base = OTHER; note = 2'-O-methyladenosine-3'-phosphate
  modified_base 11: mod_base = OTHER; note = 2'-O-methyladenosine-3'-phosphate
  modified_base 12: mod_base = OTHER; note = 2'-O-methyluridine-3'-phosphate
  modified_base 13: mod_base = OTHER; note = 2'-O-methyladenosine-3'-phosphate
  modified_base 14: mod_base = OTHER; note = 2'-deoxy-2'-fluorouridine-3'-phosphate
  modified_base 15: mod_base = OTHER; note = 2'-O-methylguanosine-3'-phosphate
  modified_base 16: mod_base = OTHER; note = 2'-deoxy-2'-fluorouridine-3'-phosphate
  modified_base 17: mod_base = OTHER; note = 2'-O-methyluridine-3'-phosphate
  modified_base 18: mod_base = OTHER; note = 2'-O-methylcytidine-3'-phosphate
  modified_base 19: mod_base = OTHER; note = 2'-O-methyluridine-3'-phosphate
  modified_base 20: mod_base = OTHER; note = 2'-O-methyluridine-3'-phosphate
  modified_base 21: mod_base = OTHER; note = 2'-O-methyladenosine-3'-phosphate
  modified_base 22: mod_base = OTHER; note = 2'-O-methylguanosine-3'-phosphate
  modified_base 23: mod_base = OTHER; note = 2'-O-methylguanosine
tacatttgtaatatgttcttagg

SEQ ID NO: 5911 - RNA, 23 nt, synthetic construct
  source 1..23: mol_type = other RNA
  modified_base 1: mod_base = OTHER; note = 2'-O-methyluridine-3'-phosphate 5'-(E)-Vinylphosphonate
  modified_base 2: mod_base = OTHER; note = 2'-deoxy-2'-fluoroadenosine-3'-phosphate
  modified_base 3: mod_base = OTHER; note = 2'-O-methylguanosine-3'-phosphate
  modified_base 4: mod_base = OTHER; note = 2'-O-methyladenosine-3'-phosphate
  modified_base 5: mod_base = OTHER; note = 2'-O-methylguanosine-3'-phosphate
  modified_base 6: mod_base = OTHER; note = 2'-deoxy-2'-fluorouridine-3'-phosphate
  modified_base 7: mod_base = OTHER; note = 2'-O-methyluridine-3'-phosphate
  modified_base 8: mod_base = OTHER; note = 2'-O-methylcytidine-3'-phosphate
  modified_base 9: mod_base = OTHER; note = 2'-O-methyladenosine-3'-phosphate
  modified_base 10: mod_base = OTHER; note = 2'-O-methyladenosine-3'-phosphate
  modified_base 11: mod_base = OTHER; note = 2'-O-methylguanosine-3'-phosphate
  modified_base 12: mod_base = OTHER; note = 2'-O-methylguanosine-3'-phosphate
  modified_base 13: mod_base = OTHER; note = 2'-O-methylcytidine-3'-phosphate
  modified_base 14: mod_base = OTHER; note = 2'-deoxy-2'-fluoroadenosine-3'-phosphate
  modified_base 15: mod_base = OTHER; note = 2'-O-methyluridine-3'-phosphate
  modified_base 16: mod_base = OTHER; note = 2'-deoxy-2'-fluoroguanosine-3'-phosphate
  modified_base 17: mod_base = OTHER; note = 2'-O-methyluridine-3'-phosphate
  modified_base 18: mod_base = OTHER; note = 2'-O-methyluridine-3'-phosphate
  modified_base 19: mod_base = OTHER; note = 2'-O-methyluridine-3'-phosphate
  modified_base 20: mod_base = OTHER; note = 2'-O-methyluridine-3'-phosphate
  modified_base 21: mod_base = OTHER; note = 2'-O-methylguanosine-3'-phosphate
  modified_base 22: mod_base = OTHER; note = 2'-O-methylcytidine-3'-phosphate
  modified_base 23: mod_base = OTHER; note = 2'-O-methyladenosine
tagagttcaaggcatgttttgca

SEQ ID NO: 5912 - RNA, 23 nt, synthetic construct
  source 1..23: mol_type = other RNA
  modified_base 1: mod_base = OTHER; note = 2'-O-methyluridine-3'-phosphate 5'-(E)-Vinylphosphonate
  modified_base 2: mod_base = OTHER; note = 2'-deoxy-2'-fluoroadenosine-3'-phosphate
  modified_base 3: mod_base = OTHER; note = 2'-O-methyladenosine-3'-phosphate
  modified_base 4: mod_base = OTHER; note = 2'-O-methylguanosine-3'-phosphate
  modified_base 5: mod_base = OTHER; note = 2'-O-methyladenosine-3'-phosphate
  modified_base 6: mod_base = OTHER; note = 2'-deoxy-2'-fluoroguanosine-3'-phosphate
  modified_base 7: mod_base = OTHER; note = 2'-O-methyluridine-3'-phosphate
  modified_base 8: mod_base = OTHER; note = 2'-O-methyluridine-3'-phosphate
  modified_base 9: mod_base = OTHER; note = 2'-O-methylcytidine-3'-phosphate
  modified_base 10: mod_base = OTHER; note = 2'-O-methyladenosine-3'-phosphate
  modified_base 11: mod_base = OTHER; note = 2'-O-methyladenosine-3'-phosphate
  modified_base 12: mod_base = OTHER; note = 2'-O-methylguanosine-3'-phosphate
  modified_base 13: mod_base = OTHER; note = 2'-O-methylguanosine-3'-phosphate
  modified_base 14: mod_base = OTHER; note = 2'-deoxy-2'-fluorocytidine-3'-phosphate
  modified_base 15: mod_base = OTHER; note = 2'-O-methyladenosine-3'-phosphate
  modified_base 16: mod_base = OTHER; note = 2'-deoxy-2'-fluorouridine-3'-phosphate
  modified_base 17: mod_base = OTHER; note = 2'-O-methylguanosine-3'-phosphate
  modified_base 18: mod_base = OTHER; note = 2'-O-methyluridine-3'-phosphate
  modified_base 19: mod_base = OTHER; note = 2'-O-methyluridine-3'-phosphate
  modified_base 20: mod_base = OTHER; note = 2'-O-methyluridine-3'-phosphate
  modified_base 21: mod_base = OTHER; note = 2'-O-methyluridine-3'-phosphate
  modified_base 22: mod_base = OTHER; note = 2'-O-methylguanosine-3'-phosphate
  modified_base 23: mod_base = OTHER; note = 2'-O-methylcytidine
taagagttcaaggcatgttttgc

SEQ ID NO: 5913 - RNA, 23 nt, synthetic construct
  source 1..23: mol_type = other RNA
  modified_base 1: mod_base = OTHER; note = 2'-O-methyluridine-3'-phosphate 5'-(E)-Vinylphosphonate
  modified_base 2: mod_base = OTHER; note = 2'-deoxy-2'-fluorouridine-3'-phosphate
  modified_base 3: mod_base = OTHER; note = 2'-O-methyladenosine-3'-phosphate
  modified_base 4: mod_base = OTHER; note = 2'-O-methylguanosine-3'-phosphate
  modified_base 5: mod_base = OTHER; note = 2'-O-methyluridine-3'-phosphate
  modified_base 6: mod_base = OTHER; note = 2'-deoxy-2'-fluorouridine-3'-phosphate
  modified_base 7: mod_base = OTHER; note = 2'-O-methylcytidine-3'-phosphate
  modified_base 8: mod_base = OTHER; note = 2'-O-methyladenosine-3'-phosphate
  modified_base 9: mod_base = OTHER; note = 2'-O-methyladenosine-3'-phosphate
  modified_base 10: mod_base = OTHER; note = 2'-O-methylguanosine-3'-phosphate
  modified_base 11: mod_base = OTHER; note = 2'-O-methyladenosine-3'-phosphate
  modified_base 12: mod_base = OTHER; note = 2'-O-methylguanosine-3'-phosphate
  modified_base 13: mod_base = OTHER; note = 2'-O-methyluridine-3'-phosphate
  modified_base 14: mod_base = OTHER; note = 2'-deoxy-2'-fluorouridine-3'-phosphate
  modified_base 15: mod_base = OTHER; note = 2'-O-methylcytidine-3'-phosphate
  modified_base 16: mod_base = OTHER; note = 2'-deoxy-2'-fluoroadenosine-3'-phosphate
  modified_base 17: mod_base = OTHER; note = 2'-O-methyladenosine-3'-phosphate
  modified_base 18: mod_base = OTHER; note = 2'-O-methylguanosine-3'-phosphate
  modified_base 19: mod_base = OTHER; note = 2'-O-methylguanosine-3'-phosphate
  modified_base 20: mod_base = OTHER; note = 2'-O-methylcytidine-3'-phosphate
  modified_base 21: mod_base = OTHER; note = 2'-O-methyladenosine-3'-phosphate
  modified_base 22: mod_base = OTHER; note = 2'-O-methyluridine-3'-phosphate
  modified_base 23: mod_base = OTHER; note = 2'-O-methylguanosine
ttagttcaagagttcaaggcatg

SEQ ID NO: 5914 - RNA, 23 nt, synthetic construct
  source 1..23: mol_type = other RNA
  modified_base 1: mod_base = OTHER; note = 2'-O-methyluridine-3'-phosphate 5'-(E)-Vinylphosphonate
  modified_base 2: mod_base = OTHER; note = 2'-deoxy-2'-fluorouridine-3'-phosphate
  modified_base 3: mod_base = OTHER; note = 2'-O-methyluridine-3'-phosphate
  modified_base 4: mod_base = OTHER; note = 2'-O-methyluridine-3'-phosphate
  modified_base 5: mod_base = OTHER; note = 2'-O-methyluridine-3'-phosphate
  modified_base 6: mod_base = OTHER; note = 2'-deoxy-2'-fluorocytidine-3'-phosphate
  modified_base 7: mod_base = OTHER; note = 2'-O-methyladenosine-3'-phosphate
  modified_base 8: mod_base = OTHER; note = 2'-O-methylcytidine-3'-phosphate
  modified_base 9: mod_base = OTHER; note = 2'-O-methyladenosine-3'-phosphate
  modified_base 10: mod_base = OTHER; note = 2'-O-methylguanosine-3'-phosphate
  modified_base 11: mod_base = OTHER; note = 2'-O-methyluridine-3'-phosphate
  modified_base 12: mod_base = OTHER; note = 2'-O-methyladenosine-3'-phosphate
  modified_base 13: mod_base = OTHER; note = 2'-O-methylguanosine-3'-phosphate
  modified_base 14: mod_base = OTHER; note = 2'-deoxy-2'-fluorouridine-3'-phosphate
  modified_base 15: mod_base = OTHER; note = 2'-O-methyluridine-3'-phosphate
  modified_base 16: mod_base = OTHER; note = 2'-deoxy-2'-fluorocytidine-3'-phosphate
  modified_base 17: mod_base = OTHER; note = 2'-O-methyladenosine-3'-phosphate
  modified_base 18: mod_base = OTHER; note = 2'-O-methyladenosine-3'-phosphate
  modified_base 19: mod_base = OTHER; note = 2'-O-methylguanosine-3'-phosphate
  modified_base 20: mod_base = OTHER; note = 2'-O-methyladenosine-3'-phosphate
  modified_base 21: mod_base = OTHER; note = 2'-O-methylguanosine-3'-phosphate
  modified_base 22: mod_base = OTHER; note = 2'-O-methyluridine-3'-phosphate
  modified_base 23: mod_base = OTHER; note = 2'-O-methyluridine
tttttcacagtagttcaagagtt

SEQ ID NO: 5915 - RNA, 23 nt, synthetic construct
  source 1..23: mol_type = other RNA
  modified_base 1: mod_base = OTHER; note = 2'-O-methyluridine-3'-phosphate 5'-(E)-Vinylphosphonate
  modified_base 2: mod_base = OTHER; note = 2'-deoxy-2'-fluorouridine-3'-phosphate
  modified_base 3: mod_base = OTHER; note = 2'-O-methyluridine-3'-phosphate
  modified_base 4: mod_base = OTHER; note = 2'-O-methylcytidine-3'-phosphate
  modified_base 5: mod_base = OTHER; note = 2'-O-methyluridine-3'-phosphate
  modified_base 6: mod_base = OTHER; note = 2'-deoxy-2'-fluorouridine-3'-phosphate
  modified_base 7: mod_base = OTHER; note = 2'-O-methyluridine-3'-phosphate
  modified_base 8: mod_base = OTHER; note = 2'-O-methyluridine-3'-phosphate
  modified_base 9: mod_base = OTHER; note = 2'-O-methylcytidine-3'-phosphate
  modified_base 10: mod_base = OTHER; note = 2'-O-methyladenosine-3'-phosphate
  modified_base 11: mod_base = OTHER; note = 2'-O-methylcytidine-3'-phosphate
  modified_base 12: mod_base = OTHER; note = 2'-O-methyladenosine-3'-phosphate
  modified_base 13: mod_base = OTHER; note = 2'-O-methylguanosine-3'-phosphate
  modified_base 14: mod_base = OTHER; note = 2'-deoxy-2'-fluorouridine-3'-phosphate
  modified_base 15: mod_base = OTHER; note = 2'-O-methyladenosine-3'-phosphate
  modified_base 16: mod_base = OTHER; note = 2'-deoxy-2'-fluoroguanosine-3'-phosphate
  modified_base 17: mod_base = OTHER; note = 2'-O-methyluridine-3'-phosphate
  modified_base 18: mod_base = OTHER; note = 2'-O-methyluridine-3'-phosphate
  modified_base 19: mod_base = OTHER; note = 2'-O-methylcytidine-3'-phosphate
  modified_base 20: mod_base = OTHER; note = 2'-O-methyladenosine-3'-phosphate
  modified_base 21: mod_base = OTHER; note = 2'-O-methyladenosine-3'-phosphate
  modified_base 22: mod_base = OTHER; note = 2'-O-methylguanosine-3'-phosphate
  modified_base 23: mod_base = OTHER; note = 2'-O-methyladenosine
tttcttttcacagtagttcaaga

SEQ ID NO: 5916 - RNA, 23 nt, synthetic construct
  source 1..23: mol_type = other RNA
  modified_base 1: mod_base = OTHER; note = 2'-O-methyluridine-3'-phosphate 5'-(E)-Vinylphosphonate
  modified_base 2: mod_base = OTHER; note = 2'-deoxy-2'-fluoroguanosine-3'-phosphate
  modified_base 3: mod_base = OTHER; note = 2'-O-methyladenosine-3'-phosphate
  modified_base 4: mod_base = OTHER; note = 2'-O-methyluridine-3'-phosphate
  modified_base 5: mod_base = OTHER; note = 2'-O-methyluridine-3'-phosphate
  modified_base 6: mod_base = OTHER; note = 2'-deoxy-2'-fluorocytidine-3'-phosphate
  modified_base 7: mod_base = OTHER; note = 2'-O-methyluridine-3'-phosphate
  modified_base 8: mod_base = OTHER; note = 2'-O-methyluridine-3'-phosphate
  modified_base 9: mod_base = OTHER; note = 2'-O-methyluridine-3'-phosphate
  modified_base 10: mod_base = OTHER; note = 2'-O-methyluridine-3'-phosphate
  modified_base 11: mod_base = OTHER; note = 2'-O-methylcytidine-3'-phosphate
  modified_base 12: mod_base = OTHER; note = 2'-O-methyladenosine-3'-phosphate
  modified_base 13: mod_base = OTHER; note = 2'-O-methylcytidine-3'-phosphate
  modified_base 14: mod_base = OTHER; note = 2'-deoxy-2'-fluoroadenosine-3'-phosphate
  modified_base 15: mod_base = OTHER; note = 2'-O-methylguanosine-3'-phosphate
  modified_base 16: mod_base = OTHER; note = 2'-deoxy-2'-fluorouridine-3'-phosphate
  modified_base 17: mod_base = OTHER; note = 2'-O-methyladenosine-3'-phosphate
  modified_base 18: mod_base = OTHER; note = 2'-O-methylguanosine-3'-phosphate
  modified_base 19: mod_base = OTHER; note = 2'-O-methyluridine-3'-phosphate
  modified_base 20: mod_base = OTHER; note = 2'-O-methyluridine-3'-phosphate
  modified_base 21: mod_base = OTHER; note = 2'-O-methylcytidine-3'-phosphate
  modified_base 22: mod_base = OTHER; note = 2'-O-methyladenosine-3'-phosphate
  modified_base 23: mod_base = OTHER; note = 2'-O-methyladenosine
tgattcttttcacagtagttcaa

SEQ ID NO: 5917 - RNA, 23 nt, synthetic construct
  source 1..23: mol_type = other RNA
  modified_base 1: mod_base = OTHER; note = 2'-O-methyluridine-3'-phosphate 5'-(E)-Vinylphosphonate
  modified_base 2: mod_base = OTHER; note = 2'-deoxy-2'-fluorouridine-3'-phosphate
  modified_base 3: mod_base = OTHER; note = 2'-O-methyladenosine-3'-phosphate
  modified_base 4: mod_base = OTHER; note = 2'-O-methylcytidine-3'-phosphate
  modified_base 5: mod_base = OTHER; note = 2'-O-methyladenosine-3'-phosphate
  modified_base 6: mod_base = OTHER; note = 2'-deoxy-2'-fluoroadenosine-3'-phosphate
  modified_base 7: mod_base = OTHER; note = 2'-O-methyladenosine-3'-phosphate
  modified_base 8: mod_base = OTHER; note = 2'-O-methyladenosine-3'-phosphate
  modified_base 9: mod_base = OTHER; note = 2'-O-methyladenosine-3'-phosphate
  modified_base 10: mod_base = OTHER; note = 2'-O-methylguanosine-3'-phosphate
  modified_base 11: mod_base = OTHER; note = 2'-O-methyluridine-3'-phosphate
  modified_base 12: mod_base = OTHER; note = 2'-O-methylcytidine-3'-phosphate
  modified_base 13: mod_base = OTHER; note = 2'-O-methyluridine-3'-phosphate
  modified_base 14: mod_base = OTHER; note = 2'-deoxy-2'-fluorouridine-3'-phosphate
  modified_base 15: mod_base = OTHER; note = 2'-O-methyluridine-3'-phosphate
  modified_base 16: mod_base = OTHER; note = 2'-deoxy-2'-fluoroadenosine-3'-phosphate
  modified_base 17: mod_base = OTHER; note = 2'-O-methylcytidine-3'-phosphate
  modified_base 18: mod_base = OTHER; note = 2'-O-methyladenosine-3'-phosphate
  modified_base 19: mod_base = OTHER; note = 2'-O-methyladenosine-3'-phosphate
  modified_base 20: mod_base = OTHER; note = 2'-O-methylcytidine-3'-phosphate
  modified_base 21: mod_base = OTHER; note = 2'-O-methylguanosine-3'-phosphate
  modified_base 22: mod_base = OTHER; note = 2'-O-methylguanosine-3'-phosphate
  modified_base 23: mod_base = OTHER; note = 2'-O-methyluridine
ttacaaaaagtctttacaacggt

SEQ ID NO: 5918 - RNA, 23 nt, synthetic construct
  source 1..23: mol_type = other RNA
  modified_base 1: mod_base = OTHER; note = 2'-O-methyluridine-3'-phosphate 5'-(E)-Vinylphosphonate
  modified_base 2: mod_base = OTHER; note = 2'-deoxy-2'-fluorouridine-3'-phosphate
  modified_base 3: mod_base = OTHER; note = 2'-O-methyluridine-3'-phosphate
  modified_base 4: mod_base = OTHER; note = 2'-O-methyladenosine-3'-phosphate
  modified_base 5: mod_base = OTHER; note = 2'-O-methylcytidine-3'-phosphate
  modified_base 6: mod_base = OTHER; note = 2'-deoxy-2'-fluoroadenosine-3'-phosphate
  modified_base 7: mod_base = OTHER; note = 2'-O-methyladenosine-3'-phosphate
  modified_base 8: mod_base = OTHER; note = 2'-O-methyladenosine-3'-phosphate
  modified_base 9: mod_base = OTHER; note = 2'-O-methyladenosine-3'-phosphate
  modified_base 10: mod_base = OTHER; note = 2'-O-methyladenosine-3'-phosphate
  modified_base 11: mod_base = OTHER; note = 2'-O-methylguanosine-3'-phosphate
  modified_base 12: mod_base = OTHER; note = 2'-O-methyluridine-3'-phosphate
  modified_base 13: mod_base = OTHER; note = 2'-O-methylcytidine-3'-phosphate
  modified_base 14: mod_base = OTHER; note = 2'-deoxy-2'-fluorouridine-3'-phosphate
  modified_base 15: mod_base = OTHER; note = 2'-O-methyluridine-3'-phosphate
  modified_base 16: mod_base = OTHER; note = 2'-deoxy-2'-fluorouridine-3'-phosphate
  modified_base 17: mod_base = OTHER; note = 2'-O-methyladenosine-3'-phosphate
  modified_base 18: mod_base = OTHER; note = 2'-O-methylcytidine-3'-phosphate
  modified_base 19: mod_base = OTHER; note = 2'-O-methyladenosine-3'-phosphate
  modified_base 20: mod_base = OTHER; note = 2'-O-methyladenosine-3'-phosphate
  modified_base 21: mod_base = OTHER; note = 2'-O-methylcytidine-3'-phosphate
  modified_base 22: mod_base = OTHER; note = 2'-O-methylguanosine-3'-phosphate
  modified_base 23: mod_base = OTHER; note = 2'-O-methylguanosine
tttacaaaaagtctttacaacgg

SEQ ID NO: 5919 - RNA, 23 nt, synthetic construct
  source 1..23: mol_type = other RNA
  modified_base 1: mod_base = OTHER; note = 2'-O-methyluridine-3'-phosphate 5'-(E)-Vinylphosphonate
  modified_base 2: mod_base = OTHER; note = 2'-deoxy-2'-fluorouridine-3'-phosphate
  modified_base 3: mod_base = OTHER; note = 2'-O-methyluridine-3'-phosphate
  modified_base 4: mod_base = OTHER; note = 2'-O-methyladenosine-3'-phosphate
  modified_base 5: mod_base = OTHER; note = 2'-O-methyladenosine-3'-phosphate
  modified_base 6: mod_base = OTHER; note = 2'-deoxy-2'-fluoroguanosine-3'-phosphate
  modified_base 7: mod_base = OTHER; note = 2'-O-methyladenosine-3'-phosphate
  modified_base 8: mod_base = OTHER; note = 2'-O-methylguanosine-3'-phosphate
  modified_base 9: mod_base = OTHER; note = 2'-O-methyluridine-3'-phosphate
  modified_base 10: mod_base = OTHER; note = 2'-O-methyladenosine-3'-phosphate
  modified_base 11: mod_base = OTHER; note = 2'-O-methyluridine-3'-phosphate
  modified_base 12: mod_base = OTHER; note = 2'-O-methylcytidine-3'-phosphate
  modified_base 13: mod_base = OTHER; note = 2'-O-methyladenosine-3'-phosphate
  modified_base 14: mod_base = OTHER; note = 2'-deoxy-2'-fluoroguanosine-3'-phosphate
  modified_base 15: mod_base = OTHER; note = 2'-O-methylcytidine-3'-phosphate
  modified_base 16: mod_base = OTHER; note = 2'-deoxy-2'-fluorouridine-3'-phosphate
  modified_base 17: mod_base = OTHER; note = 2'-O-methyladenosine-3'-phosphate
  modified_base 18: mod_base = OTHER; note = 2'-O-methylguanosine-3'-phosphate
  modified_base 19: mod_base = OTHER; note = 2'-O-methylcytidine-3'-phosphate
  modified_base 20: mod_base = OTHER; note = 2'-O-methyluridine-3'-phosphate
  modified_base 21: mod_base = OTHER; note = 2'-O-methyluridine-3'-phosphate
  modified_base 22: mod_base = OTHER; note = 2'-O-methyladenosine-3'-phosphate
  modified_base 23: mod_base = OTHER; note = 2'-O-methylcytidine
tttaagagtatcagctagcttac

SEQ ID NO: 5920 - RNA, 23 nt, synthetic construct
  source 1..23: mol_type = other RNA
  modified_base 1: mod_base = OTHER; note = 2'-O-methyluridine-3'-phosphate 5'-(E)-Vinylphosphonate
  modified_base 2: mod_base = OTHER; note = 2'-deoxy-2'-fluorouridine-3'-phosphate
  modified_base 3: mod_base = OTHER; note = 2'-O-methyladenosine-3'-phosphate
  modified_base 4: mod_base = OTHER; note = 2'-O-methylcytidine-3'-phosphate
  modified_base 5: mod_base = OTHER; note = 2'-O-methyluridine-3'-phosphate
  modified_base 6: mod_base = OTHER; note = 2'-deoxy-2'-fluorouridine-3'-phosphate
  modified_base 7: mod_base = OTHER; note = 2'-O-methyladenosine-3'-phosphate
  modified_base 8: mod_base = OTHER; note = 2'-O-methyladenosine-3'-phosphate
  modified_base 9: mod_base = OTHER; note = 2'-O-methylguanosine-3'-phosphate
  modified_base 10: mod_base = OTHER; note = 2'-O-methyladenosine-3'-phosphate
  modified_base 11: mod_base = OTHER; note = 2'-O-methylguanosine-3'-phosphate
  modified_base 12: mod_base = OTHER; note = 2'-O-methyluridine-3'-phosphate
  modified_base 13: mod_base = OTHER; note = 2'-O-methyladenosine-3'-phosphate
  modified_base 14: mod_base = OTHER; note = 2'-deoxy-2'-fluorouridine-3'-phosphate
  modified_base 15: mod_base = OTHER; note = 2'-O-methylcytidine-3'-phosphate
  modified_base 16: mod_base = OTHER; note = 2'-deoxy-2'-fluoroadenosine-3'-phosphate
  modified_base 17: mod_base = OTHER; note = 2'-O-methylguanosine-3'-phosphate
  modified_base 18: mod_base = OTHER; note = 2'-O-methylcytidine-3'-phosphate
  modified_base 19: mod_base = OTHER; note = 2'-O-methyluridine-3'-phosphate
  modified_base 20: mod_base = OTHER; note = 2'-O-methyladenosine-3'-phosphate
  modified_base 21: mod_base = OTHER; note = 2'-O-methylguanosine-3'-phosphate
  modified_base 22: mod_base = OTHER; note = 2'-O-methylcytidine-3'-phosphate
  modified_base 23: mod_base = OTHER; note = 2'-O-methyluridine
ttacttaagagtatcagctagct

SEQ ID NO: 5921 - RNA, 23 nt, synthetic construct
  source 1..23: mol_type = other RNA
  modified_base 1: mod_base = OTHER; note = 2'-O-methyluridine-3'-phosphate 5'-(E)-Vinylphosphonate
  modified_base 2: mod_base = OTHER; note = 2'-deoxy-2'-fluoroadenosine-3'-phosphate
  modified_base 3: mod_base = OTHER; note = 2'-O-methyluridine-3'-phosphate
  modified_base 4: mod_base = OTHER; note = 2'-O-methyladenosine-3'-phosphate
  modified_base 5: mod_base = OTHER; note = 2'-O-methylcytidine-3'-phosphate
  modified_base 6: mod_base = OTHER; note = 2'-deoxy-2'-fluoroadenosine-3'-phosphate
  modified_base 7: mod_base = OTHER; note = 2'-O-methylguanosine-3'-phosphate
  modified_base 8: mod_base = OTHER; note = 2'-O-methyluridine-3'-phosphate
  modified_base 9: mod_base = OTHER; note = 2'-O-methyluridine-3'-phosphate
  modified_base 10: mod_base = OTHER; note = 2'-O-methyluridine-3'-phosphate
  modified_base 11: mod_base = OTHER; note = 2'-O-methyladenosine-3'-phosphate
  modified_base 12: mod_base = OTHER; note = 2'-O-methyluridine-3'-phosphate
  modified_base 13: mod_base = OTHER; note = 2'-O-methyluridine-3'-phosphate
  modified_base 14: mod_base = OTHER; note = 2'-deoxy-2'-fluoroguanosine-3'-phosphate
  modified_base 15: mod_base = OTHER; note = 2'-O-methylcytidine-3'-phosphate
  modified_base 16: mod_base = OTHER; note = 2'-deoxy-2'-fluorocytidine-3'-phosphate
  modified_base 17: mod_base = OTHER; note = 2'-O-methylcytidine-3'-phosphate
  modified_base 18: mod_base = OTHER; note = 2'-O-methyladenosine-3'-phosphate
  modified_base 19: mod_base = OTHER; note = 2'-O-methyladenosine-3'-phosphate
  modified_base 20: mod_base = OTHER; note = 2'-O-methyluridine-3'-phosphate
  modified_base 21: mod_base = OTHER; note = 2'-O-methyluridine-3'-phosphate
  modified_base 22: mod_base = OTHER; note = 2'-O-methylcytidine-3'-phosphate
  modified_base 23: mod_base = OTHER; note = 2'-O-methylcytidine
tatacagtttattgcccaattcc

SEQ ID NO: 5922 - RNA, 23 nt, synthetic construct
  source 1..23: mol_type = other RNA
  modified_base 1: mod_base = OTHER; note = 2'-O-methyluridine-3'-phosphate 5'-(E)-Vinylphosphonate
  modified_base 2: mod_base = OTHER; note = 2'-deoxy-2'-fluoroguanosine-3'-phosphate
  modified_base 3: mod_base = OTHER; note = 2'-O-methyladenosine-3'-phosphate
  modified_base 4: mod_base = OTHER; note = 2'-O-methyluridine-3'-phosphate
  modified_base 5: mod_base = OTHER; note = 2'-O-methyladenosine-3'-phosphate
  modified_base 6: mod_base = OTHER; note = 2'-deoxy-2'-fluorocytidine-3'-phosphate
  modified_base 7: mod_base = OTHER; note = 2'-O-methyladenosine-3'-phosphate
  modified_base 8: mod_base = OTHER; note = 2'-O-methylguanosine-3'-phosphate
  modified_base 9: mod_base = OTHER; note = 2'-O-methyluridine-3'-phosphate
  modified_base 10: mod_base = OTHER; note = 2'-O-methyluridine-3'-phosphate
  modified_base 11: mod_base = OTHER; note = 2'-O-methyluridine-3'-phosphate
  modified_base 12: mod_base = OTHER; note = 2'-O-methyladenosine-3'-phosphate
  modified_base 13: mod_base = OTHER; note = 2'-O-methyluridine-3'-phosphate
  modified_base 14: mod_base = OTHER; note = 2'-deoxy-2'-fluorouridine-3'-phosphate
  modified_base 15: mod_base = OTHER; note = 2'-O-methylguanosine-3'-phosphate
  modified_base 16: mod_base = OTHER; note = 2'-deoxy-2'-fluorocytidine-3'-phosphate
  modified_base 17: mod_base = OTHER; note = 2'-O-methylcytidine-3'-phosphate
  modified_base 18: mod_base = OTHER; note = 2'-O-methylcytidine-3'-phosphate
  modified_base 19: mod_base = OTHER; note = 2'-O-methyladenosine-3'-phosphate
  modified_base 20: mod_base = OTHER; note = 2'-O-methyladenosine-3'-phosphate
  modified_base 21: mod_base = OTHER; note = 2'-O-methyluridine-3'-phosphate
  modified_base 22: mod_base = OTHER; note = 2'-O-methyluridine-3'-phosphate
  modified_base 23: mod_base = OTHER; note = 2'-O-methylcytidine
tgatacagtttattgcccaattc

SEQ ID NO: 5923 - RNA, 23 nt, synthetic construct
  source 1..23: mol_type = other RNA
  modified_base 1: mod_base = OTHER; note = 2'-O-methyluridine-3'-phosphate 5'-(E)-Vinylphosphonate
  modified_base 2: mod_base = OTHER; note = 2'-deoxy-2'-fluorouridine-3'-phosphate
  modified_base 3: mod_base = OTHER; note = 2'-O-methylguanosine-3'-phosphate
  modified_base 4: mod_base = OTHER; note = 2'-O-methyladenosine-3'-phosphate
  modified_base 5: mod_base = OTHER; note = 2'-O-methyluridine-3'-phosphate
  modified_base 6: mod_base = OTHER; note = 2'-deoxy-2'-fluoroadenosine-3'-phosphate
  modified_base 7: mod_base = OTHER; note = 2'-O-methylcytidine-3'-phosphate
  modified_base 8: mod_base = OTHER; note = 2'-O-methyladenosine-3'-phosphate
  modified_base 9: mod_base = OTHER; note = 2'-O-methylguanosine-3'-phosphate
  modified_base 10: mod_base = OTHER; note = 2'-O-methyluridine-3'-phosphate
  modified_base 11: mod_base = OTHER; note = 2'-O-methyluridine-3'-phosphate
  modified_base 12: mod_base = OTHER; note = 2'-O-methyluridine-3'-phosphate
  modified_base 13: mod_base = OTHER; note = 2'-O-methyladenosine-3'-phosphate
  modified_base 14: mod_base = OTHER; note = 2'-deoxy-2'-fluorouridine-3'-phosphate
  modified_base 15: mod_base = OTHER; note = 2'-O-methyluridine-3'-phosphate
  modified_base 16: mod_base = OTHER; note = 2'-deoxy-2'-fluoroguanosine-3'-phosphate
  modified_base 17: mod_base = OTHER; note = 2'-O-methylcytidine-3'-phosphate
  modified_base 18: mod_base = OTHER; note = 2'-O-methylcytidine-3'-phosphate
  modified_base 19: mod_base = OTHER; note = 2'-O-methylcytidine-3'-phosphate
  modified_base 20: mod_base = OTHER; note = 2'-O-methyladenosine-3'-phosphate
  modified_base 21: mod_base = OTHER; note = 2'-O-methyladenosine-3'-phosphate
  modified_base 22: mod_base = OTHER; note = 2'-O-methyluridine-3'-phosphate
  modified_base 23: mod_base = OTHER; note = 2'-O-methyluridine
ttgatacagtttattgcccaatt

SEQ ID NO: 5924 - RNA, 23 nt, synthetic construct
  source 1..23: mol_type = other RNA
  modified_base 1: mod_base = OTHER; note = 2'-O-methyluridine-3'-phosphate 5'-(E)-Vinylphosphonate
  modified_base 2: mod_base = OTHER; note = 2'-deoxy-2'-fluorouridine-3'-phosphate
  modified_base 3: mod_base = OTHER; note = 2'-O-methyluridine-3'-phosphate
  modified_base 4: mod_base = OTHER; note = 2'-O-methylguanosine-3'-phosphate
  modified_base 5: mod_base = OTHER; note = 2'-O-methyladenosine-3'-phosphate
  modified_base 6: mod_base = OTHER; note = 2'-deoxy-2'-fluorouridine-3'-phosphate
  modified_base 7: mod_base = OTHER; note = 2'-O-methyladenosine-3'-phosphate
  modified_base 8: mod_base = OTHER; note = 2'-O-methylcytidine-3'-phosphate
  modified_base 9: mod_base = OTHER; note = 2'-O-methyladenosine-3'-phosphate
  modified_base 10: mod_base = OTHER; note = 2'-O-methylguanosine-3'-phosphate
  modified_base 11: mod_base = OTHER; note = 2'-O-methyluridine-3'-phosphate
  modified_base 12: mod_base = OTHER; note = 2'-O-methyluridine-3'-phosphate
  modified_base 13: mod_base = OTHER; note = 2'-O-methyluridine-3'-phosphate
  modified_base 14: mod_base = OTHER; note = 2'-deoxy-2'-fluoroadenosine-3'-phosphate
  modified_base 15: mod_base = OTHER; note = 2'-O-methyluridine-3'-phosphate
  modified_base 16: mod_base = OTHER; note = 2'-deoxy-2'-fluorouridine-3'-phosphate
  modified_base 17: mod_base = OTHER; note = 2'-O-methylguanosine-3'-phosphate
  modified_base 18: mod_base = OTHER; note = 2'-O-methylcytidine-3'-phosphate
  modified_base 19: mod_base = OTHER; note = 2'-O-methylcytidine-3'-phosphate
  modified_base 20: mod_base = OTHER; note = 2'-O-methylcytidine-3'-phosphate
  modified_base 21: mod_base = OTHER; note = 2'-O-methyladenosine-3'-phosphate
  modified_base 22: mod_base = OTHER; note = 2'-O-methyladenosine-3'-phosphate
  modified_base 23: mod_base = OTHER; note = 2'-O-methyluridine
tttgatacagtttattgcccaat

SEQ ID NO: 5925 - RNA, 23 nt, synthetic construct
  source 1..23: mol_type = other RNA
  modified_base 1: mod_base = OTHER; note = 2'-O-methyluridine-3'-phosphate 5'-(E)-Vinylphosphonate
  modified_base 2: mod_base = OTHER; note = 2'-deoxy-2'-fluorouridine-3'-phosphate
  modified_base 3: mod_base = OTHER; note = 2'-O-methyluridine-3'-phosphate
  modified_base 4: mod_base = OTHER; note = 2'-O-methyluridine-3'-phosphate
  modified_base 5: mod_base = OTHER; note = 2'-O-methylguanosine-3'-phosphate
  modified_base 6: mod_base = OTHER; note = 2'-deoxy-2'-fluoroadenosine-3'-phosphate
  modified_base 7: mod_base = OTHER; note = 2'-O-methyluridine-3'-phosphate
  modified_base 8: mod_base = OTHER; note = 2'-O-methyladenosine-3'-phosphate
  modified_base 9: mod_base = OTHER; note = 2'-O-methylcytidine-3'-phosphate
  modified_base 10: mod_base = OTHER; note = 2'-O-methyladenosine-3'-phosphate
  modified_base 11: mod_base = OTHER; note = 2'-O-methylguanosine-3'-phosphate
  modified_base 12: mod_base = OTHER; note = 2'-O-methyluridine-3'-phosphate
  modified_base 13: mod_base = OTHER; note = 2'-O-methyluridine-3'-phosphate
  modified_base 14: mod_base = OTHER; note = 2'-deoxy-2'-fluorouridine-3'-phosphate
  modified_base 15: mod_base = OTHER; note = 2'-O-methyladenosine-3'-phosphate
  modified_base 16: mod_base = OTHER; note = 2'-deoxy-2'-fluorouridine-3'-phosphate
  modified_base 17: mod_base = OTHER; note = 2'-O-methyluridine-3'-phosphate
  modified_base 18: mod_base = OTHER; note = 2'-O-methylguanosine-3'-phosphate
  modified_base 19: mod_base = OTHER; note = 2'-O-methylcytidine-3'-phosphate
  modified_base 20: mod_base = OTHER; note = 2'-O-methylcytidine-3'-phosphate
  modified_base 21: mod_base = OTHER; note = 2'-O-methylcytidine-3'-phosphate
  modified_base 22: mod_base = OTHER; note = 2'-O-methyladenosine-3'-phosphate
  modified_base 23: mod_base = OTHER; note = 2'-O-methyladenosine
ttttgatacagtttattgcccaa

SEQ ID NO: 5926 - RNA, 23 nt, synthetic construct
  source 1..23: mol_type = other RNA
  modified_base 1: mod_base = OTHER; note = 2'-O-methyluridine-3'-phosphate 5'-(E)-Vinylphosphonate
  modified_base 2: mod_base = OTHER; note = 2'-deoxy-2'-fluorouridine-3'-phosphate
  modified_base 3: mod_base = OTHER; note = 2'-O-methyluridine-3'-phosphate
  modified_base 4: mod_base = OTHER; note = 2'-O-methyluridine-3'-phosphate
  modified_base 5: mod_base = OTHER; note = 2'-O-methyluridine-3'-phosphate
  modified_base 6: mod_base = OTHER; note = 2'-deoxy-2'-fluoroguanosine-3'-phosphate
  modified_base 7: mod_base = OTHER; note = 2'-O-methyladenosine-3'-phosphate
  modified_base 8: mod_base = OTHER; note = 2'-O-methyluridine-3'-phosphate
  modified_base 9: mod_base = OTHER; note = 2'-O-methyladenosine-3'-phosphate
  modified_base 10: mod_base = OTHER; note = 2'-O-methylcytidine-3'-phosphate
  modified_base 11: mod_base = OTHER; note = 2'-O-methyladenosine-3'-phosphate
  modified_base 12: mod_base = OTHER; note = 2'-O-methylguanosine-3'-phosphate
  modified_base 13: mod_base = OTHER; note = 2'-O-methyluridine-3'-phosphate
  modified_base 14: mod_base = OTHER; note = 2'-deoxy-2'-fluorouridine-3'-phosphate
  modified_base 15: mod_base = OTHER; note = 2'-O-methyluridine-3'-phosphate
  modified_base 16: mod_base = OTHER; note = 2'-deoxy-2'-fluoroadenosine-3'-phosphate
  modified_base 17: mod_base = OTHER; note = 2'-O-methyluridine-3'-phosphate
  modified_base 18: mod_base = OTHER; note = 2'-O-methyluridine-3'-phosphate
  modified_base 19: mod_base = OTHER; note = 2'-O-methylguanosine-3'-phosphate
  modified_base 20: mod_base = OTHER; note = 2'-O-methylcytidine-3'-phosphate
  modified_base 21: mod_base = OTHER; note = 2'-O-methylcytidine-3'-phosphate
  modified_base 22: mod_base = OTHER; note = 2'-O-methylcytidine-3'-phosphate
  modified_base 23: mod_base = OTHER; note = 2'-O-methyladenosine
tttttgatacagtttattgccca

SEQ ID NO: 5927 - RNA, 23 nt, synthetic construct
  source 1..23: mol_type = other RNA
  modified_base 1: mod_base = OTHER; note = 2'-O-methyluridine-3'-phosphate 5'-(E)-Vinylphosphonate
  modified_base 2: mod_base = OTHER; note = 2'-deoxy-2'-fluorouridine-3'-phosphate
  modified_base 3: mod_base = OTHER; note = 2'-O-methyluridine-3'-phosphate
  modified_base 4: mod_base = OTHER; note = 2'-O-methyluridine-3'-phosphate
  modified_base 5: mod_base = OTHER; note = 2'-O-methyluridine-3'-phosphate
  modified_base 6: mod_base = OTHER; note = 2'-deoxy-2'-fluorouridine-3'-phosphate
  modified_base 7: mod_base = OTHER; note = 2'-O-methylguanosine-3'-phosphate
  modified_base 8: mod_base = OTHER; note = 2'-O-methyladenosine-3'-phosphate
  modified_base 9: mod_base = OTHER; note = 2'-O-methyluridine-3'-phosphate
  modified_base 10: mod_base = OTHER; note = 2'-O-methyladenosine-3'-phosphate
  modified_base 11: mod_base = OTHER; note = 2'-O-methylcytidine-3'-phosphate
  modified_base 12: mod_base = OTHER; note = 2'-O-methyladenosine-3'-phosphate
  modified_base 13: mod_base = OTHER; note = 2'-O-methylguanosine-3'-phosphate
  modified_base 14: mod_base = OTHER; note = 2'-deoxy-2'-fluorouridine-3'-phosphate
  modified_base 15: mod_base = OTHER; note = 2'-O-methyluridine-3'-phosphate
  modified_base 16: mod_base = OTHER; note = 2'-deoxy-2'-fluorouridine-3'-phosphate
  modified_base 17: mod_base = OTHER; note = 2'-O-methyladenosine-3'-phosphate
  modified_base 18: mod_base = OTHER; note = 2'-O-methyluridine-3'-phosphate
  modified_base 19: mod_base = OTHER; note = 2'-O-methyluridine-3'-phosphate
  modified_base 20: mod_base = OTHER; note = 2'-O-methylguanosine-3'-phosphate
  modified_base 21: mod_base = OTHER; note = 2'-O-methylcytidine-3'-phosphate
  modified_base 22: mod_base = OTHER; note = 2'-O-methylcytidine-3'-phosphate
  modified_base 23: mod_base = OTHER; note = 2'-O-methylcytidine
ttttttgatacagtttattgccc

SEQ ID NO: 5928 - RNA, 23 nt, synthetic construct
  source 1..23: mol_type = other RNA
  modified_base 1: mod_base = OTHER; note = 2'-O-methyluridine-3'-phosphate 5'-(E)-Vinylphosphonate
  modified_base 2: mod_base = OTHER; note = 2'-deoxy-2'-fluoroadenosine-3'-phosphate
  modified_base 3: mod_base = OTHER; note = 2'-O-methyluridine-3'-phosphate
  modified_base 4: mod_base = OTHER; note = 2'-O-methyluridine-3'-phosphate
  modified_base 5: mod_base = OTHER; note = 2'-O-methyluridine-3'-phosphate
  modified_base 6: mod_base = OTHER; note = 2'-deoxy-2'-fluorouridine-3'-phosphate
  modified_base 7: mod_base = OTHER; note = 2'-O-methyluridine-3'-phosphate
  modified_base 8: mod_base = OTHER; note = 2'-O-methylguanosine-3'-phosphate
  modified_base 9: mod_base = OTHER; note = 2'-O-methyladenosine-3'-phosphate
  modified_base 10: mod_base = OTHER; note = 2'-O-methyluridine-3'-phosphate
  modified_base 11: mod_base = OTHER; note = 2'-O-methyladenosine-3'-phosphate
  modified_base 12: mod_base = OTHER; note = 2'-O-methylcytidine-3'-phosphate
  modified_base 13: mod_base = OTHER; note = 2'-O-methyladenosine-3'-phosphate
  modified_base 14: mod_base = OTHER; note = 2'-deoxy-2'-fluoroguanosine-3'-phosphate
  modified_base 15: mod_base = OTHER; note = 2'-O-methyluridine-3'-phosphate
  modified_base 16: mod_base = OTHER; note = 2'-deoxy-2'-fluorouridine-3'-phosphate
  modified_base 17: mod_base = OTHER; note = 2'-O-methyluridine-3'-phosphate
  modified_base 18: mod_base = OTHER; note = 2'-O-methyladenosine-3'-phosphate
  modified_base 19: mod_base = OTHER; note = 2'-O-methyluridine-3'-phosphate
  modified_base 20: mod_base = OTHER; note = 2'-O-methyluridine-3'-phosphate
  modified_base 21: mod_base = OTHER; note = 2'-O-methylguanosine-3'-phosphate
  modified_base 22: mod_base = OTHER; note = 2'-O-methylcytidine-3'-phosphate
  modified_base 23: mod_base = OTHER; note = 2'-O-methylcytidine
tatttttgatacagtttattgcc

SEQ ID NO: 5929 - RNA, 23 nt, synthetic construct
  source 1..23: mol_type = other RNA
  modified_base 1: mod_base = OTHER; note = 2'-O-methyluridine-3'-phosphate 5'-(E)-Vinylphosphonate
  modified_base 2: mod_base = OTHER; note = 2'-deoxy-2'-fluorocytidine-3'-phosphate
  modified_base 3: mod_base = OTHER; note = 2'-O-methyladenosine-3'-phosphate
  modified_base 4: mod_base = OTHER; note = 2'-O-methyluridine-3'-phosphate
  modified_base 5: mod_base = OTHER; note = 2'-O-methylcytidine-3'-phosphate
  modified_base 6: mod_base = OTHER; note = 2'-deoxy-2'-fluorouridine-3'-phosphate
  modified_base 7: mod_base = OTHER; note = 2'-O-methyladenosine-3'-phosphate
  modified_base 8: mod_base = OTHER; note = 2'-O-methylcytidine-3'-phosphate
  modified_base 9: mod_base = OTHER; note = 2'-O-methyladenosine-3'-phosphate
  modified_base 10: mod_base = OTHER; note = 2'-O-methyluridine-3'-phosphate
  modified_base 11: mod_base = OTHER; note = 2'-O-methyladenosine-3'-phosphate
  modified_base 12: mod_base = OTHER; note = 2'-O-methyluridine-3'-phosphate
  modified_base 13: mod_base = OTHER; note = 2'-O-methyluridine-3'-phosphate
  modified_base 14: mod_base = OTHER; note = 2'-deoxy-2'-fluorouridine-3'-phosphate
  modified_base 15: mod_base = OTHER; note = 2'-O-methyluridine-3'-phosphate
  modified_base 16: mod_base = OTHER; note = 2'-deoxy-2'-fluorouridine-3'-phosphate
  modified_base 17: mod_base = OTHER; note = 2'-O-methylguanosine-3'-phosphate
  modified_base 18: mod_base = OTHER; note = 2'-O-methyladenosine-3'-phosphate
  modified_base 19: mod_base = OTHER; note = 2'-O-methyluridine-3'-phosphate
  modified_base 20: mod_base = OTHER; note = 2'-O-methyladenosine-3'-phosphate
  modified_base 21: mod_base = OTHER; note = 2'-O-methylcytidine-3'-phosphate
  modified_base 22: mod_base = OTHER; note = 2'-O-methyladenosine-3'-phosphate
  modified_base 23: mod_base = OTHER; note = 2'-O-methylguanosine
tcatctacatatttttgatacag

SEQ ID NO: 5930 - RNA, 23 nt, synthetic construct
  source 1..23: mol_type = other RNA
  modified_base 1: mod_base = OTHER; note = 2'-O-methyluridine-3'-phosphate 5'-(E)-Vinylphosphonate
  modified_base 2: mod_base = OTHER; note = 2'-deoxy-2'-fluorocytidine-3'-phosphate
  modified_base 3: mod_base = OTHER; note = 2'-O-methylcytidine-3'-phosphate
  modified_base 4: mod_base = OTHER; note = 2'-O-methyladenosine-3'-phosphate
  modified_base 5: mod_base = OTHER; note = 2'-O-methyluridine-3'-phosphate
  modified_base 6: mod_base = OTHER; note = 2'-deoxy-2'-fluorocytidine-3'-phosphate
  modified_base 7: mod_base = OTHER; note = 2'-O-methyluridine-3'-phosphate
  modified_base 8: mod_base = OTHER; note = 2'-O-methyladenosine-3'-phosphate
  modified_base 9: mod_base = OTHER; note = 2'-O-methylcytidine-3'-phosphate
  modified_base 10: mod_base = OTHER; note = 2'-O-methyladenosine-3'-phosphate
  modified_base 11: mod_base = OTHER; note = 2'-O-methyluridine-3'-phosphate
  modified_base 12: mod_base = OTHER; note = 2'-O-methyladenosine-3'-phosphate
  modified_base 13: mod_base = OTHER; note = 2'-O-methyluridine-3'-phosphate
  modified_base 14: mod_base = OTHER; note = 2'-deoxy-2'-fluorouridine-3'-phosphate
  modified_base 15: mod_base = OTHER; note = 2'-O-methyluridine-3'-phosphate
  modified_base 16: mod_base = OTHER; note = 2'-deoxy-2'-fluorouridine-3'-phosphate
  modified_base 17: mod_base = OTHER; note = 2'-O-methyluridine-3'-phosphate
  modified_base 18: mod_base = OTHER; note = 2'-O-methylguanosine-3'-phosphate
  modified_base 19: mod_base = OTHER; note = 2'-O-methyladenosine-3'-phosphate
  modified_base 20: mod_base = OTHER; note = 2'-O-methyluridine-3'-phosphate
  modified_base 21: mod_base = OTHER; note = 2'-O-methyladenosine-3'-phosphate
  modified_base 22: mod_base = OTHER; note = 2'-O-methylcytidine-3'-phosphate
  modified_base 23: mod_base = OTHER; note = 2'-O-methyladenosine
tccatctacatatttttgataca

SEQ ID NO: 5931 - RNA, 23 nt, synthetic construct
  source 1..23: mol_type = other RNA
  modified_base 1: mod_base = OTHER; note = 2'-O-methyluridine-3'-phosphate 5'-(E)-Vinylphosphonate
  modified_base 2: mod_base = OTHER; note = 2'-deoxy-2'-fluorouridine-3'-phosphate
  modified_base 3: mod_base = OTHER; note = 2'-O-methylcytidine-3'-phosphate
  modified_base 4: mod_base = OTHER; note = 2'-O-methylcytidine-3'-phosphate
  modified_base 5: mod_base = OTHER; note = 2'-O-methyladenosine-3'-phosphate
  modified_base 6: mod_base = OTHER; note = 2'-deoxy-2'-fluorouridine-3'-phosphate
  modified_base 7: mod_base = OTHER; note = 2'-O-methylcytidine-3'-phosphate
  modified_base 8: mod_base = OTHER; note = 2'-O-methyluridine-3'-phosphate
  modified_base 9: mod_base = OTHER; note = 2'-O-methyladenosine-3'-phosphate
  modified_base 10: mod_base = OTHER; note = 2'-O-methylcytidine-3'-phosphate
  modified_base 11: mod_base = OTHER; note = 2'-O-methyladenosine-3'-phosphate
  modified_base 12: mod_base = OTHER; note = 2'-O-methyluridine-3'-phosphate
  modified_base 13: mod_base = OTHER; note = 2'-O-methyladenosine-3'-phosphate
  modified_base 14: mod_base = OTHER; note = 2'-deoxy-2'-fluorouridine-3'-phosphate
  modified_base 15: mod_base = OTHER; note = 2'-O-methyluridine-3'-phosphate
  modified_base 16: mod_base = OTHER; note = 2'-deoxy-2'-fluorouridine-3'-phosphate
  modified_base 17: mod_base = OTHER; note = 2'-O-methyluridine-3'-phosphate
  modified_base 18: mod_base = OTHER; note = 2'-O-methyluridine-3'-phosphate
  modified_base 19: mod_base = OTHER; note = 2'-O-methylguanosine-3'-phosphate
  modified_base 20: mod_base = OTHER; note = 2'-O-methyladenosine-3'-phosphate
  modified_base 21: mod_base = OTHER; note = 2'-O-methyluridine-3'-phosphate
  modified_base 22: mod_base = OTHER; note = 2'-O-methyladenosine-3'-phosphate
  modified_base 23: mod_base = OTHER; note = 2'-O-methylcytidine
ttccatctacatatttttgatac

SEQ ID NO: 5932 - RNA, 23 nt, synthetic construct
  source 1..23: mol_type = other RNA
  modified_base 1: mod_base = OTHER; note = 2'-O-methyluridine-3'-phosphate 5'-(E)-Vinylphosphonate
  modified_base 2: mod_base = OTHER; note = 2'-deoxy-2'-fluorouridine-3'-phosphate
  modified_base 3: mod_base = OTHER; note = 2'-O-methyluridine-3'-phosphate
  modified_base 4: mod_base = OTHER; note = 2'-O-methyluridine-3'-phosphate
  modified_base 5: mod_base = OTHER; note = 2'-O-methylguanosine-3'-phosphate
  modified_base 6: mod_base = OTHER; note = 2'-deoxy-2'-fluoroadenosine-3'-phosphate
  modified_base 7: mod_base = OTHER; note = 2'-O-methyladenosine-3'-phosphate
  modified_base 8: mod_base = OTHER; note = 2'-O-methyladenosine-3'-phosphate
  modified_base 9: mod_base = OTHER; note = 2'-O-methyluridine-3'-phosphate
  modified_base 10: mod_base = OTHER; note = 2'-O-methyluridine-3'-phosphate
  modified_base 11: mod_base = OTHER; note = 2'-O-methylcytidine-3'-phosphate
  modified_base 12: mod_base = OTHER; note = 2'-O-methyluridine-3'-phosphate
  modified_base 13: mod_base = OTHER; note = 2'-O-methylcytidine-3'-phosphate
  modified_base 14: mod_base = OTHER; note = 2'-deoxy-2'-fluorouridine-3'-phosphate
  modified_base 15: mod_base = OTHER; note = 2'-O-methyluridine-3'-phosphate
  modified_base 16: mod_base = OTHER; note = 2'-deoxy-2'-fluorocytidine-3'-phosphate
  modified_base 17: mod_base = OTHER; note = 2'-O-methyladenosine-3'-phosphate
  modified_base 18: mod_base = OTHER; note = 2'-O-methylcytidine-3'-phosphate
  modified_base 19: mod_base = OTHER; note = 2'-O-methylcytidine-3'-phosphate
  modified_base 20: mod_base = OTHER; note = 2'-O-methyluridine-3'-phosphate
  modified_base 21: mod_base = OTHER; note = 2'-O-methyluridine-3'-phosphate
  modified_base 22: mod_base = OTHER; note = 2'-O-methylcytidine-3'-phosphate
  modified_base 23: mod_base = OTHER; note = 2'-O-methylcytidine
ttttgaaattctcttcaccttcc

SEQ ID NO: 5933 - RNA, 23 nt, synthetic construct
  source 1..23: mol_type = other RNA
  modified_base 1: mod_base = OTHER; note = 2'-O-methyluridine-3'-phosphate 5'-(E)-Vinylphosphonate
  modified_base 2: mod_base = OTHER; note = 2'-deoxy-2'-fluoroadenosine-3'-phosphate
  modified_base 3: mod_base = OTHER; note = 2'-O-methylguanosine-3'-phosphate
  modified_base 4: mod_base = OTHER; note = 2'-O-methyluridine-3'-phosphate
  modified_base 5: mod_base = OTHER; note = 2'-O-methyluridine-3'-phosphate
  modified_base 6: mod_base = OTHER; note = 2'-deoxy-2'-fluorouridine-3'-phosphate
  modified_base 7: mod_base = OTHER; note = 2'-O-methylguanosine-3'-phosphate
  modified_base 8: mod_base = OTHER; note = 2'-O-methyladenosine-3'-phosphate
  modified_base 9: mod_base = OTHER; note = 2'-O-methyladenosine-3'-phosphate
  modified_base 10: mod_base = OTHER; note = 2'-O-methyladenosine-3'-phosphate
  modified_base 11: mod_base = OTHER; note = 2'-O-methyluridine-3'-phosphate
  modified_base 12: mod_base = OTHER; note = 2'-O-methyluridine-3'-phosphate
  modified_base 13: mod_base = OTHER; note = 2'-O-methylcytidine-3'-phosphate
  modified_base 14: mod_base = OTHER; note = 2'-deoxy-2'-fluorouridine-3'-phosphate
  modified_base 15: mod_base = OTHER; note = 2'-O-methylcytidine-3'-phosphate
  modified_base 16: mod_base = OTHER; note = 2'-deoxy-2'-fluorouridine-3'-phosphate
  modified_base 17: mod_base = OTHER; note = 2'-O-methyluridine-3'-phosphate
  modified_base 18: mod_base = OTHER; note = 2'-O-methylcytidine-3'-phosphate
  modified_base 19: mod_base = OTHER; note = 2'-O-methyladenosine-3'-phosphate
  modified_base 20: mod_base = OTHER; note = 2'-O-methylcytidine-3'-phosphate
  modified_base 21: mod_base = OTHER; note = 2'-O-methylcytidine-3'-phosphate
  modified_base 22: mod_base = OTHER; note = 2'-O-methyluridine-3'-phosphate
  modified_base 23: mod_base = OTHER; note = 2'-O-methyluridine
tagtttgaaattctcttcacctt

SEQ ID NO: 5934 - RNA, 23 nt, synthetic construct
  source 1..23: mol_type = other RNA
  modified_base 1: mod_base = OTHER; note = 2'-O-methyluridine-3'-phosphate 5'-(E)-Vinylphosphonate
  modified_base 2: mod_base = OTHER; note = 2'-deoxy-2'-fluoroguanosine-3'-phosphate
  modified_base 3: mod_base = OTHER; note = 2'-O-methyladenosine-3'-phosphate
  modified_base 4: mod_base = OTHER; note = 2'-O-methylguanosine-3'-phosphate
  modified_base 5: mod_base = OTHER; note = 2'-O-methyluridine-3'-phosphate
  modified_base 6: mod_base = OTHER; note = 2'-deoxy-2'-fluorouridine-3'-phosphate
  modified_base 7: mod_base = OTHER; note = 2'-O-methyluridine-3'-phosphate
  modified_base 8: mod_base = OTHER; note = 2'-O-methylguanosine-3'-phosphate
  modified_base 9: mod_base = OTHER; note = 2'-O-methyladenosine-3'-phosphate
  modified_base 10: mod_base = OTHER; note = 2'-O-methyladenosine-3'-phosphate
  modified_base 11: mod_base = OTHER; note = 2'-O-methyladenosine-3'-phosphate
  modified_base 12: mod_base = OTHER; note = 2'-O-methyluridine-3'-phosphate
  modified_base 13: mod_base = OTHER; note = 2'-O-methyluridine-3'-phosphate
  modified_base 14: mod_base = OTHER; note = 2'-deoxy-2'-fluorocytidine-3'-phosphate
  modified_base 15: mod_base = OTHER; note = 2'-O-methyluridine-3'-phosphate
  modified_base 16: mod_base = OTHER; note = 2'-deoxy-2'-fluorocytidine-3'-phosphate
  modified_base 17: mod_base = OTHER; note = 2'-O-methyluridine-3'-phosphate
  modified_base 18: mod_base = OTHER; note = 2'-O-methyluridine-3'-phosphate
  modified_base 19: mod_base = OTHER; note = 2'-O-methylcytidine-3'-phosphate
  modified_base 20: mod_base = OTHER; note = 2'-O-methyladenosine-3'-phosphate
  modified_base 21: mod_base = OTHER; note = 2'-O-methylcytidine-3'-phosphate
  modified_base 22: mod_base = OTHER; note = 2'-O-methylcytidine-3'-phosphate
  modified_base 23: mod_base = OTHER; note = 2'-O-methyluridine
tgagtttgaaattctcttcacct

SEQ ID NO: 5935 - RNA, 23 nt, synthetic construct
  source 1..23: mol_type = other RNA
  modified_base 1: mod_base = OTHER; note = 2'-O-methyluridine-3'-phosphate 5'-(E)-Vinylphosphonate
  modified_base 2: mod_base = OTHER; note = 2'-deoxy-2'-fluorocytidine-3'-phosphate
  modified_base 3: mod_base = OTHER; note = 2'-O-methyluridine-3'-phosphate
  modified_base 4: mod_base = OTHER; note = 2'-O-methyladenosine-3'-phosphate
  modified_base 5: mod_base = OTHER; note = 2'-O-methylguanosine-3'-phosphate
  modified_base 6: mod_base = OTHER; note = 2'-deoxy-2'-fluoroadenosine-3'-phosphate
  modified_base 7: mod_base = OTHER; note = 2'-O-methyladenosine-3'-phosphate
  modified_base 8: mod_base = OTHER; note = 2'-O-methyladenosine-3'-phosphate
  modified_base 9: mod_base = OTHER; note = 2'-O-methyluridine-3'-phosphate
  modified_base 10: mod_base = OTHER; note = 2'-O-methyluridine-3'-phosphate
  modified_base 11: mod_base = OTHER; note = 2'-O-methyladenosine-3'-phosphate
  modified_base 12: mod_base = OTHER; note = 2'-O-methyladenosine-3'-phosphate
  modified_base 13: mod_base = OTHER; note = 2'-O-methyluridine-3'-phosphate
  modified_base 14: mod_base = OTHER; note = 2'-deoxy-2'-fluoroguanosine-3'-phosphate
  modified_base 15: mod_base = OTHER; note = 2'-O-methyladenosine-3'-phosphate
  modified_base 16: mod_base = OTHER; note = 2'-deoxy-2'-fluoroadenosine-3'-phosphate
  modified_base 17: mod_base = OTHER; note = 2'-O-methyladenosine-3'-phosphate
  modified_base 18: mod_base = OTHER; note = 2'-O-methylcytidine-3'-phosphate
  modified_base 19: mod_base = OTHER; note = 2'-O-methyladenosine-3'-phosphate
  modified_base 20: mod_base = OTHER; note = 2'-O-methyluridine-3'-phosphate
  modified_base 21: mod_base = OTHER; note = 2'-O-methylcytidine-3'-phosphate
  modified_base 22: mod_base = OTHER; note = 2'-O-methyluridine-3'-phosphate
  modified_base 23: mod_base = OTHER; note = 2'-O-methylguanosine
tctagaaattaatgaaacatctg

SEQ ID NO: 5936 - RNA, 23 nt, synthetic construct
  source 1..23: mol_type = other RNA
  modified_base 1: mod_base = OTHER; note = 2'-O-methyluridine-3'-phosphate 5'-(E)-Vinylphosphonate
  modified_base 2: mod_base = OTHER; note = 2'-deoxy-2'-fluorocytidine-3'-phosphate
  modified_base 3: mod_base = OTHER; note = 2'-O-methyladenosine-3'-phosphate
  modified_base 4: mod_base = OTHER; note = 2'-O-methyluridine-3'-phosphate
  modified_base 5: mod_base = OTHER; note = 2'-O-methyladenosine-3'-phosphate
  modified_base 6: mod_base = OTHER; note = 2'-deoxy-2'-fluorouridine-3'-phosphate
  modified_base 7: mod_base = OTHER; note = 2'-O-methyluridine-3'-phosphate
  modified_base 8: mod_base = OTHER; note = 2'-O-methyluridine-3'-phosphate
  modified_base 9: mod_base = OTHER; note = 2'-O-methyluridine-3'-phosphate
  modified_base 10: mod_base = OTHER; note = 2'-O-methylcytidine-3'-phosphate
  modified_base 11: mod_base = OTHER; note = 2'-O-methyladenosine-3'-phosphate
  modified_base 12: mod_base = OTHER; note = 2'-O-methylcytidine-3'-phosphate
  modified_base 13: mod_base = OTHER; note = 2'-O-methyladenosine-3'-phosphate
  modified_base 14: mod_base = OTHER; note = 2'-deoxy-2'-fluoroguanosine-3'-phosphate
  modified_base 15: mod_base = OTHER; note = 2'-O-methyladenosine-3'-phosphate
  modified_base 16: mod_base = OTHER; note = 2'-deoxy-2'-fluorocytidine-3'-phosphate
  modified_base 17: mod_base = OTHER; note = 2'-O-methyluridine-3'-phosphate
  modified_base 18: mod_base = OTHER; note = 2'-O-methyladenosine-3'-phosphate
  modified_base 19: mod_base = OTHER; note = 2'-O-methylguanosine-3'-phosphate
  modified_base 20: mod_base = OTHER; note = 2'-O-methyladenosine-3'-phosphate
  modified_base 21: mod_base = OTHER; note = 2'-O-methyladenosine-3'-phosphate
  modified_base 22: mod_base = OTHER; note = 2'-O-methyladenosine-3'-phosphate
  modified_base 23: mod_base = OTHER; note = 2'-O-methyluridine
tcatattttcacagactagaaat

SEQ ID NO: 5937 - RNA, 23 nt, synthetic construct
  source 1..23: mol_type = other RNA
  modified_base 1: mod_base = OTHER; note = 2'-O-methyluridine-3'-phosphate 5'-(E)-Vinylphosphonate
  modified_base 2: mod_base = OTHER; note = 2'-deoxy-2'-fluoroguanosine-3'-phosphate
  modified_base 3: mod_base = OTHER; note = 2'-O-methylcytidine-3'-phosphate
  modified_base 4: mod_base = OTHER; note = 2'-O-methyladenosine-3'-phosphate
  modified_base 5: mod_base = OTHER; note = 2'-O-methyluridine-3'-phosphate
  modified_base 6: mod_base = OTHER; note = 2'-deoxy-2'-fluoroadenosine-3'-phosphate
  modified_base 7: mod_base = OTHER; note = 2'-O-methyluridine-3'-phosphate
  modified_base 8: mod_base = OTHER; note = 2'-O-methyluridine-3'-phosphate
  modified_base 9: mod_base = OTHER; note = 2'-O-methyluridine-3'-phosphate
  modified_base 10: mod_base = OTHER; note = 2'-O-methyluridine-3'-phosphate
  modified_base 11: mod_base = OTHER; note = 2'-O-methylcytidine-3'-phosphate
  modified_base 12: mod_base = OTHER; note = 2'-O-methyladenosine-3'-phosphate
  modified_base 13: mod_base = OTHER; note = 2'-O-methylcytidine-3'-phosphate
  modified_base 14: mod_base = OTHER; note = 2'-deoxy-2'-fluoroadenosine-3'-phosphate
  modified_base 15: mod_base = OTHER; note = 2'-O-methylguanosine-3'-phosphate
  modified_base 16: mod_base = OTHER; note = 2'-deoxy-2'-fluoroadenosine-3'-phosphate
  modified_base 17: mod_base = OTHER; note = 2'-O-methylcytidine-3'-phosphate
  modified_base 18: mod_base = OTHER; note = 2'-O-methyluridine-3'-phosphate
  modified_base 19: mod_base = OTHER; note = 2'-O-methyladenosine-3'-phosphate
  modified_base 20: mod_base = OTHER; note = 2'-O-methylguanosine-3'-phosphate
  modified_base 21: mod_base = OTHER; note = 2'-O-methyladenosine-3'-phosphate
  modified_base 22: mod_base = OTHER; note = 2'-O-methyladenosine-3'-phosphate
  modified_base 23: mod_base = OTHER; note = 2'-O-methyladenosine
tgcatattttcacagactagaaa

SEQ ID NO: 5938 - RNA, 23 nt, synthetic construct
  source 1..23: mol_type = other RNA
  modified_base 1: mod_base = OTHER; note = 2'-O-methyluridine-3'-phosphate 5'-(E)-Vinylphosphonate
  modified_base 2: mod_base = OTHER; note = 2'-deoxy-2'-fluorouridine-3'-phosphate
  modified_base 3: mod_base = OTHER; note = 2'-O-methylguanosine-3'-phosphate
  modified_base 4: mod_base = OTHER; note = 2'-O-methylcytidine-3'-phosphate
  modified_base 5: mod_base = OTHER; note = 2'-O-methyladenosine-3'-phosphate
  modified_base 6: mod_base = OTHER; note = 2'-deoxy-2'-fluorouridine-3'-phosphate
  modified_base 7: mod_base = OTHER; note = 2'-O-methyladenosine-3'-phosphate
  modified_base 8: mod_base = OTHER; note = 2'-O-methyluridine-3'-phosphate
  modified_base 9: mod_base = OTHER; note = 2'-O-methyluridine-3'-phosphate
  modified_base 10: mod_base = OTHER; note = 2'-O-methyluridine-3'-phosphate
  modified_base 11: mod_base = OTHER; note = 2'-O-methyluridine-3'-phosphate
  modified_base 12: mod_base = OTHER; note = 2'-O-methylcytidine-3'-phosphate
  modified_base 13: mod_base = OTHER; note = 2'-O-methyladenosine-3'-phosphate
  modified_base 14: mod_base = OTHER; note = 2'-deoxy-2'-fluorocytidine-3'-phosphate
  modified_base 15: mod_base = OTHER; note = 2'-O-methyladenosine-3'-phosphate
  modified_base 16: mod_base = OTHER; note = 2'-deoxy-2'-fluoroguanosine-3'-phosphate
  modified_base 17: mod_base = OTHER; note = 2'-O-methyladenosine-3'-phosphate
  modified_base 18: mod_base = OTHER; note = 2'-O-methylcytidine-3'-phosphate
  modified_base 19: mod_base = OTHER; note = 2'-O-methyluridine-3'-phosphate
  modified_base 20: mod_base = OTHER; note = 2'-O-methyladenosine-3'-phosphate
  modified_base 21: mod_base = OTHER; note = 2'-O-methylguanosine-3'-phosphate
  modified_base 22: mod_base = OTHER; note = 2'-O-methyladenosine-3'-phosphate
  modified_base 23: mod_base = OTHER; note = 2'-O-methyladenosine
ttgcatattttcacagactagaa

SEQ ID NO: 5939 - RNA, 23 nt, synthetic construct
  source 1..23: mol_type = other RNA
  modified_base 1: mod_base = OTHER; note = 2'-O-methyluridine-3'-phosphate 5'-(E)-Vinylphosphonate
  modified_base 2: mod_base = OTHER; note = 2'-deoxy-2'-fluoroadenosine-3'-phosphate
  modified_base 3: mod_base = OTHER; note = 2'-O-methyluridine-3'-phosphate
  modified_base 4: mod_base = OTHER; note = 2'-O-methylguanosine-3'-phosphate
  modified_base 5: mod_base = OTHER; note = 2'-O-methylcytidine-3'-phosphate
  modified_base 6: mod_base = OTHER; note = 2'-deoxy-2'-fluoroadenosine-3'-phosphate
  modified_base 7: mod_base = OTHER; note = 2'-O-methyluridine-3'-phosphate
  modified_base 8: mod_base = OTHER; note = 2'-O-methyladenosine-3'-phosphate
  modified_base 9: mod_base = OTHER; note = 2'-O-methyluridine-3'-phosphate
  modified_base 10: mod_base = OTHER; note = 2'-O-methyluridine-3'-phosphate
  modified_base 11: mod_base = OTHER; note = 2'-O-methyluridine-3'-phosphate
  modified_base 12: mod_base = OTHER; note = 2'-O-methyluridine-3'-phosphate
  modified_base 13: mod_base = OTHER; note = 2'-O-methylcytidine-3'-phosphate
  modified_base 14: mod_base = OTHER; note = 2'-deoxy-2'-fluoroadenosine-3'-phosphate
  modified_base 15: mod_base = OTHER; note = 2'-O-methylcytidine-3'-phosphate
  modified_base 16: mod_base = OTHER; note = 2'-deoxy-2'-fluoroadenosine-3'-phosphate
  modified_base 17: mod_base = OTHER; note = 2'-O-methylguanosine-3'-phosphate
  modified_base 18: mod_base = OTHER; note = 2'-O-methyladenosine-3'-phosphate
  modified_base 19: mod_base = OTHER; note = 2'-O-methylcytidine-3'-phosphate
  modified_base 20: mod_base = OTHER; note = 2'-O-methyluridine-3'-phosphate
  modified_base 21: mod_base = OTHER; note = 2'-O-methyladenosine-3'-phosphate
  modified_base 22: mod_base = OTHER; note = 2'-O-methylguanosine-3'-phosphate
  modified_base 23: mod_base = OTHER; note = 2'-O-methyladenosine
tatgcatattttcacagactaga

SEQ ID NO: 5940 - RNA, 23 nt, synthetic construct
  source 1..23: mol_type = other RNA
  modified_base 1: mod_base = OTHER; note = 2'-O-methyluridine-3'-phosphate 5'-(E)-Vinylphosphonate
  modified_base 2: mod_base = OTHER; note = 2'-deoxy-2'-fluoroadenosine-3'-phosphate
  modified_base 3: mod_base = OTHER; note = 2'-O-methyladenosine-3'-phosphate
  modified_base 4: mod_base = OTHER; note = 2'-O-methyluridine-3'-phosphate
  modified_base 5: mod_base = OTHER; note = 2'-O-methylguanosine-3'-phosphate
  modified_base 6: mod_base = OTHER; note = 2'-deoxy-2'-fluorocytidine-3'-phosphate
  modified_base 7: mod_base = OTHER; note = 2'-O-methyladenosine-3'-phosphate
  modified_base 8: mod_base = OTHER; note = 2'-O-methyluridine-3'-phosphate
  modified_base 9: mod_base = OTHER; note = 2'-O-methyladenosine-3'-phosphate
  modified_base 10: mod_base = OTHER; note = 2'-O-methyluridine-3'-phosphate
  modified_base 11: mod_base = OTHER; note = 2'-O-methyluridine-3'-phosphate
  modified_base 12: mod_base = OTHER; note = 2'-O-methyluridine-3'-phosphate
  modified_base 13: mod_base = OTHER; note = 2'-O-methyluridine-3'-phosphate
  modified_base 14: mod_base = OTHER; note = 2'-deoxy-2'-fluorocytidine-3'-phosphate
  modified_base 15: mod_base = OTHER; note = 2'-O-methyladenosine-3'-phosphate
  modified_base 16: mod_base = OTHER; note = 2'-deoxy-2'-fluorocytidine-3'-phosphate
  modified_base 17: mod_base = OTHER; note = 2'-O-methyladenosine-3'-phosphate
  modified_base 18: mod_base = OTHER; note = 2'-O-methylguanosine-3'-phosphate
  modified_base 19: mod_base = OTHER; note = 2'-O-methyladenosine-3'-phosphate
  modified_base 20: mod_base = OTHER; note = 2'-O-methylcytidine-3'-phosphate
  modified_base 21: mod_base = OTHER; note = 2'-O-methyluridine-3'-phosphate
  modified_base 22: mod_base = OTHER; note = 2'-O-methyladenosine-3'-phosphate
  modified_base 23: mod_base = OTHER; note = 2'-O-methylguanosine
taatgcatattttcacagactag

SEQ ID NO: 5941 - RNA, 23 nt, synthetic construct
  source 1..23: mol_type = other RNA
  modified_base 1: mod_base = OTHER; note = 2'-O-methyluridine-3'-phosphate 5'-(E)-Vinylphosphonate
  modified_base 2: mod_base = OTHER; note = 2'-deoxy-2'-fluoroadenosine-3'-phosphate
  modified_base 3: mod_base = OTHER; note = 2'-O-methyladenosine-3'-phosphate
  modified_base 4: mod_base = OTHER; note = 2'-O-methyladenosine-3'-phosphate
  modified_base 5: mod_base = OTHER; note = 2'-O-methyluridine-3'-phosphate
  modified_base 6: mod_base = OTHER; note = 2'-deoxy-2'-fluoroguanosine-3'-phosphate
  modified_base 7: mod_base = OTHER; note = 2'-O-methylcytidine-3'-phosphate
  modified_base 8: mod_base = OTHER; note = 2'-O-methyladenosine-3'-phosphate
  modified_base 9: mod_base = OTHER; note = 2'-O-methyluridine-3'-phosphate
  modified_base 10: mod_base = OTHER; note = 2'-O-methyladenosine-3'-phosphate
  modified_base 11: mod_base = OTHER; note = 2'-O-methyluridine-3'-phosphate
  modified_base 12: mod_base = OTHER; note = 2'-O-methyluridine-3'-phosphate
  modified_base 13: mod_base = OTHER; note = 2'-O-methyluridine-3'-phosphate
  modified_base 14: mod_base = OTHER; note = 2'-deoxy-2'-fluorouridine-3'-phosphate
  modified_base 15: mod_base = OTHER; note = 2'-O-methylcytidine-3'-phosphate
  modified_base 16: mod_base = OTHER; note = 2'-deoxy-2'-fluoroadenosine-3'-phosphate
  modified_base 17: mod_base = OTHER; note = 2'-O-methylcytidine-3'-phosphate
  modified_base 18: mod_base = OTHER; note = 2'-O-methyladenosine-3'-phosphate
  modified_base 19: mod_base = OTHER; note = 2'-O-methylguanosine-3'-phosphate
  modified_base 20: mod_base = OTHER; note = 2'-O-methyladenosine-3'-phosphate
  modified_base 21: mod_base = OTHER; note = 2'-O-methylcytidine-3'-phosphate
  modified_base 22: mod_base = OTHER; note = 2'-O-methyluridine-3'-phosphate
  modified_base 23: mod_base = OTHER; note = 2'-O-methyladenosine
taaatgcatattttcacagacta

SEQ ID NO: 5942 - RNA, 23 nt, synthetic construct
  source 1..23: mol_type = other RNA
  modified_base 1: mod_base = OTHER; note = 2'-O-methyluridine-3'-phosphate 5'-(E)-Vinylphosphonate
  modified_base 2: mod_base = OTHER; note = 2'-deoxy-2'-fluoroadenosine-3'-phosphate
  modified_base 3: mod_base = OTHER; note = 2'-O-methyladenosine-3'-phosphate
  modified_base 4: mod_base = OTHER; note = 2'-O-methyladenosine-3'-phosphate
  modified_base 5: mod_base = OTHER; note = 2'-O-methyladenosine-3'-phosphate
  modified_base 6: mod_base = OTHER; note = 2'-deoxy-2'-fluorouridine-3'-phosphate
  modified_base 7: mod_base = OTHER; note = 2'-O-methylguanosine-3'-phosphate
  modified_base 8: mod_base = OTHER; note = 2'-O-methylcytidine-3'-phosphate
  modified_base 9: mod_base = OTHER; note = 2'-O-methyladenosine-3'-phosphate
  modified_base 10: mod_base = OTHER; note = 2'-O-methyluridine-3'-phosphate
  modified_base 11: mod_base = OTHER; note = 2'-O-methyladenosine-3'-phosphate
  modified_base 12: mod_base = OTHER; note = 2'-O-methyluridine-3'-phosphate
  modified_base 13: mod_base = OTHER; note = 2'-O-methyluridine-3'-phosphate
  modified_base 14: mod_base = OTHER; note = 2'-deoxy-2'-fluorouridine-3'-phosphate
  modified_base 15: mod_base = OTHER; note = 2'-O-methyluridine-3'-phosphate
  modified_base 16: mod_base = OTHER; note = 2'-deoxy-2'-fluorocytidine-3'-phosphate
  modified_base 17: mod_base = OTHER; note = 2'-O-methyladenosine-3'-phosphate
  modified_base 18: mod_base = OTHER; note = 2'-O-methylcytidine-3'-phosphate
  modified_base 19: mod_base = OTHER; note = 2'-O-methyladenosine-3'-phosphate
  modified_base 20: mod_base = OTHER; note = 2'-O-methylguanosine-3'-phosphate
  modified_base 21: mod_base = OTHER; note = 2'-O-methyladenosine-3'-phosphate
  modified_base 22: mod_base = OTHER; note = 2'-O-methylcytidine-3'-phosphate
  modified_base 23: mod_base = OTHER; note = 2'-O-methyluridine
taaaatgcatattttcacagact

SEQ ID NO: 5943 - RNA, 23 nt, synthetic construct
  source 1..23: mol_type = other RNA
  modified_base 1: mod_base = OTHER; note = 2'-O-methyluridine-3'-phosphate 5'-(E)-Vinylphosphonate
  modified_base 2: mod_base = OTHER; note = 2'-deoxy-2'-fluorouridine-3'-phosphate
  modified_base 3: mod_base = OTHER; note = 2'-O-methyladenosine-3'-phosphate
  modified_base 4: mod_base = OTHER; note = 2'-O-methyladenosine-3'-phosphate
  modified_base 5: mod_base = OTHER; note = 2'-O-methyladenosine-3'-phosphate
  modified_base 6: mod_base = OTHER; note = 2'-deoxy-2'-fluoroadenosine-3'-phosphate
  modified_base 7: mod_base = OTHER; note = 2'-O-methyluridine-3'-phosphate
  modified_base 8: mod_base = OTHER; note = 2'-O-methylguanosine-3'-phosphate
  modified_base 9: mod_base = OTHER; note = 2'-O-methylcytidine-3'-phosphate
  modified_base 10: mod_base = OTHER; note = 2'-O-methyladenosine-3'-phosphate
  modified_base 11: mod_base = OTHER; note = 2'-O-methyluridine-3'-phosphate
  modified_base 12: mod_base = OTHER; note = 2'-O-methyladenosine-3'-phosphate
  modified_base 13: mod_base = OTHER; note = 2'-O-methyluridine-3'-phosphate
  modified_base 14: mod_base = OTHER; note = 2'-deoxy-2'-fluorouridine-3'-phosphate
  modified_base 15: mod_base = OTHER; note = 2'-O-methyluridine-3'-phosphate
  modified_base 16: mod_base = OTHER; note = 2'-deoxy-2'-fluorouridine-3'-phosphate
  modified_base 17: mod_base = OTHER; note = 2'-O-methylcytidine-3'-phosphate
  modified_base 18: mod_base = OTHER; note = 2'-O-methyladenosine-3'-phosphate
  modified_base 19: mod_base = OTHER; note = 2'-O-methylcytidine-3'-phosphate
  modified_base 20: mod_base = OTHER; note = 2'-O-methyladenosine-3'-phosphate
  modified_base 21: mod_base = OTHER; note = 2'-O-methylguanosine-3'-phosphate
  modified_base 22: mod_base = OTHER; note = 2'-O-methyladenosine-3'-phosphate
  modified_base 23: mod_base = OTHER; note = 2'-O-methylcytidine
ttaaaatgcatattttcacagac

SEQ ID NO: 5944 - RNA, 23 nt, synthetic construct
  source 1..23: mol_type = other RNA
  modified_base 1: mod_base = OTHER; note = 2'-O-methyluridine-3'-phosphate 5'-(E)-Vinylphosphonate
  modified_base 2: mod_base = OTHER; note = 2'-deoxy-2'-fluoroadenosine-3'-phosphate
  modified_base 3: mod_base = OTHER; note = 2'-O-methyluridine-3'-phosphate
  modified_base 4: mod_base = OTHER; note = 2'-O-methyluridine-3'-phosphate
  modified_base 5: mod_base = OTHER; note = 2'-O-methyluridine-3'-phosphate
  modified_base 6: mod_base = OTHER; note = 2'-deoxy-2'-fluorouridine-3'-phosphate
  modified_base 7: mod_base = OTHER; note = 2'-O-methylguanosine-3'-phosphate
  modified_base 8: mod_base = OTHER; note = 2'-O-methylguanosine-3'-phosphate
  modified_base 9: mod_base = OTHER; note = 2'-O-methyluridine-3'-phosphate
  modified_base 10: mod_base = OTHER; note = 2'-O-methyladenosine-3'-phosphate
  modified_base 11: mod_base = OTHER; note = 2'-O-methyluridine-3'-phosphate
  modified_base 12: mod_base = OTHER; note = 2'-O-methyladenosine-3'-phosphate
  modified_base 13: mod_base = OTHER; note = 2'-O-methyladenosine-3'-phosphate
  modified_base 14: mod_base = OTHER; note = 2'-deoxy-2'-fluoroadenosine-3'-phosphate
  modified_base 15: mod_base = OTHER; note = 2'-O-methylguanosine-3'-phosphate
  modified_base 16: mod_base = OTHER; note = 2'-deoxy-2'-fluoroguanosine-3'-phosphate
  modified_base 17: mod_base = OTHER; note = 2'-O-methylcytidine-3'-phosphate
  modified_base 18: mod_base = OTHER; note = 2'-O-methyluridine-3'-phosphate
  modified_base 19: mod_base = OTHER; note = 2'-O-methyladenosine-3'-phosphate
  modified_base 20: mod_base = OTHER; note = 2'-O-methyluridine-3'-phosphate
  modified_base 21: mod_base = OTHER; note = 2'-O-methylcytidine-3'-phosphate
  modified_base 22: mod_base = OTHER; note = 2'-O-methyladenosine-3'-phosphate
  modified_base 23: mod_base = OTHER; note = 2'-O-methylcytidine
tattttggtataaaggctatcac

SEQ ID NO: 5945 - RNA, 23 nt, synthetic construct
  source 1..23: mol_type = other RNA
  modified_base 1: mod_base = OTHER; note = 2'-O-methyluridine-3'-phosphate 5'-(E)-Vinylphosphonate
  modified_base 2: mod_base = OTHER; note = 2'-deoxy-2'-fluoroadenosine-3'-phosphate
  modified_base 3: mod_base = OTHER; note = 2'-O-methylcytidine-3'-phosphate
  modified_base 4: mod_base = OTHER; note = 2'-O-methyluridine-3'-phosphate
  modified_base 5: mod_base = OTHER; note = 2'-O-methyluridine-3'-phosphate
  modified_base 6: mod_base = OTHER; note = 2'-deoxy-2'-fluorouridine-3'-phosphate
  modified_base 7: mod_base = OTHER; note = 2'-O-methyluridine-3'-phosphate
  modified_base 8: mod_base = OTHER; note = 2'-O-methyladenosine-3'-phosphate
  modified_base 9: mod_base = OTHER; note = 2'-O-methyluridine-3'-phosphate
  modified_base 10: mod_base = OTHER; note = 2'-O-methylguanosine-3'-phosphate
  modified_base 11: mod_base = OTHER; note = 2'-O-methyladenosine-3'-phosphate
  modified_base 12: mod_base = OTHER; note = 2'-O-methylcytidine-3'-phosphate
  modified_base 13: mod_base = OTHER; note = 2'-O-methyluridine-3'-phosphate
  modified_base 14: mod_base = OTHER; note = 2'-deoxy-2'-fluorouridine-3'-phosphate
  modified_base 15: mod_base = OTHER; note = 2'-O-methylguanosine-3'-phosphate
  modified_base 16: mod_base = OTHER; note = 2'-deoxy-2'-fluorocytidine-3'-phosphate
  modified_base 17: mod_base = OTHER; note = 2'-O-methyluridine-3'-phosphate
  modified_base 18: mod_base = OTHER; note = 2'-O-methylguanosine-3'-phosphate
  modified_base 19: mod_base = OTHER; note = 2'-O-methyluridine-3'-phosphate
  modified_base 20: mod_base = OTHER; note = 2'-O-methyluridine-3'-phosphate
  modified_base 21: mod_base = OTHER; note = 2'-O-methylguanosine-3'-phosphate
  modified_base 22: mod_base = OTHER; note = 2'-O-methylguanosine-3'-phosphate
  modified_base 23: mod_base = OTHER; note = 2'-O-methyluridine
tacttttatgacttgctgttggt

SEQ ID NO: 5946 - RNA, 23 nt, synthetic construct
  source 1..23: mol_type = other RNA
  modified_base 1: mod_base = OTHER; note = 2'-O-methyluridine-3'-phosphate 5'-(E)-Vinylphosphonate
  modified_base 2: mod_base = OTHER; note = 2'-deoxy-2'-fluorouridine-3'-phosphate
  modified_base 3: mod_base = OTHER; note = 2'-O-methyladenosine-3'-phosphate
  modified_base 4: mod_base = OTHER; note = 2'-O-methylcytidine-3'-phosphate
  modified_base 5: mod_base = OTHER; note = 2'-O-methyluridine-3'-phosphate
  modified_base 6: mod_base = OTHER; note = 2'-deoxy-2'-fluorouridine-3'-phosphate
  modified_base 7: mod_base = OTHER; note = 2'-O-methyluridine-3'-phosphate
  modified_base 8: mod_base = OTHER; note = 2'-O-methyluridine-3'-phosphate
  modified_base 9: mod_base = OTHER; note = 2'-O-methyladenosine-3'-phosphate
  modified_base 10: mod_base = OTHER; note = 2'-O-methyluridine-3'-phosphate
  modified_base 11: mod_base = OTHER; note = 2'-O-methylguanosine-3'-phosphate
  modified_base 12: mod_base = OTHER; note = 2'-O-methyladenosine-3'-phosphate
  modified_base 13: mod_base = OTHER; note = 2'-O-methylcytidine-3'-phosphate
  modified_base 14: mod_base = OTHER; note = 2'-deoxy-2'-fluorouridine-3'-phosphate
  modified_base 15: mod_base = OTHER; note = 2'-O-methyluridine-3'-phosphate
  modified_base 16: mod_base = OTHER; note = 2'-deoxy-2'-fluoroguanosine-3'-phosphate
  modified_base 17: mod_base = OTHER; note = 2'-O-methylcytidine-3'-phosphate
  modified_base 18: mod_base = OTHER; note = 2'-O-methyluridine-3'-phosphate
  modified_base 19: mod_base = OTHER; note = 2'-O-methylguanosine-3'-phosphate
  modified_base 20: mod_base = OTHER; note = 2'-O-methyluridine-3'-phosphate
  modified_base 21: mod_base = OTHER; note = 2'-O-methyluridine-3'-phosphate
  modified_base 22: mod_base = OTHER; note = 2'-O-methylguanosine-3'-phosphate
  modified_base 23: mod_base = OTHER; note = 2'-O-methylguanosine
ttacttttatgacttgctgttgg

SEQ ID NO: 5947 - RNA, 23 nt, synthetic construct
  source 1..23: mol_type = other RNA
  modified_base 1: mod_base = OTHER; note = 2'-O-methyluridine-3'-phosphate 5'-(E)-Vinylphosphonate
  modified_base 2: mod_base = OTHER; note = 2'-deoxy-2'-fluoroadenosine-3'-phosphate
  modified_base 3: mod_base = OTHER; note = 2'-O-methyluridine-3'-phosphate
  modified_base 4: mod_base = OTHER; note = 2'-O-methyladenosine-3'-phosphate
  modified_base 5: mod_base = OTHER; note = 2'-O-methylcytidine-3'-phosphate
  modified_base 6: mod_base = OTHER; note = 2'-deoxy-2'-fluorouridine-3'-phosphate
  modified_base 7: mod_base = OTHER; note = 2'-O-methyluridine-3'-phosphate
  modified_base 8: mod_base = OTHER; note = 2'-O-methyluridine-3'-phosphate
  modified_base 9: mod_base = OTHER; note = 2'-O-methyluridine-3'-phosphate
  modified_base 10: mod_base = OTHER; note = 2'-O-methyladenosine-3'-phosphate
  modified_base 11: mod_base = OTHER; note = 2'-O-methyluridine-3'-phosphate
  modified_base 12: mod_base = OTHER; note = 2'-O-methylguanosine-3'-phosphate
  modified_base 13: mod_base = OTHER; note = 2'-O-methyladenosine-3'-phosphate
  modified_base 14: mod_base = OTHER; note = 2'-deoxy-2'-fluorocytidine-3'-phosphate
  modified_base 15: mod_base = OTHER; note = 2'-O-methyluridine-3'-phosphate
  modified_base 16: mod_base = OTHER; note = 2'-deoxy-2'-fluorouridine-3'-phosphate
  modified_base 17: mod_base = OTHER; note = 2'-O-methylguanosine-3'-phosphate
  modified_base 18: mod_base = OTHER; note = 2'-O-methylcytidine-3'-phosphate
  modified_base 19: mod_base = OTHER; note = 2'-O-methyluridine-3'-phosphate
  modified_base 20: mod_base = OTHER; note = 2'-O-methylguanosine-3'-phosphate
  modified_base 21: mod_base = OTHER; note = 2'-O-methyluridine-3'-phosphate
  modified_base 22: mod_base = OTHER; note = 2'-O-methyluridine-3'-phosphate
  modified_base 23: mod_base = OTHER; note = 2'-O-methylguanosine
tatacttttatgacttgctgttg

SEQ ID NO: 5948 - RNA, 23 nt, synthetic construct
  source 1..23: mol_type = other RNA
  modified_base 1: mod_base = OTHER; note = 2'-O-methyluridine-3'-phosphate 5'-(E)-Vinylphosphonate
  modified_base 2: mod_base = OTHER; note = 2'-deoxy-2'-fluoroadenosine-3'-phosphate
  modified_base 3: mod_base = OTHER; note = 2'-O-methyladenosine-3'-phosphate
  modified_base 4: mod_base = OTHER; note = 2'-O-methyluridine-3'-phosphate
  modified_base 5: mod_base = OTHER; note = 2'-O-methyladenosine-3'-phosphate
  modified_base 6: mod_base = OTHER; note = 2'-deoxy-2'-fluorocytidine-3'-phosphate
  modified_base 7: mod_base = OTHER; note = 2'-O-methyluridine-3'-phosphate
  modified_base 8: mod_base = OTHER; note = 2'-O-methyluridine-3'-phosphate
  modified_base 9: mod_base = OTHER; note = 2'-O-methyluridine-3'-phosphate
  modified_base 10: mod_base = OTHER; note = 2'-O-methyluridine-3'-phosphate
  modified_base 11: mod_base = OTHER; note = 2'-O-methyladenosine-3'-phosphate
  modified_base 12: mod_base = OTHER; note = 2'-O-methyluridine-3'-phosphate
  modified_base 13: mod_base = OTHER; note = 2'-O-methylguanosine-3'-phosphate
  modified_base 14: mod_base = OTHER; note = 2'-deoxy-2'-fluoroadenosine-3'-phosphate
  modified_base 15: mod_base = OTHER; note = 2'-O-methylcytidine-3'-phosphate
  modified_base 16: mod_base = OTHER; note = 2'-deoxy-2'-fluorouridine-3'-phosphate
  modified_base 17: mod_base = OTHER; note = 2'-O-methyluridine-3'-phosphate
  modified_base 18: mod_base = OTHER; note = 2'-O-methylguanosine-3'-phosphate
  modified_base 19: mod_base = OTHER; note = 2'-O-methylcytidine-3'-phosphate
  modified_base 20: mod_base = OTHER; note = 2'-O-methyluridine-3'-phosphate
  modified_base 21: mod_base = OTHER; note = 2'-O-methylguanosine-3'-phosphate
  modified_base 22: mod_base = OTHER; note = 2'-O-methyluridine-3'-phosphate
  modified_base 23: mod_base = OTHER; note = 2'-O-methyluridine
taatacttttatgacttgctgtt

SEQ ID NO: 5949 - RNA, 23 nt, synthetic construct
  source 1..23: mol_type = other RNA
  modified_base 1: mod_base = OTHER; note = 2'-O-methyluridine-3'-phosphate 5'-(E)-Vinylphosphonate
  modified_base 2: mod_base = OTHER; note = 2'-deoxy-2'-fluoroadenosine-3'-phosphate
  modified_base 3: mod_base = OTHER; note = 2'-O-methyladenosine-3'-phosphate
  modified_base 4: mod_base = OTHER; note = 2'-O-methyladenosine-3'-phosphate
  modified_base 5: mod_base = OTHER; note = 2'-O-methyluridine-3'-phosphate
  modified_base 6: mod_base = OTHER; note = 2'-deoxy-2'-fluoroadenosine-3'-phosphate
  modified_base 7: mod_base = OTHER; note = 2'-O-methylcytidine-3'-phosphate
  modified_base 8: mod_base = OTHER; note = 2'-O-methyluridine-3'-phosphate
  modified_base 9: mod_base = OTHER; note = 2'-O-methyluridine-3'-phosphate
  modified_base 10: mod_base = OTHER; note = 2'-O-methyluridine-3'-phosphate
  modified_base 11: mod_base = OTHER; note = 2'-O-methyluridine-3'-phosphate
  modified_base 12: mod_base = OTHER; note = 2'-O-methyladenosine-3'-phosphate
  modified_base 13: mod_base = OTHER; note = 2'-O-methyluridine-3'-phosphate
  modified_base 14: mod_base = OTHER; note = 2'-deoxy-2'-fluoroguanosine-3'-phosphate
  modified_base 15: mod_base = OTHER; note = 2'-O-methyladenosine-3'-phosphate
  modified_base 16: mod_base = OTHER; note = 2'-deoxy-2'-fluorocytidine-3'-phosphate
  modified_base 17: mod_base = OTHER; note = 2'-O-methyluridine-3'-phosphate
  modified_base 18: mod_base = OTHER; note = 2'-O-methyluridine-3'-phosphate
  modified_base 19: mod_base = OTHER; note = 2'-O-methylguanosine-3'-phosphate
  modified_base 20: mod_base = OTHER; note = 2'-O-methylcytidine-3'-phosphate
  modified_base 21: mod_base = OTHER; note = 2'-O-methyluridine-3'-phosphate
  modified_base 22: mod_base = OTHER; note = 2'-O-methylguanosine-3'-phosphate
  modified_base 23: mod_base = OTHER; note = 2'-O-methyluridine
taaatacttttatgacttgctgt

SEQ ID NO: 5950 - RNA, 23 nt, synthetic construct
  source 1..23: mol_type = other RNA
  modified_base 1: mod_base = OTHER; note = 2'-O-methyluridine-3'-phosphate 5'-(E)-Vinylphosphonate
  modified_base 2: mod_base = OTHER; note = 2'-deoxy-2'-fluorouridine-3'-phosphate
  modified_base 3: mod_base = OTHER; note = 2'-O-methyladenosine-3'-phosphate
  modified_base 4: mod_base = OTHER; note = 2'-O-methyladenosine-3'-phosphate
  modified_base 5: mod_base = OTHER; note = 2'-O-methyladenosine-3'-phosphate
  modified_base 6: mod_base = OTHER; note = 2'-deoxy-2'-fluorouridine-3'-phosphate
  modified_base 7: mod_base = OTHER; note = 2'-O-methyladenosine-3'-phosphate
  modified_base 8: mod_base = OTHER; note = 2'-O-methylcytidine-3'-phosphate
  modified_base 9: mod_base = OTHER; note = 2'-O-methyluridine-3'-phosphate
  modified_base 10: mod_base = OTHER; note = 2'-O-methyluridine-3'-phosphate
  modified_base 11: mod_base = OTHER; note = 2'-O-methyluridine-3'-phosphate
  modified_base 12: mod_base = OTHER; note = 2'-O-methyluridine-3'-phosphate
  modified_base 13: mod_base = OTHER; note = 2'-O-methyladenosine-3'-phosphate
  modified_base 14: mod_base = OTHER; note = 2'-deoxy-2'-fluorouridine-3'-phosphate
  modified_base 15: mod_base = OTHER; note = 2'-O-methylguanosine-3'-phosphate
  modified_base 16: mod_base = OTHER; note = 2'-deoxy-2'-fluoroadenosine-3'-phosphate
  modified_base 17: mod_base = OTHER; note = 2'-O-methylcytidine-3'-phosphate
  modified_base 18: mod_base = OTHER; note = 2'-O-methyluridine-3'-phosphate
  modified_base 19: mod_base = OTHER; note = 2'-O-methyluridine-3'-phosphate
  modified_base 20: mod_base = OTHER; note = 2'-O-methylguanosine-3'-phosphate
  modified_base 21: mod_base = OTHER; note = 2'-O-methylcytidine-3'-phosphate
  modified_base 22: mod_base = OTHER; note = 2'-O-methyluridine-3'-phosphate
  modified_base 23: mod_base = OTHER; note = 2'-O-methylguanosine
ttaaatacttttatgacttgctg

SEQ ID NO: 5951 - RNA, 23 nt, synthetic construct
  source 1..23: mol_type = other RNA
  modified_base 1: mod_base = OTHER; note = 2'-O-methyluridine-3'-phosphate 5'-(E)-Vinylphosphonate
  modified_base 2: mod_base = OTHER; note = 2'-deoxy-2'-fluoroadenosine-3'-phosphate
  modified_base 3: mod_base = OTHER; note = 2'-O-methyladenosine-3'-phosphate
  modified_base 4: mod_base = OTHER; note = 2'-O-methyluridine-3'-phosphate
  modified_base 5: mod_base = OTHER; note = 2'-O-methyluridine-3'-phosphate
  modified_base 6: mod_base = OTHER; note = 2'-deoxy-2'-fluoroadenosine-3'-phosphate
  modified_base 7: mod_base = OTHER; note = 2'-O-methyluridine-3'-phosphate
  modified_base 8: mod_base = OTHER; note = 2'-O-methyluridine-3'-phosphate
  modified_base 9: mod_base = OTHER; note = 2'-O-methyluridine-3'-phosphate
  modified_base 10: mod_base = OTHER; note = 2'-O-methyladenosine-3'-phosphate
  modified_base 11: mod_base = OTHER; note = 2'-O-methylcytidine-3'-phosphate
  modified_base 12: mod_base = OTHER; note = 2'-O-methyladenosine-3'-phosphate
  modified_base 13: mod_base = OTHER; note = 2'-O-methyluridine-3'-phosphate
  modified_base 14: mod_base = OTHER; note = 2'-deoxy-2'-fluorocytidine-3'-phosphate
  modified_base 15: mod_base = OTHER; note = 2'-O-methyluridine-3'-phosphate
  modified_base 16: mod_base = OTHER; note = 2'-deoxy-2'-fluoroguanosine-3'-phosphate
  modified_base 17: mod_base = OTHER; note = 2'-O-methyladenosine-3'-phosphate
  modified_base 18: mod_base = OTHER; note = 2'-O-methyladenosine-3'-phosphate
  modified_base 19: mod_base = OTHER; note = 2'-O-methylguanosine-3'-phosphate
  modified_base 20: mod_base = OTHER; note = 2'-O-methyladenosine-3'-phosphate
  modified_base 21: mod_base = OTHER; note = 2'-O-methylcytidine-3'-phosphate
  modified_base 22: mod_base = OTHER; note = 2'-O-methyladenosine-3'-phosphate
  modified_base 23: mod_base = OTHER; note = 2'-O-methylguanosine
taattatttacatctgaagacag

SEQ ID NO: 5952 - RNA, 23 nt, synthetic construct
  source 1..23: mol_type = other RNA
  modified_base 1: mod_base = OTHER; note = 2'-O-methyluridine-3'-phosphate 5'-(E)-Vinylphosphonate
  modified_base 2: mod_base = OTHER; note = 2'-deoxy-2'-fluorocytidine-3'-phosphate
  modified_base 3: mod_base = OTHER; note = 2'-O-methyladenosine-3'-phosphate
  modified_base 4: mod_base = OTHER; note = 2'-O-methyladenosine-3'-phosphate
  modified_base 5: mod_base = OTHER; note = 2'-O-methyluridine-3'-phosphate
  modified_base 6: mod_base = OTHER; note = 2'-deoxy-2'-fluoroadenosine-3'-phosphate
  modified_base 7: mod_base = OTHER; note = 2'-O-methylcytidine-3'-phosphate
  modified_base 8: mod_base = OTHER; note = 2'-O-methyladenosine-3'-phosphate
  modified_base 9: mod_base = OTHER; note = 2'-O-methyluridine-3'-phosphate
  modified_base 10: mod_base = OTHER; note = 2'-O-methyluridine-3'-phosphate
  modified_base 11: mod_base = OTHER; note = 2'-O-methyluridine-3'-phosphate
  modified_base 12: mod_base = OTHER; note = 2'-O-methyluridine-3'-phosphate
  modified_base 13: mod_base = OTHER; note = 2'-O-methylcytidine-3'-phosphate
  modified_base 14: mod_base = OTHER; note = 2'-deoxy-2'-fluoroadenosine-3'-phosphate
  modified_base 15: mod_base = OTHER; note = 2'-O-methylguanosine-3'-phosphate
  modified_base 16: mod_base = OTHER; note = 2'-deoxy-2'-fluoroadenosine-3'-phosphate
  modified_base 17: mod_base = OTHER; note = 2'-O-methyladenosine-3'-phosphate
  modified_base 18: mod_base = OTHER; note = 2'-O-methyladenosine-3'-phosphate
  modified_base 19: mod_base = OTHER; note = 2'-O-methyladenosine-3'-phosphate
  modified_base 20: mod_base = OTHER; note = 2'-O-methyluridine-3'-phosphate
  modified_base 21: mod_base = OTHER; note = 2'-O-methylguanosine-3'-phosphate
  modified_base 22: mod_base = OTHER; note = 2'-O-methylcytidine-3'-phosphate
  modified_base 23: mod_base = OTHER; note = 2'-O-methyladenosine
tcaatacattttcagaaaatgca

SEQ ID NO: 5953 - RNA, 23 nt, synthetic construct
  source 1..23: mol_type = other RNA
  modified_base 1: mod_base = OTHER; note = 2'-O-methyluridine-3'-phosphate 5'-(E)-Vinylphosphonate
  modified_base 2: mod_base = OTHER; note = 2'-deoxy-2'-fluoroguanosine-3'-phosphate
  modified_base 3: mod_base = OTHER; note = 2'-O-methyladenosine-3'-phosphate
  modified_base 4: mod_base = OTHER; note = 2'-O-methylguanosine-3'-phosphate
  modified_base 5: mod_base = OTHER; note = 2'-O-methyluridine-3'-phosphate
  modified_base 6: mod_base = OTHER; note = 2'-deoxy-2'-fluorouridine-3'-phosphate
  modified_base 7: mod_base = OTHER; note = 2'-O-methylcytidine-3'-phosphate
  modified_base 8: mod_base = OTHER; note = 2'-O-methyluridine-3'-phosphate
  modified_base 9: mod_base = OTHER; note = 2'-O-methyladenosine-3'-phosphate
  modified_base 10: mod_base = OTHER; note = 2'-O-methyluridine-3'-phosphate
  modified_base 11: mod_base = OTHER; note = 2'-O-methyladenosine-3'-phosphate
  modified_base 12: mod_base = OTHER; note = 2'-O-methyluridine-3'-phosphate
  modified_base 13: mod_base = OTHER; note = 2'-O-methylguanosine-3'-phosphate
  modified_base 14: mod_base = OTHER; note = 2'-deoxy-2'-fluorocytidine-3'-phosphate
  modified_base 15: mod_base = OTHER; note = 2'-O-methyluridine-3'-phosphate
  modified_base 16: mod_base = OTHER; note = 2'-deoxy-2'-fluorouridine-3'-phosphate
  modified_base 17: mod_base = OTHER; note = 2'-O-methylcytidine-3'-phosphate
  modified_base 18: mod_base = OTHER; note = 2'-O-methyladenosine-3'-phosphate
  modified_base 19: mod_base = OTHER; note = 2'-O-methylcytidine-3'-phosphate
  modified_base 20: mod_base = OTHER; note = 2'-O-methyladenosine-3'-phosphate
  modified_base 21: mod_base = OTHER; note = 2'-O-methylguanosine-3'-phosphate
  modified_base 22: mod_base = OTHER; note = 2'-O-methyladenosine-3'-phosphate
  modified_base 23: mod_base = OTHER; note = 2'-O-methyladenosine
tgagttctatatgcttcacagaa

SEQ ID NO: 5954 - RNA, 23 nt, synthetic construct
  source 1..23: mol_type = other RNA
  modified_base 1: mod_base = OTHER; note = 2'-O-methyluridine-3'-phosphate 5'-(E)-Vinylphosphonate
  modified_base 2: mod_base = OTHER; note = 2'-deoxy-2'-fluoroadenosine-3'-phosphate
  modified_base 3: mod_base = OTHER; note = 2'-O-methylguanosine-3'-phosphate
  modified_base 4: mod_base = OTHER; note = 2'-O-methyladenosine-3'-phosphate
  modified_base 5: mod_base = OTHER; note = 2'-O-methylguanosine-3'-phosphate
  modified_base 6: mod_base = OTHER; note = 2'-deoxy-2'-fluorouridine-3'-phosphate
  modified_base 7: mod_base = OTHER; note = 2'-O-methyluridine-3'-phosphate
  modified_base 8: mod_base = OTHER; note = 2'-O-methylcytidine-3'-phosphate
  modified_base 9: mod_base = OTHER; note = 2'-O-methyluridine-3'-phosphate
  modified_base 10: mod_base = OTHER; note = 2'-O-methyladenosine-3'-phosphate
  modified_base 11: mod_base = OTHER; note = 2'-O-methyluridine-3'-phosphate
  modified_base 12: mod_base = OTHER; note = 2'-O-methyladenosine-3'-phosphate
  modified_base 13: mod_base = OTHER; note = 2'-O-methyluridine-3'-phosphate
  modified_base 14: mod_base = OTHER; note = 2'-deoxy-2'-fluoroguanosine-3'-phosphate
  modified_base 15: mod_base = OTHER; note = 2'-O-methylcytidine-3'-phosphate
  modified_base 16: mod_base = OTHER; note = 2'-deoxy-2'-fluorouridine-3'-phosphate
  modified_base 17: mod_base = OTHER; note = 2'-O-methyluridine-3'-phosphate
  modified_base 18: mod_base = OTHER; note = 2'-O-methylcytidine-3'-phosphate
  modified_base 19: mod_base = OTHER; note = 2'-O-methyladenosine-3'-phosphate
  modified_base 20: mod_base = OTHER; note = 2'-O-methylcytidine-3'-phosphate
  modified_base 21: mod_base = OTHER; note = 2'-O-methyladenosine-3'-phosphate
  modified_base 22: mod_base = OTHER; note = 2'-O-methylguanosine-3'-phosphate
  modified_base 23: mod_base = OTHER; note = 2'-O-methyladenosine
tagagttctatatgcttcacaga

SEQ ID NO: 5955 - RNA, 23 nt, synthetic construct
  source 1..23: mol_type = other RNA
  modified_base 1: mod_base = OTHER; note = 2'-O-methyluridine-3'-phosphate 5'-(E)-Vinylphosphonate
  modified_base 2: mod_base = OTHER; note = 2'-deoxy-2'-fluorouridine-3'-phosphate
  modified_base 3: mod_base = OTHER; note = 2'-O-methyladenosine-3'-phosphate
  modified_base 4: mod_base = OTHER; note = 2'-O-methylguanosine-3'-phosphate
  modified_base 5: mod_base = OTHER; note = 2'-O-methyladenosine-3'-phosphate
  modified_base 6: mod_base = OTHER; note = 2'-deoxy-2'-fluoroguanosine-3'-phosphate
  modified_base 7: mod_base = OTHER; note = 2'-O-methyluridine-3'-phosphate
  modified_base 8: mod_base = OTHER; note = 2'-O-methyluridine-3'-phosphate
  modified_base 9: mod_base = OTHER; note = 2'-O-methylcytidine-3'-phosphate
  modified_base 10: mod_base = OTHER; note = 2'-O-methyluridine-3'-phosphate
  modified_base 11: mod_base = OTHER; note = 2'-O-methyladenosine-3'-phosphate
  modified_base 12: mod_base = OTHER; note = 2'-O-methyluridine-3'-phosphate
  modified_base 13: mod_base = OTHER; note = 2'-O-methyladenosine-3'-phosphate
  modified_base 14: mod_base = OTHER; note = 2'-deoxy-2'-fluorouridine-3'-phosphate
  modified_base 15: mod_base = OTHER; note = 2'-O-methylguanosine-3'-phosphate
  modified_base 16: mod_base = OTHER; note = 2'-deoxy-2'-fluorocytidine-3'-phosphate
  modified_base 17: mod_base = OTHER; note = 2'-O-methyluridine-3'-phosphate
  modified_base 18: mod_base = OTHER; note = 2'-O-methyluridine-3'-phosphate
  modified_base 19: mod_base = OTHER; note = 2'-O-methylcytidine-3'-phosphate
  modified_base 20: mod_base = OTHER; note = 2'-O-methyladenosine-3'-phosphate
  modified_base 21: mod_base = OTHER; note = 2'-O-methylcytidine-3'-phosphate
  modified_base 22: mod_base = OTHER; note = 2'-O-methyladenosine-3'-phosphate
  modified_base 23: mod_base = OTHER; note = 2'-O-methylguanosine
ttagagttctatatgcttcacag

SEQ ID NO: 5956 - RNA, 23 nt, synthetic construct
  source 1..23: mol_type = other RNA
  modified_base 1: mod_base = OTHER; note = 2'-O-methyluridine-3'-phosphate 5'-(E)-Vinylphosphonate
  modified_base 2: mod_base = OTHER; note = 2'-deoxy-2'-fluoroadenosine-3'-phosphate
  modified_base 3: mod_base = OTHER; note = 2'-O-methyluridine-3'-phosphate
  modified_base 4: mod_base = OTHER; note = 2'-O-methyladenosine-3'-phosphate
  modified_base 5: mod_base = OTHER; note = 2'-O-methylguanosine-3'-phosphate
  modified_base 6: mod_base = OTHER; note = 2'-deoxy-2'-fluoroadenosine-3'-phosphate
  modified_base 7: mod_base = OTHER; note = 2'-O-methylguanosine-3'-phosphate
  modified_base 8: mod_base = OTHER; note = 2'-O-methyluridine-3'-phosphate
  modified_base 9: mod_base = OTHER; note = 2'-O-methyluridine-3'-phosphate
  modified_base 10: mod_base = OTHER; note = 2'-O-methylcytidine-3'-phosphate
  modified_base 11: mod_base = OTHER; note = 2'-O-methyluridine-3'-phosphate
  modified_base 12: mod_base = OTHER; note = 2'-O-methyladenosine-3'-phosphate
  modified_base 13: mod_base = OTHER; note = 2'-O-methyluridine-3'-phosphate
  modified_base 14: mod_base = OTHER; note = 2'-deoxy-2'-fluoroadenosine-3'-phosphate
  modified_base 15: mod_base = OTHER; note = 2'-O-methyluridine-3'-phosphate
  modified_base 16: mod_base = OTHER; note = 2'-deoxy-2'-fluoroguanosine-3'-phosphate
  modified_base 17: mod_base = OTHER; note = 2'-O-methylcytidine-3'-phosphate
  modified_base 18: mod_base = OTHER; note = 2'-O-methyluridine-3'-phosphate
  modified_base 19: mod_base = OTHER; note = 2'-O-methyluridine-3'-phosphate
  modified_base 20: mod_base = OTHER; note = 2'-O-methylcytidine-3'-phosphate
  modified_base 21: mod_base = OTHER; note = 2'-O-methyladenosine-3'-phosphate
  modified_base 22: mod_base = OTHER; note = 2'-O-methylcytidine-3'-phosphate
  modified_base 23: mod_base = OTHER; note = 2'-O-methyladenosine
tatagagttctatatgcttcaca

SEQ ID NO: 5957 - RNA, 23 nt, synthetic construct
  source 1..23: mol_type = other RNA
  modified_base 1: mod_base = OTHER; note = 2'-O-methyluridine-3'-phosphate 5'-(E)-Vinylphosphonate
  modified_base 2: mod_base = OTHER; note = 2'-deoxy-2'-fluoroadenosine-3'-phosphate
  modified_base 3: mod_base = OTHER; note = 2'-O-methyladenosine-3'-phosphate
  modified_base 4: mod_base = OTHER; note = 2'-O-methyluridine-3'-phosphate
  modified_base 5: mod_base = OTHER; note = 2'-O-methyladenosine-3'-phosphate
  modified_base 6: mod_base = OTHER; note = 2'-deoxy-2'-fluoroguanosine-3'-phosphate
  modified_base 7: mod_base = OTHER; note = 2'-O-methyladenosine-3'-phosphate
  modified_base 8: mod_base = OTHER; note = 2'-O-methylguanosine-3'-phosphate
  modified_base 9: mod_base = OTHER; note = 2'-O-methyluridine-3'-phosphate
  modified_base 10: mod_base = OTHER; note = 2'-O-methyluridine-3'-phosphate
  modified_base 11: mod_base = OTHER; note = 2'-O-methylcytidine-3'-phosphate
  modified_base 12: mod_base = OTHER; note = 2'-O-methyluridine-3'-phosphate
  modified_base 13: mod_base = OTHER; note = 2'-O-methyladenosine-3'-phosphate
  modified_base 14: mod_base = OTHER; note = 2'-deoxy-2'-fluorouridine-3'-phosphate
  modified_base 15: mod_base = OTHER; note = 2'-O-methyladenosine-3'-phosphate
  modified_base 16: mod_base = OTHER; note = 2'-deoxy-2'-fluorouridine-3'-phosphate
  modified_base 17: mod_base = OTHER; note = 2'-O-methylguanosine-3'-phosphate
  modified_base 18: mod_base = OTHER; note = 2'-O-methylcytidine-3'-phosphate
  modified_base 19: mod_base = OTHER; note = 2'-O-methyluridine-3'-phosphate
  modified_base 20: mod_base = OTHER; note = 2'-O-methyluridine-3'-phosphate
  modified_base 21: mod_base = OTHER; note = 2'-O-methylcytidine-3'-phosphate
  modified_base 22: mod_base = OTHER; note = 2'-O-methyladenosine-3'-phosphate
  modified_base 23: mod_base = OTHER; note = 2'-O-methylcytidine
taatagagttctatatgcttcac

SEQ ID NO: 5958 - RNA, 23 nt, synthetic construct
  source 1..23: mol_type = other RNA
  modified_base 1: mod_base = OTHER; note = 2'-O-methyluridine-3'-phosphate 5'-(E)-Vinylphosphonate
  modified_base 2: mod_base = OTHER; note = 2'-deoxy-2'-fluoroadenosine-3'-phosphate
  modified_base 3: mod_base = OTHER; note = 2'-O-methyladenosine-3'-phosphate
  modified_base 4: mod_base = OTHER; note = 2'-O-methyladenosine-3'-phosphate
  modified_base 5: mod_base = OTHER; note = 2'-O-methyluridine-3'-phosphate
  modified_base 6: mod_base = OTHER; note = 2'-deoxy-2'-fluoroadenosine-3'-phosphate
  modified_base 7: mod_base = OTHER; note = 2'-O-methylguanosine-3'-phosphate
  modified_base 8: mod_base = OTHER; note = 2'-O-methyladenosine-3'-phosphate
  modified_base 9: mod_base = OTHER; note = 2'-O-methylguanosine-3'-phosphate
  modified_base 10: mod_base = OTHER; note = 2'-O-methyluridine-3'-phosphate
  modified_base 11: mod_base = OTHER; note = 2'-O-methyluridine-3'-phosphate
  modified_base 12: mod_base = OTHER; note = 2'-O-methylcytidine-3'-phosphate
  modified_base 13: mod_base = OTHER; note = 2'-O-methyluridine-3'-phosphate
  modified_base 14: mod_base = OTHER; note = 2'-deoxy-2'-fluoroadenosine-3'-phosphate
  modified_base 15: mod_base = OTHER; note = 2'-O-methyluridine-3'-phosphate
  modified_base 16: mod_base = OTHER; note = 2'-deoxy-2'-fluoroadenosine-3'-phosphate
  modified_base 17: mod_base = OTHER; note = 2'-O-methyluridine-3'-phosphate
  modified_base 18: mod_base = OTHER; note = 2'-O-methylguanosine-3'-phosphate
  modified_base 19: mod_base = OTHER; note = 2'-O-methylcytidine-3'-phosphate
  modified_base 20: mod_base = OTHER; note = 2'-O-methyluridine-3'-phosphate
  modified_base 21: mod_base = OTHER; note = 2'-O-methyluridine-3'-phosphate
  modified_base 22: mod_base = OTHER; note = 2'-O-methylcytidine-3'-phosphate
  modified_base 23: mod_base = OTHER; note = 2'-O-methyladenosine
taaatagagttctatatgcttca

SEQ ID NO: 5959 - RNA, 23 nt, synthetic construct
  source 1..23: mol_type = other RNA
  modified_base 1: mod_base = OTHER; note = 2'-O-methyluridine-3'-phosphate 5'-(E)-Vinylphosphonate
  modified_base 2: mod_base = OTHER; note = 2'-deoxy-2'-fluoroadenosine-3'-phosphate
  modified_base 3: mod_base = OTHER; note = 2'-O-methyladenosine-3'-phosphate
  modified_base 4: mod_base = OTHER; note = 2'-O-methyladenosine-3'-phosphate
  modified_base 5: mod_base = OTHER; note = 2'-O-methyladenosine-3'-phosphate
  modified_base 6: mod_base = OTHER; note = 2'-deoxy-2'-fluorouridine-3'-phosphate
  modified_base 7: mod_base = OTHER; note = 2'-O-methyladenosine-3'-phosphate
  modified_base 8: mod_base = OTHER; note = 2'-O-methylguanosine-3'-phosphate
  modified_base 9: mod_base = OTHER; note = 2'-O-methyladenosine-3'-phosphate
  modified_base 10: mod_base = OTHER; note = 2'-O-methylguanosine-3'-phosphate
  modified_base 11: mod_base = OTHER; note = 2'-O-methyluridine-3'-phosphate
  modified_base 12: mod_base = OTHER; note = 2'-O-methyluridine-3'-phosphate
  modified_base 13: mod_base = OTHER; note = 2'-O-methylcytidine-3'-phosphate
  modified_base 14: mod_base = OTHER; note = 2'-deoxy-2'-fluorouridine-3'-phosphate
  modified_base 15: mod_base = OTHER; note = 2'-O-methyladenosine-3'-phosphate
  modified_base 16: mod_base = OTHER; note = 2'-deoxy-2'-fluorouridine-3'-phosphate
  modified_base 17: mod_base = OTHER; note = 2'-O-methyladenosine-3'-phosphate
  modified_base 18: mod_base = OTHER; note = 2'-O-methyluridine-3'-phosphate
  modified_base 19: mod_base = OTHER; note = 2'-O-methylguanosine-3'-phosphate
  modified_base 20: mod_base = OTHER; note = 2'-O-methylcytidine-3'-phosphate
  modified_base 21: mod_base = OTHER; note = 2'-O-methyluridine-3'-phosphate
  modified_base 22: mod_base = OTHER; note = 2'-O-methyluridine-3'-phosphate
  modified_base 23: mod_base = OTHER; note = 2'-O-methylcytidine
taaaatagagttctatatgcttc

SEQ ID NO: 5960 - RNA, 23 nt, synthetic construct
  source 1..23: mol_type = other RNA
  modified_base 1: mod_base = OTHER; note = 2'-O-methyluridine-3'-phosphate 5'-(E)-Vinylphosphonate
  modified_base 2: mod_base = OTHER; note = 2'-deoxy-2'-fluoroguanosine-3'-phosphate
  modified_base 3: mod_base = OTHER; note = 2'-O-methyladenosine-3'-phosphate
  modified_base 4: mod_base = OTHER; note = 2'-O-methylcytidine-3'-phosphate
  modified_base 5: mod_base = OTHER; note = 2'-O-methyladenosine-3'-phosphate
  modified_base 6: mod_base = OTHER; note = 2'-deoxy-2'-fluorocytidine-3'-phosphate
  modified_base 7: mod_base = OTHER; note = 2'-O-methyladenosine-3'-phosphate
  modified_base 8: mod_base = OTHER; note = 2'-O-methyluridine-3'-phosphate
  modified_base 9: mod_base = OTHER; note = 2'-O-methylcytidine-3'-phosphate
  modified_base 10: mod_base = OTHER; note = 2'-O-methyluridine-3'-phosphate
  modified_base 11: mod_base = OTHER; note = 2'-O-methyluridine-3'-phosphate
  modified_base 12: mod_base = OTHER; note = 2'-O-methylcytidine-3'-phosphate
  modified_base 13: mod_base = OTHER; note = 2'-O-methylcytidine-3'-phosphate
  modified_base 14: mod_base = OTHER; note = 2'-deoxy-2'-fluorouridine-3'-phosphate
  modified_base 15: mod_base = OTHER; note = 2'-O-methyluridine-3'-phosphate
  modified_base 16: mod_base = OTHER; note = 2'-deoxy-2'-fluorouridine-3'-phosphate
  modified_base 17: mod_base = OTHER; note = 2'-O-methyladenosine-3'-phosphate
  modified_base 18: mod_base = OTHER; note = 2'-O-methyluridine-3'-phosphate
  modified_base 19: mod_base = OTHER; note = 2'-O-methyluridine-3'-phosphate
  modified_base 20: mod_base = OTHER; note = 2'-O-methyluridine-3'-phosphate
  modified_base 21: mod_base = OTHER; note = 2'-O-methyladenosine-3'-phosphate
  modified_base 22: mod_base = OTHER; note = 2'-O-methyladenosine-3'-phosphate
  modified_base 23: mod_base = OTHER; note = 2'-O-methyladenosine
tgacacatcttcctttatttaaa

SEQ ID NO: 5961 - RNA, 23 nt, synthetic construct
  source 1..23: mol_type = other RNA
gagccaaccgcgcacttcaaaag

SEQ ID NO: 5962 - RNA, 23 nt, synthetic construct
  source 1..23: mol_type = other RNA
agccaaccgcgcacttcaaaagg

SEQ ID NO: 5963 - RNA, 23 nt, synthetic construct
  source 1..23: mol_type = other RNA
gccaaccgcgcacttcaaaaggg

SEQ ID NO: 5964 - RNA, 23 nt, synthetic construct
  source 1..23: mol_type = other RNA
ccaaccgcgcacttcaaaagggt

SEQ ID NO: 5965 - RNA, 23 nt, synthetic construct
  source 1..23: mol_type = other RNA
caaccgcgcacttcaaaagggtg

SEQ ID NO: 5966 - RNA, 23 nt, synthetic construct
  source 1..23: mol_type = other RNA
aaccgcgcacttcaaaagggtgt

SEQ ID NO: 5967 - RNA, 23 nt, synthetic construct
  source 1..23: mol_type = other RNA
accgcgcacttcaaaagggtgtc

SEQ ID NO: 5968 - RNA, 23 nt, synthetic construct
  source 1..23: mol_type = other RNA
ccgcgcacttcaaaagggtgtcg

SEQ ID NO: 5969 - RNA, 23 nt, synthetic construct
  source 1..23: mol_type = other RNA
cgcgcacttcaaaagggtgtcgg

SEQ ID NO: 5970 - RNA, 23 nt, synthetic construct
  source 1..23: mol_type = other RNA
gcgcacttcaaaagggtgtcggt

SEQ ID NO: 5971 - RNA, 23 nt, synthetic construct
  source 1..23: mol_type = other RNA
cgcacttcaaaagggtgtcggtg

SEQ ID NO: 5972 - RNA, 23 nt, synthetic construct
  source 1..23: mol_type = other RNA
ctcgccaggactgaagtgtgtat

SEQ ID NO: 5973 - RNA, 23 nt, synthetic construct
  source 1..23: mol_type = other RNA
tcgccaggactgaagtgtgtatg

SEQ ID NO: 5974 - RNA, 23 nt, synthetic construct
  source 1..23: mol_type = other RNA
cgccaggactgaagtgtgtatgt

SEQ ID NO: 5975 - RNA, 23 nt, synthetic construct
  source 1..23: mol_type = other RNA
gccaggactgaagtgtgtatgtc

SEQ ID NO: 5976 - RNA, 23 nt, synthetic construct
  source 1..23: mol_type = other RNA
ccaggactgaagtgtgtatgtct

SEQ ID NO: 5977 - RNA, 23 nt, synthetic construct
  source 1..23: mol_type = other RNA
caggactgaagtgtgtatgtctt

SEQ ID NO: 5978 - RNA, 23 nt, synthetic construct
  source 1..23: mol_type = other RNA
aggactgaagtgtgtatgtcttt

SEQ ID NO: 5979 - RNA, 23 nt, synthetic construct
  source 1..23: mol_type = other RNA
ggactgaagtgtgtatgtctttt

SEQ ID NO: 5980 - RNA, 23 nt, synthetic construct
  source 1..23: mol_type = other RNA
gactgaagtgtgtatgtcttttg

SEQ ID NO: 5981 - RNA, 23 nt, synthetic construct
  source 1..23: mol_type = other RNA
actgaagtgtgtatgtcttttgt

SEQ ID NO: 5982 - RNA, 23 nt, synthetic construct
  source 1..23: mol_type = other RNA
ctgaagtgtgtatgtcttttgtg

SEQ ID NO: 5983 - RNA, 23 nt, synthetic construct
  source 1..23: mol_type = other RNA
tgaagtgtgtatgtcttttgtgt

SEQ ID NO: 5984 - RNA, 23 nt, synthetic construct
  source 1..23: mol_type = other RNA
gaagtgtgtatgtcttttgtgtg

SEQ ID NO: 5985 - RNA, 23 nt, synthetic construct
  source 1..23: mol_type = other RNA
aagtgtgtatgtcttttgtgtga

SEQ ID NO: 5986 - RNA, 23 nt, synthetic construct
  source 1..23: mol_type = other RNA
agtgtgtatgtcttttgtgtgat

SEQ ID NO: 5987 - RNA, 23 nt, synthetic construct
  source 1..23: mol_type = other RNA
gtgtgtatgtcttttgtgtgatt

SEQ ID NO: 5988 - RNA, 23 nt, synthetic construct
  source 1..23: mol_type = other RNA
tgtgtatgtcttttgtgtgattc

SEQ ID NO: 5989 - RNA, 23 nt, synthetic construct
  source 1..23: mol_type = other RNA
gtgtatgtcttttgtgtgattct

SEQ ID NO: 5990 - RNA, 23 nt, synthetic construct
  source 1..23: mol_type = other RNA
tgtatgtcttttgtgtgattctt

SEQ ID NO: 5991 - RNA, 23 nt, synthetic construct
  source 1..23: mol_type = other RNA
gtatgtcttttgtgtgattcttc

SEQ ID NO: 5992 - RNA, 23 nt, synthetic construct
  source 1..23: mol_type = other RNA
tatgtcttttgtgtgattcttca

SEQ ID NO: 5993 - RNA, 23 nt, synthetic construct
  source 1..23: mol_type = other RNA
atgtcttttgtgtgattcttcaa

SEQ ID NO: 5994 - RNA, 23 nt, synthetic construct
  source 1..23: mol_type = other RNA
tgtcttttgtgtgattcttcaaa

SEQ ID NO: 5995 - RNA, 23 nt, synthetic construct
  source 1..23: mol_type = other RNA
gtcttttgtgtgattcttcaaac

SEQ ID NO: 5996 - RNA, 23 nt, synthetic construct
  source 1..23: mol_type = other RNA
tcttttgtgtgattcttcaaact

SEQ ID NO: 5997 - RNA, 23 nt, synthetic construct
  source 1..23: mol_type = other RNA
cttttgtgtgattcttcaaactt

SEQ ID NO: 5998 - RNA, 23 nt, synthetic construct
  source 1..23: mol_type = other RNA
ttttgtgtgattcttcaaacttc

SEQ ID NO: 5999 - RNA, 23 nt, synthetic construct
  source 1..23: mol_type = other RNA
tgccaaacagaaggagcatgttg

SEQ ID NO: 6000 - RNA, 23 nt, synthetic construct
  source 1..23: mol_type = other RNA
gccaaacagaaggagcatgttgg

SEQ ID NO: 6001 - RNA, 23 nt, synthetic construct
  source 1..23: mol_type = other RNA
tgttgggcatcagtcatgctaac

SEQ ID NO: 6002 - RNA, 23 nt, synthetic construct
  source 1..23: mol_type = other RNA
tgggcatcagtcatgctaaccaa

SEQ ID NO: 6003 - RNA, 23 nt, synthetic construct
  source 1..23: mol_type = other RNA
gcatcagtcatgctaaccaatgg

SEQ ID NO: 6004 - RNA, 23 nt, synthetic construct
  source 1..23: mol_type = other RNA
cagtcatgctaaccaatggaaaa

SEQ ID NO: 6005 - RNA, 23 nt, synthetic construct
  source 1..23: mol_type = other RNA
tcatgctaaccaatggaaaagag

SEQ ID NO: 6006 - RNA, 23 nt, synthetic construct
  source 1..23: mol_type = other RNA
ggaaaagagcaggtgatcaaatc

SEQ ID NO: 6007 - RNA, 23 nt, synthetic construct
  source 1..23: mol_type = other RNA
gtctcccttccagaactgaatgc

SEQ ID NO: 6008 - RNA, 23 nt, synthetic construct
  source 1..23: mol_type = other RNA
tctcccttccagaactgaatgct

SEQ ID NO: 6009 - RNA, 23 nt, synthetic construct
  source 1..23: mol_type = other RNA
ctcccttccagaactgaatgctc

SEQ ID NO: 6010 - RNA, 23 nt, synthetic construct
  source 1..23: mol_type = other RNA
tcccttccagaactgaatgctca

SEQ ID NO: 6011 - RNA, 23 nt, synthetic construct
  source 1..23: mol_type = other RNA
cccttccagaactgaatgctcaa

SEQ ID NO: 6012 - RNA, 23 nt, synthetic construct
  source 1..23: mol_type = other RNA
ccttccagaactgaatgctcaag

SEQ ID NO: 6013 - RNA, 23 nt, synthetic construct
  source 1..23: mol_type = other RNA
cttccagaactgaatgctcaagt

SEQ ID NO: 6014 - RNA, 23 nt, synthetic construct
  source 1..23: mol_type = other RNA
ttccagaactgaatgctcaagtc

SEQ ID NO: 6015 - RNA, 23 nt, synthetic construct
  source 1..23: mol_type = other RNA
tccagaactgaatgctcaagtct

SEQ ID NO: 6016 - RNA, 23 nt, synthetic construct
  source 1..23: mol_type = other RNA
ccagaactgaatgctcaagtctt

SEQ ID NO: 6017 - RNA, 23 nt, synthetic construct
  source 1..23: mol_type = other RNA
cagaactgaatgctcaagtcttc

SEQ ID NO: 6018 - RNA, 23 nt, synthetic construct
  source 1..23: mol_type = other RNA
agaactgaatgctcaagtcttct

SEQ ID NO: 6019 - RNA, 23 nt, synthetic construct
  source 1..23: mol_type = other RNA
gaactgaatgctcaagtcttctg

SEQ ID NO: 6020 - RNA, 23 nt, synthetic construct
  source 1..23: mol_type = other RNA
aactgaatgctcaagtcttctgt

SEQ ID NO: 6021 - RNA, 23 nt, synthetic construct
  source 1..23: mol_type = other RNA
actgaatgctcaagtcttctgtc

SEQ ID NO: 6022 - RNA, 23 nt, synthetic construct
  source 1..23: mol_type = other RNA
ctgaatgctcaagtcttctgtca

SEQ ID NO: 6023 - RNA, 23 nt, synthetic construct
  source 1..23: mol_type = other RNA
tgaatgctcaagtcttctgtcat

SEQ ID NO: 6024 - RNA, 23 nt, synthetic construct
  source 1..23: mol_type = other RNA
gaatgctcaagtcttctgtcata

SEQ ID NO: 6025 - RNA, 23 nt, synthetic construct
  source 1..23: mol_type = other RNA
aatgctcaagtcttctgtcatag

SEQ ID NO: 6026 - RNA, 23 nt, synthetic construct
  source 1..23: mol_type = other RNA
atgctcaagtcttctgtcatagt

SEQ ID NO: 6027 - RNA, 23 nt, synthetic construct
  source 1..23: mol_type = other RNA
tgctcaagtcttctgtcatagtt

SEQ ID NO: 6028 - RNA, 23 nt, synthetic construct
  source 1..23: mol_type = other RNA
gctcaagtcttctgtcatagttc

SEQ ID NO: 6029 - RNA, 23 nt, synthetic construct
  source 1..23: mol_type = other RNA
ctcaagtcttctgtcatagttcc

SEQ ID NO: 6030 - RNA, 23 nt, synthetic construct
  source 1..23: mol_type = other RNA
tcaagtcttctgtcatagttcca

SEQ ID NO: 6031 - RNA, 23 nt, synthetic construct
  source 1..23: mol_type = other RNA
caagtcttctgtcatagttccaa

SEQ ID NO: 6032 - RNA, 23 nt, synthetic construct
  source 1..23: mol_type = other RNA
aagtcttctgtcatagttccaac

SEQ ID NO: 6033 - RNA, 23 nt, synthetic construct
  source 1..23: mol_type = other RNA
agtcttctgtcatagttccaaca

SEQ ID NO: 6034 - RNA, 23 nt, synthetic construct
  source 1..23: mol_type = other RNA
gtcttctgtcatagttccaacaa

SEQ ID NO: 6035 - RNA, 23 nt, synthetic construct
  source 1..23: mol_type = other RNA
tcttctgtcatagttccaacaat

SEQ ID NO: 6036 - RNA, 23 nt, synthetic construct
  source 1..23: mol_type = other RNA
cttctgtcatagttccaacaatg

SEQ ID NO: 6037 - RNA, 23 nt, synthetic construct
  source 1..23: mol_type = other RNA
ttctgtcatagttccaacaatgt

SEQ ID NO: 6038 - RNA, 23 nt, synthetic construct
  source 1..23: mol_type = other RNA
tctgtcatagttccaacaatgtt

SEQ ID NO: 6039 - RNA, 23 nt, synthetic construct
  source 1..23: mol_type = other RNA
ctgtcatagttccaacaatgtta

SEQ ID NO: 6040 - RNA, 23 nt, synthetic construct
  source 1..23: mol_type = other RNA
tgtcatagttccaacaatgttac

SEQ ID NO: 6041 - RNA, 23 nt, synthetic construct
  source 1..23: mol_type = other RNA
gtcatagttccaacaatgttacc

SEQ ID NO: 6042 - RNA, 23 nt, synthetic construct
  source 1..23: mol_type = other RNA
tcatagttccaacaatgttacca

SEQ ID NO: 6043 - RNA, 23 nt, synthetic construct
  source 1..23: mol_type = other RNA
catagttccaacaatgttaccaa

SEQ ID NO: 6044 - RNA, 23 nt, synthetic construct
  source 1..23: mol_type = other RNA
atagttccaacaatgttaccaaa

SEQ ID NO: 6045 - RNA, 23 nt, synthetic construct
  source 1..23: mol_type = other RNA
tagttccaacaatgttaccaaaa

SEQ ID NO: 6046 - RNA, 23 nt, synthetic construct
  source 1..23: mol_type = other RNA
agttccaacaatgttaccaaaac

SEQ ID NO: 6047 - RNA, 23 nt, synthetic construct
  source 1..23: mol_type = other RNA
gttccaacaatgttaccaaaacc

SEQ ID NO: 6048 - RNA, 23 nt, synthetic construct
  source 1..23: mol_type = other RNA
ttccaacaatgttaccaaaaccg

SEQ ID NO: 6049 - RNA, 23 nt, synthetic construct
  source 1..23: mol_type = other RNA
tccaacaatgttaccaaaaccga

SEQ ID NO: 6050 - RNA, 23 nt, synthetic construct
  source 1..23: mol_type = other RNA
ccaacaatgttaccaaaaccgaa

SEQ ID NO: 6051 - RNA, 23 nt, synthetic construct
  source 1..23: mol_type = other RNA
caacaatgttaccaaaaccgaat

SEQ ID NO: 6052 - RNA, 23 nt, synthetic construct
  source 1..23: mol_type = other RNA
aacaatgttaccaaaaccgaatg

SEQ ID NO: 6053 - RNA, 23 nt, synthetic construct
  source 1..23: mol_type = other RNA
acaatgttaccaaaaccgaatgc

SEQ ID NO: 6054 - RNA, 23 nt, synthetic construct
  source 1..23: mol_type = other RNA
caatgttaccaaaaccgaatgct

SEQ ID NO: 6055 - RNA, 23 nt, synthetic construct
  source 1..23: mol_type = other RNA
aatgttaccaaaaccgaatgctg

SEQ ID NO: 6056 - RNA, 23 nt, synthetic construct
  source 1..23: mol_type = other RNA
atgttaccaaaaccgaatgctgc

SEQ ID NO: 6057 - RNA, 23 nt, synthetic construct
  source 1..23: mol_type = other RNA
tgttaccaaaaccgaatgctgct

SEQ ID NO: 6058 - RNA, 23 nt, synthetic construct
  source 1..23: mol_type = other RNA
gttaccaaaaccgaatgctgctt

SEQ ID NO: 6059 - RNA, 23 nt, synthetic construct
  source 1..23: mol_type = other RNA
ttaccaaaaccgaatgctgcttc

SEQ ID NO: 6060 - RNA, 23 nt, synthetic construct
  source 1..23: mol_type = other RNA
taccaaaaccgaatgctgcttca

SEQ ID NO: 6061 - RNA, 23 nt, synthetic construct
  source 1..23: mol_type = other RNA
accaaaaccgaatgctgcttcac

SEQ ID NO: 6062 - RNA, 23 nt, synthetic construct
  source 1..23: mol_type = other RNA
ccaaaaccgaatgctgcttcaca

SEQ ID NO: 6063 - RNA, 23 nt, synthetic construct
  source 1..23: mol_type = other RNA
caaaaccgaatgctgcttcacag

SEQ ID NO: 6064 - RNA, 23 nt, synthetic construct
  source 1..23: mol_type = other RNA
aaaaccgaatgctgcttcacaga

SEQ ID NO: 6065 - RNA, 23 nt, synthetic construct
  source 1..23: mol_type = other RNA
aaaccgaatgctgcttcacagat

SEQ ID NO: 6066 - RNA, 23 nt, synthetic construct
  source 1..23: mol_type = other RNA
accgaatgctgcttcacagattt

SEQ ID NO: 6067 - RNA, 23 nt, synthetic construct
  source 1..23: mol_type = other RNA
gaatgctgcttcacagatttttg

SEQ ID NO: 6068 - RNA, 23 nt, synthetic construct
  source 1..23: mol_type = other RNA
aatgctgcttcacagatttttgc

SEQ ID NO: 6069 - RNA, 23 nt, synthetic construct
  source 1..23: mol_type = other RNA
atgctgcttcacagatttttgca

SEQ ID NO: 6070 - RNA, 23 nt, synthetic construct
  source 1..23: mol_type = other RNA
tgctgcttcacagatttttgcaa

SEQ ID NO: 6071 - RNA, 23 nt, synthetic construct
  source 1..23: mol_type = other RNA
gctgcttcacagatttttgcaac

SEQ ID NO: 6072 - RNA, 23 nt, synthetic construct
  source 1..23: mol_type = other RNA
ctgcttcacagatttttgcaaca

SEQ ID NO: 6073 - RNA, 23 nt, synthetic construct
  source 1..23: mol_type = other RNA
tgcttcacagatttttgcaacaa

SEQ ID NO: 6074 - RNA, 23 nt, synthetic construct
  source 1..23: mol_type = other RNA
gcttcacagatttttgcaacaac

SEQ ID NO: 6075 - RNA, 23 nt, synthetic construct
  source 1..23: mol_type = other RNA
cttcacagatttttgcaacaaca

SEQ ID NO: 6076 - RNA, 23 nt, synthetic construct
  source 1..23: mol_type = other RNA
ttcacagatttttgcaacaacat

SEQ ID NO: 6077 - RNA, 23 nt, synthetic construct
  source 1..23: mol_type = other RNA
tcacagatttttgcaacaacata

SEQ ID NO: 6078 - RNA, 23 nt, synthetic construct
  source 1..23: mol_type = other RNA
cacagatttttgcaacaacataa

SEQ ID NO: 6079 - RNA, 23 nt, synthetic construct
  source 1..23: mol_type = other RNA
acagatttttgcaacaacataac

SEQ ID NO: 6080 - RNA, 23 nt, synthetic construct
  source 1..23: mol_type = other RNA
cagatttttgcaacaacataaca

SEQ ID NO: 6081 - RNA, 23 nt, synthetic construct
  source 1..23: mol_type = other RNA
agatttttgcaacaacataacac

SEQ ID NO: 6082 - RNA, 23 nt, synthetic construct
  source 1..23: mol_type = other RNA
gatttttgcaacaacataacact

SEQ ID NO: 6083 - RNA, 23 nt, synthetic construct
  source 1..23: mol_type = other RNA
atttttgcaacaacataacactg

SEQ ID NO: 6084 - RNA, 23 nt, synthetic construct
  source 1..23: mol_type = other RNA
tttttgcaacaacataacactgc

SEQ ID NO: 6085 - RNA, 23 nt, synthetic construct
  source 1..23: mol_type = other RNA
ttttgcaacaacataacactgca

SEQ ID NO: 6086 - RNA, 23 nt, synthetic construct
  source 1..23: mol_type = other RNA
tttgcaacaacataacactgcac

SEQ ID NO: 6087 - RNA, 23 nt, synthetic construct
  source 1..23: mol_type = other RNA
ttgcaacaacataacactgcacc

SEQ ID NO: 6088 - RNA, 23 nt, synthetic construct
  source 1..23: mol_type = other RNA
tgcaacaacataacactgcacct

SEQ ID NO: 6089 - RNA, 23 nt, synthetic construct
  source 1..23: mol_type = other RNA
gcaacaacataacactgcacctt

SEQ ID NO: 6090 - RNA, 23 nt, synthetic construct
  source 1..23: mol_type = other RNA
caacaacataacactgcaccttc

SEQ ID NO: 6091 - RNA, 23 nt, synthetic construct
  source 1..23: mol_type = other RNA
aacaacataacactgcaccttcc

SEQ ID NO: 6092 - RNA, 23 nt, synthetic construct
  source 1..23: mol_type = other RNA
acaacataacactgcaccttcca

SEQ ID NO: 6093 - RNA, 23 nt, synthetic construct
  source 1..23: mol_type = other RNA
caacataacactgcaccttccaa

SEQ ID NO: 6094 - RNA, 23 nt, synthetic construct
  source 1..23: mol_type = other RNA
aacataacactgcaccttccaac

SEQ ID NO: 6095 - RNA, 23 nt, synthetic construct
  source 1..23: mol_type = other RNA
acataacactgcaccttccaaca

SEQ ID NO: 6096 - RNA, 23 nt, synthetic construct
  source 1..23: mol_type = other RNA
cataacactgcaccttccaacag

SEQ ID NO: 6097 - RNA, 23 nt, synthetic construct
  source 1..23: mol_type = other RNA
ataacactgcaccttccaacagc

SEQ ID NO: 6098 - RNA, 23 nt, synthetic construct
  source 1..23: mol_type = other RNA
taacactgcaccttccaacagca

SEQ ID NO: 6099 - RNA, 23 nt, synthetic construct
  source 1..23: mol_type = other RNA
aacactgcaccttccaacagcat

SEQ ID NO: 6100 - RNA, 23 nt, synthetic construct
  source 1..23: mol_type = other RNA
acactgcaccttccaacagcatc

SEQ ID NO: 6101 - RNA, 23 nt, synthetic construct
  source 1..23: mol_type = other RNA
cactgcaccttccaacagcatca

SEQ ID NO: 6102 - RNA, 23 nt, synthetic construct
  source 1..23: mol_type = other RNA
actgcaccttccaacagcatcac

SEQ ID NO: 6103 - RNA, 23 nt, synthetic construct
  source 1..23: mol_type = other RNA
ctgcaccttccaacagcatcacc

SEQ ID NO: 6104 - RNA, 23 nt, synthetic construct
  source 1..23: mol_type = other RNA
tgcaccttccaacagcatcacca

SEQ ID NO: 6105 - RNA, 23 nt, synthetic construct
  source 1..23: mol_type = other RNA
gcaccttccaacagcatcaccaa

SEQ ID NO: 6106 - RNA, 23 nt, synthetic construct
  source 1..23: mol_type = other RNA
caccttccaacagcatcaccaaa

SEQ ID NO: 6107 - RNA, 23 nt, synthetic construct
  source 1..23: mol_type = other RNA
accttccaacagcatcaccaaat

SEQ ID NO: 6108 - RNA, 23 nt, synthetic construct
  source 1..23: mol_type = other RNA
ccttccaacagcatcaccaaatg

SEQ ID NO: 6109 - RNA, 23 nt, synthetic construct
  source 1..23: mol_type = other RNA
cttccaacagcatcaccaaatgc

SEQ ID NO: 6110 - RNA, 23 nt, synthetic construct
  source 1..23: mol_type = other RNA
ttccaacagcatcaccaaatgcc

SEQ ID NO: 6111 - RNA, 23 nt, synthetic construct
  source 1..23: mol_type = other RNA
tccaacagcatcaccaaatgccc

SEQ ID NO: 6112 - RNA, 23 nt, synthetic construct
  source 1..23: mol_type = other RNA
atggagctggccatcattattac

SEQ ID NO: 6113 - RNA, 23 nt, synthetic construct
  source 1..23: mol_type = other RNA
gagctggccatcattattactgt

SEQ ID NO: 6114 - RNA, 23 nt, synthetic construct
  source 1..23: mol_type = other RNA
agctggccatcattattactgtg

SEQ ID NO: 6115 - RNA, 23 nt, synthetic construct
  source 1..23: mol_type = other RNA
ctggccatcattattactgtgcc

SEQ ID NO: 6116 - RNA, 23 nt, synthetic construct
  source 1..23: mol_type = other RNA
atcattattactgtgcctgtttg

SEQ ID NO: 6117 - RNA, 23 nt, synthetic construct
  source 1..23: mol_type = other RNA
ttattactgtgcctgtttgcctc

SEQ ID NO: 6118 - RNA, 23 nt, synthetic construct
  source 1..23: mol_type = other RNA
gtgcctgtttgcctcctgtccat

SEQ ID NO: 6119 - RNA, 23 nt, synthetic construct
  source 1..23: mol_type = other RNA
atagctgcgatgctgacagtatg

SEQ ID NO: 6120 - RNA, 23 nt, synthetic construct
  source 1..23: mol_type = other RNA
cagtgctcctacaggaagaaaaa

SEQ ID NO: 6121 - RNA, 23 nt, synthetic construct
  source 1..23: mol_type = other RNA
agtgctcctacaggaagaaaaag

SEQ ID NO: 6122 - RNA, 23 nt, synthetic construct
  source 1..23: mol_type = other RNA
tgctcctacaggaagaaaaagag

SEQ ID NO: 6123 - RNA, 23 nt, synthetic construct
  source 1..23: mol_type = other RNA
tcctacaggaagaaaaagagacc

SEQ ID NO: 6124 - RNA, 23 nt, synthetic construct
  source 1..23: mol_type = other RNA
accactctctgagtgcaatctgg

SEQ ID NO: 6125 - RNA, 23 nt, synthetic construct
  source 1..23: mol_type = other RNA
ctctctgagtgcaatctggtaaa

SEQ ID NO: 6126 - RNA, 23 nt, synthetic construct
  source 1..23: mol_type = other RNA
tctgagtgcaatctggtaaatgc

SEQ ID NO: 6127 - RNA, 23 nt, synthetic construct
  source 1..23: mol_type = other RNA
gcaatctggtaaatgctggaaaa

SEQ ID NO: 6128 - RNA, 23 nt, synthetic construct
  source 1..23: mol_type = other RNA
atctggtaaatgctggaaaaact

SEQ ID NO: 6129 - RNA, 23 nt, synthetic construct
  source 1..23: mol_type = other RNA
atgctggaaaaactctgaaagat

SEQ ID NO: 6130 - RNA, 23 nt, synthetic construct
  source 1..23: mol_type = other RNA
gctggaaaaactctgaaagatct

SEQ ID NO: 6131 - RNA, 23 nt, synthetic construct
  source 1..23: mol_type = other RNA
ctggaaaaactctgaaagatctg

SEQ ID NO: 6132 - RNA, 23 nt, synthetic construct
  source 1..23: mol_type = other RNA
tggaaaaactctgaaagatctga

SEQ ID NO: 6133 - RNA, 23 nt, synthetic construct
  source 1..23: mol_type = other RNA
ggaaaaactctgaaagatctgat

SEQ ID NO: 6134 - RNA, 23 nt, synthetic construct
  source 1..23: mol_type = other RNA
gaaaaactctgaaagatctgatt

SEQ ID NO: 6135 - RNA, 23 nt, synthetic construct
  source 1..23: mol_type = other RNA
aaaaactctgaaagatctgattt

SEQ ID NO: 6136 - RNA, 23 nt, synthetic construct
  source 1..23: mol_type = other RNA
aaaactctgaaagatctgattta

SEQ ID NO: 6137 - RNA, 23 nt, synthetic construct
  source 1..23: mol_type = other RNA
aaactctgaaagatctgatttat

SEQ ID NO: 6138 - RNA, 23 nt, synthetic construct
  source 1..23: mol_type = other RNA
aactctgaaagatctgatttatg

SEQ ID NO: 6139 - RNA, 23 nt, synthetic construct
  source 1..23: mol_type = other RNA
actctgaaagatctgatttatga

SEQ ID NO: 6140 - RNA, 23 nt, synthetic construct
  source 1..23: mol_type = other RNA
ctctgaaagatctgatttatgat

SEQ ID NO: 6141 - RNA, 23 nt, synthetic construct
  source 1..23: mol_type = other RNA
tctgaaagatctgatttatgatg

SEQ ID NO: 6142 - RNA, 23 nt, synthetic construct
  source 1..23: mol_type = other RNA
ctgaaagatctgatttatgatgt

SEQ ID NO: 6143 - RNA, 23 nt, synthetic construct
  source 1..23: mol_type = other RNA
tgaaagatctgatttatgatgtg

SEQ ID NO: 6144 - RNA, 23 nt, synthetic construct
  source 1..23: mol_type = other RNA
gaaagatctgatttatgatgtga

SEQ ID NO: 6145 - RNA, 23 nt, synthetic construct
  source 1..23: mol_type = other RNA
aaagatctgatttatgatgtgac

SEQ ID NO: 6146 - RNA, 23 nt, synthetic construct
  source 1..23: mol_type = other RNA
aagatctgatttatgatgtgacc

SEQ ID NO: 6147 - RNA, 23 nt, synthetic construct
  source 1..23: mol_type = other RNA
tggtctacctctgttggttcaaa

SEQ ID NO: 6148 - RNA, 23 nt, synthetic construct
  source 1..23: mol_type = other RNA
ggtctacctctgttggttcaaag

SEQ ID NO: 6149 - RNA, 23 nt, synthetic construct
  source 1..23: mol_type = other RNA
ctacctctgttggttcaaaggac

SEQ ID NO: 6150 - RNA, 23 nt, synthetic construct
  source 1..23: mol_type = other RNA
tacctctgttggttcaaaggaca

SEQ ID NO: 6151 - RNA, 23 nt, synthetic construct
  source 1..23: mol_type = other RNA
ctctgttggttcaaaggacaatt

SEQ ID NO: 6152 - RNA, 23 nt, synthetic construct
  source 1..23: mol_type = other RNA
tctgttggttcaaaggacaattg

SEQ ID NO: 6153 - RNA, 23 nt, synthetic construct
  source 1..23: mol_type = other RNA
ttggttcaaaggacaattgcaag

SEQ ID NO: 6154 - RNA, 23 nt, synthetic construct
  source 1..23: mol_type = other RNA
gttcaaaggacaattgcaaggac

SEQ ID NO: 6155 - RNA, 23 nt, synthetic construct
  source 1..23: mol_type = other RNA
aatagtaggaaaaggtagatttg

SEQ ID NO: 6156 - RNA, 23 nt, synthetic construct
  source 1..23: mol_type = other RNA
agtaggaaaaggtagatttggtg

SEQ ID NO: 6157 - RNA, 23 nt, synthetic construct
  source 1..23: mol_type = other RNA
gggaagatgtggctgtgaaaata

SEQ ID NO: 6158 - RNA, 23 nt, synthetic construct
  source 1..23: mol_type = other RNA
ggaagatgtggctgtgaaaatat

SEQ ID NO: 6159 - RNA, 23 nt, synthetic construct
  source 1..23: mol_type = other RNA
gaagatgtggctgtgaaaatatt

SEQ ID NO: 6160 - RNA, 23 nt, synthetic construct
  source 1..23: mol_type = other RNA
ttctcctccagagatgaaagatc

SEQ ID NO: 6161 - RNA, 23 nt, synthetic construct
  source 1..23: mol_type = other RNA
tctcctccagagatgaaagatct

SEQ ID NO: 6162 - RNA, 23 nt, synthetic construct
  source 1..23: mol_type = other RNA
ctcctccagagatgaaagatctt

SEQ ID NO: 6163 - RNA, 23 nt, synthetic construct
  source 1..23: mol_type = other RNA
tcctccagagatgaaagatcttg

SEQ ID NO: 6164 - RNA, 23 nt, synthetic construct
  source 1..23: mol_type = other RNA
cctccagagatgaaagatcttgg

SEQ ID NO: 6165 - RNA, 23 nt, synthetic construct
  source 1..23: mol_type = other RNA
ctccagagatgaaagatcttggt

SEQ ID NO: 6166 - RNA, 23 nt, synthetic construct
  source 1..23: mol_type = other RNA
ccagagatgaaagatcttggttt

SEQ ID NO: 6167 - RNA, 23 nt, synthetic construct
  source 1..23: mol_type = other RNA
cagagatgaaagatcttggtttc

SEQ ID NO: 6168 - RNA, 23 nt, synthetic construct
  source 1..23: mol_type = other RNA
agatgaaagatcttggtttcgtg

SEQ ID NO: 6169 - RNA, 23 nt, synthetic construct
  source 1..23: mol_type = other RNA
ggtttcgtgaggcagaaatttac

SEQ ID NO: 6170 - RNA, 23 nt, synthetic construct
  source 1..23: mol_type = other RNA
tcatgctgcgacatgaaaacatc

SEQ ID NO: 6171 - RNA, 23 nt, synthetic construct
  source 1..23: mol_type = other RNA
tgctgcgacatgaaaacatcctt

SEQ ID NO: 6172 - RNA, 23 nt, synthetic construct
  source 1..23: mol_type = other RNA
gctgcgacatgaaaacatccttg

SEQ ID NO: 6173 - RNA, 23 nt, synthetic construct
  source 1..23: mol_type = other RNA
ctgcgacatgaaaacatccttgg

SEQ ID NO: 6174 - RNA, 23 nt, synthetic construct
  source 1..23: mol_type = other RNA
gcgacatgaaaacatccttggtt

SEQ ID NO: 6175 - RNA, 23 nt, synthetic construct
  source 1..23: mol_type = other RNA
cgacatgaaaacatccttggttt

SEQ ID NO: 6176 - RNA, 23 nt, synthetic construct
  source 1..23: mol_type = other RNA
gacatgaaaacatccttggtttc

SEQ ID NO: 6177 - RNA, 23 nt, synthetic construct
  source 1..23: mol_type = other RNA
atgaaaacatccttggtttcatt

SEQ ID NO: 6178 - RNA, 23 nt, synthetic construct
  source 1..23: mol_type = other RNA
aacatccttggtttcattgctgc

SEQ ID NO: 6179 - RNA, 23 nt, synthetic construct
  source 1..23: mol_type = other RNA
tccttggtttcattgctgctgac

SEQ ID NO: 6180 - RNA, 23 nt, synthetic construct
  source 1..23: mol_type = other RNA
ttggtttcattgctgctgacaac

SEQ ID NO: 6181 - RNA, 23 nt, synthetic construct
  source 1..23: mol_type = other RNA
gtttcattgctgctgacaacaaa

SEQ ID NO: 6182 - RNA, 23 nt, synthetic construct
  source 1..23: mol_type = other RNA
tttcattgctgctgacaacaaag

SEQ ID NO: 6183 - RNA, 23 nt, synthetic construct
  source 1..23: mol_type = other RNA
cattgctgctgacaacaaagata

SEQ ID NO: 6184 - RNA, 23 nt, synthetic construct
  source 1..23: mol_type = other RNA
gctgctgacaacaaagataatgg

SEQ ID NO: 6185 - RNA, 23 nt, synthetic construct
  source 1..23: mol_type = other RNA
ctgctgacaacaaagataatgga

SEQ ID NO: 6186 - RNA, 23 nt, synthetic construct
  source 1..23: mol_type = other RNA
gctgacaacaaagataatggaac

SEQ ID NO: 6187 - RNA, 23 nt, synthetic construct
  source 1..23: mol_type = other RNA
ctgacaacaaagataatggaact

SEQ ID NO: 6188 - RNA, 23 nt, synthetic construct
  source 1..23: mol_type = other RNA
acaacaaagataatggaacttgg

SEQ ID NO: 6189 - RNA, 23 nt, synthetic construct
  source 1..23: mol_type = other RNA
caactttggctggtatctgaata

SEQ ID NO: 6190 - RNA, 23 nt, synthetic construct
  source 1..23: mol_type = other RNA
actttggctggtatctgaatatc

SEQ ID NO: 6191 - RNA, 23 nt, synthetic construct
  source 1..23: mol_type = other RNA
ctttggctggtatctgaatatca

SEQ ID NO: 6192 - RNA, 23 nt, synthetic construct
  source 1..23: mol_type = other RNA
tttggctggtatctgaatatcat

SEQ ID NO: 6193 - RNA, 23 nt, synthetic construct
  source 1..23: mol_type = other RNA
gctggtatctgaatatcatgaac

SEQ ID NO: 6194 - RNA, 23 nt, synthetic construct
  source 1..23: mol_type = other RNA
tggtatctgaatatcatgaacag

SEQ ID NO: 6195 - RNA, 23 nt, synthetic construct
  source 1..23: mol_type = other RNA
atcatgaacagggctccttatat

SEQ ID NO: 6196 - RNA, 23 nt, synthetic construct
  source 1..23: mol_type = other RNA
tcatgaacagggctccttatatg

SEQ ID NO: 6197 - RNA, 23 nt, synthetic construct
  source 1..23: mol_type = other RNA
gaacagggctccttatatgacta

SEQ ID NO: 6198 - RNA, 23 nt, synthetic construct
  source 1..23: mol_type = other RNA
aacagggctccttatatgactat

SEQ ID NO: 6199 - RNA, 23 nt, synthetic construct
  source 1..23: mol_type = other RNA
acagggctccttatatgactatt

SEQ ID NO: 6200 - RNA, 23 nt, synthetic construct
  source 1..23: mol_type = other RNA
cagggctccttatatgactattt

SEQ ID NO: 6201 - RNA, 23 nt, synthetic construct
  source 1..23: mol_type = other RNA
agggctccttatatgactatttg

SEQ ID NO: 6202 - RNA, 23 nt, synthetic construct
  source 1..23: mol_type = other RNA
gggctccttatatgactatttga

SEQ ID NO: 6203 - RNA, 23 nt, synthetic construct
  source 1..23: mol_type = other RNA
ggctccttatatgactatttgaa

SEQ ID NO: 6204 - RNA, 23 nt, synthetic construct
  source 1..23: mol_type = other RNA
gctccttatatgactatttgaat

SEQ ID NO: 6205 - RNA, 23 nt, synthetic construct
  source 1..23: mol_type = other RNA
ctccttatatgactatttgaata

SEQ ID NO: 6206 - RNA, 23 nt, synthetic construct
  source 1..23: mol_type = other RNA
ccttatatgactatttgaataga

SEQ ID NO: 6207 - RNA, 23 nt, synthetic construct
  source 1..23: mol_type = other RNA
tagtgaccgtggctggaatgatc

SEQ ID NO: 6208 - RNA, 23 nt, synthetic construct
  source 1..23: mol_type = other RNA
accgtggctggaatgatcaagct

SEQ ID NO: 6209 - RNA, 23 nt, synthetic construct
  source 1..23: mol_type = other RNA
cgtggctggaatgatcaagctgg

SEQ ID NO: 6210 - RNA, 23 nt, synthetic construct
  source 1..23: mol_type = other RNA
ctggcgctctcaattgctagtgg

SEQ ID NO: 6211 - RNA, 23 nt, synthetic construct
  source 1..23: mol_type = other RNA
cgctctcaattgctagtggtctg

SEQ ID NO: 6212 - RNA, 23 nt, synthetic construct
  source 1..23: mol_type = other RNA
gtctggcacaccttcatatggag

SEQ ID NO: 6213 - RNA, 23 nt, synthetic construct
  source 1..23: mol_type = other RNA
tctggcacaccttcatatggaga

SEQ ID NO: 6214 - RNA, 23 nt, synthetic construct
  source 1..23: mol_type = other RNA
ctggcacaccttcatatggagat

SEQ ID NO: 6215 - RNA, 23 nt, synthetic construct
  source 1..23: mol_type = other RNA
tggcacaccttcatatggagatt

SEQ ID NO: 6216 - RNA, 23 nt, synthetic construct
  source 1..23: mol_type = other RNA
ggcacaccttcatatggagattg

SEQ ID NO: 6217 - RNA, 23 nt, synthetic construct
  source 1..23: mol_type = other RNA
gcacaccttcatatggagattgt

SEQ ID NO: 6218 - RNA, 23 nt, synthetic construct
  source 1..23: mol_type = other RNA
cacaccttcatatggagattgtt

SEQ ID NO: 6219 - RNA, 23 nt, synthetic construct
  source 1..23: mol_type = other RNA
acaccttcatatggagattgttg

SEQ ID NO: 6220 - RNA, 23 nt, synthetic construct
  source 1..23: mol_type = other RNA
caccttcatatggagattgttgg

SEQ ID NO: 6221 - RNA, 23 nt, synthetic construct
  source 1..23: mol_type = other RNA
accttcatatggagattgttggt

SEQ ID NO: 6222 - RNA, 23 nt, synthetic construct
  source 1..23: mol_type = other RNA
ccttcatatggagattgttggta

SEQ ID NO: 6223 - RNA, 23 nt, synthetic construct
  source 1..23: mol_type = other RNA
cttcatatggagattgttggtac

SEQ ID NO: 6224 - RNA, 23 nt, synthetic construct
  source 1..23: mol_type = other RNA
ttcatatggagattgttggtaca

SEQ ID NO: 6225 - RNA, 23 nt, synthetic construct
  source 1..23: mol_type = other RNA
tcatatggagattgttggtacac

SEQ ID NO: 6226 - RNA, 23 nt, synthetic construct
  source 1..23: mol_type = other RNA
catatggagattgttggtacaca

SEQ ID NO: 6227 - RNA, 23 nt, synthetic construct
  source 1..23: mol_type = other RNA
atatggagattgttggtacacaa

SEQ ID NO: 6228 - RNA, 23 nt, synthetic construct
  source 1..23: mol_type = other RNA
tatggagattgttggtacacaag

SEQ ID NO: 6229 - RNA, 23 nt, synthetic construct
  source 1..23: mol_type = other RNA
atggagattgttggtacacaagg

SEQ ID NO: 6230 - RNA, 23 nt, synthetic construct
  source 1..23: mol_type = other RNA
tggagattgttggtacacaaggt

SEQ ID NO: 6231 - RNA, 23 nt, synthetic construct
  source 1..23: mol_type = other RNA
agattgttggtacacaaggtaaa

SEQ ID NO: 6232 - RNA, 23 nt, synthetic construct
  source 1..23: mol_type = other RNA
tgttggtacacaaggtaaacctg

SEQ ID NO: 6233 - RNA, 23 nt, synthetic construct
  source 1..23: mol_type = other RNA
tggtacacaaggtaaacctgcta

SEQ ID NO: 6234 - RNA, 23 nt, synthetic construct
  source 1..23: mol_type = other RNA
ggtacacaaggtaaacctgctat

SEQ ID NO: 6235 - RNA, 23 nt, synthetic construct
  source 1..23: mol_type = other RNA
gtacacaaggtaaacctgctatt

SEQ ID NO: 6236 - RNA, 23 nt, synthetic construct
  source 1..23: mol_type = other RNA
tacacaaggtaaacctgctattg

SEQ ID NO: 6237 - RNA, 23 nt, synthetic construct
  source 1..23: mol_type = other RNA
acacaaggtaaacctgctattgc

SEQ ID NO: 6238 - RNA, 23 nt, synthetic construct
  source 1..23: mol_type = other RNA
cacaaggtaaacctgctattgct

SEQ ID NO: 6239 - RNA, 23 nt, synthetic construct
  source 1..23: mol_type = other RNA
acaaggtaaacctgctattgctc

SEQ ID NO: 6240 - RNA, 23 nt, synthetic construct
  source 1..23: mol_type = other RNA
caaggtaaacctgctattgctca

SEQ ID NO: 6241 - RNA, 23 nt, synthetic construct
  source 1..23: mol_type = other RNA
aaggtaaacctgctattgctcat

SEQ ID NO: 6242 - RNA, 23 nt, synthetic construct
  source 1..23: mol_type = other RNA
aggtaaacctgctattgctcatc

SEQ ID NO: 6243 - RNA, 23 nt, synthetic construct
  source 1..23: mol_type = other RNA
ggtaaacctgctattgctcatcg

SEQ ID NO: 6244 - RNA, 23 nt, synthetic construct
  source 1..23: mol_type = other RNA
gtaaacctgctattgctcatcga

SEQ ID NO: 6245 - RNA, 23 nt, synthetic construct
  source 1..23: mol_type = other RNA
taaacctgctattgctcatcgag

SEQ ID NO: 6246 - RNA, 23 nt, synthetic construct
  source 1..23: mol_type = other RNA
aaacctgctattgctcatcgaga

SEQ ID NO: 6247 - RNA, 23 nt, synthetic construct
  source 1..23: mol_type = other RNA
aacctgctattgctcatcgagac

SEQ ID NO: 6248 - RNA, 23 nt, synthetic construct
  source 1..23: mol_type = other RNA
acctgctattgctcatcgagaca

SEQ ID NO: 6249 - RNA, 23 nt, synthetic construct
  source 1..23: mol_type = other RNA
cctgctattgctcatcgagacat

SEQ ID NO: 6250 - RNA, 23 nt, synthetic construct
  source 1..23: mol_type = other RNA
ctgctattgctcatcgagacata

SEQ ID NO: 6251 - RNA, 23 nt, synthetic construct
  source 1..23: mol_type = other RNA
tgctattgctcatcgagacataa

SEQ ID NO: 6252 - RNA, 23 nt, synthetic construct
  source 1..23: mol_type = other RNA
gctattgctcatcgagacataaa

SEQ ID NO: 6253 - RNA, 23 nt, synthetic construct
  source 1..23: mol_type = other RNA
ctattgctcatcgagacataaaa

SEQ ID NO: 6254 - RNA, 23 nt, synthetic construct
  source 1..23: mol_type = other RNA
tattgctcatcgagacataaaat

SEQ ID NO: 6255 - RNA, 23 nt, synthetic construct
  source 1..23: mol_type = other RNA
attgctcatcgagacataaaatc

SEQ ID NO: 6256 - RNA, 23 nt, synthetic construct
  source 1..23: mol_type = other RNA
ttgctcatcgagacataaaatca

SEQ ID NO: 6257 - RNA, 23 nt, synthetic construct
  source 1..23: mol_type = other RNA
tgctcatcgagacataaaatcaa

SEQ ID NO: 6258 - RNA, 23 nt, synthetic construct
  source 1..23: mol_type = other RNA
gctcatcgagacataaaatcaaa

SEQ ID NO: 6259 - RNA, 23 nt, synthetic construct
  source 1..23: mol_type = other RNA
ctcatcgagacataaaatcaaag

SEQ ID NO: 6260 - RNA, 23 nt, synthetic construct
  source 1..23: mol_type = other RNA
tcatcgagacataaaatcaaaga

SEQ ID NO: 6261 - RNA, 23 nt, synthetic construct
  source 1..23: mol_type = other RNA
catcgagacataaaatcaaagaa

SEQ ID NO: 6262 - RNA, 23 nt, synthetic construct
  source 1..23: mol_type = other RNA
atcgagacataaaatcaaagaat

SEQ ID NO: 6263 - RNA, 23 nt, synthetic construct
  source 1..23: mol_type = other RNA
tcgagacataaaatcaaagaata

SEQ ID NO: 6264 - RNA, 23 nt, synthetic construct
  source 1..23: mol_type = other RNA
cgagacataaaatcaaagaatat

SEQ ID NO: 6265 - RNA, 23 nt, synthetic construct
  source 1..23: mol_type = other RNA
agaatatcttagtgaaaaagtgt

SEQ ID NO: 6266 - RNA, 23 nt, synthetic construct
  source 1..23: mol_type = other RNA
gaatatcttagtgaaaaagtgtg

SEQ ID NO: 6267 - RNA, 23 nt, synthetic construct
  source 1..23: mol_type = other RNA
aatatcttagtgaaaaagtgtga

SEQ ID NO: 6268 - RNA, 23 nt, synthetic construct
  source 1..23: mol_type = other RNA
atatcttagtgaaaaagtgtgaa

SEQ ID NO: 6269 - RNA, 23 nt, synthetic construct
  source 1..23: mol_type = other RNA
tatcttagtgaaaaagtgtgaaa

SEQ ID NO: 6270 - RNA, 23 nt, synthetic construct
  source 1..23: mol_type = other RNA
atcttagtgaaaaagtgtgaaac

SEQ ID NO: 6271 - RNA, 23 nt, synthetic construct
  source 1..23: mol_type = other RNA
tcttagtgaaaaagtgtgaaact

SEQ ID NO: 6272 - RNA, 23 nt, synthetic construct
  source 1..23: mol_type = other RNA
cttagtgaaaaagtgtgaaactt

SEQ ID NO: 6273 - RNA, 23 nt, synthetic construct
  source 1..23: mol_type = other RNA
ttagtgaaaaagtgtgaaacttg

SEQ ID NO: 6274 - RNA, 23 nt, synthetic construct
  source 1..23: mol_type = other RNA
tagtgaaaaagtgtgaaacttgt

SEQ ID NO: 6275 - RNA, 23 nt, synthetic construct
  source 1..23: mol_type = other RNA
agtgaaaaagtgtgaaacttgtg

SEQ ID NO: 6276 - RNA, 23 nt, synthetic construct
  source 1..23: mol_type = other RNA
gtgaaaaagtgtgaaacttgtgc

SEQ ID NO: 6277 - RNA, 23 nt, synthetic construct
  source 1..23: mol_type = other RNA
tgaaaaagtgtgaaacttgtgcc

SEQ ID NO: 6278 - RNA, 23 nt, synthetic construct
  source 1..23: mol_type = other RNA
gaaaaagtgtgaaacttgtgcca

SEQ ID NO: 6279 - RNA, 23 nt, synthetic construct
  source 1..23: mol_type = other RNA
aaaagtgtgaaacttgtgccata

SEQ ID NO: 6280 - RNA, 23 nt, synthetic construct
  source 1..23: mol_type = other RNA
aaagtgtgaaacttgtgccatag

SEQ ID NO: 6281 - RNA, 23 nt, synthetic construct
  source 1..23: mol_type = other RNA
tggctgtgaagcatgattcaata

SEQ ID NO: 6282 - RNA, 23 nt, synthetic construct
  source 1..23: mol_type = other RNA
ggctgtgaagcatgattcaatac

SEQ ID NO: 6283 - RNA, 23 nt, synthetic construct
  source 1..23: mol_type = other RNA
ctgtgaagcatgattcaatactg

SEQ ID NO: 6284 - RNA, 23 nt, synthetic construct
  source 1..23: mol_type = other RNA
tgtgaagcatgattcaatactga

SEQ ID NO: 6285 - RNA, 23 nt, synthetic construct
  source 1..23: mol_type = other RNA
aagcatgattcaatactgaacac

SEQ ID NO: 6286 - RNA, 23 nt, synthetic construct
  source 1..23: mol_type = other RNA
gcatgattcaatactgaacacta

SEQ ID NO: 6287 - RNA, 23 nt, synthetic construct
  source 1..23: mol_type = other RNA
catgattcaatactgaacactat

SEQ ID NO: 6288 - RNA, 23 nt, synthetic construct
  source 1..23: mol_type = other RNA
caatactgaacactatcgacata

SEQ ID NO: 6289 - RNA, 23 nt, synthetic construct
  source 1..23: mol_type = other RNA
atactgaacactatcgacatacc

SEQ ID NO: 6290 - RNA, 23 nt, synthetic construct
  source 1..23: mol_type = other RNA
acatacctcagaatcctaaagtg

SEQ ID NO: 6291 - RNA, 23 nt, synthetic construct
  source 1..23: mol_type = other RNA
ggtatatggctcctgaaatgctt

SEQ ID NO: 6292 - RNA, 23 nt, synthetic construct
  source 1..23: mol_type = other RNA
tatggctcctgaaatgcttgatg

SEQ ID NO: 6293 - RNA, 23 nt, synthetic construct
  source 1..23: mol_type = other RNA
atggctcctgaaatgcttgatga

SEQ ID NO: 6294 - RNA, 23 nt, synthetic construct
  source 1..23: mol_type = other RNA
tggctcctgaaatgcttgatgat

SEQ ID NO: 6295 - RNA, 23 nt, synthetic construct
  source 1..23: mol_type = other RNA
ggctcctgaaatgcttgatgata

SEQ ID NO: 6296 - RNA, 23 nt, synthetic construct
  source 1..23: mol_type = other RNA
gctcctgaaatgcttgatgatac

SEQ ID NO: 6297 - RNA, 23 nt, synthetic construct
  source 1..23: mol_type = other RNA
ctcctgaaatgcttgatgataca

SEQ ID NO: 6298 - RNA, 23 nt, synthetic construct
  source 1..23: mol_type = other RNA
tcctgaaatgcttgatgatacaa

SEQ ID NO: 6299 - RNA, 23 nt, synthetic construct
  source 1..23: mol_type = other RNA
cctgaaatgcttgatgatacaat

SEQ ID NO: 6300 - RNA, 23 nt, synthetic construct
  source 1..23: mol_type = other RNA
ctgaaatgcttgatgatacaatg

SEQ ID NO: 6301 - RNA, 23 nt, synthetic construct
  source 1..23: mol_type = other RNA
tgaaatgcttgatgatacaatga

SEQ ID NO: 6302 - RNA, 23 nt, synthetic construct
  source 1..23: mol_type = other RNA
gaaatgcttgatgatacaatgaa

SEQ ID NO: 6303 - RNA, 23 nt, synthetic construct
  source 1..23: mol_type = other RNA
aaatgcttgatgatacaatgaat

SEQ ID NO: 6304 - RNA, 23 nt, synthetic construct
  source 1..23: mol_type = other RNA
aatgcttgatgatacaatgaatg

SEQ ID NO: 6305 - RNA, 23 nt, synthetic construct
  source 1..23: mol_type = other RNA
atgcttgatgatacaatgaatgt

SEQ ID NO: 6306 - RNA, 23 nt, synthetic construct
  source 1..23: mol_type = other RNA
tgcttgatgatacaatgaatgtg

SEQ ID NO: 6307 - RNA, 23 nt, synthetic construct
  source 1..23: mol_type = other RNA
gcttgatgatacaatgaatgtga

SEQ ID NO: 6308 - RNA, 23 nt, synthetic construct
  source 1..23: mol_type = other RNA
cttgatgatacaatgaatgtgaa

SEQ ID NO: 6309 - RNA, 23 nt, synthetic construct
  source 1..23: mol_type = other RNA
ttgatgatacaatgaatgtgaat

SEQ ID NO: 6310 - RNA, 23 nt, synthetic construct
  source 1..23: mol_type = other RNA
tgatgatacaatgaatgtgaata

SEQ ID NO: 6311 - RNA, 23 nt, synthetic construct
  source 1..23: mol_type = other RNA
gatgatacaatgaatgtgaatat

SEQ ID NO: 6312 - RNA, 23 nt, synthetic construct
  source 1..23: mol_type = other RNA
tgatacaatgaatgtgaatatct

SEQ ID NO: 6313 - RNA, 23 nt, synthetic construct
  source 1..23: mol_type = other RNA
gatacaatgaatgtgaatatctt

SEQ ID NO: 6314 - RNA, 23 nt, synthetic construct
  source 1..23: mol_type = other RNA
acaatgaatgtgaatatctttga

SEQ ID NO: 6315 - RNA, 23 nt, synthetic construct
  source 1..23: mol_type = other RNA
caatgaatgtgaatatctttgag

SEQ ID NO: 6316 - RNA, 23 nt, synthetic construct
  source 1..23: mol_type = other RNA
aatgaatgtgaatatctttgagt

SEQ ID NO: 6317 - RNA, 23 nt, synthetic construct
  source 1..23: mol_type = other RNA
atgaatgtgaatatctttgagtc

SEQ ID NO: 6318 - RNA, 23 nt, synthetic construct
  source 1..23: mol_type = other RNA
tgaatgtgaatatctttgagtcc

SEQ ID NO: 6319 - RNA, 23 nt, synthetic construct
  source 1..23: mol_type = other RNA
gaatgtgaatatctttgagtcct

SEQ ID NO: 6320 - RNA, 23 nt, synthetic construct
  source 1..23: mol_type = other RNA
aatgtgaatatctttgagtcctt

SEQ ID NO: 6321 - RNA, 23 nt, synthetic construct
  source 1..23: mol_type = other RNA
atgtgaatatctttgagtccttc

SEQ ID NO: 6322 - RNA, 23 nt, synthetic construct
  source 1..23: mol_type = other RNA
tgtgaatatctttgagtccttca

SEQ ID NO: 6323 - RNA, 23 nt, synthetic construct
  source 1..23: mol_type = other RNA
gtgaatatctttgagtccttcaa

SEQ ID NO: 6324 - RNA, 23 nt, synthetic construct
  source 1..23: mol_type = other RNA
tgaatatctttgagtccttcaaa

SEQ ID NO: 6325 - RNA, 23 nt, synthetic construct
  source 1..23: mol_type = other RNA
gaatatctttgagtccttcaaac

SEQ ID NO: 6326 - RNA, 23 nt, synthetic construct
  source 1..23: mol_type = other RNA
aatatctttgagtccttcaaacg

SEQ ID NO: 6327 - RNA, 23 nt, synthetic construct
  source 1..23: mol_type = other RNA
atatctttgagtccttcaaacga

SEQ ID NO: 6328 - RNA, 23 nt, synthetic construct
  source 1..23: mol_type = other RNA
tatctttgagtccttcaaacgag

SEQ ID NO: 6329 - RNA, 23 nt, synthetic construct
  source 1..23: mol_type = other RNA
atctttgagtccttcaaacgagc

SEQ ID NO: 6330 - RNA, 23 nt, synthetic construct
  source 1..23: mol_type = other RNA
ccttcaaacgagctgacatctat

SEQ ID NO: 6331 - RNA, 23 nt, synthetic construct
  source 1..23: mol_type = other RNA
caaacgagctgacatctattctg

SEQ ID NO: 6332 - RNA, 23 nt, synthetic construct
  source 1..23: mol_type = other RNA
aaacgagctgacatctattctgt

SEQ ID NO: 6333 - RNA, 23 nt, synthetic construct
  source 1..23: mol_type = other RNA
aacgagctgacatctattctgtt

SEQ ID NO: 6334 - RNA, 23 nt, synthetic construct
  source 1..23: mol_type = other RNA
cgagctgacatctattctgttgg

SEQ ID NO: 6335 - RNA, 23 nt, synthetic construct
  source 1..23: mol_type = other RNA
gagctgacatctattctgttggt

SEQ ID NO: 6336 - RNA, 23 nt, synthetic construct
  source 1..23: mol_type = other RNA
ctgacatctattctgttggtctg

SEQ ID NO: 6337 - RNA, 23 nt, synthetic construct
  source 1..23: mol_type = other RNA
tctattctgttggtctggtttac

SEQ ID NO: 6338 - RNA, 23 nt, synthetic construct
  source 1..23: mol_type = other RNA
tggtctggtttactgggaaatag

SEQ ID NO: 6339 - RNA, 23 nt, synthetic construct
  source 1..23: mol_type = other RNA
gttgaggagtaccaattgcctta

SEQ ID NO: 6340 - RNA, 23 nt, synthetic construct
  source 1..23: mol_type = other RNA
ttgaggagtaccaattgccttat

SEQ ID NO: 6341 - RNA, 23 nt, synthetic construct
  source 1..23: mol_type = other RNA
tgaggagtaccaattgccttatt

SEQ ID NO: 6342 - RNA, 23 nt, synthetic construct
  source 1..23: mol_type = other RNA
gaggagtaccaattgccttatta

SEQ ID NO: 6343 - RNA, 23 nt, synthetic construct
  source 1..23: mol_type = other RNA
aggagtaccaattgccttattat

SEQ ID NO: 6344 - RNA, 23 nt, synthetic construct
  source 1..23: mol_type = other RNA
ggagtaccaattgccttattatg

SEQ ID NO: 6345 - RNA, 23 nt, synthetic construct
  source 1..23: mol_type = other RNA
gagtaccaattgccttattatga

SEQ ID NO: 6346 - RNA, 23 nt, synthetic construct
  source 1..23: mol_type = other RNA
agtaccaattgccttattatgac

SEQ ID NO: 6347 - RNA, 23 nt, synthetic construct
  source 1..23: mol_type = other RNA
gtaccaattgccttattatgaca

SEQ ID NO: 6348 - RNA, 23 nt, synthetic construct
  source 1..23: mol_type = other RNA
taccaattgccttattatgacat

SEQ ID NO: 6349 - RNA, 23 nt, synthetic construct
  source 1..23: mol_type = other RNA
accaattgccttattatgacatg

SEQ ID NO: 6350 - RNA, 23 nt, synthetic construct
  source 1..23: mol_type = other RNA
ccaattgccttattatgacatgg

SEQ ID NO: 6351 - RNA, 23 nt, synthetic construct
  source 1..23: mol_type = other RNA
caattgccttattatgacatggt

SEQ ID NO: 6352 - RNA, 23 nt, synthetic construct
  source 1..23: mol_type = other RNA
aattgccttattatgacatggtg

SEQ ID NO: 6353 - RNA, 23 nt, synthetic construct
  source 1..23: mol_type = other RNA
attgccttattatgacatggtgc

SEQ ID NO: 6354 - RNA, 23 nt, synthetic construct
  source 1..23: mol_type = other RNA
ttgccttattatgacatggtgcc

SEQ ID NO: 6355 - RNA, 23 nt, synthetic construct
  source 1..23: mol_type = other RNA
tgccttattatgacatggtgcct

SEQ ID NO: 6356 - RNA, 23 nt, synthetic construct
  source 1..23: mol_type = other RNA
gccttattatgacatggtgcctt

SEQ ID NO: 6357 - RNA, 23 nt, synthetic construct
  source 1..23: mol_type = other RNA
ccttattatgacatggtgccttc

SEQ ID NO: 6358 - RNA, 23 nt, synthetic construct
  source 1..23: mol_type = other RNA
cttattatgacatggtgccttca

SEQ ID NO: 6359 - RNA, 23 nt, synthetic construct
  source 1..23: mol_type = other RNA
ttattatgacatggtgccttcag

SEQ ID NO: 6360 - RNA, 23 nt, synthetic construct
  source 1..23: mol_type = other RNA
cgatagaggaaatgagaaaggtt

SEQ ID NO: 6361 - RNA, 23 nt, synthetic construct
  source 1..23: mol_type = other RNA
tagaggaaatgagaaaggttgtt

SEQ ID NO: 6362 - RNA, 23 nt, synthetic construct
  source 1..23: mol_type = other RNA
agaggaaatgagaaaggttgttt

SEQ ID NO: 6363 - RNA, 23 nt, synthetic construct
  source 1..23: mol_type = other RNA
gaggaaatgagaaaggttgtttg

SEQ ID NO: 6364 - RNA, 23 nt, synthetic construct
  source 1..23: mol_type = other RNA
aggaaatgagaaaggttgtttgt

SEQ ID NO: 6365 - RNA, 23 nt, synthetic construct
  source 1..23: mol_type = other RNA
ggaaatgagaaaggttgtttgtg

SEQ ID NO: 6366 - RNA, 23 nt, synthetic construct
  source 1..23: mol_type = other RNA
gaaatgagaaaggttgtttgtga

SEQ ID NO: 6367 - RNA, 23 nt, synthetic construct
  source 1..23: mol_type = other RNA
aaatgagaaaggttgtttgtgac

SEQ ID NO: 6368 - RNA, 23 nt, synthetic construct
  source 1..23: mol_type = other RNA
aatgagaaaggttgtttgtgacc

SEQ ID NO: 6369 - RNA, 23 nt, synthetic construct
  source 1..23: mol_type = other RNA
atgagaaaggttgtttgtgacca

SEQ ID NO: 6370 - RNA, 23 nt, synthetic construct
  source 1..23: mol_type = other RNA
tgagaaaggttgtttgtgaccag

SEQ ID NO: 6371 - RNA, 23 nt, synthetic construct
  source 1..23: mol_type = other RNA
gagaaaggttgtttgtgaccaga

SEQ ID NO: 6372 - RNA, 23 nt, synthetic construct
  source 1..23: mol_type = other RNA
agaaaggttgtttgtgaccagaa

SEQ ID NO: 6373 - RNA, 23 nt, synthetic construct
  source 1..23: mol_type = other RNA
gaaaggttgtttgtgaccagaag

SEQ ID NO: 6374 - RNA, 23 nt, synthetic construct
  source 1..23: mol_type = other RNA
aaaggttgtttgtgaccagaagt

SEQ ID NO: 6375 - RNA, 23 nt, synthetic construct
  source 1..23: mol_type = other RNA
aaggttgtttgtgaccagaagtt

SEQ ID NO: 6376 - RNA, 23 nt, synthetic construct
  source 1..23: mol_type = other RNA
aggttgtttgtgaccagaagttt

SEQ ID NO: 6377 - RNA, 23 nt, synthetic construct
  source 1..23: mol_type = other RNA
ggttgtttgtgaccagaagtttc

SEQ ID NO: 6378 - RNA, 23 nt, synthetic construct
  source 1..23: mol_type = other RNA
accagaagtttcgaccaagtatc

SEQ ID NO: 6379 - RNA, 23 nt, synthetic construct
  source 1..23: mol_type = other RNA
ccagtggcaaagttgtgaagcac

SEQ ID NO: 6380 - RNA, 23 nt, synthetic construct
  source 1..23: mol_type = other RNA
agtggcaaagttgtgaagcactc

SEQ ID NO: 6381 - RNA, 23 nt, synthetic construct
  source 1..23: mol_type = other RNA
aataatgcgtgagtgttggtatg

SEQ ID NO: 6382 - RNA, 23 nt, synthetic construct
  source 1..23: mol_type = other RNA
ccgcctaactgctcttcgtatta

SEQ ID NO: 6383 - RNA, 23 nt, synthetic construct
  source 1..23: mol_type = other RNA
cgcctaactgctcttcgtattaa

SEQ ID NO: 6384 - RNA, 23 nt, synthetic construct
  source 1..23: mol_type = other RNA
gcctaactgctcttcgtattaag

SEQ ID NO: 6385 - RNA, 23 nt, synthetic construct
  source 1..23: mol_type = other RNA
taactgctcttcgtattaagaag

SEQ ID NO: 6386 - RNA, 23 nt, synthetic construct
  source 1..23: mol_type = other RNA
ctgctcttcgtattaagaagact

SEQ ID NO: 6387 - RNA, 23 nt, synthetic construct
  source 1..23: mol_type = other RNA
tgctcttcgtattaagaagacta

SEQ ID NO: 6388 - RNA, 23 nt, synthetic construct
  source 1..23: mol_type = other RNA
actatatctcaactttgtgtcaa

SEQ ID NO: 6389 - RNA, 23 nt, synthetic construct
  source 1..23: mol_type = other RNA
ctatatctcaactttgtgtcaaa

SEQ ID NO: 6390 - RNA, 23 nt, synthetic construct
  source 1..23: mol_type = other RNA
tatatctcaactttgtgtcaaag

SEQ ID NO: 6391 - RNA, 23 nt, synthetic construct
  source 1..23: mol_type = other RNA
atctcaactttgtgtcaaagaag

SEQ ID NO: 6392 - RNA, 23 nt, synthetic construct
  source 1..23: mol_type = other RNA
agactgcaaagcctaatgatgat

SEQ ID NO: 6393 - RNA, 23 nt, synthetic construct
  source 1..23: mol_type = other RNA
gactgcaaagcctaatgatgata

SEQ ID NO: 6394 - RNA, 23 nt, synthetic construct
  source 1..23: mol_type = other RNA
actgcaaagcctaatgatgataa

SEQ ID NO: 6395 - RNA, 23 nt, synthetic construct
  source 1..23: mol_type = other RNA
ctgcaaagcctaatgatgataat

SEQ ID NO: 6396 - RNA, 23 nt, synthetic construct
  source 1..23: mol_type = other RNA
tgcaaagcctaatgatgataatt

SEQ ID NO: 6397 - RNA, 23 nt, synthetic construct
  source 1..23: mol_type = other RNA
gcaaagcctaatgatgataatta

SEQ ID NO: 6398 - RNA, 23 nt, synthetic construct
  source 1..23: mol_type = other RNA
caaagcctaatgatgataattat

SEQ ID NO: 6399 - RNA, 23 nt, synthetic construct
  source 1..23: mol_type = other RNA
aagcctaatgatgataattatgt

SEQ ID NO: 6400 - RNA, 23 nt, synthetic construct
  source 1..23: mol_type = other RNA
agcctaatgatgataattatgtt

SEQ ID NO: 6401 - RNA, 23 nt, synthetic construct
  source 1..23: mol_type = other RNA
gcctaatgatgataattatgtta

SEQ ID NO: 6402 - RNA, 23 nt, synthetic construct
  source 1..23: mol_type = other RNA
gttaaaaagaaatctctcatagc

SEQ ID NO: 6403 - RNA, 23 nt, synthetic construct
  source 1..23: mol_type = other RNA
ttaaaaagaaatctctcatagct

SEQ ID NO: 6404 - RNA, 23 nt, synthetic construct
  source 1..23: mol_type = other RNA
agaaatctctcatagctttcttt

SEQ ID NO: 6405 - RNA, 23 nt, synthetic construct
  source 1..23: mol_type = other RNA
aaatctctcatagctttcttttc

SEQ ID NO: 6406 - RNA, 23 nt, synthetic construct
  source 1..23: mol_type = other RNA
tctcatagctttcttttccattt

SEQ ID NO: 6407 - RNA, 23 nt, synthetic construct
  source 1..23: mol_type = other RNA
ctcatagctttcttttccatttt

SEQ ID NO: 6408 - RNA, 23 nt, synthetic construct
  source 1..23: mol_type = other RNA
ccctttatgtgaatgtttttgcc

SEQ ID NO: 6409 - RNA, 23 nt, synthetic construct
  source 1..23: mol_type = other RNA
ttatgtgaatgtttttgccattt

SEQ ID NO: 6410 - RNA, 23 nt, synthetic construct
  source 1..23: mol_type = other RNA
atgtgaatgtttttgccattttt

SEQ ID NO: 6411 - RNA, 23 nt, synthetic construct
  source 1..23: mol_type = other RNA
gtgaatgtttttgccattttttt

SEQ ID NO: 6412 - RNA, 23 nt, synthetic construct
  source 1..23: mol_type = other RNA
aaagataagacagtacagtattt

SEQ ID NO: 6413 - RNA, 23 nt, synthetic construct
  source 1..23: mol_type = other RNA
gataagacagtacagtatttaag

SEQ ID NO: 6414 - RNA, 23 nt, synthetic construct
  source 1..23: mol_type = other RNA
taagacagtacagtatttaagtg

SEQ ID NO: 6415 - RNA, 23 nt, synthetic construct
  source 1..23: mol_type = other RNA
ggcagcatgaaaagataactcta

SEQ ID NO: 6416 - RNA, 23 nt, synthetic construct
  source 1..23: mol_type = other RNA
acttcatccaatctctatgttat

SEQ ID NO: 6417 - RNA, 23 nt, synthetic construct
  source 1..23: mol_type = other RNA
gaaagcaacacctcaactcatct

SEQ ID NO: 6418 - RNA, 23 nt, synthetic construct
  source 1..23: mol_type = other RNA
agcaacacctcaactcatctttt

SEQ ID NO: 6419 - RNA, 23 nt, synthetic construct
  source 1..23: mol_type = other RNA
aacacctcaactcatctttttat

SEQ ID NO: 6420 - RNA, 23 nt, synthetic construct
  source 1..23: mol_type = other RNA
cacctcaactcatctttttattt

SEQ ID NO: 6421 - RNA, 23 nt, synthetic construct
  source 1..23: mol_type = other RNA
acctcaactcatctttttattta

SEQ ID NO: 6422 - RNA, 23 nt, synthetic construct
  source 1..23: mol_type = other RNA
gctctataaaaatgttatagtca

SEQ ID NO: 6423 - RNA, 23 nt, synthetic construct
  source 1..23: mol_type = other RNA
ttattttacttgaaccaagagca

SEQ ID NO: 6424 - RNA, 23 nt, synthetic construct
  source 1..23: mol_type = other RNA
tattttacttgaaccaagagcac

SEQ ID NO: 6425 - RNA, 23 nt, synthetic construct
  source 1..23: mol_type = other RNA
attttacttgaaccaagagcaca

SEQ ID NO: 6426 - RNA, 23 nt, synthetic construct
  source 1..23: mol_type = other RNA
ttttacttgaaccaagagcacat

SEQ ID NO: 6427 - RNA, 23 nt, synthetic construct
  source 1..23: mol_type = other RNA
tttacttgaaccaagagcacatg

SEQ ID NO: 6428 - RNA, 23 nt, synthetic construct
  source 1..23: mol_type = other RNA
ttacttgaaccaagagcacatga

SEQ ID NO: 6429 - RNA, 23 nt, synthetic construct
  source 1..23: mol_type = other RNA
tacttgaaccaagagcacatgaa

SEQ ID NO: 6430 - RNA, 23 nt, synthetic construct
  source 1..23: mol_type = other RNA
acttgaaccaagagcacatgaat

SEQ ID NO: 6431 - RNA, 23 nt, synthetic construct
  source 1..23: mol_type = other RNA
cttgaaccaagagcacatgaatg

SEQ ID NO: 6432 - RNA, 23 nt, synthetic construct
  source 1..23: mol_type = other RNA
ttgaaccaagagcacatgaatga

SEQ ID NO: 6433 - RNA, 23 nt, synthetic construct
  source 1..23: mol_type = other RNA
tgaaccaagagcacatgaatgaa

SEQ ID NO: 6434 - RNA, 23 nt, synthetic construct
  source 1..23: mol_type = other RNA
gaaccaagagcacatgaatgaac

SEQ ID NO: 6435 - RNA, 23 nt, synthetic construct
  source 1..23: mol_type = other RNA
aaccaagagcacatgaatgaaca

SEQ ID NO: 6436 - RNA, 23 nt, synthetic construct
  source 1..23: mol_type = other RNA
accaagagcacatgaatgaacag

SEQ ID NO: 6437 - RNA, 23 nt, synthetic construct
  source 1..23: mol_type = other RNA
ccaagagcacatgaatgaacagg

SEQ ID NO: 6438 - RNA, 23 nt, synthetic construct
  source 1..23: mol_type = other RNA
caggaaaagatgtaaaaacattt

SEQ ID NO: 6439 - RNA, 23 nt, synthetic construct
  source 1..23: mol_type = other RNA
catttttttctgagatgaaaaca

SEQ ID NO: 6440 - RNA, 23 nt, synthetic construct
  source 1..23: mol_type = other RNA
acatgcaaattagagcatgctat

SEQ ID NO: 6441 - RNA, 23 nt, synthetic construct
  source 1..23: mol_type = other RNA
catgcaaattagagcatgctatc

SEQ ID NO: 6442 - RNA, 23 nt, synthetic construct
  source 1..23: mol_type = other RNA
gcaaattagagcatgctatcttt

SEQ ID NO: 6443 - RNA, 23 nt, synthetic construct
  source 1..23: mol_type = other RNA
ttagagcatgctatctttaggtg

SEQ ID NO: 6444 - RNA, 23 nt, synthetic construct
  source 1..23: mol_type = other RNA
gagcatgctatctttaggtgatg

SEQ ID NO: 6445 - RNA, 23 nt, synthetic construct
  source 1..23: mol_type = other RNA
tatctttaggtgatgcaatctat

SEQ ID NO: 6446 - RNA, 23 nt, synthetic construct
  source 1..23: mol_type = other RNA
taagttagcaggactttttaaaa

SEQ ID NO: 6447 - RNA, 23 nt, synthetic construct
  source 1..23: mol_type = other RNA
aagttagcaggactttttaaaaa

SEQ ID NO: 6448 - RNA, 23 nt, synthetic construct
  source 1..23: mol_type = other RNA
agttagcaggactttttaaaaat

SEQ ID NO: 6449 - RNA, 23 nt, synthetic construct
  source 1..23: mol_type = other RNA
gttagcaggactttttaaaaata

SEQ ID NO: 6450 - RNA, 23 nt, synthetic construct
  source 1..23: mol_type = other RNA
tgctctaaactttaatatatcga

SEQ ID NO: 6451 - RNA, 23 nt, synthetic construct
  source 1..23: mol_type = other RNA
gctctaaactttaatatatcgaa

SEQ ID NO: 6452 - RNA, 23 nt, synthetic construct
  source 1..23: mol_type = other RNA
ctaaactttaatatatcgaacgt

SEQ ID NO: 6453 - RNA, 23 nt, synthetic construct
  source 1..23: mol_type = other RNA
aaactttaatatatcgaacgtga

SEQ ID NO: 6454 - RNA, 23 nt, synthetic construct
  source 1..23: mol_type = other RNA
aactttaatatatcgaacgtgag

SEQ ID NO: 6455 - RNA, 23 nt, synthetic construct
  source 1..23: mol_type = other RNA
actttaatatatcgaacgtgaga

SEQ ID NO: 6456 - RNA, 23 nt, synthetic construct
  source 1..23: mol_type = other RNA
ctttaatatatcgaacgtgagag

SEQ ID NO: 6457 - RNA, 23 nt, synthetic construct
  source 1..23: mol_type = other RNA
tttaatatatcgaacgtgagagt

SEQ ID NO: 6458 - RNA, 23 nt, synthetic construct
  source 1..23: mol_type = other RNA
ttaatatatcgaacgtgagagtg

SEQ ID NO: 6459 - RNA, 23 nt, synthetic construct
  source 1..23: mol_type = other RNA
taatatatcgaacgtgagagtgg

SEQ ID NO: 6460 - RNA, 23 nt, synthetic construct
  source 1..23: mol_type = other RNA
aatatatcgaacgtgagagtgga

SEQ ID NO: 6461 - RNA, 23 nt, synthetic construct
  source 1..23: mol_type = other RNA
ctgttcttcataatccactactg

SEQ ID NO: 6462 - RNA, 23 nt, synthetic construct
  source 1..23: mol_type = other RNA
cctgaaccactaaacttgttcct

SEQ ID NO: 6463 - RNA, 23 nt, synthetic construct
  source 1..23: mol_type = other RNA
ctgaaccactaaacttgttcctt

SEQ ID NO: 6464 - RNA, 23 nt, synthetic construct
  source 1..23: mol_type = other RNA
tgaaccactaaacttgttccttt

SEQ ID NO: 6465 - RNA, 23 nt, synthetic construct
  source 1..23: mol_type = other RNA
gaaccactaaacttgttcctttc

SEQ ID NO: 6466 - RNA, 23 nt, synthetic construct
  source 1..23: mol_type = other RNA
aaccactaaacttgttcctttca

SEQ ID NO: 6467 - RNA, 23 nt, synthetic construct
  source 1..23: mol_type = other RNA
accactaaacttgttcctttcat

SEQ ID NO: 6468 - RNA, 23 nt, synthetic construct
  source 1..23: mol_type = other RNA
ccactaaacttgttcctttcatt

SEQ ID NO: 6469 - RNA, 23 nt, synthetic construct
  source 1..23: mol_type = other RNA
cactaaacttgttcctttcattt

SEQ ID NO: 6470 - RNA, 23 nt, synthetic construct
  source 1..23: mol_type = other RNA
actaaacttgttcctttcattta

SEQ ID NO: 6471 - RNA, 23 nt, synthetic construct
  source 1..23: mol_type = other RNA
ctaaacttgttcctttcatttac

SEQ ID NO: 6472 - RNA, 23 nt, synthetic construct
  source 1..23: mol_type = other RNA
taaacttgttcctttcatttaca

SEQ ID NO: 6473 - RNA, 23 nt, synthetic construct
  source 1..23: mol_type = other RNA
aaacttgttcctttcatttacaa

SEQ ID NO: 6474 - RNA, 23 nt, synthetic construct
  source 1..23: mol_type = other RNA
aacttgttcctttcatttacaaa

SEQ ID NO: 6475 - RNA, 23 nt, synthetic construct
  source 1..23: mol_type = other RNA
acttgttcctttcatttacaaaa

SEQ ID NO: 6476 - RNA, 23 nt, synthetic construct
  source 1..23: mol_type = other RNA
cttgttcctttcatttacaaaag

SEQ ID NO: 6477 - RNA, 23 nt, synthetic construct
  source 1..23: mol_type = other RNA
ttgttcctttcatttacaaaaga

SEQ ID NO: 6478 - RNA, 23 nt, synthetic construct
  source 1..23: mol_type = other RNA
tgttcctttcatttacaaaagag

SEQ ID NO: 6479 - RNA, 23 nt, synthetic construct
  source 1..23: mol_type = other RNA
gttcctttcatttacaaaagaga

SEQ ID NO: 6480 - RNA, 23 nt, synthetic construct
  source 1..23: mol_type = other RNA
ttcctttcatttacaaaagagat

SEQ ID NO: 6481 - RNA, 23 nt, synthetic construct
  source 1..23: mol_type = other RNA
tcctttcatttacaaaagagata

SEQ ID NO: 6482 - RNA, 23 nt, synthetic construct
  source 1..23: mol_type = other RNA
cctttcatttacaaaagagatac

SEQ ID NO: 6483 - RNA, 23 nt, synthetic construct
  source 1..23: mol_type = other RNA
ctttcatttacaaaagagatacc

SEQ ID NO: 6484 - RNA, 23 nt, synthetic construct
  source 1..23: mol_type = other RNA
tttcatttacaaaagagatacct

SEQ ID NO: 6485 - RNA, 23 nt, synthetic construct
  source 1..23: mol_type = other RNA
ttcatttacaaaagagatacctg

SEQ ID NO: 6486 - RNA, 23 nt, synthetic construct
  source 1..23: mol_type = other RNA
tcatttacaaaagagatacctga

SEQ ID NO: 6487 - RNA, 23 nt, synthetic construct
  source 1..23: mol_type = other RNA
catttacaaaagagatacctgac

SEQ ID NO: 6488 - RNA, 23 nt, synthetic construct
  source 1..23: mol_type = other RNA
atttacaaaagagatacctgaca

SEQ ID NO: 6489 - RNA, 23 nt, synthetic construct
  source 1..23: mol_type = other RNA
tttacaaaagagatacctgacat

SEQ ID NO: 6490 - RNA, 23 nt, synthetic construct
  source 1..23: mol_type = other RNA
ttacaaaagagatacctgacatc

SEQ ID NO: 6491 - RNA, 23 nt, synthetic construct
  source 1..23: mol_type = other RNA
tacaaaagagatacctgacatcc

SEQ ID NO: 6492 - RNA, 23 nt, synthetic construct
  source 1..23: mol_type = other RNA
acaaaagagatacctgacatcct

SEQ ID NO: 6493 - RNA, 23 nt, synthetic construct
  source 1..23: mol_type = other RNA
catcctgagacactgagaaatgt

SEQ ID NO: 6494 - RNA, 23 nt, synthetic construct
  source 1..23: mol_type = other RNA
tcctgagacactgagaaatgtcc

SEQ ID NO: 6495 - RNA, 23 nt, synthetic construct
  source 1..23: mol_type = other RNA
ctgagacactgagaaatgtcctg

SEQ ID NO: 6496 - RNA, 23 nt, synthetic construct
  source 1..23: mol_type = other RNA
tgagaaatgtcctgaagtcacac

SEQ ID NO: 6497 - RNA, 23 nt, synthetic construct
  source 1..23: mol_type = other RNA
gtcctgaagtcacacagctaatg

SEQ ID NO: 6498 - RNA, 23 nt, synthetic construct
  source 1..23: mol_type = other RNA
actaggtccaaatcttgtgataa

SEQ ID NO: 6499 - RNA, 23 nt, synthetic construct
  source 1..23: mol_type = other RNA
ctaggtccaaatcttgtgataat

SEQ ID NO: 6500 - RNA, 23 nt, synthetic construct
  source 1..23: mol_type = other RNA
aggtccaaatcttgtgataatga

SEQ ID NO: 6501 - RNA, 23 nt, synthetic construct
  source 1..23: mol_type = other RNA
gtccaaatcttgtgataatgaac

SEQ ID NO: 6502 - RNA, 23 nt, synthetic construct
  source 1..23: mol_type = other RNA
ccaaatcttgtgataatgaacac

SEQ ID NO: 6503 - RNA, 23 nt, synthetic construct
  source 1..23: mol_type = other RNA
cttgtgataatgaacaccgtaag

SEQ ID NO: 6504 - RNA, 23 nt, synthetic construct
  source 1..23: mol_type = other RNA
aaggttagctagcttcctacttt

SEQ ID NO: 6505 - RNA, 23 nt, synthetic construct
  source 1..23: mol_type = other RNA
aggttagctagcttcctactttc

SEQ ID NO: 6506 - RNA, 23 nt, synthetic construct
  source 1..23: mol_type = other RNA
ctagcttcctactttcccttgaa

SEQ ID NO: 6507 - RNA, 23 nt, synthetic construct
  source 1..23: mol_type = other RNA
ttcctactttcccttgaatagtg

SEQ ID NO: 6508 - RNA, 23 nt, synthetic construct
  source 1..23: mol_type = other RNA
tcctactttcccttgaatagtgc

SEQ ID NO: 6509 - RNA, 23 nt, synthetic construct
  source 1..23: mol_type = other RNA
tttcccttgaatagtgcttttct

SEQ ID NO: 6510 - RNA, 23 nt, synthetic construct
  source 1..23: mol_type = other RNA
ttcccttgaatagtgcttttctc

SEQ ID NO: 6511 - RNA, 23 nt, synthetic construct
  source 1..23: mol_type = other RNA
tcccttgaatagtgcttttctcc

SEQ ID NO: 6512 - RNA, 23 nt, synthetic construct
  source 1..23: mol_type = other RNA
cccttgaatagtgcttttctccc

SEQ ID NO: 6513 - RNA, 23 nt, synthetic construct
  source 1..23: mol_type = other RNA
cttgaatagtgcttttctcccta

SEQ ID NO: 6514 - RNA, 23 nt, synthetic construct
  source 1..23: mol_type = other RNA
gtgcttttctccctatgtaatat

SEQ ID NO: 6515 - RNA, 23 nt, synthetic construct
  source 1..23: mol_type = other RNA
tttgtggtttagaaggcatattg

SEQ ID NO: 6516 - RNA, 23 nt, synthetic construct
  source 1..23: mol_type = other RNA
ggtttagaaggcatattgagtta

SEQ ID NO: 6517 - RNA, 23 nt, synthetic construct
  source 1..23: mol_type = other RNA
tttagaaggcatattgagttatt

SEQ ID NO: 6518 - RNA, 23 nt, synthetic construct
  source 1..23: mol_type = other RNA
ttagaaggcatattgagttattt

SEQ ID NO: 6519 - RNA, 23 nt, synthetic construct
  source 1..23: mol_type = other RNA
ggcatattgagttattttgcaga

SEQ ID NO: 6520 - RNA, 23 nt, synthetic construct
  source 1..23: mol_type = other RNA
gttattttgcagaatcataatgg

SEQ ID NO: 6521 - RNA, 23 nt, synthetic construct
  source 1..23: mol_type = other RNA
ttattttgcagaatcataatgga

SEQ ID NO: 6522 - RNA, 23 nt, synthetic construct
  source 1..23: mol_type = other RNA
tattttgcagaatcataatggac

SEQ ID NO: 6523 - RNA, 23 nt, synthetic construct
  source 1..23: mol_type = other RNA
attttgcagaatcataatggacc

SEQ ID NO: 6524 - RNA, 23 nt, synthetic construct
  source 1..23: mol_type = other RNA
ttttgcagaatcataatggaccc

SEQ ID NO: 6525 - RNA, 23 nt, synthetic construct
  source 1..23: mol_type = other RNA
tttgcagaatcataatggacccg

SEQ ID NO: 6526 - RNA, 23 nt, synthetic construct
  source 1..23: mol_type = other RNA
ttgcagaatcataatggacccgc

SEQ ID NO: 6527 - RNA, 23 nt, synthetic construct
  source 1..23: mol_type = other RNA
tgcagaatcataatggacccgca

SEQ ID NO: 6528 - RNA, 23 nt, synthetic construct
  source 1..23: mol_type = other RNA
gcagaatcataatggacccgcac

SEQ ID NO: 6529 - RNA, 23 nt, synthetic construct
  source 1..23: mol_type = other RNA
cagaatcataatggacccgcaca

SEQ ID NO: 6530 - RNA, 23 nt, synthetic construct
  source 1..23: mol_type = other RNA
agaatcataatggacccgcacaa

SEQ ID NO: 6531 - RNA, 23 nt, synthetic construct
  source 1..23: mol_type = other RNA
gaatcataatggacccgcacaaa

SEQ ID NO: 6532 - RNA, 23 nt, synthetic construct
  source 1..23: mol_type = other RNA
aatcataatggacccgcacaaaa

SEQ ID NO: 6533 - RNA, 23 nt, synthetic construct
  source 1..23: mol_type = other RNA
atcataatggacccgcacaaaat

SEQ ID NO: 6534 - RNA, 23 nt, synthetic construct
  source 1..23: mol_type = other RNA
tcataatggacccgcacaaaatc

SEQ ID NO: 6535 - RNA, 23 nt, synthetic construct
  source 1..23: mol_type = other RNA
cataatggacccgcacaaaatct

SEQ ID NO: 6536 - RNA, 23 nt, synthetic construct
  source 1..23: mol_type = other RNA
ataatggacccgcacaaaatctc

SEQ ID NO: 6537 - RNA, 23 nt, synthetic construct
  source 1..23: mol_type = other RNA
taatggacccgcacaaaatctca

SEQ ID NO: 6538 - RNA, 23 nt, synthetic construct
  source 1..23: mol_type = other RNA
aatggacccgcacaaaatctcag

SEQ ID NO: 6539 - RNA, 23 nt, synthetic construct
  source 1..23: mol_type = other RNA
atggacccgcacaaaatctcaga

SEQ ID NO: 6540 - RNA, 23 nt, synthetic construct
  source 1..23: mol_type = other RNA
tggacccgcacaaaatctcagaa

SEQ ID NO: 6541 - RNA, 23 nt, synthetic construct
  source 1..23: mol_type = other RNA
ggacccgcacaaaatctcagaac

SEQ ID NO: 6542 - RNA, 23 nt, synthetic construct
  source 1..23: mol_type = other RNA
gacccgcacaaaatctcagaacc

SEQ ID NO: 6543 - RNA, 23 nt, synthetic construct
  source 1..23: mol_type = other RNA
acccgcacaaaatctcagaacca

SEQ ID NO: 6544 - RNA, 23 nt, synthetic construct
  source 1..23: mol_type = other RNA
cccgcacaaaatctcagaaccat

SEQ ID NO: 6545 - RNA, 23 nt, synthetic construct
  source 1..23: mol_type = other RNA
ccgcacaaaatctcagaaccata

SEQ ID NO: 6546 - RNA, 23 nt, synthetic construct
  source 1..23: mol_type = other RNA
cgcacaaaatctcagaaccatat

SEQ ID NO: 6547 - RNA, 23 nt, synthetic construct
  source 1..23: mol_type = other RNA
gcacaaaatctcagaaccatatc

SEQ ID NO: 6548 - RNA, 23 nt, synthetic construct
  source 1..23: mol_type = other RNA
cacaaaatctcagaaccatatct

SEQ ID NO: 6549 - RNA, 23 nt, synthetic construct
  source 1..23: mol_type = other RNA
acaaaatctcagaaccatatctg

SEQ ID NO: 6550 - RNA, 23 nt, synthetic construct
  source 1..23: mol_type = other RNA
caaaatctcagaaccatatctgt

SEQ ID NO: 6551 - RNA, 23 nt, synthetic construct
  source 1..23: mol_type = other RNA
aaaatctcagaaccatatctgtt

SEQ ID NO: 6552 - RNA, 23 nt, synthetic construct
  source 1..23: mol_type = other RNA
aaatctcagaaccatatctgttg

SEQ ID NO: 6553 - RNA, 23 nt, synthetic construct
  source 1..23: mol_type = other RNA
aatctcagaaccatatctgttga

SEQ ID NO: 6554 - RNA, 23 nt, synthetic construct
  source 1..23: mol_type = other RNA
atctcagaaccatatctgttgac

SEQ ID NO: 6555 - RNA, 23 nt, synthetic construct
  source 1..23: mol_type = other RNA
tctcagaaccatatctgttgaca

SEQ ID NO: 6556 - RNA, 23 nt, synthetic construct
  source 1..23: mol_type = other RNA
ctcagaaccatatctgttgacat

SEQ ID NO: 6557 - RNA, 23 nt, synthetic construct
  source 1..23: mol_type = other RNA
tcagaaccatatctgttgacatt

SEQ ID NO: 6558 - RNA, 23 nt, synthetic construct
  source 1..23: mol_type = other RNA
cagaaccatatctgttgacattt

SEQ ID NO: 6559 - RNA, 23 nt, synthetic construct
  source 1..23: mol_type = other RNA
agaaccatatctgttgacatttt

SEQ ID NO: 6560 - RNA, 23 nt, synthetic construct
  source 1..23: mol_type = other RNA
gaaccatatctgttgacattttt

SEQ ID NO: 6561 - RNA, 23 nt, synthetic construct
  source 1..23: mol_type = other RNA
aaccatatctgttgacatttttt

SEQ ID NO: 6562 - RNA, 23 nt, synthetic construct
  source 1..23: mol_type = other RNA
accatatctgttgacattttttc

SEQ ID NO: 6563 - RNA, 23 nt, synthetic construct
  source 1..23: mol_type = other RNA
ccatatctgttgacattttttct

SEQ ID NO: 6564 - RNA, 23 nt, synthetic construct
  source 1..23: mol_type = other RNA
catatctgttgacattttttctc

SEQ ID NO: 6565 - RNA, 23 nt, synthetic construct
  source 1..23: mol_type = other RNA
atatctgttgacattttttctca

SEQ ID NO: 6566 - RNA, 23 nt, synthetic construct
  source 1..23: mol_type = other RNA
tatctgttgacattttttctcat

SEQ ID NO: 6567 - RNA, 23 nt, synthetic construct
  source 1..23: mol_type = other RNA
atctgttgacattttttctcata

SEQ ID NO: 6568 - RNA, 23 nt, synthetic construct
  source 1..23: mol_type = other RNA
tctgttgacattttttctcatag

SEQ ID NO: 6569 - RNA, 23 nt, synthetic construct
  source 1..23: mol_type = other RNA
ctgttgacattttttctcataga

SEQ ID NO: 6570 - RNA, 23 nt, synthetic construct
  source 1..23: mol_type = other RNA
tgttgacattttttctcatagaa

SEQ ID NO: 6571 - RNA, 23 nt, synthetic construct
  source 1..23: mol_type = other RNA
gttgacattttttctcatagaaa

SEQ ID NO: 6572 - RNA, 23 nt, synthetic construct
  source 1..23: mol_type = other RNA
tttctcatagaaatatcatggtt

SEQ ID NO: 6573 - RNA, 23 nt, synthetic construct
  source 1..23: mol_type = other RNA
ttctcatagaaatatcatggtta

SEQ ID NO: 6574 - RNA, 23 nt, synthetic construct
  source 1..23: mol_type = other RNA
tctcatagaaatatcatggttac

SEQ ID NO: 6575 - RNA, 23 nt, synthetic construct
  source 1..23: mol_type = other RNA
cccatttgttaatgagcattaat

SEQ ID NO: 6576 - RNA, 23 nt, synthetic construct
  source 1..23: mol_type = other RNA
catttgttaatgagcattaatgt

SEQ ID NO: 6577 - RNA, 23 nt, synthetic construct
  source 1..23: mol_type = other RNA
gttaatgagcattaatgttttct

SEQ ID NO: 6578 - RNA, 23 nt, synthetic construct
  source 1..23: mol_type = other RNA
taatgagcattaatgttttctga

SEQ ID NO: 6579 - RNA, 23 nt, synthetic construct
  source 1..23: mol_type = other RNA
aatgagcattaatgttttctgaa

SEQ ID NO: 6580 - RNA, 23 nt, synthetic construct
  source 1..23: mol_type = other RNA
atgagcattaatgttttctgaac

SEQ ID NO: 6581 - RNA, 23 nt, synthetic construct
  source 1..23: mol_type = other RNA
tgagcattaatgttttctgaaca

SEQ ID NO: 6582 - RNA, 23 nt, synthetic construct
  source 1..23: mol_type = other RNA
gagcattaatgttttctgaacac

SEQ ID NO: 6583 - RNA, 23 nt, synthetic construct
  source 1..23: mol_type = other RNA
agcattaatgttttctgaacact

SEQ ID NO: 6584 - RNA, 23 nt, synthetic construct
  source 1..23: mol_type = other RNA
gcattaatgttttctgaacactt

SEQ ID NO: 6585 - RNA, 23 nt, synthetic construct
  source 1..23: mol_type = other RNA
cattaatgttttctgaacacttc

SEQ ID NO: 6586 - RNA, 23 nt, synthetic construct
  source 1..23: mol_type = other RNA
tttctgaacacttccaaagatta

SEQ ID NO: 6587 - RNA, 23 nt, synthetic construct
  source 1..23: mol_type = other RNA
ttctgaacacttccaaagattaa

SEQ ID NO: 6588 - RNA, 23 nt, synthetic construct
  source 1..23: mol_type = other RNA
tctgaacacttccaaagattaat

SEQ ID NO: 6589 - RNA, 23 nt, synthetic construct
  source 1..23: mol_type = other RNA
ctgaacacttccaaagattaatc

SEQ ID NO: 6590 - RNA, 23 nt, synthetic construct
  source 1..23: mol_type = other RNA
tgaacacttccaaagattaatca

SEQ ID NO: 6591 - RNA, 23 nt, synthetic construct
  source 1..23: mol_type = other RNA
gaacacttccaaagattaatcaa

SEQ ID NO: 6592 - RNA, 23 nt, synthetic construct
  source 1..23: mol_type = other RNA
aacacttccaaagattaatcaaa

SEQ ID NO: 6593 - RNA, 23 nt, synthetic construct
  source 1..23: mol_type = other RNA
acacttccaaagattaatcaaac

SEQ ID NO: 6594 - RNA, 23 nt, synthetic construct
  source 1..23: mol_type = other RNA
cacttccaaagattaatcaaaca

SEQ ID NO: 6595 - RNA, 23 nt, synthetic construct
  source 1..23: mol_type = other RNA
acttccaaagattaatcaaacat

SEQ ID NO: 6596 - RNA, 23 nt, synthetic construct
  source 1..23: mol_type = other RNA
cttccaaagattaatcaaacata

SEQ ID NO: 6597 - RNA, 23 nt, synthetic construct
  source 1..23: mol_type = other RNA
atattcattgtctgaaaatgtct

SEQ ID NO: 6598 - RNA, 23 nt, synthetic construct
  source 1..23: mol_type = other RNA
ttcattgtctgaaaatgtcttta

SEQ ID NO: 6599 - RNA, 23 nt, synthetic construct
  source 1..23: mol_type = other RNA
tcattgtctgaaaatgtctttaa

SEQ ID NO: 6600 - RNA, 23 nt, synthetic construct
  source 1..23: mol_type = other RNA
cattgtctgaaaatgtctttaag

SEQ ID NO: 6601 - RNA, 23 nt, synthetic construct
  source 1..23: mol_type = other RNA
ttgtctgaaaatgtctttaagat

SEQ ID NO: 6602 - RNA, 23 nt, synthetic construct
  source 1..23: mol_type = other RNA
gtctgaaaatgtctttaagatac

SEQ ID NO: 6603 - RNA, 23 nt, synthetic construct
  source 1..23: mol_type = other RNA
agaggtccctatttcctttgtac

SEQ ID NO: 6604 - RNA, 23 nt, synthetic construct
  source 1..23: mol_type = other RNA
gaggtccctatttcctttgtaca

SEQ ID NO: 6605 - RNA, 23 nt, synthetic construct
  source 1..23: mol_type = other RNA
aggtccctatttcctttgtacat

SEQ ID NO: 6606 - RNA, 23 nt, synthetic construct
  source 1..23: mol_type = other RNA
ggtccctatttcctttgtacata

SEQ ID NO: 6607 - RNA, 23 nt, synthetic construct
  source 1..23: mol_type = other RNA
gtccctatttcctttgtacatac

SEQ ID NO: 6608 - RNA, 23 nt, synthetic construct
  source 1..23: mol_type = other RNA
tccctatttcctttgtacataca

SEQ ID NO: 6609 - RNA, 23 nt, synthetic construct
  source 1..23: mol_type = other RNA
ccctatttcctttgtacatacac

SEQ ID NO: 6610 - RNA, 23 nt, synthetic construct
  source 1..23: mol_type = other RNA
cctatttcctttgtacatacaca

SEQ ID NO: 6611 - RNA, 23 nt, synthetic construct
  source 1..23: mol_type = other RNA
cacacttagaaagaaaagacaga

SEQ ID NO: 6612 - RNA, 23 nt, synthetic construct
  source 1..23: mol_type = other RNA
acacttagaaagaaaagacagaa

SEQ ID NO: 6613 - RNA, 23 nt, synthetic construct
  source 1..23: mol_type = other RNA
cacttagaaagaaaagacagaaa

SEQ ID NO: 6614 - RNA, 23 nt, synthetic construct
  source 1..23: mol_type = other RNA
acttagaaagaaaagacagaaaa

SEQ ID NO: 6615 - RNA, 23 nt, synthetic construct
  source 1..23: mol_type = other RNA
cttagaaagaaaagacagaaaag

SEQ ID NO: 6616 - RNA, 23 nt, synthetic construct
  source 1..23: mol_type = other RNA
aagaggaaggaaggaaatatttt

SEQ ID NO: 6617 - RNA, 23 nt, synthetic construct
  source 1..23: mol_type = other RNA
agaggaaggaaggaaatattttg

SEQ ID NO: 6618 - RNA, 23 nt, synthetic construct
  source 1..23: mol_type = other RNA
aaggaaggaaatattttgagaat

SEQ ID NO: 6619 - RNA, 23 nt, synthetic construct
  source 1..23: mol_type = other RNA
gagaagaattaagaaaactcttc

SEQ ID NO: 6620 - RNA, 23 nt, synthetic construct
  source 1..23: mol_type = other RNA
gaaaactcttcaatgaagtgtta

SEQ ID NO: 6621 - RNA, 23 nt, synthetic construct
  source 1..23: mol_type = other RNA
ctcttcaatgaagtgttaacaac

SEQ ID NO: 6622 - RNA, 23 nt, synthetic construct
  source 1..23: mol_type = other RNA
tcaatgaagtgttaacaaccaaa

SEQ ID NO: 6623 - RNA, 23 nt, synthetic construct
  source 1..23: mol_type = other RNA
caatgaagtgttaacaaccaaac

SEQ ID NO: 6624 - RNA, 23 nt, synthetic construct
  source 1..23: mol_type = other RNA
cctacagacggtatcagaaacag

SEQ ID NO: 6625 - RNA, 23 nt, synthetic construct
  source 1..23: mol_type = other RNA
gacggtatcagaaacagcaaata

SEQ ID NO: 6626 - RNA, 23 nt, synthetic construct
  source 1..23: mol_type = other RNA
gtatcagaaacagcaaatagata

SEQ ID NO: 6627 - RNA, 23 nt, synthetic construct
  source 1..23: mol_type = other RNA
atcagaaacagcaaatagatatt

SEQ ID NO: 6628 - RNA, 23 nt, synthetic construct
  source 1..23: mol_type = other RNA
tcagaaacagcaaatagatattc

SEQ ID NO: 6629 - RNA, 23 nt, synthetic construct
  source 1..23: mol_type = other RNA
cagaaacagcaaatagatattcc

SEQ ID NO: 6630 - RNA, 23 nt, synthetic construct
  source 1..23: mol_type = other RNA
gaaacagcaaatagatattcctc

SEQ ID NO: 6631 - RNA, 23 nt, synthetic construct
  source 1..23: mol_type = other RNA
aacagcaaatagatattcctcta

SEQ ID NO: 6632 - RNA, 23 nt, synthetic construct
  source 1..23: mol_type = other RNA
acagcaaatagatattcctctac

SEQ ID NO: 6633 - RNA, 23 nt, synthetic construct
  source 1..23: mol_type = other RNA
agcaaatagatattcctctaccc

SEQ ID NO: 6634 - RNA, 23 nt, synthetic construct
  source 1..23: mol_type = other RNA
agtgagtacagaagaatgctcat

SEQ ID NO: 6635 - RNA, 23 nt, synthetic construct
  source 1..23: mol_type = other RNA
gagtacagaagaatgctcatgat

SEQ ID NO: 6636 - RNA, 23 nt, synthetic construct
  source 1..23: mol_type = other RNA
agtacagaagaatgctcatgata

SEQ ID NO: 6637 - RNA, 23 nt, synthetic construct
  source 1..23: mol_type = other RNA
gtacagaagaatgctcatgatag

SEQ ID NO: 6638 - RNA, 23 nt, synthetic construct
  source 1..23: mol_type = other RNA
agaagaatgctcatgatagtttt

SEQ ID NO: 6639 - RNA, 23 nt, synthetic construct
  source 1..23: mol_type = other RNA
gaagaatgctcatgatagttttg

SEQ ID NO: 6640 - RNA, 23 nt, synthetic construct
  source 1..23: mol_type = other RNA
agaatgctcatgatagttttgcc

SEQ ID NO: 6641 - RNA, 23 nt, synthetic construct
  source 1..23: mol_type = other RNA
atgctcatgatagttttgccttc

SEQ ID NO: 6642 - RNA, 23 nt, synthetic construct
  source 1..23: mol_type = other RNA
gctcatgatagttttgccttcat

SEQ ID NO: 6643 - RNA, 23 nt, synthetic construct
  source 1..23: mol_type = other RNA
tcatgatagttttgccttcattc

SEQ ID NO: 6644 - RNA, 23 nt, synthetic construct
  source 1..23: mol_type = other RNA
catgatagttttgccttcattct

SEQ ID NO: 6645 - RNA, 23 nt, synthetic construct
  source 1..23: mol_type = other RNA
tgatagttttgccttcattctac

SEQ ID NO: 6646 - RNA, 23 nt, synthetic construct
  source 1..23: mol_type = other RNA
tgtggacacagagtaatgaatat

SEQ ID NO: 6647 - RNA, 23 nt, synthetic construct
  source 1..23: mol_type = other RNA
ggacacagagtaatgaatattta

SEQ ID NO: 6648 - RNA, 23 nt, synthetic construct
  source 1..23: mol_type = other RNA
agagtaatgaatatttaatggga

SEQ ID NO: 6649 - RNA, 23 nt, synthetic construct
  source 1..23: mol_type = other RNA
ttaatgggacattaaatatgccc

SEQ ID NO: 6650 - RNA, 23 nt, synthetic construct
  source 1..23: mol_type = other RNA
taatgggacattaaatatgccct

SEQ ID NO: 6651 - RNA, 23 nt, synthetic construct
  source 1..23: mol_type = other RNA
aatgggacattaaatatgccctt

SEQ ID NO: 6652 - RNA, 23 nt, synthetic construct
  source 1..23: mol_type = other RNA
atgggacattaaatatgcccttc

SEQ ID NO: 6653 - RNA, 23 nt, synthetic construct
  source 1..23: mol_type = other RNA
tgggacattaaatatgcccttca

SEQ ID NO: 6654 - RNA, 23 nt, synthetic construct
  source 1..23: mol_type = other RNA
gggacattaaatatgcccttcaa

SEQ ID NO: 6655 - RNA, 23 nt, synthetic construct
  source 1..23: mol_type = other RNA
ggacattaaatatgcccttcaaa

SEQ ID NO: 6656 - RNA, 23 nt, synthetic construct
  source 1..23: mol_type = other RNA
gacattaaatatgcccttcaaat

SEQ ID NO: 6657 - RNA, 23 nt, synthetic construct
  source 1..23: mol_type = other RNA
acattaaatatgcccttcaaatc

SEQ ID NO: 6658 - RNA, 23 nt, synthetic construct
  source 1..23: mol_type = other RNA
cattaaatatgcccttcaaatct

SEQ ID NO: 6659 - RNA, 23 nt, synthetic construct
  source 1..23: mol_type = other RNA
attaaatatgcccttcaaatcta

SEQ ID NO: 6660 - RNA, 23 nt, synthetic construct
  source 1..23: mol_type = other RNA
atgcccttcaaatctataatttt

SEQ ID NO: 6661 - RNA, 23 nt, synthetic construct
  source 1..23: mol_type = other RNA
tgcccttcaaatctataatttta

SEQ ID NO: 6662 - RNA, 23 nt, synthetic construct
  source 1..23: mol_type = other RNA
taattttactttggtaaacgaga

SEQ ID NO: 6663 - RNA, 23 nt, synthetic construct
  source 1..23: mol_type = other RNA
aattttactttggtaaacgagat

SEQ ID NO: 6664 - RNA, 23 nt, synthetic construct
  source 1..23: mol_type = other RNA
attttactttggtaaacgagatt

SEQ ID NO: 6665 - RNA, 23 nt, synthetic construct
  source 1..23: mol_type = other RNA
ttttactttggtaaacgagattt

SEQ ID NO: 6666 - RNA, 23 nt, synthetic construct
  source 1..23: mol_type = other RNA
tttactttggtaaacgagattta

SEQ ID NO: 6667 - RNA, 23 nt, synthetic construct
  source 1..23: mol_type = other RNA
tactttggtaaacgagatttaac

SEQ ID NO: 6668 - RNA, 23 nt, synthetic construct
  source 1..23: mol_type = other RNA
ctttggtaaacgagatttaacat

SEQ ID NO: 6669 - RNA, 23 nt, synthetic construct
  source 1..23: mol_type = other RNA
ttggtaaacgagatttaacatga

SEQ ID NO: 6670 - RNA, 23 nt, synthetic construct
  source 1..23: mol_type = other RNA
acgagatttaacatgatgtcttt

SEQ ID NO: 6671 - RNA, 23 nt, synthetic construct
  source 1..23: mol_type = other RNA
atgtcttttatgctcctaaaaca

SEQ ID NO: 6672 - RNA, 23 nt, synthetic construct
  source 1..23: mol_type = other RNA
catcttttttcaaactccattcc

SEQ ID NO: 6673 - RNA, 23 nt, synthetic construct
  source 1..23: mol_type = other RNA
atcttttttcaaactccattcct

SEQ ID NO: 6674 - RNA, 23 nt, synthetic construct
  source 1..23: mol_type = other RNA
tcttttttcaaactccattcctt

SEQ ID NO: 6675 - RNA, 23 nt, synthetic construct
  source 1..23: mol_type = other RNA
ttttttcaaactccattccttag

SEQ ID NO: 6676 - RNA, 23 nt, synthetic construct
  source 1..23: mol_type = other RNA
tttttcaaactccattccttaga

SEQ ID NO: 6677 - RNA, 23 nt, synthetic construct
  source 1..23: mol_type = other RNA
tttcaaactccattccttagaac

SEQ ID NO: 6678 - RNA, 23 nt, synthetic construct
  source 1..23: mol_type = other RNA
ttcaaactccattccttagaaca

SEQ ID NO: 6679 - RNA, 23 nt, synthetic construct
  source 1..23: mol_type = other RNA
tcaaactccattccttagaacat

SEQ ID NO: 6680 - RNA, 23 nt, synthetic construct
  source 1..23: mol_type = other RNA
caaactccattccttagaacatt

SEQ ID NO: 6681 - RNA, 23 nt, synthetic construct
  source 1..23: mol_type = other RNA
aaactccattccttagaacattc

SEQ ID NO: 6682 - RNA, 23 nt, synthetic construct
  source 1..23: mol_type = other RNA
aactccattccttagaacattct

SEQ ID NO: 6683 - RNA, 23 nt, synthetic construct
  source 1..23: mol_type = other RNA
actccattccttagaacattctt

SEQ ID NO: 6684 - RNA, 23 nt, synthetic construct
  source 1..23: mol_type = other RNA
ctccattccttagaacattcttc

SEQ ID NO: 6685 - RNA, 23 nt, synthetic construct
  source 1..23: mol_type = other RNA
tccattccttagaacattcttct

SEQ ID NO: 6686 - RNA, 23 nt, synthetic construct
  source 1..23: mol_type = other RNA
ccattccttagaacattcttcta

SEQ ID NO: 6687 - RNA, 23 nt, synthetic construct
  source 1..23: mol_type = other RNA
cattccttagaacattcttctac

SEQ ID NO: 6688 - RNA, 23 nt, synthetic construct
  source 1..23: mol_type = other RNA
attccttagaacattcttctact

SEQ ID NO: 6689 - RNA, 23 nt, synthetic construct
  source 1..23: mol_type = other RNA
ttccttagaacattcttctactg

SEQ ID NO: 6690 - RNA, 23 nt, synthetic construct
  source 1..23: mol_type = other RNA
tccttagaacattcttctactga

SEQ ID NO: 6691 - RNA, 23 nt, synthetic construct
  source 1..23: mol_type = other RNA
ccttagaacattcttctactgag

SEQ ID NO: 6692 - RNA, 23 nt, synthetic construct
  source 1..23: mol_type = other RNA
cttagaacattcttctactgaga

SEQ ID NO: 6693 - RNA, 23 nt, synthetic construct
  source 1..23: mol_type = other RNA
ttagaacattcttctactgagat

SEQ ID NO: 6694 - RNA, 23 nt, synthetic construct
  source 1..23: mol_type = other RNA
tagaacattcttctactgagatg

SEQ ID NO: 6695 - RNA, 23 nt, synthetic construct
  source 1..23: mol_type = other RNA
aacattcttctactgagatgatc

SEQ ID NO: 6696 - RNA, 23 nt, synthetic construct
  source 1..23: mol_type = other RNA
acattcttctactgagatgatcc

SEQ ID NO: 6697 - RNA, 23 nt, synthetic construct
  source 1..23: mol_type = other RNA
cattcttctactgagatgatcca

SEQ ID NO: 6698 - RNA, 23 nt, synthetic construct
  source 1..23: mol_type = other RNA
attcttctactgagatgatccaa

SEQ ID NO: 6699 - RNA, 23 nt, synthetic construct
  source 1..23: mol_type = other RNA
ttcttctactgagatgatccaag

SEQ ID NO: 6700 - RNA, 23 nt, synthetic construct
  source 1..23: mol_type = other RNA
tcttctactgagatgatccaaga

SEQ ID NO: 6701 - RNA, 23 nt, synthetic construct
  source 1..23: mol_type = other RNA
cttctactgagatgatccaagac

SEQ ID NO: 6702 - RNA, 23 nt, synthetic construct
  source 1..23: mol_type = other RNA
ttctactgagatgatccaagacc

SEQ ID NO: 6703 - RNA, 23 nt, synthetic construct
  source 1..23: mol_type = other RNA
tctactgagatgatccaagacca

SEQ ID NO: 6704 - RNA, 23 nt, synthetic construct
  source 1..23: mol_type = other RNA
ctactgagatgatccaagaccaa

SEQ ID NO: 6705 - RNA, 23 nt, synthetic construct
  source 1..23: mol_type = other RNA
tactgagatgatccaagaccaaa

SEQ ID NO: 6706 - RNA, 23 nt, synthetic construct
  source 1..23: mol_type = other RNA
atccaagaccaaaagtgttcttt

SEQ ID NO: 6707 - RNA, 23 nt, synthetic construct
  source 1..23: mol_type = other RNA
tccaagaccaaaagtgttctttg

SEQ ID NO: 6708 - RNA, 23 nt, synthetic construct
  source 1..23: mol_type = other RNA
ccaagaccaaaagtgttctttgg

SEQ ID NO: 6709 - RNA, 23 nt, synthetic construct
  source 1..23: mol_type = other RNA
caagaccaaaagtgttctttggt

SEQ ID NO: 6710 - RNA, 23 nt, synthetic construct
  source 1..23: mol_type = other RNA
aagaccaaaagtgttctttggta

SEQ ID NO: 6711 - RNA, 23 nt, synthetic construct
  source 1..23: mol_type = other RNA
agaccaaaagtgttctttggtac

SEQ ID NO: 6712 - RNA, 23 nt, synthetic construct
  source 1..23: mol_type = other RNA
gaccaaaagtgttctttggtact

SEQ ID NO: 6713 - RNA, 23 nt, synthetic construct
  source 1..23: mol_type = other RNA
accaaaagtgttctttggtactt

SEQ ID NO: 6714 - RNA, 23 nt, synthetic construct
  source 1..23: mol_type = other RNA
ccaaaagtgttctttggtacttg

SEQ ID NO: 6715 - RNA, 23 nt, synthetic construct
  source 1..23: mol_type = other RNA
caaaagtgttctttggtacttgc

SEQ ID NO: 6716 - RNA, 23 nt, synthetic construct
  source 1..23: mol_type = other RNA
aaaagtgttctttggtacttgct

SEQ ID NO: 6717 - RNA, 23 nt, synthetic construct
  source 1..23: mol_type = other RNA
gttctttggtacttgcttataaa

SEQ ID NO: 6718 - RNA, 23 nt, synthetic construct
  source 1..23: mol_type = other RNA
ttctttggtacttgcttataaag

SEQ ID NO: 6719 - RNA, 23 nt, synthetic construct
  source 1..23: mol_type = other RNA
ctttggtacttgcttataaagtg

SEQ ID NO: 6720 - RNA, 23 nt, synthetic construct
  source 1..23: mol_type = other RNA
tttggtacttgcttataaagtga

SEQ ID NO: 6721 - RNA, 23 nt, synthetic construct
  source 1..23: mol_type = other RNA
ggtacttgcttataaagtgatag

SEQ ID NO: 6722 - RNA, 23 nt, synthetic construct
  source 1..23: mol_type = other RNA
acttgcttataaagtgatagtac

SEQ ID NO: 6723 - RNA, 23 nt, synthetic construct
  source 1..23: mol_type = other RNA
tgcttataaagtgatagtacatg

SEQ ID NO: 6724 - RNA, 23 nt, synthetic construct
  source 1..23: mol_type = other RNA
gcttataaagtgatagtacatgt

SEQ ID NO: 6725 - RNA, 23 nt, synthetic construct
  source 1..23: mol_type = other RNA
cttataaagtgatagtacatgtt

SEQ ID NO: 6726 - RNA, 23 nt, synthetic construct
  source 1..23: mol_type = other RNA
ataaagtgatagtacatgttagc

SEQ ID NO: 6727 - RNA, 23 nt, synthetic construct
  source 1..23: mol_type = other RNA
taaagtgatagtacatgttagca

SEQ ID NO: 6728 - RNA, 23 nt, synthetic construct
  source 1..23: mol_type = other RNA
aaagtgatagtacatgttagcat

SEQ ID NO: 6729 - RNA, 23 nt, synthetic construct
  source 1..23: mol_type = other RNA
aagtgatagtacatgttagcata

SEQ ID NO: 6730 - RNA, 23 nt, synthetic construct
  source 1..23: mol_type = other RNA
agtgatagtacatgttagcatat

SEQ ID NO: 6731 - RNA, 23 nt, synthetic construct
  source 1..23: mol_type = other RNA
gtgatagtacatgttagcatata

SEQ ID NO: 6732 - RNA, 23 nt, synthetic construct
  source 1..23: mol_type = other RNA
tgatagtacatgttagcatataa

SEQ ID NO: 6733 - RNA, 23 nt, synthetic construct
  source 1..23: mol_type = other RNA
gatagtacatgttagcatataat

SEQ ID NO: 6734 - RNA, 23 nt, synthetic construct
  source 1..23: mol_type = other RNA
tagtacatgttagcatataatgt

SEQ ID NO: 6735 - RNA, 23 nt, synthetic construct
  source 1..23: mol_type = other RNA
agtacatgttagcatataatgta

SEQ ID NO: 6736 - RNA, 23 nt, synthetic construct
  source 1..23: mol_type = other RNA
gtacatgttagcatataatgtat

SEQ ID NO: 6737 - RNA, 23 nt, synthetic construct
  source 1..23: mol_type = other RNA
gcatataatgtattttgaagagt

SEQ ID NO: 6738 - RNA, 23 nt, synthetic construct
  source 1..23: mol_type = other RNA
gtattttgaagagtgaagtaaat

SEQ ID NO: 6739 - RNA, 23 nt, synthetic construct
  source 1..23: mol_type = other RNA
attttgaagagtgaagtaaatgc

SEQ ID NO: 6740 - RNA, 23 nt, synthetic construct
  source 1..23: mol_type = other RNA
ttttgaagagtgaagtaaatgct

SEQ ID NO: 6741 - RNA, 23 nt, synthetic construct
  source 1..23: mol_type = other RNA
tttgaagagtgaagtaaatgcta

SEQ ID NO: 6742 - RNA, 23 nt, synthetic construct
  source 1..23: mol_type = other RNA
ttgaagagtgaagtaaatgctat

SEQ ID NO: 6743 - RNA, 23 nt, synthetic construct
  source 1..23: mol_type = other RNA
tgaagagtgaagtaaatgctatt

SEQ ID NO: 6744 - RNA, 23 nt, synthetic construct
  source 1..23: mol_type = other RNA
gaagagtgaagtaaatgctattg

SEQ ID NO: 6745 - RNA, 23 nt, synthetic construct
  source 1..23: mol_type = other RNA
aagagtgaagtaaatgctattga

SEQ ID NO: 6746 - RNA, 23 nt, synthetic construct
  source 1..23: mol_type = other RNA
agagtgaagtaaatgctattgat

SEQ ID NO: 6747 - RNA, 23 nt, synthetic construct
  source 1..23: mol_type = other RNA
gagtgaagtaaatgctattgata

SEQ ID NO: 6748 - RNA, 23 nt, synthetic construct
  source 1..23: mol_type = other RNA
agtgaagtaaatgctattgataa

SEQ ID NO: 6749 - RNA, 23 nt, synthetic construct
  source 1..23: mol_type = other RNA
gtgaagtaaatgctattgataac

SEQ ID NO: 6750 - RNA, 23 nt, synthetic construct
  source 1..23: mol_type = other RNA
actaataacagtaaagaaatgct

SEQ ID NO: 6751 - RNA, 23 nt, synthetic construct
  source 1..23: mol_type = other RNA
ctaataacagtaaagaaatgcta

SEQ ID NO: 6752 - RNA, 23 nt, synthetic construct
  source 1..23: mol_type = other RNA
aataacagtaaagaaatgctact

SEQ ID NO: 6753 - RNA, 23 nt, synthetic construct
  source 1..23: mol_type = other RNA
ataacagtaaagaaatgctactt

SEQ ID NO: 6754 - RNA, 23 nt, synthetic construct
  source 1..23: mol_type = other RNA
taacagtaaagaaatgctacttg

SEQ ID NO: 6755 - RNA, 23 nt, synthetic construct
  source 1..23: mol_type = other RNA
aacagtaaagaaatgctacttga

SEQ ID NO: 6756 - RNA, 23 nt, synthetic construct
  source 1..23: mol_type = other RNA
acagtaaagaaatgctacttgat

SEQ ID NO: 6757 - RNA, 23 nt, synthetic construct
  source 1..23: mol_type = other RNA
cagtaaagaaatgctacttgatt

SEQ ID NO: 6758 - RNA, 23 nt, synthetic construct
  source 1..23: mol_type = other RNA
agtaaagaaatgctacttgattt

SEQ ID NO: 6759 - RNA, 23 nt, synthetic construct
  source 1..23: mol_type = other RNA
gtaaagaaatgctacttgatttt

SEQ ID NO: 6760 - RNA, 23 nt, synthetic construct
  source 1..23: mol_type = other RNA
taaactggattgctcagattacc

SEQ ID NO: 6761 - RNA, 23 nt, synthetic construct
  source 1..23: mol_type = other RNA
ggattgctcagattacctgatcg

SEQ ID NO: 6762 - RNA, 23 nt, synthetic construct
  source 1..23: mol_type = other RNA
ctcagattacctgatcgtggtgg

SEQ ID NO: 6763 - RNA, 23 nt, synthetic construct
  source 1..23: mol_type = other RNA
tcagattacctgatcgtggtgga

SEQ ID NO: 6764 - RNA, 23 nt, synthetic construct
  source 1..23: mol_type = other RNA
cagattacctgatcgtggtggaa

SEQ ID NO: 6765 - RNA, 23 nt, synthetic construct
  source 1..23: mol_type = other RNA
agattacctgatcgtggtggaac

SEQ ID NO: 6766 - RNA, 23 nt, synthetic construct
  source 1..23: mol_type = other RNA
gattacctgatcgtggtggaacc

SEQ ID NO: 6767 - RNA, 23 nt, synthetic construct
  source 1..23: mol_type = other RNA
attacctgatcgtggtggaaccc

SEQ ID NO: 6768 - RNA, 23 nt, synthetic construct
  source 1..23: mol_type = other RNA
ttacctgatcgtggtggaaccct

SEQ ID NO: 6769 - RNA, 23 nt, synthetic construct
  source 1..23: mol_type = other RNA
tacctgatcgtggtggaaccctt

SEQ ID NO: 6770 - RNA, 23 nt, synthetic construct
  source 1..23: mol_type = other RNA
actatcccatatttaactgttct

SEQ ID NO: 6771 - RNA, 23 nt, synthetic construct
  source 1..23: mol_type = other RNA
ctatcccatatttaactgttcta

SEQ ID NO: 6772 - RNA, 23 nt, synthetic construct
  source 1..23: mol_type = other RNA
tatcccatatttaactgttctat

SEQ ID NO: 6773 - RNA, 23 nt, synthetic construct
  source 1..23: mol_type = other RNA
atcccatatttaactgttctata

SEQ ID NO: 6774 - RNA, 23 nt, synthetic construct
  source 1..23: mol_type = other RNA
tcccatatttaactgttctataa

SEQ ID NO: 6775 - RNA, 23 nt, synthetic construct
  source 1..23: mol_type = other RNA
cccatatttaactgttctataaa

SEQ ID NO: 6776 - RNA, 23 nt, synthetic construct
  source 1..23: mol_type = other RNA
ttaactgttctataaagcaaagc

SEQ ID NO: 6777 - RNA, 23 nt, synthetic construct
  source 1..23: mol_type = other RNA
taactgttctataaagcaaagca

SEQ ID NO: 6778 - RNA, 23 nt, synthetic construct
  source 1..23: mol_type = other RNA
aactgttctataaagcaaagcac

SEQ ID NO: 6779 - RNA, 23 nt, synthetic construct
  source 1..23: mol_type = other RNA
actgttctataaagcaaagcaca

SEQ ID NO: 6780 - RNA, 23 nt, synthetic construct
  source 1..23: mol_type = other RNA
ctgttctataaagcaaagcacag

SEQ ID NO: 6781 - RNA, 23 nt, synthetic construct
  source 1..23: mol_type = other RNA
tgttctataaagcaaagcacagc

SEQ ID NO: 6782 - RNA, 23 nt, synthetic construct
  source 1..23: mol_type = other RNA
gttctataaagcaaagcacagct

SEQ ID NO: 6783 - RNA, 23 nt, synthetic construct
  source 1..23: mol_type = other RNA
ttctataaagcaaagcacagctt

SEQ ID NO: 6784 - RNA, 23 nt, synthetic construct
  source 1..23: mol_type = other RNA
tctataaagcaaagcacagcttg

SEQ ID NO: 6785 - RNA, 23 nt, synthetic construct
  source 1..23: mol_type = other RNA
cacagcttgggtaatagcgttct

SEQ ID NO: 6786 - RNA, 23 nt, synthetic construct
  source 1..23: mol_type = other RNA
acagcttgggtaatagcgttctg

SEQ ID NO: 6787 - RNA, 23 nt, synthetic construct
  source 1..23: mol_type = other RNA
cagcttgggtaatagcgttctga

SEQ ID NO: 6788 - RNA, 23 nt, synthetic construct
  source 1..23: mol_type = other RNA
agcttgggtaatagcgttctgaa

SEQ ID NO: 6789 - RNA, 23 nt, synthetic construct
  source 1..23: mol_type = other RNA
gcttgggtaatagcgttctgaag

SEQ ID NO: 6790 - RNA, 23 nt, synthetic construct
  source 1..23: mol_type = other RNA
cttgggtaatagcgttctgaagg

SEQ ID NO: 6791 - RNA, 23 nt, synthetic construct
  source 1..23: mol_type = other RNA
ttgggtaatagcgttctgaagga

SEQ ID NO: 6792 - RNA, 23 nt, synthetic construct
  source 1..23: mol_type = other RNA
tgggtaatagcgttctgaaggat

SEQ ID NO: 6793 - RNA, 23 nt, synthetic construct
  source 1..23: mol_type = other RNA
gggtaatagcgttctgaaggata

SEQ ID NO: 6794 - RNA, 23 nt, synthetic construct
  source 1..23: mol_type = other RNA
ggtaatagcgttctgaaggatat

SEQ ID NO: 6795 - RNA, 23 nt, synthetic construct
  source 1..23: mol_type = other RNA
gtaatagcgttctgaaggatata

SEQ ID NO: 6796 - RNA, 23 nt, synthetic construct
  source 1..23: mol_type = other RNA
taatagcgttctgaaggatatac

SEQ ID NO: 6797 - RNA, 23 nt, synthetic construct
  source 1..23: mol_type = other RNA
aatagcgttctgaaggatatact

SEQ ID NO: 6798 - RNA, 23 nt, synthetic construct
  source 1..23: mol_type = other RNA
atagcgttctgaaggatatactt

SEQ ID NO: 6799 - RNA, 23 nt, synthetic construct
  source 1..23: mol_type = other RNA
tagcgttctgaaggatatacttc

SEQ ID NO: 6800 - RNA, 23 nt, synthetic construct
  source 1..23: mol_type = other RNA
agcgttctgaaggatatacttct

SEQ ID NO: 6801 - RNA, 23 nt, synthetic construct
  source 1..23: mol_type = other RNA
gcgttctgaaggatatacttctg

SEQ ID NO: 6802 - RNA, 23 nt, synthetic construct
  source 1..23: mol_type = other RNA
cgttctgaaggatatacttctgt

SEQ ID NO: 6803 - RNA, 23 nt, synthetic construct
  source 1..23: mol_type = other RNA
gttctgaaggatatacttctgta

SEQ ID NO: 6804 - RNA, 23 nt, synthetic construct
  source 1..23: mol_type = other RNA
ttctgaaggatatacttctgtat

SEQ ID NO: 6805 - RNA, 23 nt, synthetic construct
  source 1..23: mol_type = other RNA
tctgaaggatatacttctgtatt

SEQ ID NO: 6806 - RNA, 23 nt, synthetic construct
  source 1..23: mol_type = other RNA
ctgaaggatatacttctgtattt

SEQ ID NO: 6807 - RNA, 23 nt, synthetic construct
  source 1..23: mol_type = other RNA
tgaaggatatacttctgtatttt

SEQ ID NO: 6808 - RNA, 23 nt, synthetic construct
  source 1..23: mol_type = other RNA
gaaggatatacttctgtattttc

SEQ ID NO: 6809 - RNA, 23 nt, synthetic construct
  source 1..23: mol_type = other RNA
aaggatatacttctgtattttct

SEQ ID NO: 6810 - RNA, 23 nt, synthetic construct
  source 1..23: mol_type = other RNA
aggatatacttctgtattttctc

SEQ ID NO: 6811 - RNA, 23 nt, synthetic construct
  source 1..23: mol_type = other RNA
ggatatacttctgtattttctca

SEQ ID NO: 6812 - RNA, 23 nt, synthetic construct
  source 1..23: mol_type = other RNA
gatatacttctgtattttctcat

SEQ ID NO: 6813 - RNA, 23 nt, synthetic construct
  source 1..23: mol_type = other RNA
atacttctgtattttctcataga

SEQ ID NO: 6814 - RNA, 23 nt, synthetic construct
  source 1..23: mol_type = other RNA
tacttctgtattttctcatagag

SEQ ID NO: 6815 - RNA, 23 nt, synthetic construct
  source 1..23: mol_type = other RNA
acttctgtattttctcatagagt

SEQ ID NO: 6816 - RNA, 23 nt, synthetic construct
  source 1..23: mol_type = other RNA
cttctgtattttctcatagagta

SEQ ID NO: 6817 - RNA, 23 nt, synthetic construct
  source 1..23: mol_type = other RNA
ttctgtattttctcatagagtac

SEQ ID NO: 6818 - RNA, 23 nt, synthetic construct
  source 1..23: mol_type = other RNA
ttctcatagagtacaatttagtg

SEQ ID NO: 6819 - RNA, 23 nt, synthetic construct
  source 1..23: mol_type = other RNA
tctcatagagtacaatttagtga

SEQ ID NO: 6820 - RNA, 23 nt, synthetic construct
  source 1..23: mol_type = other RNA
ctcatagagtacaatttagtgat

SEQ ID NO: 6821 - RNA, 23 nt, synthetic construct
  source 1..23: mol_type = other RNA
tcatagagtacaatttagtgatt

SEQ ID NO: 6822 - RNA, 23 nt, synthetic construct
  source 1..23: mol_type = other RNA
catagagtacaatttagtgatta

SEQ ID NO: 6823 - RNA, 23 nt, synthetic construct
  source 1..23: mol_type = other RNA
agagtacaatttagtgattatgc

SEQ ID NO: 6824 - RNA, 23 nt, synthetic construct
  source 1..23: mol_type = other RNA
gagtacaatttagtgattatgct

SEQ ID NO: 6825 - RNA, 23 nt, synthetic construct
  source 1..23: mol_type = other RNA
agtacaatttagtgattatgctt

SEQ ID NO: 6826 - RNA, 23 nt, synthetic construct
  source 1..23: mol_type = other RNA
gtacaatttagtgattatgcttc

SEQ ID NO: 6827 - RNA, 23 nt, synthetic construct
  source 1..23: mol_type = other RNA
ttagtgattatgcttcatttcac

SEQ ID NO: 6828 - RNA, 23 nt, synthetic construct
  source 1..23: mol_type = other RNA
tagtgattatgcttcatttcact

SEQ ID NO: 6829 - RNA, 23 nt, synthetic construct
  source 1..23: mol_type = other RNA
agtgattatgcttcatttcacta

SEQ ID NO: 6830 - RNA, 23 nt, synthetic construct
  source 1..23: mol_type = other RNA
gtgattatgcttcatttcactat

SEQ ID NO: 6831 - RNA, 23 nt, synthetic construct
  source 1..23: mol_type = other RNA
tgattatgcttcatttcactatg

SEQ ID NO: 6832 - RNA, 23 nt, synthetic construct
  source 1..23: mol_type = other RNA
gattatgcttcatttcactatgg

SEQ ID NO: 6833 - RNA, 23 nt, synthetic construct
  source 1..23: mol_type = other RNA
attatgcttcatttcactatgga

SEQ ID NO: 6834 - RNA, 23 nt, synthetic construct
  source 1..23: mol_type = other RNA
ttatgcttcatttcactatggaa

SEQ ID NO: 6835 - RNA, 23 nt, synthetic construct
  source 1..23: mol_type = other RNA
tatgcttcatttcactatggaaa

SEQ ID NO: 6836 - RNA, 23 nt, synthetic construct
  source 1..23: mol_type = other RNA
atgcttcatttcactatggaaat

SEQ ID NO: 6837 - RNA, 23 nt, synthetic construct
  source 1..23: mol_type = other RNA
tgcttcatttcactatggaaata

SEQ ID NO: 6838 - RNA, 23 nt, synthetic construct
  source 1..23: mol_type = other RNA
gcttcatttcactatggaaatat

SEQ ID NO: 6839 - RNA, 23 nt, synthetic construct
  source 1..23: mol_type = other RNA
cttcatttcactatggaaatatg

SEQ ID NO: 6840 - RNA, 23 nt, synthetic construct
  source 1..23: mol_type = other RNA
catttcactatggaaatatgtta

SEQ ID NO: 6841 - RNA, 23 nt, synthetic construct
  source 1..23: mol_type = other RNA
tcactatggaaatatgttactga

SEQ ID NO: 6842 - RNA, 23 nt, synthetic construct
  source 1..23: mol_type = other RNA
cactatggaaatatgttactgaa

SEQ ID NO: 6843 - RNA, 23 nt, synthetic construct
  source 1..23: mol_type = other RNA
actatggaaatatgttactgaat

SEQ ID NO: 6844 - RNA, 23 nt, synthetic construct
  source 1..23: mol_type = other RNA
ctatggaaatatgttactgaatc

SEQ ID NO: 6845 - RNA, 23 nt, synthetic construct
  source 1..23: mol_type = other RNA
aaactgacagctatggagtttgc

SEQ ID NO: 6846 - RNA, 23 nt, synthetic construct
  source 1..23: mol_type = other RNA
aactgacagctatggagtttgcg

SEQ ID NO: 6847 - RNA, 23 nt, synthetic construct
  source 1..23: mol_type = other RNA
actgacagctatggagtttgcgt

SEQ ID NO: 6848 - RNA, 23 nt, synthetic construct
  source 1..23: mol_type = other RNA
ctgacagctatggagtttgcgtg

SEQ ID NO: 6849 - RNA, 23 nt, synthetic construct
  source 1..23: mol_type = other RNA
tgacagctatggagtttgcgtgt

SEQ ID NO: 6850 - RNA, 23 nt, synthetic construct
  source 1..23: mol_type = other RNA
gacagctatggagtttgcgtgta

SEQ ID NO: 6851 - RNA, 23 nt, synthetic construct
  source 1..23: mol_type = other RNA
acagctatggagtttgcgtgtac

SEQ ID NO: 6852 - RNA, 23 nt, synthetic construct
  source 1..23: mol_type = other RNA
cagctatggagtttgcgtgtact

SEQ ID NO: 6853 - RNA, 23 nt, synthetic construct
  source 1..23: mol_type = other RNA
agctatggagtttgcgtgtactt

SEQ ID NO: 6854 - RNA, 23 nt, synthetic construct
  source 1..23: mol_type = other RNA
gctatggagtttgcgtgtacttc

SEQ ID NO: 6855 - RNA, 23 nt, synthetic construct
  source 1..23: mol_type = other RNA
ctatggagtttgcgtgtacttcc

SEQ ID NO: 6856 - RNA, 23 nt, synthetic construct
  source 1..23: mol_type = other RNA
agtttgcgtgtacttccatactc

SEQ ID NO: 6857 - RNA, 23 nt, synthetic construct
  source 1..23: mol_type = other RNA
tttgcgtgtacttccatactcgt

SEQ ID NO: 6858 - RNA, 23 nt, synthetic construct
  source 1..23: mol_type = other RNA
ttgcgtgtacttccatactcgtt

SEQ ID NO: 6859 - RNA, 23 nt, synthetic construct
  source 1..23: mol_type = other RNA
tgcgtgtacttccatactcgtta

SEQ ID NO: 6860 - RNA, 23 nt, synthetic construct
  source 1..23: mol_type = other RNA
gcgtgtacttccatactcgttaa

SEQ ID NO: 6861 - RNA, 23 nt, synthetic construct
  source 1..23: mol_type = other RNA
cgtgtacttccatactcgttaat

SEQ ID NO: 6862 - RNA, 23 nt, synthetic construct
  source 1..23: mol_type = other RNA
gtgtacttccatactcgttaatg

SEQ ID NO: 6863 - RNA, 23 nt, synthetic construct
  source 1..23: mol_type = other RNA
tgtacttccatactcgttaatgc

SEQ ID NO: 6864 - RNA, 23 nt, synthetic construct
  source 1..23: mol_type = other RNA
gtacttccatactcgttaatgct

SEQ ID NO: 6865 - RNA, 23 nt, synthetic construct
  source 1..23: mol_type = other RNA
tacttccatactcgttaatgctc

SEQ ID NO: 6866 - RNA, 23 nt, synthetic construct
  source 1..23: mol_type = other RNA
acttccatactcgttaatgctct

SEQ ID NO: 6867 - RNA, 23 nt, synthetic construct
  source 1..23: mol_type = other RNA
cttccatactcgttaatgctctc

SEQ ID NO: 6868 - RNA, 23 nt, synthetic construct
  source 1..23: mol_type = other RNA
ttccatactcgttaatgctctca

SEQ ID NO: 6869 - RNA, 23 nt, synthetic construct
  source 1..23: mol_type = other RNA
tccatactcgttaatgctctcat

SEQ ID NO: 6870 - RNA, 23 nt, synthetic construct
  source 1..23: mol_type = other RNA
ccatactcgttaatgctctcatc

SEQ ID NO: 6871 - RNA, 23 nt, synthetic construct
  source 1..23: mol_type = other RNA
tactcgttaatgctctcatccac

SEQ ID NO: 6872 - RNA, 23 nt, synthetic construct
  source 1..23: mol_type = other RNA
actcgttaatgctctcatccact

SEQ ID NO: 6873 - RNA, 23 nt, synthetic construct
  source 1..23: mol_type = other RNA
ctcgttaatgctctcatccactt

SEQ ID NO: 6874 - RNA, 23 nt, synthetic construct
  source 1..23: mol_type = other RNA
tcgttaatgctctcatccactta

SEQ ID NO: 6875 - RNA, 23 nt, synthetic construct
  source 1..23: mol_type = other RNA
cgttaatgctctcatccacttat

SEQ ID NO: 6876 - RNA, 23 nt, synthetic construct
  source 1..23: mol_type = other RNA
gttaatgctctcatccacttatt

SEQ ID NO: 6877 - RNA, 23 nt, synthetic construct
  source 1..23: mol_type = other RNA
ttaatgctctcatccacttatta

SEQ ID NO: 6878 - RNA, 23 nt, synthetic construct
  source 1..23: mol_type = other RNA
taatgctctcatccacttattaa

SEQ ID NO: 6879 - RNA, 23 nt, synthetic construct
  source 1..23: mol_type = other RNA
aatgctctcatccacttattaaa

SEQ ID NO: 6880 - RNA, 23 nt, synthetic construct
  source 1..23: mol_type = other RNA
atgctctcatccacttattaaat

SEQ ID NO: 6881 - RNA, 23 nt, synthetic construct
  source 1..23: mol_type = other RNA
tgctctcatccacttattaaata

SEQ ID NO: 6882 - RNA, 23 nt, synthetic construct
  source 1..23: mol_type = other RNA
gctctcatccacttattaaataa

SEQ ID NO: 6883 - RNA, 23 nt, synthetic construct
  source 1..23: mol_type = other RNA
ctctcatccacttattaaataat

SEQ ID NO: 6884 - RNA, 23 nt, synthetic construct
  source 1..23: mol_type = other RNA
tattaaataatcatagagcaccc

SEQ ID NO: 6885 - RNA, 23 nt, synthetic construct
  source 1..23: mol_type = other RNA
attaaataatcatagagcaccca

SEQ ID NO: 6886 - RNA, 23 nt, synthetic construct
  source 1..23: mol_type = other RNA
ttaaataatcatagagcacccat

SEQ ID NO: 6887 - RNA, 23 nt, synthetic construct
  source 1..23: mol_type = other RNA
taaataatcatagagcacccata

SEQ ID NO: 6888 - RNA, 23 nt, synthetic construct
  source 1..23: mol_type = other RNA
aaataatcatagagcacccatat

SEQ ID NO: 6889 - RNA, 23 nt, synthetic construct
  source 1..23: mol_type = other RNA
aataatcatagagcacccatatc

SEQ ID NO: 6890 - RNA, 23 nt, synthetic construct
  source 1..23: mol_type = other RNA
tagagcacccatatcttgcttgc

SEQ ID NO: 6891 - RNA, 23 nt, synthetic construct
  source 1..23: mol_type = other RNA
ccatatcttgcttgccacaatat

SEQ ID NO: 6892 - RNA, 23 nt, synthetic construct
  source 1..23: mol_type = other RNA
agataggtcctgccctcagggat

SEQ ID NO: 6893 - RNA, 23 nt, synthetic construct
  source 1..23: mol_type = other RNA
gataggtcctgccctcagggatt

SEQ ID NO: 6894 - RNA, 23 nt, synthetic construct
  source 1..23: mol_type = other RNA
ataggtcctgccctcagggattt

SEQ ID NO: 6895 - RNA, 23 nt, synthetic construct
  source 1..23: mol_type = other RNA
taggtcctgccctcagggatttt

SEQ ID NO: 6896 - RNA, 23 nt, synthetic construct
  source 1..23: mol_type = other RNA
aggtcctgccctcagggatttta

SEQ ID NO: 6897 - RNA, 23 nt, synthetic construct
  source 1..23: mol_type = other RNA
ggtcctgccctcagggattttaa

SEQ ID NO: 6898 - RNA, 23 nt, synthetic construct
  source 1..23: mol_type = other RNA
gtcctgccctcagggattttaaa

SEQ ID NO: 6899 - RNA, 23 nt, synthetic construct
  source 1..23: mol_type = other RNA
tcctgccctcagggattttaaag

SEQ ID NO: 6900 - RNA, 23 nt, synthetic construct
  source 1..23: mol_type = other RNA
cctgccctcagggattttaaagt

SEQ ID NO: 6901 - RNA, 23 nt, synthetic construct
  source 1..23: mol_type = other RNA
ctgccctcagggattttaaagtc

SEQ ID NO: 6902 - RNA, 23 nt, synthetic construct
  source 1..23: mol_type = other RNA
tgccctcagggattttaaagtct

SEQ ID NO: 6903 - RNA, 23 nt, synthetic construct
  source 1..23: mol_type = other RNA
tcagggattttaaagtctaattt

SEQ ID NO: 6904 - RNA, 23 nt, synthetic construct
  source 1..23: mol_type = other RNA
cagggattttaaagtctaatttg

SEQ ID NO: 6905 - RNA, 23 nt, synthetic construct
  source 1..23: mol_type = other RNA
gggaagagattaaattgacagat

SEQ ID NO: 6906 - RNA, 23 nt, synthetic construct
  source 1..23: mol_type = other RNA
ggaagagattaaattgacagata

SEQ ID NO: 6907 - RNA, 23 nt, synthetic construct
  source 1..23: mol_type = other RNA
gaagagattaaattgacagataa

SEQ ID NO: 6908 - RNA, 23 nt, synthetic construct
  source 1..23: mol_type = other RNA
aattgacagataaaatacgaagt

SEQ ID NO: 6909 - RNA, 23 nt, synthetic construct
  source 1..23: mol_type = other RNA
attgacagataaaatacgaagtg

SEQ ID NO: 6910 - RNA, 23 nt, synthetic construct
  source 1..23: mol_type = other RNA
ttgacagataaaatacgaagtgg

SEQ ID NO: 6911 - RNA, 23 nt, synthetic construct
  source 1..23: mol_type = other RNA
tgacagataaaatacgaagtggg

SEQ ID NO: 6912 - RNA, 23 nt, synthetic construct
  source 1..23: mol_type = other RNA
acgaagtgggatgtcttgagttc

SEQ ID NO: 6913 - RNA, 23 nt, synthetic construct
  source 1..23: mol_type = other RNA
gaagtgggatgtcttgagttctg

SEQ ID NO: 6914 - RNA, 23 nt, synthetic construct
  source 1..23: mol_type = other RNA
gggatgtcttgagttctgcatga

SEQ ID NO: 6915 - RNA, 23 nt, synthetic construct
  source 1..23: mol_type = other RNA
acagtgggtttctaggataggtc

SEQ ID NO: 6916 - RNA, 23 nt, synthetic construct
  source 1..23: mol_type = other RNA
cagtgggtttctaggataggtct

SEQ ID NO: 6917 - RNA, 23 nt, synthetic construct
  source 1..23: mol_type = other RNA
agtgggtttctaggataggtctg

SEQ ID NO: 6918 - RNA, 23 nt, synthetic construct
  source 1..23: mol_type = other RNA
gtgggtttctaggataggtctga

SEQ ID NO: 6919 - RNA, 23 nt, synthetic construct
  source 1..23: mol_type = other RNA
tgggtttctaggataggtctgaa

SEQ ID NO: 6920 - RNA, 23 nt, synthetic construct
  source 1..23: mol_type = other RNA
gggtttctaggataggtctgaaa

SEQ ID NO: 6921 - RNA, 23 nt, synthetic construct
  source 1..23: mol_type = other RNA
ggtttctaggataggtctgaaaa

SEQ ID NO: 6922 - RNA, 23 nt, synthetic construct
  source 1..23: mol_type = other RNA
gtttctaggataggtctgaaaat

SEQ ID NO: 6923 - RNA, 23 nt, synthetic construct
  source 1..23: mol_type = other RNA
tttctaggataggtctgaaaatt

SEQ ID NO: 6924 - RNA, 23 nt, synthetic construct
  source 1..23: mol_type = other RNA
ttctaggataggtctgaaaattg

SEQ ID NO: 6925 - RNA, 23 nt, synthetic construct
  source 1..23: mol_type = other RNA
tctaggataggtctgaaaattgc

SEQ ID NO: 6926 - RNA, 23 nt, synthetic construct
  source 1..23: mol_type = other RNA
gtctgaaaattgctttcatttgc

SEQ ID NO: 6927 - RNA, 23 nt, synthetic construct
  source 1..23: mol_type = other RNA
aaattgctttcatttgcaacaca

SEQ ID NO: 6928 - RNA, 23 nt, synthetic construct
  source 1..23: mol_type = other RNA
aattgctttcatttgcaacacat

SEQ ID NO: 6929 - RNA, 23 nt, synthetic construct
  source 1..23: mol_type = other RNA
attgctttcatttgcaacacatt

SEQ ID NO: 6930 - RNA, 23 nt, synthetic construct
  source 1..23: mol_type = other RNA
ttgctttcatttgcaacacattt

SEQ ID NO: 6931 - RNA, 23 nt, synthetic construct
  source 1..23: mol_type = other RNA
tgctttcatttgcaacacattta

SEQ ID NO: 6932 - RNA, 23 nt, synthetic construct
  source 1..23: mol_type = other RNA
ttagaaagtagctttatttggat

SEQ ID NO: 6933 - RNA, 23 nt, synthetic construct
  source 1..23: mol_type = other RNA
gaaagtagctttatttggatatt

SEQ ID NO: 6934 - RNA, 23 nt, synthetic construct
  source 1..23: mol_type = other RNA
cagacaatctaaatatatcatca

SEQ ID NO: 6935 - RNA, 23 nt, synthetic construct
  source 1..23: mol_type = other RNA
gacaatctaaatatatcatcagt

SEQ ID NO: 6936 - RNA, 23 nt, synthetic construct
  source 1..23: mol_type = other RNA
tatcatcagtttttaaaagtgcc

SEQ ID NO: 6937 - RNA, 23 nt, synthetic construct
  source 1..23: mol_type = other RNA
atcatcagtttttaaaagtgcct

SEQ ID NO: 6938 - RNA, 23 nt, synthetic construct
  source 1..23: mol_type = other RNA
tcatcagtttttaaaagtgccta

SEQ ID NO: 6939 - RNA, 23 nt, synthetic construct
  source 1..23: mol_type = other RNA
catcagtttttaaaagtgcctat

SEQ ID NO: 6940 - RNA, 23 nt, synthetic construct
  source 1..23: mol_type = other RNA
atcagtttttaaaagtgcctatg

SEQ ID NO: 6941 - RNA, 23 nt, synthetic construct
  source 1..23: mol_type = other RNA
tcagtttttaaaagtgcctatgt

SEQ ID NO: 6942 - RNA, 23 nt, synthetic construct
  source 1..23: mol_type = other RNA
cagtttttaaaagtgcctatgtg

SEQ ID NO: 6943 - RNA, 23 nt, synthetic construct
  source 1..23: mol_type = other RNA
agtttttaaaagtgcctatgtga

SEQ ID NO: 6944 - RNA, 23 nt, synthetic construct
  source 1..23: mol_type = other RNA
aaaagtgcctatgtgaagtgatt

SEQ ID NO: 6945 - RNA, 23 nt, synthetic construct
  source 1..23: mol_type = other RNA
aaagtgcctatgtgaagtgattt

SEQ ID NO: 6946 - RNA, 23 nt, synthetic construct
  source 1..23: mol_type = other RNA
aagtgcctatgtgaagtgatttt

SEQ ID NO: 6947 - RNA, 23 nt, synthetic construct
  source 1..23: mol_type = other RNA
agtgcctatgtgaagtgattttt

SEQ ID NO: 6948 - RNA, 23 nt, synthetic construct
  source 1..23: mol_type = other RNA
gtgcctatgtgaagtgattttta

SEQ ID NO: 6949 - RNA, 23 nt, synthetic construct
  source 1..23: mol_type = other RNA
tgcctatgtgaagtgatttttaa

SEQ ID NO: 6950 - RNA, 23 nt, synthetic construct
  source 1..23: mol_type = other RNA
gcctatgtgaagtgatttttaaa

SEQ ID NO: 6951 - RNA, 23 nt, synthetic construct
  source 1..23: mol_type = other RNA
cctatgtgaagtgatttttaaaa

SEQ ID NO: 6952 - RNA, 23 nt, synthetic construct
  source 1..23: mol_type = other RNA
gtgaagtgatttttaaaaagagc

SEQ ID NO: 6953 - RNA, 23 nt, synthetic construct
  source 1..23: mol_type = other RNA
tgaagtgatttttaaaaagagcc

SEQ ID NO: 6954 - RNA, 23 nt, synthetic construct
  source 1..23: mol_type = other RNA
agtgatttttaaaaagagcctat

SEQ ID NO: 6955 - RNA, 23 nt, synthetic construct
  source 1..23: mol_type = other RNA
gtgatttttaaaaagagcctatg

SEQ ID NO: 6956 - RNA, 23 nt, synthetic construct
  source 1..23: mol_type = other RNA
tgatttttaaaaagagcctatgt

SEQ ID NO: 6957 - RNA, 23 nt, synthetic construct
  source 1..23: mol_type = other RNA
gatttttaaaaagagcctatgtg

SEQ ID NO: 6958 - RNA, 23 nt, synthetic construct
  source 1..23: mol_type = other RNA
atttttaaaaagagcctatgtga

SEQ ID NO: 6959 - RNA, 23 nt, synthetic construct
  source 1..23: mol_type = other RNA
tttttaaaaagagcctatgtgaa

SEQ ID NO: 6960 - RNA, 23 nt, synthetic construct
  source 1..23: mol_type = other RNA
ttttaaaaagagcctatgtgaag

SEQ ID NO: 6961 - RNA, 23 nt, synthetic construct
  source 1..23: mol_type = other RNA
tttaaaaagagcctatgtgaagg

SEQ ID NO: 6962 - RNA, 23 nt, synthetic construct
  source 1..23: mol_type = other RNA
ttaaaaagagcctatgtgaaggg

SEQ ID NO: 6963 - RNA, 23 nt, synthetic construct
  source 1..23: mol_type = other RNA
gggtaatcttgcttgttcttgtt

SEQ ID NO: 6964 - RNA, 23 nt, synthetic construct
  source 1..23: mol_type = other RNA
ggtaatcttgcttgttcttgtta

SEQ ID NO: 6965 - RNA, 23 nt, synthetic construct
  source 1..23: mol_type = other RNA
gtaatcttgcttgttcttgttac

SEQ ID NO: 6966 - RNA, 23 nt, synthetic construct
  source 1..23: mol_type = other RNA
taatcttgcttgttcttgttact

SEQ ID NO: 6967 - RNA, 23 nt, synthetic construct
  source 1..23: mol_type = other RNA
aatcttgcttgttcttgttacta

SEQ ID NO: 6968 - RNA, 23 nt, synthetic construct
  source 1..23: mol_type = other RNA
atcttgcttgttcttgttactaa

SEQ ID NO: 6969 - RNA, 23 nt, synthetic construct
  source 1..23: mol_type = other RNA
tcttgcttgttcttgttactaat

SEQ ID NO: 6970 - RNA, 23 nt, synthetic construct
  source 1..23: mol_type = other RNA
cttgcttgttcttgttactaatt

SEQ ID NO: 6971 - RNA, 23 nt, synthetic construct
  source 1..23: mol_type = other RNA
ttgcttgttcttgttactaattt

SEQ ID NO: 6972 - RNA, 23 nt, synthetic construct
  source 1..23: mol_type = other RNA
tgcttgttcttgttactaatttc

SEQ ID NO: 6973 - RNA, 23 nt, synthetic construct
  source 1..23: mol_type = other RNA
gcttgttcttgttactaatttct

SEQ ID NO: 6974 - RNA, 23 nt, synthetic construct
  source 1..23: mol_type = other RNA
tttctgcatatataagaacgaaa

SEQ ID NO: 6975 - RNA, 23 nt, synthetic construct
  source 1..23: mol_type = other RNA
ggttgtacgtgcctcaaataaac

SEQ ID NO: 6976 - RNA, 23 nt, synthetic construct
  source 1..23: mol_type = other RNA
cgtgcctcaaataaacaagaatg

SEQ ID NO: 6977 - RNA, 23 nt, synthetic construct
  source 1..23: mol_type = other RNA
gtgcctcaaataaacaagaatga

SEQ ID NO: 6978 - RNA, 23 nt, synthetic construct
  source 1..23: mol_type = other RNA
tgcctcaaataaacaagaatgat

SEQ ID NO: 6979 - RNA, 23 nt, synthetic construct
  source 1..23: mol_type = other RNA
gcctcaaataaacaagaatgata

SEQ ID NO: 6980 - RNA, 23 nt, synthetic construct
  source 1..23: mol_type = other RNA
cctcaaataaacaagaatgatat

SEQ ID NO: 6981 - RNA, 23 nt, synthetic construct
  source 1..23: mol_type = other RNA
taaacaagaatgatatttcctgt

SEQ ID NO: 6982 - RNA, 23 nt, synthetic construct
  source 1..23: mol_type = other RNA
aaacaagaatgatatttcctgtt

SEQ ID NO: 6983 - RNA, 23 nt, synthetic construct
  source 1..23: mol_type = other RNA
aacaagaatgatatttcctgttt

SEQ ID NO: 6984 - RNA, 23 nt, synthetic construct
  source 1..23: mol_type = other RNA
acaagaatgatatttcctgtttt

SEQ ID NO: 6985 - RNA, 23 nt, synthetic construct
  source 1..23: mol_type = other RNA
caagaatgatatttcctgtttta

SEQ ID NO: 6986 - RNA, 23 nt, synthetic construct
  source 1..23: mol_type = other RNA
ttacttatgttgggtaaatatgc

SEQ ID NO: 6987 - RNA, 23 nt, synthetic construct
  source 1..23: mol_type = other RNA
tacttatgttgggtaaatatgct

SEQ ID NO: 6988 - RNA, 23 nt, synthetic construct
  source 1..23: mol_type = other RNA
acttatgttgggtaaatatgctt

SEQ ID NO: 6989 - RNA, 23 nt, synthetic construct
  source 1..23: mol_type = other RNA
cttatgttgggtaaatatgctta

SEQ ID NO: 6990 - RNA, 23 nt, synthetic construct
  source 1..23: mol_type = other RNA
ttatgttgggtaaatatgcttat

SEQ ID NO: 6991 - RNA, 23 nt, synthetic construct
  source 1..23: mol_type = other RNA
tatgttgggtaaatatgcttatt

SEQ ID NO: 6992 - RNA, 23 nt, synthetic construct
  source 1..23: mol_type = other RNA
atgttgggtaaatatgcttattg

SEQ ID NO: 6993 - RNA, 23 nt, synthetic construct
  source 1..23: mol_type = other RNA
tattggttcaactttcactctga

SEQ ID NO: 6994 - RNA, 23 nt, synthetic construct
  source 1..23: mol_type = other RNA
tcaactttcactctgaagaaatc

SEQ ID NO: 6995 - RNA, 23 nt, synthetic construct
  source 1..23: mol_type = other RNA
cactctgaagaaatccgtatgtt

SEQ ID NO: 6996 - RNA, 23 nt, synthetic construct
  source 1..23: mol_type = other RNA
ctctgaagaaatccgtatgttag

SEQ ID NO: 6997 - RNA, 23 nt, synthetic construct
  source 1..23: mol_type = other RNA
ttgtgttgtttaactatgactcc

SEQ ID NO: 6998 - RNA, 23 nt, synthetic construct
  source 1..23: mol_type = other RNA
tatgactcctaactgagtagtct

SEQ ID NO: 6999 - RNA, 23 nt, synthetic construct
  source 1..23: mol_type = other RNA
atgactcctaactgagtagtctt

SEQ ID NO: 7000 - RNA, 23 nt, synthetic construct
  source 1..23: mol_type = other RNA
tgactcctaactgagtagtctta

SEQ ID NO: 7001 - RNA, 23 nt, synthetic construct
  source 1..23: mol_type = other RNA
gactcctaactgagtagtcttat

SEQ ID NO: 7002 - RNA, 23 nt, synthetic construct
  source 1..23: mol_type = other RNA
actcctaactgagtagtcttata

SEQ ID NO: 7003 - RNA, 23 nt, synthetic construct
  source 1..23: mol_type = other RNA
ctcctaactgagtagtcttatat

SEQ ID NO: 7004 - RNA, 23 nt, synthetic construct
  source 1..23: mol_type = other RNA
tcctaactgagtagtcttatatt

SEQ ID NO: 7005 - RNA, 23 nt, synthetic construct
  source 1..23: mol_type = other RNA
cctaactgagtagtcttatattt

SEQ ID NO: 7006 - RNA, 23 nt, synthetic construct
  source 1..23: mol_type = other RNA
ctaactgagtagtcttatatttc

SEQ ID NO: 7007 - RNA, 23 nt, synthetic construct
  source 1..23: mol_type = other RNA
taactgagtagtcttatatttca

SEQ ID NO: 7008 - RNA, 23 nt, synthetic construct
  source 1..23: mol_type = other RNA
aactgagtagtcttatatttcaa

SEQ ID NO: 7009 - RNA, 23 nt, synthetic construct
  source 1..23: mol_type = other RNA
actgagtagtcttatatttcaat

SEQ ID NO: 7010 - RNA, 23 nt, synthetic construct
  source 1..23: mol_type = other RNA
ctgagtagtcttatatttcaatt

SEQ ID NO: 7011 - RNA, 23 nt, synthetic construct
  source 1..23: mol_type = other RNA
atttcctttactcttaacaggat

SEQ ID NO: 7012 - RNA, 23 nt, synthetic construct
  source 1..23: mol_type = other RNA
tttcctttactcttaacaggatt

SEQ ID NO: 7013 - RNA, 23 nt, synthetic construct
  source 1..23: mol_type = other RNA
ttcctttactcttaacaggatta

SEQ ID NO: 7014 - RNA, 23 nt, synthetic construct
  source 1..23: mol_type = other RNA
tcctttactcttaacaggattat

SEQ ID NO: 7015 - RNA, 23 nt, synthetic construct
  source 1..23: mol_type = other RNA
cctttactcttaacaggattata

SEQ ID NO: 7016 - RNA, 23 nt, synthetic construct
  source 1..23: mol_type = other RNA
ctttactcttaacaggattatat

SEQ ID NO: 7017 - RNA, 23 nt, synthetic construct
  source 1..23: mol_type = other RNA
ctcttaacaggattatatataga

SEQ ID NO: 7018 - RNA, 23 nt, synthetic construct
  source 1..23: mol_type = other RNA
acaggattatatatagaacatgc

SEQ ID NO: 7019 - RNA, 23 nt, synthetic construct
  source 1..23: mol_type = other RNA
aacatgctcacttacaaaaatag

SEQ ID NO: 7020 - RNA, 23 nt, synthetic construct
  source 1..23: mol_type = other RNA
tcacttacaaaaataggatgatg

SEQ ID NO: 7021 - RNA, 23 nt, synthetic construct
  source 1..23: mol_type = other RNA
gcataaggcaggcttcttgtata

SEQ ID NO: 7022 - RNA, 23 nt, synthetic construct
  source 1..23: mol_type = other RNA
ggcaggcttcttgtatatactta

SEQ ID NO: 7023 - RNA, 23 nt, synthetic construct
  source 1..23: mol_type = other RNA
tgtatatacttatgctgtcaaat

SEQ ID NO: 7024 - RNA, 23 nt, synthetic construct
  source 1..23: mol_type = other RNA
gtatatacttatgctgtcaaatg

SEQ ID NO: 7025 - RNA, 23 nt, synthetic construct
  source 1..23: mol_type = other RNA
tatatacttatgctgtcaaatgt

SEQ ID NO: 7026 - RNA, 23 nt, synthetic construct
  source 1..23: mol_type = other RNA
atatacttatgctgtcaaatgtt

SEQ ID NO: 7027 - RNA, 23 nt, synthetic construct
  source 1..23: mol_type = other RNA
tatacttatgctgtcaaatgtta

SEQ ID NO: 7028 - RNA, 23 nt, synthetic construct
  source 1..23: mol_type = other RNA
atacttatgctgtcaaatgttat

SEQ ID NO: 7029 - RNA, 23 nt, synthetic construct
  source 1..23: mol_type = other RNA
tacttatgctgtcaaatgttata

SEQ ID NO: 7030 - RNA, 23 nt, synthetic construct
  source 1..23: mol_type = other RNA
acttatgctgtcaaatgttatat

SEQ ID NO: 7031 - RNA, 23 nt, synthetic construct
  source 1..23: mol_type = other RNA
cttatgctgtcaaatgttatatt

SEQ ID NO: 7032 - RNA, 23 nt, synthetic construct
  source 1..23: mol_type = other RNA
tatgctgtcaaatgttatattgt

SEQ ID NO: 7033 - RNA, 23 nt, synthetic construct
  source 1..23: mol_type = other RNA
atgctgtcaaatgttatattgtt

SEQ ID NO: 7034 - RNA, 23 nt, synthetic construct
  source 1..23: mol_type = other RNA
tgctgtcaaatgttatattgttt

SEQ ID NO: 7035 - RNA, 23 nt, synthetic construct
  source 1..23: mol_type = other RNA
gctgtcaaatgttatattgtttt

SEQ ID NO: 7036 - RNA, 23 nt, synthetic construct
  source 1..23: mol_type = other RNA
gttatgttcagagtatcagtgtt

SEQ ID NO: 7037 - RNA, 23 nt, synthetic construct
  source 1..23: mol_type = other RNA
ttatgttcagagtatcagtgttc

SEQ ID NO: 7038 - RNA, 23 nt, synthetic construct
  source 1..23: mol_type = other RNA
tatgttcagagtatcagtgttct

SEQ ID NO: 7039 - RNA, 23 nt, synthetic construct
  source 1..23: mol_type = other RNA
atgttcagagtatcagtgttctt

SEQ ID NO: 7040 - RNA, 23 nt, synthetic construct
  source 1..23: mol_type = other RNA
tgttcagagtatcagtgttcttt

SEQ ID NO: 7041 - RNA, 23 nt, synthetic construct
  source 1..23: mol_type = other RNA
gttcagagtatcagtgttcttta

SEQ ID NO: 7042 - RNA, 23 nt, synthetic construct
  source 1..23: mol_type = other RNA
ttcagagtatcagtgttctttac

SEQ ID NO: 7043 - RNA, 23 nt, synthetic construct
  source 1..23: mol_type = other RNA
tcagagtatcagtgttctttact

SEQ ID NO: 7044 - RNA, 23 nt, synthetic construct
  source 1..23: mol_type = other RNA
cagagtatcagtgttctttactc

SEQ ID NO: 7045 - RNA, 23 nt, synthetic construct
  source 1..23: mol_type = other RNA
agagtatcagtgttctttactcc

SEQ ID NO: 7046 - RNA, 23 nt, synthetic construct
  source 1..23: mol_type = other RNA
gagtatcagtgttctttactcct

SEQ ID NO: 7047 - RNA, 23 nt, synthetic construct
  source 1..23: mol_type = other RNA
gttctttactccttacagatatt

SEQ ID NO: 7048 - RNA, 23 nt, synthetic construct
  source 1..23: mol_type = other RNA
ctttactccttacagatattttg

SEQ ID NO: 7049 - RNA, 23 nt, synthetic construct
  source 1..23: mol_type = other RNA
tttaaatgcagcatcactttctg

SEQ ID NO: 7050 - RNA, 23 nt, synthetic construct
  source 1..23: mol_type = other RNA
cagcatcactttctgaaaataag

SEQ ID NO: 7051 - RNA, 23 nt, synthetic construct
  source 1..23: mol_type = other RNA
aagagaaacattatttgttgtca

SEQ ID NO: 7052 - RNA, 23 nt, synthetic construct
  source 1..23: mol_type = other RNA
tttgttgtcagtatttcagcatg

SEQ ID NO: 7053 - RNA, 23 nt, synthetic construct
  source 1..23: mol_type = other RNA
cagtatttcagcatgaacttgtt

SEQ ID NO: 7054 - RNA, 23 nt, synthetic construct
  source 1..23: mol_type = other RNA
gtttgtaattggtacagattctg

SEQ ID NO: 7055 - RNA, 23 nt, synthetic construct
  source 1..23: mol_type = other RNA
tttgtaattggtacagattctgt

SEQ ID NO: 7056 - RNA, 23 nt, synthetic construct
  source 1..23: mol_type = other RNA
ttgtaattggtacagattctgtt

SEQ ID NO: 7057 - RNA, 23 nt, synthetic construct
  source 1..23: mol_type = other RNA
tgtaattggtacagattctgttg

SEQ ID NO: 7058 - RNA, 23 nt, synthetic construct
  source 1..23: mol_type = other RNA
gtaattggtacagattctgttgt

SEQ ID NO: 7059 - RNA, 23 nt, synthetic construct
  source 1..23: mol_type = other RNA
taattggtacagattctgttgta

SEQ ID NO: 7060 - RNA, 23 nt, synthetic construct
  source 1..23: mol_type = other RNA
aattggtacagattctgttgtat

SEQ ID NO: 7061 - RNA, 23 nt, synthetic construct
  source 1..23: mol_type = other RNA
attggtacagattctgttgtatg

SEQ ID NO: 7062 - RNA, 23 nt, synthetic construct
  source 1..23: mol_type = other RNA
ttggtacagattctgttgtatgc

SEQ ID NO: 7063 - RNA, 23 nt, synthetic construct
  source 1..23: mol_type = other RNA
tggtacagattctgttgtatgct

SEQ ID NO: 7064 - RNA, 23 nt, synthetic construct
  source 1..23: mol_type = other RNA
ggtacagattctgttgtatgctt

SEQ ID NO: 7065 - RNA, 23 nt, synthetic construct
  source 1..23: mol_type = other RNA
gtacagattctgttgtatgcttt

SEQ ID NO: 7066 - RNA, 23 nt, synthetic construct
  source 1..23: mol_type = other RNA
tacagattctgttgtatgctttc

SEQ ID NO: 7067 - RNA, 23 nt, synthetic construct
  source 1..23: mol_type = other RNA
acagattctgttgtatgctttct

SEQ ID NO: 7068 - RNA, 23 nt, synthetic construct
  source 1..23: mol_type = other RNA
cagattctgttgtatgctttctt

SEQ ID NO: 7069 - RNA, 23 nt, synthetic construct
  source 1..23: mol_type = other RNA
tttggcatgtcacatctagaatt

SEQ ID NO: 7070 - RNA, 23 nt, synthetic construct
  source 1..23: mol_type = other RNA
ttggcatgtcacatctagaattc

SEQ ID NO: 7071 - RNA, 23 nt, synthetic construct
  source 1..23: mol_type = other RNA
tggcatgtcacatctagaattct

SEQ ID NO: 7072 - RNA, 23 nt, synthetic construct
  source 1..23: mol_type = other RNA
ggcatgtcacatctagaattctt

SEQ ID NO: 7073 - RNA, 23 nt, synthetic construct
  source 1..23: mol_type = other RNA
gcatgtcacatctagaattctta

SEQ ID NO: 7074 - RNA, 23 nt, synthetic construct
  source 1..23: mol_type = other RNA
catgtcacatctagaattcttaa

SEQ ID NO: 7075 - RNA, 23 nt, synthetic construct
  source 1..23: mol_type = other RNA
atgtcacatctagaattcttaat

SEQ ID NO: 7076 - RNA, 23 nt, synthetic construct
  source 1..23: mol_type = other RNA
tgtcacatctagaattcttaatt

SEQ ID NO: 7077 - RNA, 23 nt, synthetic construct
  source 1..23: mol_type = other RNA
gtcacatctagaattcttaattt

SEQ ID NO: 7078 - RNA, 23 nt, synthetic construct
  source 1..23: mol_type = other RNA
tctgacttgagagttaagtgaaa

SEQ ID NO: 7079 - RNA, 23 nt, synthetic construct
  source 1..23: mol_type = other RNA
acttgagagttaagtgaaacatg

SEQ ID NO: 7080 - RNA, 23 nt, synthetic construct
  source 1..23: mol_type = other RNA
catagcacttgcttttcatcttt

SEQ ID NO: 7081 - RNA, 23 nt, synthetic construct
  source 1..23: mol_type = other RNA
ctttgcattttaaatttccatga

SEQ ID NO: 7082 - RNA, 23 nt, synthetic construct
  source 1..23: mol_type = other RNA
gcattttaaatttccatgattgt

SEQ ID NO: 7083 - RNA, 23 nt, synthetic construct
  source 1..23: mol_type = other RNA
cctggttgcagtatctgaaaaaa

SEQ ID NO: 7084 - RNA, 23 nt, synthetic construct
  source 1..23: mol_type = other RNA
ctggttgcagtatctgaaaaaat

SEQ ID NO: 7085 - RNA, 23 nt, synthetic construct
  source 1..23: mol_type = other RNA
tggttgcagtatctgaaaaaatt

SEQ ID NO: 7086 - RNA, 23 nt, synthetic construct
  source 1..23: mol_type = other RNA
ggttgcagtatctgaaaaaatta

SEQ ID NO: 7087 - RNA, 23 nt, synthetic construct
  source 1..23: mol_type = other RNA
gttgcagtatctgaaaaaattaa

SEQ ID NO: 7088 - RNA, 23 nt, synthetic construct
  source 1..23: mol_type = other RNA
agattcattaggttagaagttcc

SEQ ID NO: 7089 - RNA, 23 nt, synthetic construct
  source 1..23: mol_type = other RNA
gttagaagttccagaataattta

SEQ ID NO: 7090 - RNA, 23 nt, synthetic construct
  source 1..23: mol_type = other RNA
acacctactattgtagaattact

SEQ ID NO: 7091 - RNA, 23 nt, synthetic construct
  source 1..23: mol_type = other RNA
taaaacaaaacaaaactactcct

SEQ ID NO: 7092 - RNA, 23 nt, synthetic construct
  source 1..23: mol_type = other RNA
aaacaaaacaaaactactcctat

SEQ ID NO: 7093 - RNA, 23 nt, synthetic construct
  source 1..23: mol_type = other RNA
aacaaaacaaaactactcctatt

SEQ ID NO: 7094 - RNA, 23 nt, synthetic construct
  source 1..23: mol_type = other RNA
acaaaacaaaactactcctattt

SEQ ID NO: 7095 - RNA, 23 nt, synthetic construct
  source 1..23: mol_type = other RNA
caaaacaaaactactcctatttt

SEQ ID NO: 7096 - RNA, 23 nt, synthetic construct
  source 1..23: mol_type = other RNA
aaacaaaactactcctattttcc

SEQ ID NO: 7097 - RNA, 23 nt, synthetic construct
  source 1..23: mol_type = other RNA
aacaaaactactcctattttcct

SEQ ID NO: 7098 - RNA, 23 nt, synthetic construct
  source 1..23: mol_type = other RNA
acaaaactactcctattttcctg

SEQ ID NO: 7099 - RNA, 23 nt, synthetic construct
  source 1..23: mol_type = other RNA
ctattttcctggaattttgccac

SEQ ID NO: 7100 - RNA, 23 nt, synthetic construct
  source 1..23: mol_type = other RNA
ctgatgtttgccattatacaaag

SEQ ID NO: 7101 - RNA, 23 nt, synthetic construct
  source 1..23: mol_type = other RNA
tacaaagtttgagtaaacaactt

SEQ ID NO: 7102 - RNA, 23 nt, synthetic construct
  source 1..23: mol_type = other RNA
acaaagtttgagtaaacaactta

SEQ ID NO: 7103 - RNA, 23 nt, synthetic construct
  source 1..23: mol_type = other RNA
caaagtttgagtaaacaacttaa

SEQ ID NO: 7104 - RNA, 23 nt, synthetic construct
  source 1..23: mol_type = other RNA
tgagtaaacaacttaaaattgct

SEQ ID NO: 7105 - RNA, 23 nt, synthetic construct
  source 1..23: mol_type = other RNA
gagtaaacaacttaaaattgctt

SEQ ID NO: 7106 - RNA, 23 nt, synthetic construct
  source 1..23: mol_type = other RNA
gtaaacaacttaaaattgcttgt

SEQ ID NO: 7107 - RNA, 23 nt, synthetic construct
  source 1..23: mol_type = other RNA
gcatagtctttgattgaaataag

SEQ ID NO: 7108 - RNA, 23 nt, synthetic construct
  source 1..23: mol_type = other RNA
atgagaatgtatttggctaaata

SEQ ID NO: 7109 - RNA, 23 nt, synthetic construct
  source 1..23: mol_type = other RNA
agctggcagttgatgtcttcaat

SEQ ID NO: 7110 - RNA, 23 nt, synthetic construct
  source 1..23: mol_type = other RNA
ctggcagttgatgtcttcaataa

SEQ ID NO: 7111 - RNA, 23 nt, synthetic construct
  source 1..23: mol_type = other RNA
tggcagttgatgtcttcaataat

SEQ ID NO: 7112 - RNA, 23 nt, synthetic construct
  source 1..23: mol_type = other RNA
ggcagttgatgtcttcaataatc

SEQ ID NO: 7113 - RNA, 23 nt, synthetic construct
  source 1..23: mol_type = other RNA
gcagttgatgtcttcaataatca

SEQ ID NO: 7114 - RNA, 23 nt, synthetic construct
  source 1..23: mol_type = other RNA
cagttgatgtcttcaataatcat

SEQ ID NO: 7115 - RNA, 23 nt, synthetic construct
  source 1..23: mol_type = other RNA
agttgatgtcttcaataatcatt

SEQ ID NO: 7116 - RNA, 23 nt, synthetic construct
  source 1..23: mol_type = other RNA
gttgatgtcttcaataatcattc

SEQ ID NO: 7117 - RNA, 23 nt, synthetic construct
  source 1..23: mol_type = other RNA
ttgatgtcttcaataatcattcc

SEQ ID NO: 7118 - RNA, 23 nt, synthetic construct
  source 1..23: mol_type = other RNA
tgatgtcttcaataatcattcct

SEQ ID NO: 7119 - RNA, 23 nt, synthetic construct
  source 1..23: mol_type = other RNA
gatgtcttcaataatcattcctt

SEQ ID NO: 7120 - RNA, 23 nt, synthetic construct
  source 1..23: mol_type = other RNA
atgtcttcaataatcattccttt

SEQ ID NO: 7121 - RNA, 23 nt, synthetic construct
  source 1..23: mol_type = other RNA
tgtcttcaataatcattccttta

SEQ ID NO: 7122 - RNA, 23 nt, synthetic construct
  source 1..23: mol_type = other RNA
gtcttcaataatcattcctttaa

SEQ ID NO: 7123 - RNA, 23 nt, synthetic construct
  source 1..23: mol_type = other RNA
aaattcacaaacacatcattaca

SEQ ID NO: 7124 - RNA, 23 nt, synthetic construct
  source 1..23: mol_type = other RNA
aattcacaaacacatcattacaa

SEQ ID NO: 7125 - RNA, 23 nt, synthetic construct
  source 1..23: mol_type = other RNA
attcacaaacacatcattacaag

SEQ ID NO: 7126 - RNA, 23 nt, synthetic construct
  source 1..23: mol_type = other RNA
ttcacaaacacatcattacaagc

SEQ ID NO: 7127 - RNA, 23 nt, synthetic construct
  source 1..23: mol_type = other RNA
tcacaaacacatcattacaagct

SEQ ID NO: 7128 - RNA, 23 nt, synthetic construct
  source 1..23: mol_type = other RNA
cacaaacacatcattacaagcta

SEQ ID NO: 7129 - RNA, 23 nt, synthetic construct
  source 1..23: mol_type = other RNA
acaaacacatcattacaagctac

SEQ ID NO: 7130 - RNA, 23 nt, synthetic construct
  source 1..23: mol_type = other RNA
caaacacatcattacaagctact

SEQ ID NO: 7131 - RNA, 23 nt, synthetic construct
  source 1..23: mol_type = other RNA
aaacacatcattacaagctactt

SEQ ID NO: 7132 - RNA, 23 nt, synthetic construct
  source 1..23: mol_type = other RNA
aacacatcattacaagctactta

SEQ ID NO: 7133 - RNA, 23 nt, synthetic construct
  source 1..23: mol_type = other RNA
catcattacaagctacttagaaa

SEQ ID NO: 7134 - RNA, 23 nt, synthetic construct
  source 1..23: mol_type = other RNA
ttacaagctacttagaaatgttt

SEQ ID NO: 7135 - RNA, 23 nt, synthetic construct
  source 1..23: mol_type = other RNA
acaagctacttagaaatgtttag

SEQ ID NO: 7136 - RNA, 23 nt, synthetic construct
  source 1..23: mol_type = other RNA
agctacttagaaatgtttagtat

SEQ ID NO: 7137 - RNA, 23 nt, synthetic construct
  source 1..23: mol_type = other RNA
gtgaaacatactatttctgtttg

SEQ ID NO: 7138 - RNA, 23 nt, synthetic construct
  source 1..23: mol_type = other RNA
agctgcttctaaataacaaaaaa

SEQ ID NO: 7139 - RNA, 23 nt, synthetic construct
  source 1..23: mol_type = other RNA
gctgcttctaaataacaaaaaag

SEQ ID NO: 7140 - RNA, 23 nt, synthetic construct
  source 1..23: mol_type = other RNA
tatgggcatttttcaaaacattt

SEQ ID NO: 7141 - RNA, 23 nt, synthetic construct
  source 1..23: mol_type = other RNA
tgactttctttttttcatctagc

SEQ ID NO: 7142 - RNA, 23 nt, synthetic construct
  source 1..23: mol_type = other RNA
gactttctttttttcatctagcc

SEQ ID NO: 7143 - RNA, 23 nt, synthetic construct
  source 1..23: mol_type = other RNA
actttctttttttcatctagcct

SEQ ID NO: 7144 - RNA, 23 nt, synthetic construct
  source 1..23: mol_type = other RNA
ctttctttttttcatctagcctt

SEQ ID NO: 7145 - RNA, 23 nt, synthetic construct
  source 1..23: mol_type = other RNA
tttctttttttcatctagccttg

SEQ ID NO: 7146 - RNA, 23 nt, synthetic construct
  source 1..23: mol_type = other RNA
ttctttttttcatctagccttgc

SEQ ID NO: 7147 - RNA, 23 nt, synthetic construct
  source 1..23: mol_type = other RNA
tctttttttcatctagccttgct

SEQ ID NO: 7148 - RNA, 23 nt, synthetic construct
  source 1..23: mol_type = other RNA
ctttttttcatctagccttgctt

SEQ ID NO: 7149 - RNA, 23 nt, synthetic construct
  source 1..23: mol_type = other RNA
tttttttcatctagccttgcttt

SEQ ID NO: 7150 - RNA, 23 nt, synthetic construct
  source 1..23: mol_type = other RNA
ttttttcatctagccttgcttta

SEQ ID NO: 7151 - RNA, 23 nt, synthetic construct
  source 1..23: mol_type = other RNA
ttttcatctagccttgctttata

SEQ ID NO: 7152 - RNA, 23 nt, synthetic construct
  source 1..23: mol_type = other RNA
tcccttagtactctcagagatta

SEQ ID NO: 7153 - RNA, 23 nt, synthetic construct
  source 1..23: mol_type = other RNA
agtactctcagagattatataaa

SEQ ID NO: 7154 - RNA, 23 nt, synthetic construct
  source 1..23: mol_type = other RNA
gtactctcagagattatataaag

SEQ ID NO: 7155 - RNA, 23 nt, synthetic construct
  source 1..23: mol_type = other RNA
ctagttactagcagaactcttat

SEQ ID NO: 7156 - RNA, 23 nt, synthetic construct
  source 1..23: mol_type = other RNA
cccagcactgttccctgccatat

SEQ ID NO: 7157 - RNA, 23 nt, synthetic construct
  source 1..23: mol_type = other RNA
ccagcactgttccctgccatatc

SEQ ID NO: 7158 - RNA, 23 nt, synthetic construct
  source 1..23: mol_type = other RNA
cagcactgttccctgccatatcc

SEQ ID NO: 7159 - RNA, 23 nt, synthetic construct
  source 1..23: mol_type = other RNA
agcactgttccctgccatatccc

SEQ ID NO: 7160 - RNA, 23 nt, synthetic construct
  source 1..23: mol_type = other RNA
cccaacttttactgattaaaaat

SEQ ID NO: 7161 - RNA, 23 nt, synthetic construct
  source 1..23: mol_type = other RNA
acgtaatgtgccattcaatgatg

SEQ ID NO: 7162 - RNA, 23 nt, synthetic construct
  source 1..23: mol_type = other RNA
gatgatgataaaatcccactttt

SEQ ID NO: 7163 - RNA, 23 nt, synthetic construct
  source 1..23: mol_type = other RNA
atgatgataaaatcccacttttc

SEQ ID NO: 7164 - RNA, 23 nt, synthetic construct
  source 1..23: mol_type = other RNA
tcccacttttctttgggtttcta

SEQ ID NO: 7165 - RNA, 23 nt, synthetic construct
  source 1..23: mol_type = other RNA
cccacttttctttgggtttctac

SEQ ID NO: 7166 - RNA, 23 nt, synthetic construct
  source 1..23: mol_type = other RNA
ccacttttctttgggtttctact

SEQ ID NO: 7167 - RNA, 23 nt, synthetic construct
  source 1..23: mol_type = other RNA
cacttttctttgggtttctacta

SEQ ID NO: 7168 - RNA, 23 nt, synthetic construct
  source 1..23: mol_type = other RNA
acttttctttgggtttctactaa

SEQ ID NO: 7169 - RNA, 23 nt, synthetic construct
  source 1..23: mol_type = other RNA
cttttctttgggtttctactaaa

SEQ ID NO: 7170 - RNA, 23 nt, synthetic construct
  source 1..23: mol_type = other RNA
ttttctttgggtttctactaaaa

SEQ ID NO: 7171 - RNA, 23 nt, synthetic construct
  source 1..23: mol_type = other RNA
tttctttgggtttctactaaaat

SEQ ID NO: 7172 - RNA, 23 nt, synthetic construct
  source 1..23: mol_type = other RNA
ttctttgggtttctactaaaata

SEQ ID NO: 7173 - RNA, 23 nt, synthetic construct
  source 1..23: mol_type = other RNA
tctttgggtttctactaaaataa

SEQ ID NO: 7174 - RNA, 23 nt, synthetic construct
  source 1..23: mol_type = other RNA
ctttgggtttctactaaaataat

SEQ ID NO: 7175 - RNA, 23 nt, synthetic construct
  source 1..23: mol_type = other RNA
ctaaaataatttactcactcaga

SEQ ID NO: 7176 - RNA, 23 nt, synthetic construct
  source 1..23: mol_type = other RNA
aaaataatttactcactcagagt

SEQ ID NO: 7177 - RNA, 23 nt, synthetic construct
  source 1..23: mol_type = other RNA
aaataatttactcactcagagtg

SEQ ID NO: 7178 - RNA, 23 nt, synthetic construct
  source 1..23: mol_type = other RNA
aataatttactcactcagagtga

SEQ ID NO: 7179 - RNA, 23 nt, synthetic construct
  source 1..23: mol_type = other RNA
ataatttactcactcagagtgag

SEQ ID NO: 7180 - RNA, 23 nt, synthetic construct
  source 1..23: mol_type = other RNA
taatttactcactcagagtgagg

SEQ ID NO: 7181 - RNA, 23 nt, synthetic construct
  source 1..23: mol_type = other RNA
agagtgaggtcaatgagaaaaac

SEQ ID NO: 7182 - RNA, 23 nt, synthetic construct
  source 1..23: mol_type = other RNA
ggctaagaaagagttgtagaatg

SEQ ID NO: 7183 - RNA, 23 nt, synthetic construct
  source 1..23: mol_type = other RNA
aagaaagagttgtagaatggttg

SEQ ID NO: 7184 - RNA, 23 nt, synthetic construct
  source 1..23: mol_type = other RNA
gggtgctgataaaattaatggat

SEQ ID NO: 7185 - RNA, 23 nt, synthetic construct
  source 1..23: mol_type = other RNA
ggtgctgataaaattaatggata

SEQ ID NO: 7186 - RNA, 23 nt, synthetic construct
  source 1..23: mol_type = other RNA
gtgctgataaaattaatggataa

SEQ ID NO: 7187 - RNA, 23 nt, synthetic construct
  source 1..23: mol_type = other RNA
taggaactgtgagagtatagaat

SEQ ID NO: 7188 - RNA, 23 nt, synthetic construct
  source 1..23: mol_type = other RNA
aggaactgtgagagtatagaatt

SEQ ID NO: 7189 - RNA, 23 nt, synthetic construct
  source 1..23: mol_type = other RNA
ggaactgtgagagtatagaattt

SEQ ID NO: 7190 - RNA, 23 nt, synthetic construct
  source 1..23: mol_type = other RNA
gaactgtgagagtatagaatttc

SEQ ID NO: 7191 - RNA, 23 nt, synthetic construct
  source 1..23: mol_type = other RNA
aactgtgagagtatagaatttct

SEQ ID NO: 7192 - RNA, 23 nt, synthetic construct
  source 1..23: mol_type = other RNA
actgtgagagtatagaatttctt

SEQ ID NO: 7193 - RNA, 23 nt, synthetic construct
  source 1..23: mol_type = other RNA
ctgtgagagtatagaatttctta

SEQ ID NO: 7194 - RNA, 23 nt, synthetic construct
  source 1..23: mol_type = other RNA
tgtgagagtatagaatttcttag

SEQ ID NO: 7195 - RNA, 23 nt, synthetic construct
  source 1..23: mol_type = other RNA
gtgagagtatagaatttcttagt

SEQ ID NO: 7196 - RNA, 23 nt, synthetic construct
  source 1..23: mol_type = other RNA
tgagagtatagaatttcttagtg

SEQ ID NO: 7197 - RNA, 23 nt, synthetic construct
  source 1..23: mol_type = other RNA
gagagtatagaatttcttagtgc

SEQ ID NO: 7198 - RNA, 23 nt, synthetic construct
  source 1..23: mol_type = other RNA
agagtatagaatttcttagtgca

SEQ ID NO: 7199 - RNA, 23 nt, synthetic construct
  source 1..23: mol_type = other RNA
gagtatagaatttcttagtgcaa

SEQ ID NO: 7200 - RNA, 23 nt, synthetic construct
  source 1..23: mol_type = other RNA
tctgtaaggactgttctttctct

SEQ ID NO: 7201 - RNA, 23 nt, synthetic construct
  source 1..23: mol_type = other RNA
agtgggatattatctaacttttc

SEQ ID NO: 7202 - RNA, 23 nt, synthetic construct
  source 1..23: mol_type = other RNA
tttgtctttggcattcatcttct

SEQ ID NO: 7203 - RNA, 23 nt, synthetic construct
  source 1..23: mol_type = other RNA
tctttggcattcatcttctttta

SEQ ID NO: 7204 - RNA, 23 nt, synthetic construct
  source 1..23: mol_type = other RNA
gtgcattaaaaaatgtttggcag

SEQ ID NO: 7205 - RNA, 23 nt, synthetic construct
  source 1..23: mol_type = other RNA
agtcactctataattcctgtatt

SEQ ID NO: 7206 - RNA, 23 nt, synthetic construct
  source 1..23: mol_type = other RNA
tttagttgtcgtttaacctgtcc

SEQ ID NO: 7207 - RNA, 23 nt, synthetic construct
  source 1..23: mol_type = other RNA
ttagttgtcgtttaacctgtcca

SEQ ID NO: 7208 - RNA, 23 nt, synthetic construct
  source 1..23: mol_type = other RNA
tagttgtcgtttaacctgtccaa

SEQ ID NO: 7209 - RNA, 23 nt, synthetic construct
  source 1..23: mol_type = other RNA
agttgtcgtttaacctgtccaaa

SEQ ID NO: 7210 - RNA, 23 nt, synthetic construct
  source 1..23: mol_type = other RNA
gttgtcgtttaacctgtccaaac

SEQ ID NO: 7211 - RNA, 23 nt, synthetic construct
  source 1..23: mol_type = other RNA
ttgtcgtttaacctgtccaaact

SEQ ID NO: 7212 - RNA, 23 nt, synthetic construct
  source 1..23: mol_type = other RNA
tgtcgtttaacctgtccaaactt

SEQ ID NO: 7213 - RNA, 23 nt, synthetic construct
  source 1..23: mol_type = other RNA
gtcgtttaacctgtccaaacttc

SEQ ID NO: 7214 - RNA, 23 nt, synthetic construct
  source 1..23: mol_type = other RNA
tcgtttaacctgtccaaacttct

SEQ ID NO: 7215 - RNA, 23 nt, synthetic construct
  source 1..23: mol_type = other RNA
cgtttaacctgtccaaacttcta

SEQ ID NO: 7216 - RNA, 23 nt, synthetic construct
  source 1..23: mol_type = other RNA
gtttaacctgtccaaacttctac

SEQ ID NO: 7217 - RNA, 23 nt, synthetic construct
  source 1..23: mol_type = other RNA
tttaacctgtccaaacttctaca

SEQ ID NO: 7218 - RNA, 23 nt, synthetic construct
  source 1..23: mol_type = other RNA
ttaacctgtccaaacttctacac

SEQ ID NO: 7219 - RNA, 23 nt, synthetic construct
  source 1..23: mol_type = other RNA
taacctgtccaaacttctacaca

SEQ ID NO: 7220 - RNA, 23 nt, synthetic construct
  source 1..23: mol_type = other RNA
aacctgtccaaacttctacacaa

SEQ ID NO: 7221 - RNA, 23 nt, synthetic construct
  source 1..23: mol_type = other RNA
acctgtccaaacttctacacaat

SEQ ID NO: 7222 - RNA, 23 nt, synthetic construct
  source 1..23: mol_type = other RNA
cctgtccaaacttctacacaatg

SEQ ID NO: 7223 - RNA, 23 nt, synthetic construct
  source 1..23: mol_type = other RNA
ctgtccaaacttctacacaatga

SEQ ID NO: 7224 - RNA, 23 nt, synthetic construct
  source 1..23: mol_type = other RNA
tgtccaaacttctacacaatgaa

SEQ ID NO: 7225 - RNA, 23 nt, synthetic construct
  source 1..23: mol_type = other RNA
gtccaaacttctacacaatgaac

SEQ ID NO: 7226 - RNA, 23 nt, synthetic construct
  source 1..23: mol_type = other RNA
tccaaacttctacacaatgaact

SEQ ID NO: 7227 - RNA, 23 nt, synthetic construct
  source 1..23: mol_type = other RNA
ccaaacttctacacaatgaactt

SEQ ID NO: 7228 - RNA, 23 nt, synthetic construct
  source 1..23: mol_type = other RNA
caaacttctacacaatgaacttc

SEQ ID NO: 7229 - RNA, 23 nt, synthetic construct
  source 1..23: mol_type = other RNA
aaacttctacacaatgaacttct

SEQ ID NO: 7230 - RNA, 23 nt, synthetic construct
  source 1..23: mol_type = other RNA
aacttctacacaatgaacttctt

SEQ ID NO: 7231 - RNA, 23 nt, synthetic construct
  source 1..23: mol_type = other RNA
acttctacacaatgaacttctta

SEQ ID NO: 7232 - RNA, 23 nt, synthetic construct
  source 1..23: mol_type = other RNA
cttctacacaatgaacttcttaa

SEQ ID NO: 7233 - RNA, 23 nt, synthetic construct
  source 1..23: mol_type = other RNA
ttctacacaatgaacttcttaac

SEQ ID NO: 7234 - RNA, 23 nt, synthetic construct
  source 1..23: mol_type = other RNA
tctacacaatgaacttcttaaca

SEQ ID NO: 7235 - RNA, 23 nt, synthetic construct
  source 1..23: mol_type = other RNA
ctacacaatgaacttcttaacaa

SEQ ID NO: 7236 - RNA, 23 nt, synthetic construct
  source 1..23: mol_type = other RNA
tacacaatgaacttcttaacaag

SEQ ID NO: 7237 - RNA, 23 nt, synthetic construct
  source 1..23: mol_type = other RNA
acacaatgaacttcttaacaaga

SEQ ID NO: 7238 - RNA, 23 nt, synthetic construct
  source 1..23: mol_type = other RNA
cacaatgaacttcttaacaagat

SEQ ID NO: 7239 - RNA, 23 nt, synthetic construct
  source 1..23: mol_type = other RNA
acaatgaacttcttaacaagatt

SEQ ID NO: 7240 - RNA, 23 nt, synthetic construct
  source 1..23: mol_type = other RNA
caatgaacttcttaacaagattt

SEQ ID NO: 7241 - RNA, 23 nt, synthetic construct
  source 1..23: mol_type = other RNA
cttaacaagattttaagttctct

SEQ ID NO: 7242 - RNA, 23 nt, synthetic construct
  source 1..23: mol_type = other RNA
taacaagattttaagttctctgt

SEQ ID NO: 7243 - RNA, 23 nt, synthetic construct
  source 1..23: mol_type = other RNA
taagttctctgtataagaggttt

SEQ ID NO: 7244 - RNA, 23 nt, synthetic construct
  source 1..23: mol_type = other RNA
ctgtataagaggtttcacctcat

SEQ ID NO: 7245 - RNA, 23 nt, synthetic construct
  source 1..23: mol_type = other RNA
tcatttggcactatagagtattt

SEQ ID NO: 7246 - RNA, 23 nt, synthetic construct
  source 1..23: mol_type = other RNA
catttggcactatagagtatttg

SEQ ID NO: 7247 - RNA, 23 nt, synthetic construct
  source 1..23: mol_type = other RNA
atttggcactatagagtatttgt

SEQ ID NO: 7248 - RNA, 23 nt, synthetic construct
  source 1..23: mol_type = other RNA
tttggcactatagagtatttgtt

SEQ ID NO: 7249 - RNA, 23 nt, synthetic construct
  source 1..23: mol_type = other RNA
ttggcactatagagtatttgtta

SEQ ID NO: 7250 - RNA, 23 nt, synthetic construct
  source 1..23: mol_type = other RNA
tggcactatagagtatttgttaa

SEQ ID NO: 7251 - RNA, 23 nt, synthetic construct
  source 1..23: mol_type = other RNA
ggcactatagagtatttgttaat

SEQ ID NO: 7252 - RNA, 23 nt, synthetic construct
  source 1..23: mol_type = other RNA
gcactatagagtatttgttaatg

SEQ ID NO: 7253 - RNA, 23 nt, synthetic construct
  source 1..23: mol_type = other RNA
cactatagagtatttgttaatgg

SEQ ID NO: 7254 - RNA, 23 nt, synthetic construct
  source 1..23: mol_type = other RNA
actatagagtatttgttaatggc

SEQ ID NO: 7255 - RNA, 23 nt, synthetic construct
  source 1..23: mol_type = other RNA
ctatagagtatttgttaatggca

SEQ ID NO: 7256 - RNA, 23 nt, synthetic construct
  source 1..23: mol_type = other RNA
tatagagtatttgttaatggcag

SEQ ID NO: 7257 - RNA, 23 nt, synthetic construct
  source 1..23: mol_type = other RNA
atagagtatttgttaatggcaga

SEQ ID NO: 7258 - RNA, 23 nt, synthetic construct
  source 1..23: mol_type = other RNA
tagagtatttgttaatggcagag

SEQ ID NO: 7259 - RNA, 23 nt, synthetic construct
  source 1..23: mol_type = other RNA
tggcagagatgatttttctttta

SEQ ID NO: 7260 - RNA, 23 nt, synthetic construct
  source 1..23: mol_type = other RNA
ggcagagatgatttttcttttaa

SEQ ID NO: 7261 - RNA, 23 nt, synthetic construct
  source 1..23: mol_type = other RNA
gcagagatgatttttcttttaaa

SEQ ID NO: 7262 - RNA, 23 nt, synthetic construct
  source 1..23: mol_type = other RNA
aaagactagctgttatttgtatt

SEQ ID NO: 7263 - RNA, 23 nt, synthetic construct
  source 1..23: mol_type = other RNA
tagctaacatataaagaatgtct

SEQ ID NO: 7264 - RNA, 23 nt, synthetic construct
  source 1..23: mol_type = other RNA
taaagaatgtctacttttgcttt

SEQ ID NO: 7265 - RNA, 23 nt, synthetic construct
  source 1..23: mol_type = other RNA
agaatgtctacttttgctttaat

SEQ ID NO: 7266 - RNA, 23 nt, synthetic construct
  source 1..23: mol_type = other RNA
aactaagccattatgctattagt

SEQ ID NO: 7267 - RNA, 23 nt, synthetic construct
  source 1..23: mol_type = other RNA
aattaggtaacaatccctatttt

SEQ ID NO: 7268 - RNA, 23 nt, synthetic construct
  source 1..23: mol_type = other RNA
attaggtaacaatccctatttta

SEQ ID NO: 7269 - RNA, 23 nt, synthetic construct
  source 1..23: mol_type = other RNA
ttaggtaacaatccctattttaa

SEQ ID NO: 7270 - RNA, 23 nt, synthetic construct
  source 1..23: mol_type = other RNA
taggtaacaatccctattttaaa

SEQ ID NO: 7271 - RNA, 23 nt, synthetic construct
  source 1..23: mol_type = other RNA
aggtaacaatccctattttaaaa

SEQ ID NO: 7272 - RNA, 23 nt, synthetic construct
  source 1..23: mol_type = other RNA
ggtaacaatccctattttaaaat

SEQ ID NO: 7273 - RNA, 23 nt, synthetic construct
  source 1..23: mol_type = other RNA
acaatccctattttaaaattccc

SEQ ID NO: 7274 - RNA, 23 nt, synthetic construct
  source 1..23: mol_type = other RNA
ccctaacaataatagaactgcca

SEQ ID NO: 7275 - RNA, 23 nt, synthetic construct
  source 1..23: mol_type = other RNA
cctaacaataatagaactgccag

SEQ ID NO: 7276 - RNA, 23 nt, synthetic construct
  source 1..23: mol_type = other RNA
taacaataatagaactgccagca

SEQ ID NO: 7277 - RNA, 23 nt, synthetic construct
  source 1..23: mol_type = other RNA
agaactgccagcatacttttctc

SEQ ID NO: 7278 - RNA, 23 nt, synthetic construct
  source 1..23: mol_type = other RNA
gaactgccagcatacttttctct

SEQ ID NO: 7279 - RNA, 23 nt, synthetic construct
  source 1..23: mol_type = other RNA
aactgccagcatacttttctctt

SEQ ID NO: 7280 - RNA, 23 nt, synthetic construct
  source 1..23: mol_type = other RNA
actgccagcatacttttctcttt

SEQ ID NO: 7281 - RNA, 23 nt, synthetic construct
  source 1..23: mol_type = other RNA
ctgccagcatacttttctctttc

SEQ ID NO: 7282 - RNA, 23 nt, synthetic construct
  source 1..23: mol_type = other RNA
tgccagcatacttttctctttca

SEQ ID NO: 7283 - RNA, 23 nt, synthetic construct
  source 1..23: mol_type = other RNA
gccagcatacttttctctttcag

SEQ ID NO: 7284 - RNA, 23 nt, synthetic construct
  source 1..23: mol_type = other RNA
ccagcatacttttctctttcagt

SEQ ID NO: 7285 - RNA, 23 nt, synthetic construct
  source 1..23: mol_type = other RNA
cagcatacttttctctttcagtt

SEQ ID NO: 7286 - RNA, 23 nt, synthetic construct
  source 1..23: mol_type = other RNA
agcatacttttctctttcagttg

SEQ ID NO: 7287 - RNA, 23 nt, synthetic construct
  source 1..23: mol_type = other RNA
gcatacttttctctttcagttgt

SEQ ID NO: 7288 - RNA, 23 nt, synthetic construct
  source 1..23: mol_type = other RNA
catacttttctctttcagttgta

SEQ ID NO: 7289 - RNA, 23 nt, synthetic construct
  source 1..23: mol_type = other RNA
atacttttctctttcagttgtag

SEQ ID NO: 7290 - RNA, 23 nt, synthetic construct
  source 1..23: mol_type = other RNA
tttcagttgtagatgaatacatt

SEQ ID NO: 7291 - RNA, 23 nt, synthetic construct
  source 1..23: mol_type = other RNA
ttcagttgtagatgaatacattc

SEQ ID NO: 7292 - RNA, 23 nt, synthetic construct
  source 1..23: mol_type = other RNA
tattttcagatgtgactgtattt

SEQ ID NO: 7293 - RNA, 23 nt, synthetic construct
  source 1..23: mol_type = other RNA
attttcagatgtgactgtatttc

SEQ ID NO: 7294 - RNA, 23 nt, synthetic construct
  source 1..23: mol_type = other RNA
ttttcagatgtgactgtatttcc

SEQ ID NO: 7295 - RNA, 23 nt, synthetic construct
  source 1..23: mol_type = other RNA
tttcagatgtgactgtatttcct

SEQ ID NO: 7296 - RNA, 23 nt, synthetic construct
  source 1..23: mol_type = other RNA
ttcagatgtgactgtatttcctg

SEQ ID NO: 7297 - RNA, 23 nt, synthetic construct
  source 1..23: mol_type = other RNA
tcagatgtgactgtatttcctga

SEQ ID NO: 7298 - RNA, 23 nt, synthetic construct
  source 1..23: mol_type = other RNA
cagatgtgactgtatttcctgat

SEQ ID NO: 7299 - RNA, 23 nt, synthetic construct
  source 1..23: mol_type = other RNA
agatgtgactgtatttcctgatc

SEQ ID NO: 7300 - RNA, 23 nt, synthetic construct
  source 1..23: mol_type = other RNA
gatgtgactgtatttcctgatca

SEQ ID NO: 7301 - RNA, 23 nt, synthetic construct
  source 1..23: mol_type = other RNA
atgtgactgtatttcctgatcat

SEQ ID NO: 7302 - RNA, 23 nt, synthetic construct
  source 1..23: mol_type = other RNA
tgtgactgtatttcctgatcatt

SEQ ID NO: 7303 - RNA, 23 nt, synthetic construct
  source 1..23: mol_type = other RNA
gtgactgtatttcctgatcattg

SEQ ID NO: 7304 - RNA, 23 nt, synthetic construct
  source 1..23: mol_type = other RNA
tgactgtatttcctgatcattgg

SEQ ID NO: 7305 - RNA, 23 nt, synthetic construct
  source 1..23: mol_type = other RNA
gactgtatttcctgatcattggt

SEQ ID NO: 7306 - RNA, 23 nt, synthetic construct
  source 1..23: mol_type = other RNA
actgtatttcctgatcattggtc

SEQ ID NO: 7307 - RNA, 23 nt, synthetic construct
  source 1..23: mol_type = other RNA
ctgtatttcctgatcattggtcc

SEQ ID NO: 7308 - RNA, 23 nt, synthetic construct
  source 1..23: mol_type = other RNA
taggagattacccttatacccac

SEQ ID NO: 7309 - RNA, 23 nt, synthetic construct
  source 1..23: mol_type = other RNA
aggtgcgggctaaaatccaactg

SEQ ID NO: 7310 - RNA, 23 nt, synthetic construct
  source 1..23: mol_type = other RNA
ggtgcgggctaaaatccaactgc

SEQ ID NO: 7311 - RNA, 23 nt, synthetic construct
  source 1..23: mol_type = other RNA
gtgcgggctaaaatccaactgca

SEQ ID NO: 7312 - RNA, 23 nt, synthetic construct
  source 1..23: mol_type = other RNA
tgcgggctaaaatccaactgcaa

SEQ ID NO: 7313 - RNA, 23 nt, synthetic construct
  source 1..23: mol_type = other RNA
gcgggctaaaatccaactgcaat

SEQ ID NO: 7314 - RNA, 23 nt, synthetic construct
  source 1..23: mol_type = other RNA
cgggctaaaatccaactgcaatt

SEQ ID NO: 7315 - RNA, 23 nt, synthetic construct
  source 1..23: mol_type = other RNA
gggctaaaatccaactgcaattg

SEQ ID NO: 7316 - RNA, 23 nt, synthetic construct
  source 1..23: mol_type = other RNA
ggctaaaatccaactgcaattgg

SEQ ID NO: 7317 - RNA, 23 nt, synthetic construct
  source 1..23: mol_type = other RNA
gctaaaatccaactgcaattggc

SEQ ID NO: 7318 - RNA, 23 nt, synthetic construct
  source 1..23: mol_type = other RNA
ctaaaatccaactgcaattggct

SEQ ID NO: 7319 - RNA, 23 nt, synthetic construct
  source 1..23: mol_type = other RNA
taaaatccaactgcaattggctc

SEQ ID NO: 7320 - RNA, 23 nt, synthetic construct
  source 1..23: mol_type = other RNA
aaaatccaactgcaattggctcc

SEQ ID NO: 7321 - RNA, 23 nt, synthetic construct
  source 1..23: mol_type = other RNA
aaatccaactgcaattggctccc

SEQ ID NO: 7322 - RNA, 23 nt, synthetic construct
  source 1..23: mol_type = other RNA
aatccaactgcaattggctccca

SEQ ID NO: 7323 - RNA, 23 nt, synthetic construct
  source 1..23: mol_type = other RNA
cagagaagcatcttattggctta

SEQ ID NO: 7324 - RNA, 23 nt, synthetic construct
  source 1..23: mol_type = other RNA
agaagcatcttattggcttatat

SEQ ID NO: 7325 - RNA, 23 nt, synthetic construct
  source 1..23: mol_type = other RNA
gaagcatcttattggcttatatg

SEQ ID NO: 7326 - RNA, 23 nt, synthetic construct
  source 1..23: mol_type = other RNA
tatacatcttcagaaaatgagaa

SEQ ID NO: 7327 - RNA, 23 nt, synthetic construct
  source 1..23: mol_type = other RNA
atacatcttcagaaaatgagaat

SEQ ID NO: 7328 - RNA, 23 nt, synthetic construct
  source 1..23: mol_type = other RNA
tacatcttcagaaaatgagaatt

SEQ ID NO: 7329 - RNA, 23 nt, synthetic construct
  source 1..23: mol_type = other RNA
acatcttcagaaaatgagaatta

SEQ ID NO: 7330 - RNA, 23 nt, synthetic construct
  source 1..23: mol_type = other RNA
catcttcagaaaatgagaattaa

SEQ ID NO: 7331 - RNA, 23 nt, synthetic construct
  source 1..23: mol_type = other RNA
ctacagattgaacaaagaactta

SEQ ID NO: 7332 - RNA, 23 nt, synthetic construct
  source 1..23: mol_type = other RNA
tacagattgaacaaagaacttag

SEQ ID NO: 7333 - RNA, 23 nt, synthetic construct
  source 1..23: mol_type = other RNA
acagattgaacaaagaacttaga

SEQ ID NO: 7334 - RNA, 23 nt, synthetic construct
  source 1..23: mol_type = other RNA
cagattgaacaaagaacttagaa

SEQ ID NO: 7335 - RNA, 23 nt, synthetic construct
  source 1..23: mol_type = other RNA
agattgaacaaagaacttagaag

SEQ ID NO: 7336 - RNA, 23 nt, synthetic construct
  source 1..23: mol_type = other RNA
gattgaacaaagaacttagaaga

SEQ ID NO: 7337 - RNA, 23 nt, synthetic construct
  source 1..23: mol_type = other RNA
attcctgagagaagagaaattga

SEQ ID NO: 7338 - RNA, 23 nt, synthetic construct
  source 1..23: mol_type = other RNA
ttcctgagagaagagaaattgat

SEQ ID NO: 7339 - RNA, 23 nt, synthetic construct
  source 1..23: mol_type = other RNA
tcctgagagaagagaaattgatt

SEQ ID NO: 7340 - RNA, 23 nt, synthetic construct
  source 1..23: mol_type = other RNA
cctgagagaagagaaattgattg

SEQ ID NO: 7341 - RNA, 23 nt, synthetic construct
  source 1..23: mol_type = other RNA
ctgagagaagagaaattgattgt

SEQ ID NO: 7342 - RNA, 23 nt, synthetic construct
  source 1..23: mol_type = other RNA
tgagagaagagaaattgattgtt

SEQ ID NO: 7343 - RNA, 23 nt, synthetic construct
  source 1..23: mol_type = other RNA
gagagaagagaaattgattgttt

SEQ ID NO: 7344 - RNA, 23 nt, synthetic construct
  source 1..23: mol_type = other RNA
agagaagagaaattgattgttta

SEQ ID NO: 7345 - RNA, 23 nt, synthetic construct
  source 1..23: mol_type = other RNA
gagaagagaaattgattgtttat

SEQ ID NO: 7346 - RNA, 23 nt, synthetic construct
  source 1..23: mol_type = other RNA
gaagagaaattgattgtttatca

SEQ ID NO: 7347 - RNA, 23 nt, synthetic construct
  source 1..23: mol_type = other RNA
catgttggtttaatttttcaacc

SEQ ID NO: 7348 - RNA, 23 nt, synthetic construct
  source 1..23: mol_type = other RNA
atgttggtttaatttttcaaccc

SEQ ID NO: 7349 - RNA, 23 nt, synthetic construct
  source 1..23: mol_type = other RNA
tgttggtttaatttttcaaccca

SEQ ID NO: 7350 - RNA, 23 nt, synthetic construct
  source 1..23: mol_type = other RNA
gttggtttaatttttcaacccag

SEQ ID NO: 7351 - RNA, 23 nt, synthetic construct
  source 1..23: mol_type = other RNA
tatcgtccatacagttttcattc

SEQ ID NO: 7352 - RNA, 23 nt, synthetic construct
  source 1..23: mol_type = other RNA
atcgtccatacagttttcattct

SEQ ID NO: 7353 - RNA, 23 nt, synthetic construct
  source 1..23: mol_type = other RNA
tcgtccatacagttttcattcta

SEQ ID NO: 7354 - RNA, 23 nt, synthetic construct
  source 1..23: mol_type = other RNA
cgtccatacagttttcattctat

SEQ ID NO: 7355 - RNA, 23 nt, synthetic construct
  source 1..23: mol_type = other RNA
gtccatacagttttcattctatg

SEQ ID NO: 7356 - RNA, 23 nt, synthetic construct
  source 1..23: mol_type = other RNA
tccatacagttttcattctatgc

SEQ ID NO: 7357 - RNA, 23 nt, synthetic construct
  source 1..23: mol_type = other RNA
ccatacagttttcattctatgca

SEQ ID NO: 7358 - RNA, 23 nt, synthetic construct
  source 1..23: mol_type = other RNA
catacagttttcattctatgcat

SEQ ID NO: 7359 - RNA, 23 nt, synthetic construct
  source 1..23: mol_type = other RNA
atacagttttcattctatgcatg

SEQ ID NO: 7360 - RNA, 23 nt, synthetic construct
  source 1..23: mol_type = other RNA
tacagttttcattctatgcatgg

SEQ ID NO: 7361 - RNA, 23 nt, synthetic construct
  source 1..23: mol_type = other RNA
acagttttcattctatgcatgga

SEQ ID NO: 7362 - RNA, 23 nt, synthetic construct
  source 1..23: mol_type = other RNA
gaggattgtgtgcctaaattttg

SEQ ID NO: 7363 - RNA, 23 nt, synthetic construct
  source 1..23: mol_type = other RNA
tgtgcctaaattttgtctaacaa

SEQ ID NO: 7364 - RNA, 23 nt, synthetic construct
  source 1..23: mol_type = other RNA
gcctaaattttgtctaacaaatg

SEQ ID NO: 7365 - RNA, 23 nt, synthetic construct
  source 1..23: mol_type = other RNA
cctaaattttgtctaacaaatgc

SEQ ID NO: 7366 - RNA, 23 nt, synthetic construct
  source 1..23: mol_type = other RNA
ctaaattttgtctaacaaatgca

SEQ ID NO: 7367 - RNA, 23 nt, synthetic construct
  source 1..23: mol_type = other RNA
aattttgtctaacaaatgcaagc

SEQ ID NO: 7368 - RNA, 23 nt, synthetic construct
  source 1..23: mol_type = other RNA
cgtagaatgacatttactaatat

SEQ ID NO: 7369 - RNA, 23 nt, synthetic construct
  source 1..23: mol_type = other RNA
ttcttccataggctaaataatag

SEQ ID NO: 7370 - RNA, 23 nt, synthetic construct
  source 1..23: mol_type = other RNA
gagccaaaatattaaattctagt

SEQ ID NO: 7371 - RNA, 23 nt, synthetic construct
  source 1..23: mol_type = other RNA
attaaattctagttcttttccgc

SEQ ID NO: 7372 - RNA, 23 nt, synthetic construct
  source 1..23: mol_type = other RNA
ttaaattctagttcttttccgca

SEQ ID NO: 7373 - RNA, 23 nt, synthetic construct
  source 1..23: mol_type = other RNA
taaattctagttcttttccgcaa

SEQ ID NO: 7374 - RNA, 23 nt, synthetic construct
  source 1..23: mol_type = other RNA
aaattctagttcttttccgcaat

SEQ ID NO: 7375 - RNA, 23 nt, synthetic construct
  source 1..23: mol_type = other RNA
aattctagttcttttccgcaatg

SEQ ID NO: 7376 - RNA, 23 nt, synthetic construct
  source 1..23: mol_type = other RNA
attctagttcttttccgcaatga

SEQ ID NO: 7377 - RNA, 23 nt, synthetic construct
  source 1..23: mol_type = other RNA
ttctagttcttttccgcaatgac

SEQ ID NO: 7378 - RNA, 23 nt, synthetic construct
  source 1..23: mol_type = other RNA
tctagttcttttccgcaatgact

SEQ ID NO: 7379 - RNA, 23 nt, synthetic construct
  source 1..23: mol_type = other RNA
ctagttcttttccgcaatgacta

SEQ ID NO: 7380 - RNA, 23 nt, synthetic construct
  source 1..23: mol_type = other RNA
tagttcttttccgcaatgactag

SEQ ID NO: 7381 - RNA, 23 nt, synthetic construct
  source 1..23: mol_type = other RNA
agttcttttccgcaatgactagt

SEQ ID NO: 7382 - RNA, 23 nt, synthetic construct
  source 1..23: mol_type = other RNA
gttcttttccgcaatgactagtg

SEQ ID NO: 7383 - RNA, 23 nt, synthetic construct
  source 1..23: mol_type = other RNA
gactggagaagattattcaaact

SEQ ID NO: 7384 - RNA, 23 nt, synthetic construct
  source 1..23: mol_type = other RNA
ctggagaagattattcaaacttg

SEQ ID NO: 7385 - RNA, 23 nt, synthetic construct
  source 1..23: mol_type = other RNA
aacttgatctgtgtttcaggttt

SEQ ID NO: 7386 - RNA, 23 nt, synthetic construct
  source 1..23: mol_type = other RNA
gatctgtgtttcaggtttttaaa

SEQ ID NO: 7387 - RNA, 23 nt, synthetic construct
  source 1..23: mol_type = other RNA
ttcaggtttttaaatgtcctaaa

SEQ ID NO: 7388 - RNA, 23 nt, synthetic construct
  source 1..23: mol_type = other RNA
aaaaggaattttggattgacttt

SEQ ID NO: 7389 - RNA, 23 nt, synthetic construct
  source 1..23: mol_type = other RNA
gattgactttcaaagtactaata

SEQ ID NO: 7390 - RNA, 23 nt, synthetic construct
  source 1..23: mol_type = other RNA
ttgactttcaaagtactaatact

SEQ ID NO: 7391 - RNA, 23 nt, synthetic construct
  source 1..23: mol_type = other RNA
ggtagcgtgactcttcttatacc

SEQ ID NO: 7392 - RNA, 23 nt, synthetic construct
  source 1..23: mol_type = other RNA
gcgtgactcttcttatacctaag

SEQ ID NO: 7393 - RNA, 23 nt, synthetic construct
  source 1..23: mol_type = other RNA
cctaagaacatattacaaatgtc

SEQ ID NO: 7394 - RNA, 23 nt, synthetic construct
  source 1..23: mol_type = other RNA
tgcaaaacatgccttgaactctt

SEQ ID NO: 7395 - RNA, 23 nt, synthetic construct
  source 1..23: mol_type = other RNA
gcaaaacatgccttgaactcttg

SEQ ID NO: 7396 - RNA, 23 nt, synthetic construct
  source 1..23: mol_type = other RNA
catgccttgaactcttgaactac

SEQ ID NO: 7397 - RNA, 23 nt, synthetic construct
  source 1..23: mol_type = other RNA
aactcttgaactactgtgaaaag

SEQ ID NO: 7398 - RNA, 23 nt, synthetic construct
  source 1..23: mol_type = other RNA
tcttgaactactgtgaaaagaat

SEQ ID NO: 7399 - RNA, 23 nt, synthetic construct
  source 1..23: mol_type = other RNA
ttgaactactgtgaaaagaatca

SEQ ID NO: 7400 - RNA, 23 nt, synthetic construct
  source 1..23: mol_type = other RNA
accgttgtaaagactttttgtaa

SEQ ID NO: 7401 - RNA, 23 nt, synthetic construct
  source 1..23: mol_type = other RNA
ccgttgtaaagactttttgtaag

SEQ ID NO: 7402 - RNA, 23 nt, synthetic construct
  source 1..23: mol_type = other RNA
gtaagctagctgatactcttaag

SEQ ID NO: 7403 - RNA, 23 nt, synthetic construct
  source 1..23: mol_type = other RNA
agctagctgatactcttaagtat

SEQ ID NO: 7404 - RNA, 23 nt, synthetic construct
  source 1..23: mol_type = other RNA
ggaattgggcaataaactgtatc

SEQ ID NO: 7405 - RNA, 23 nt, synthetic construct
  source 1..23: mol_type = other RNA
gaattgggcaataaactgtatca

SEQ ID NO: 7406 - RNA, 23 nt, synthetic construct
  source 1..23: mol_type = other RNA
aattgggcaataaactgtatcaa

SEQ ID NO: 7407 - RNA, 23 nt, synthetic construct
  source 1..23: mol_type = other RNA
attgggcaataaactgtatcaaa

SEQ ID NO: 7408 - RNA, 23 nt, synthetic construct
  source 1..23: mol_type = other RNA
ttgggcaataaactgtatcaaaa

SEQ ID NO: 7409 - RNA, 23 nt, synthetic construct
  source 1..23: mol_type = other RNA
tgggcaataaactgtatcaaaaa

SEQ ID NO: 7410 - RNA, 23 nt, synthetic construct
  source 1..23: mol_type = other RNA
gggcaataaactgtatcaaaaat

SEQ ID NO: 7411 - RNA, 23 nt, synthetic construct
  source 1..23: mol_type = other RNA
ggcaataaactgtatcaaaaata

SEQ ID NO: 7412 - RNA, 23 nt, synthetic construct
  source 1..23: mol_type = other RNA
ctgtatcaaaaatatgtagatgg

SEQ ID NO: 7413 - RNA, 23 nt, synthetic construct
  source 1..23: mol_type = other RNA
tgtatcaaaaatatgtagatgga

SEQ ID NO: 7414 - RNA, 23 nt, synthetic construct
  source 1..23: mol_type = other RNA
gtatcaaaaatatgtagatggat

SEQ ID NO: 7415 - RNA, 23 nt, synthetic construct
  source 1..23: mol_type = other RNA
ggaaggtgaagagaatttcaaac

SEQ ID NO: 7416 - RNA, 23 nt, synthetic construct
  source 1..23: mol_type = other RNA
aaggtgaagagaatttcaaactc

SEQ ID NO: 7417 - RNA, 23 nt, synthetic construct
  source 1..23: mol_type = other RNA
aggtgaagagaatttcaaactcc

SEQ ID NO: 7418 - RNA, 23 nt, synthetic construct
  source 1..23: mol_type = other RNA
cagatgtttcattaatttctagt

SEQ ID NO: 7419 - RNA, 23 nt, synthetic construct
  source 1..23: mol_type = other RNA
atttctagtctgtgaaaatatgc

SEQ ID NO: 7420 - RNA, 23 nt, synthetic construct
  source 1..23: mol_type = other RNA
tttctagtctgtgaaaatatgca

SEQ ID NO: 7421 - RNA, 23 nt, synthetic construct
  source 1..23: mol_type = other RNA
ttctagtctgtgaaaatatgcat

SEQ ID NO: 7422 - RNA, 23 nt, synthetic construct
  source 1..23: mol_type = other RNA
tctagtctgtgaaaatatgcatt

SEQ ID NO: 7423 - RNA, 23 nt, synthetic construct
  source 1..23: mol_type = other RNA
ctagtctgtgaaaatatgcattt

SEQ ID NO: 7424 - RNA, 23 nt, synthetic construct
  source 1..23: mol_type = other RNA
tagtctgtgaaaatatgcatttt

SEQ ID NO: 7425 - RNA, 23 nt, synthetic construct
  source 1..23: mol_type = other RNA
agtctgtgaaaatatgcatttta

SEQ ID NO: 7426 - RNA, 23 nt, synthetic construct
  source 1..23: mol_type = other RNA
gtctgtgaaaatatgcattttat

SEQ ID NO: 7427 - RNA, 23 nt, synthetic construct
  source 1..23: mol_type = other RNA
gtgatagcctttataccaaaatg

SEQ ID NO: 7428 - RNA, 23 nt, synthetic construct
  source 1..23: mol_type = other RNA
accaacagcaagtcataaaagta

SEQ ID NO: 7429 - RNA, 23 nt, synthetic construct
  source 1..23: mol_type = other RNA
ccaacagcaagtcataaaagtat

SEQ ID NO: 7430 - RNA, 23 nt, synthetic construct
  source 1..23: mol_type = other RNA
caacagcaagtcataaaagtatt

SEQ ID NO: 7431 - RNA, 23 nt, synthetic construct
  source 1..23: mol_type = other RNA
aacagcaagtcataaaagtattt

SEQ ID NO: 7432 - RNA, 23 nt, synthetic construct
  source 1..23: mol_type = other RNA
acagcaagtcataaaagtattta

SEQ ID NO: 7433 - RNA, 23 nt, synthetic construct
  source 1..23: mol_type = other RNA
cagcaagtcataaaagtatttat

SEQ ID NO: 7434 - RNA, 23 nt, synthetic construct
  source 1..23: mol_type = other RNA
ctgtcttcagatgtaaataatta

SEQ ID NO: 7435 - RNA, 23 nt, synthetic construct
  source 1..23: mol_type = other RNA
tgcattttctgaaaatgtattgt

SEQ ID NO: 7436 - RNA, 23 nt, synthetic construct
  source 1..23: mol_type = other RNA
ttctgtgaagcatatagaactct

SEQ ID NO: 7437 - RNA, 23 nt, synthetic construct
  source 1..23: mol_type = other RNA
tctgtgaagcatatagaactcta

SEQ ID NO: 7438 - RNA, 23 nt, synthetic construct
  source 1..23: mol_type = other RNA
ctgtgaagcatatagaactctat

SEQ ID NO: 7439 - RNA, 23 nt, synthetic construct
  source 1..23: mol_type = other RNA
tgtgaagcatatagaactctatt

SEQ ID NO: 7440 - RNA, 23 nt, synthetic construct
  source 1..23: mol_type = other RNA
gtgaagcatatagaactctattt

SEQ ID NO: 7441 - RNA, 23 nt, synthetic construct
  source 1..23: mol_type = other RNA
tgaagcatatagaactctatttt

SEQ ID NO: 7442 - RNA, 23 nt, synthetic construct
  source 1..23: mol_type = other RNA
gaagcatatagaactctatttta

SEQ ID NO: 7443 - RNA, 23 nt, synthetic construct
  source 1..23: mol_type = other RNA
tttaaataaaggaagatgtgtcg

SEQ ID NO: 7444 - RNA, 21 nt, synthetic construct
  source 1..21: mol_type = other RNA
gccaaccgcgcacttcaaaaa

SEQ ID NO: 7445 - RNA, 21 nt, synthetic construct
  source 1..21: mol_type = other RNA
ccaaccgcgcacttcaaaaga

SEQ ID NO: 7446 - RNA, 21 nt, synthetic construct
  source 1..21: mol_type = other RNA
caaccgcgcacttcaaaagga

SEQ ID NO: 7447 - RNA, 21 nt, synthetic construct
  source 1..21: mol_type = other RNA
aaccgcgcacttcaaaaggga

SEQ ID NO: 7448 - RNA, 21 nt, synthetic construct
  source 1..21: mol_type = other RNA
accgcgcacttcaaaagggta

SEQ ID NO: 7449 - RNA, 21 nt, synthetic construct
  source 1..21: mol_type = other RNA
ccgcgcacttcaaaagggtga

SEQ ID NO: 7450 - RNA, 21 nt, synthetic construct
  source 1..21: mol_type = other RNA
cgcgcacttcaaaagggtgta

SEQ ID NO: 7451 - RNA, 21 nt, synthetic construct
  source 1..21: mol_type = other RNA
gcgcacttcaaaagggtgtca

SEQ ID NO: 7452 - RNA, 21 nt, synthetic construct
  source 1..21: mol_type = other RNA
cgcacttcaaaagggtgtcga

SEQ ID NO: 7453 - RNA, 21 nt, synthetic construct
  source 1..21: mol_type = other RNA
gcacttcaaaagggtgtcgga

SEQ ID NO: 7454 - RNA, 21 nt, synthetic construct
  source 1..21: mol_type = other RNA
cacttcaaaagggtgtcggta

SEQ ID NO: 7455 - RNA, 21 nt, synthetic construct
  source 1..21: mol_type = other RNA
caggactgaagtgtgtatgta

SEQ ID NO: 7456 - RNA, 21 nt, synthetic construct
  source 1..21: mol_type = other RNA
tgtcttttgtgtgattcttca

SEQ ID NO: 7457 - RNA, 21 nt, synthetic construct
  source 1..21: mol_type = other RNA
ttgtgtgattcttcaaactta

SEQ ID NO: 7458 - RNA, 21 nt, synthetic construct
  source 1..21: mol_type = other RNA
cgccaggactgaagtgtgtaa

SEQ ID NO: 7459 - RNA, 21 nt, synthetic construct
  source 1..21: mol_type = other RNA
gccaggactgaagtgtgtata

SEQ ID NO: 7460 - RNA, 21 nt, synthetic construct
  source 1..21: mol_type = other RNA
ccaggactgaagtgtgtatga

SEQ ID NO: 7461 - RNA, 21 nt, synthetic construct
  source 1..21: mol_type = other RNA
aggactgaagtgtgtatgtca

SEQ ID NO: 7462 - RNA, 21 nt, synthetic construct
  source 1..21: mol_type = other RNA
ggactgaagtgtgtatgtcta

SEQ ID NO: 7463 - RNA, 21 nt, synthetic construct
  source 1..21: mol_type = other RNA
gactgaagtgtgtatgtctta

SEQ ID NO: 7464 - RNA, 21 nt, synthetic construct
  source 1..21: mol_type = other RNA
actgaagtgtgtatgtcttta

SEQ ID NO: 7465 - RNA, 21 nt, synthetic construct
  source 1..21: mol_type = other RNA
ctgaagtgtgtatgtctttta

SEQ ID NO: 7466 - RNA, 21 nt, synthetic construct
  source 1..21: mol_type = other RNA
tgaagtgtgtatgtcttttga

SEQ ID NO: 7467 - RNA, 21 nt, synthetic construct
  source 1..21: mol_type = other RNA
gaagtgtgtatgtcttttgta

SEQ ID NO: 7468 - RNA, 21 nt, synthetic construct
  source 1..21: mol_type = other RNA
aagtgtgtatgtcttttgtga

SEQ ID NO: 7469 - RNA, 21 nt, synthetic construct
  source 1..21: mol_type = other RNA
agtgtgtatgtcttttgtgta

SEQ ID NO: 7470 - RNA, 21 nt, synthetic construct
  source 1..21: mol_type = other RNA
gtgtgtatgtcttttgtgtga

SEQ ID NO: 7471 - RNA, 21 nt, synthetic construct
  source 1..21: mol_type = other RNA
tgtgtatgtcttttgtgtgaa

SEQ ID NO: 7472 - RNA, 21 nt, synthetic construct
  source 1..21: mol_type = other RNA
gtgtatgtcttttgtgtgata

SEQ ID NO: 7473 - RNA, 21 nt, synthetic construct
  source 1..21: mol_type = other RNA
tgtatgtcttttgtgtgatta

SEQ ID NO: 7474 - RNA, 21 nt, synthetic construct
  source 1..21: mol_type = other RNA
gtatgtcttttgtgtgattca

SEQ ID NO: 7475 - RNA, 21 nt, synthetic construct
  source 1..21: mol_type = other RNA
tatgtcttttgtgtgattcta

SEQ ID NO: 7476 - RNA, 21 nt, synthetic construct
  source 1..21: mol_type = other RNA
atgtcttttgtgtgattctta

SEQ ID NO: 7477 - RNA, 21 nt, synthetic construct
  source 1..21: mol_type = other RNA
gtcttttgtgtgattcttcaa

SEQ ID NO: 7478 - RNA, 21 nt, synthetic construct
  source 1..21: mol_type = other RNA
tcttttgtgtgattcttcaaa

SEQ ID NO: 7479 - RNA, 21 nt, synthetic construct
  source 1..21: mol_type = other RNA
cttttgtgtgattcttcaaaa

SEQ ID NO: 7480 - RNA, 21 nt, synthetic construct
  source 1..21: mol_type = other RNA
ttttgtgtgattcttcaaaca

SEQ ID NO: 7481 - RNA, 21 nt, synthetic construct
  source 1..21: mol_type = other RNA
tttgtgtgattcttcaaacta

SEQ ID NO: 7482 - RNA, 21 nt, synthetic construct
  source 1..21: mol_type = other RNA
ccaaacagaaggagcatgtta

SEQ ID NO: 7483 - RNA, 21 nt, synthetic construct
  source 1..21: mol_type = other RNA
caaacagaaggagcatgttga

SEQ ID NO: 7484 - RNA, 21 nt, synthetic construct
  source 1..21: mol_type = other RNA
ttgggcatcagtcatgctaaa

SEQ ID NO: 7485 - RNA, 21 nt, synthetic construct
  source 1..21: mol_type = other RNA
ggcatcagtcatgctaaccaa

SEQ ID NO: 7486 - RNA, 21 nt, synthetic construct
  source 1..21: mol_type = other RNA
atcagtcatgctaaccaatga

SEQ ID NO: 7487 - RNA, 21 nt, synthetic construct
  source 1..21: mol_type = other RNA
gtcatgctaaccaatggaaaa

SEQ ID NO: 7488 - RNA, 21 nt, synthetic construct
  source 1..21: mol_type = other RNA
atgctaaccaatggaaaagaa

SEQ ID NO: 7489 - RNA, 21 nt, synthetic construct
  source 1..21: mol_type = other RNA
cagaactgaatgctcaagtca

SEQ ID NO: 7490 - RNA, 21 nt, synthetic construct
  source 1..21: mol_type = other RNA
aaaagagcaggtgatcaaata

SEQ ID NO: 7491 - RNA, 21 nt, synthetic construct
  source 1..21: mol_type = other RNA
ctcccttccagaactgaatga

SEQ ID NO: 7492 - RNA, 21 nt, synthetic construct
  source 1..21: mol_type = other RNA
tcccttccagaactgaatgca

SEQ ID NO: 7493 - RNA, 21 nt, synthetic construct
  source 1..21: mol_type = other RNA
cccttccagaactgaatgcta

SEQ ID NO: 7494 - RNA, 21 nt, synthetic construct
  source 1..21: mol_type = other RNA
ccttccagaactgaatgctca

SEQ ID NO: 7495 - RNA, 21 nt, synthetic construct
  source 1..21: mol_type = other RNA
cttccagaactgaatgctcaa

SEQ ID NO: 7496 - RNA, 21 nt, synthetic construct
  source 1..21: mol_type = other RNA
ttccagaactgaatgctcaaa

SEQ ID NO: 7497 - RNA, 21 nt, synthetic construct
  source 1..21: mol_type = other RNA
tccagaactgaatgctcaaga

SEQ ID NO: 7498 - RNA, 21 nt, synthetic construct
  source 1..21: mol_type = other RNA
ccagaactgaatgctcaagta

SEQ ID NO: 7499 - RNA, 21 nt, synthetic construct
  source 1..21: mol_type = other RNA
agaactgaatgctcaagtcta

SEQ ID NO: 7500 - RNA, 21 nt, synthetic construct
  source 1..21: mol_type = other RNA
gaactgaatgctcaagtctta

SEQ ID NO: 7501 - RNA, 21 nt, synthetic construct
  source 1..21: mol_type = other RNA
aactgaatgctcaagtcttca

SEQ ID NO: 7502 - RNA, 21 nt, synthetic construct
  source 1..21: mol_type = other RNA
actgaatgctcaagtcttcta

SEQ ID NO: 7503 - RNA, 21 nt, synthetic construct
  source 1..21: mol_type = other RNA
ctgaatgctcaagtcttctga

SEQ ID NO: 7504 - RNA, 21 nt, synthetic construct
  source 1..21: mol_type = other RNA
tgaatgctcaagtcttctgta

SEQ ID NO: 7505 - RNA, 21 nt, synthetic construct
  source 1..21: mol_type = other RNA
gaatgctcaagtcttctgtca

SEQ ID NO: 7506 - RNA, 21 nt, synthetic construct
  source 1..21: mol_type = other RNA
aatgctcaagtcttctgtcaa

SEQ ID NO: 7507 - RNA, 21 nt, synthetic construct
  source 1..21: mol_type = other RNA
atgctcaagtcttctgtcata

SEQ ID NO: 7508 - RNA, 21 nt, synthetic construct
  source 1..21: mol_type = other RNA
tgctcaagtcttctgtcataa

SEQ ID NO: 7509 - RNA, 21 nt, synthetic construct
  source 1..21: mol_type = other RNA
gctcaagtcttctgtcataga

SEQ ID NO: 7510 - RNA, 21 nt, synthetic construct
  source 1..21: mol_type = other RNA
ctcaagtcttctgtcatagta

SEQ ID NO: 7511 - RNA, 21 nt, synthetic construct
  source 1..21: mol_type = other RNA
tcaagtcttctgtcatagtta

SEQ ID NO: 7512 - RNA, 21 nt, synthetic construct
  source 1..21: mol_type = other RNA
tcttctgtcatagttccaaca

SEQ ID NO: 7513 - RNA, 21 nt, synthetic construct
  source 1..21: mol_type = other RNA
caagtcttctgtcatagttca

SEQ ID NO: 7514 - RNA, 21 nt, synthetic construct
  source 1..21: mol_type = other RNA
aagtcttctgtcatagttcca

SEQ ID NO: 7515 - RNA, 21 nt, synthetic construct
  source 1..21: mol_type = other RNA
agtcttctgtcatagttccaa

SEQ ID NO: 7516 - RNA, 21 nt, synthetic construct
  source 1..21: mol_type = other RNA
gtcttctgtcatagttccaaa

SEQ ID NO: 7517 - RNA, 21 nt, synthetic construct
  source 1..21: mol_type = other RNA
cttctgtcatagttccaacaa

SEQ ID NO: 7518 - RNA, 21 nt, synthetic construct
  source 1..21: mol_type = other RNA
ttctgtcatagttccaacaaa

SEQ ID NO: 7519 - RNA, 21 nt, synthetic construct
  source 1..21: mol_type = other RNA
tctgtcatagttccaacaata

SEQ ID NO: 7520 - RNA, 21 nt, synthetic construct
  source 1..21: mol_type = other RNA
ctgtcatagttccaacaatga

SEQ ID NO: 7521 - RNA, 21 nt, synthetic construct
  source 1..21: mol_type = other RNA
tgtcatagttccaacaatgta

SEQ ID NO: 7522 - RNA, 21 nt, synthetic construct
  source 1..21: mol_type = other RNA
gtcatagttccaacaatgtta

SEQ ID NO: 7523 - RNA, 21 nt, synthetic construct
  source 1..21: mol_type = other RNA
tcatagttccaacaatgttaa

SEQ ID NO: 7524 - RNA, 21 nt, synthetic construct
  source 1..21: mol_type = other RNA
catagttccaacaatgttaca

SEQ ID NO: 7525 - RNA, 21 nt, synthetic construct
  source 1..21: mol_type = other RNA
atagttccaacaatgttacca

SEQ ID NO: 7526 - RNA, 21 nt, synthetic construct
  source 1..21: mol_type = other RNA
tagttccaacaatgttaccaa

SEQ ID NO: 7527 - RNA, 21 nt, synthetic construct
  source 1..21: mol_type = other RNA
agttccaacaatgttaccaaa

SEQ ID NO: 7528 - RNA, 21 nt, synthetic construct
  source 1..21: mol_type = other RNA
gttccaacaatgttaccaaaa

SEQ ID NO: 7529 - RNA, 21 nt, synthetic construct
  source 1..21: mol_type = other RNA
ttccaacaatgttaccaaaaa

SEQ ID NO: 7530 - RNA, 21 nt, synthetic construct
  source 1..21: mol_type = other RNA
tccaacaatgttaccaaaaca

SEQ ID NO: 7531 - RNA, 21 nt, synthetic construct
  source 1..21: mol_type = other RNA
ccaacaatgttaccaaaacca

SEQ ID NO: 7532 - RNA, 21 nt, synthetic construct
  source 1..21: mol_type = other RNA
caacaatgttaccaaaaccga

SEQ ID NO: 7533 - RNA, 21 nt, synthetic construct
  source 1..21: mol_type = other RNA
aacaatgttaccaaaaccgaa

SEQ ID NO: 7534 - RNA, 21 nt, synthetic construct
  source 1..21: mol_type = other RNA
acaatgttaccaaaaccgaaa

SEQ ID NO: 7535 - RNA, 21 nt, synthetic construct
  source 1..21: mol_type = other RNA
caatgttaccaaaaccgaata

SEQ ID NO: 7536 - RNA, 21 nt, synthetic construct
  source 1..21: mol_type = other RNA
aatgttaccaaaaccgaatga

SEQ ID NO: 7537 - RNA, 21 nt, synthetic construct
  source 1..21: mol_type = other RNA
atgttaccaaaaccgaatgca

SEQ ID NO: 7538 - RNA, 21 nt, synthetic construct
  source 1..21: mol_type = other RNA
tgttaccaaaaccgaatgcta

SEQ ID NO: 7539 - RNA, 21 nt, synthetic construct
  source 1..21: mol_type = other RNA
gttaccaaaaccgaatgctga

SEQ ID NO: 7540 - RNA, 21 nt, synthetic construct
  source 1..21: mol_type = other RNA
ttaccaaaaccgaatgctgca

SEQ ID NO: 7541 - RNA, 21 nt, synthetic construct
  source 1..21: mol_type = other RNA
taccaaaaccgaatgctgcta

SEQ ID NO: 7542 - RNA, 21 nt, synthetic construct
  source 1..21: mol_type = other RNA
accaaaaccgaatgctgctta

SEQ ID NO: 7543 - RNA, 21 nt, synthetic construct
  source 1..21: mol_type = other RNA
ccaaaaccgaatgctgcttca

SEQ ID NO: 7544 - RNA, 21 nt, synthetic construct
  source 1..21: mol_type = other RNA
caaaaccgaatgctgcttcaa

SEQ ID NO: 7545 - RNA, 21 nt, synthetic construct
  source 1..21: mol_type = other RNA
aaaaccgaatgctgcttcaca

SEQ ID NO: 7546 - RNA, 21 nt, synthetic construct
  source 1..21: mol_type = other RNA
aaaccgaatgctgcttcacaa

SEQ ID NO: 7547 - RNA, 21 nt, synthetic construct
  source 1..21: mol_type = other RNA
aaccgaatgctgcttcacaga

SEQ ID NO: 7548 - RNA, 21 nt, synthetic construct
  source 1..21: mol_type = other RNA
accgaatgctgcttcacagaa

SEQ ID NO: 7549 - RNA, 21 nt, synthetic construct
  source 1..21: mol_type = other RNA
cgaatgctgcttcacagatta

SEQ ID NO: 7550 - RNA, 21 nt, synthetic construct
  source 1..21: mol_type = other RNA
atgctgcttcacagattttta

SEQ ID NO: 7551 - RNA, 21 nt, synthetic construct
  source 1..21: mol_type = other RNA
tgctgcttcacagatttttga

SEQ ID NO: 7552 - RNA, 21 nt, synthetic construct
  source 1..21: mol_type = other RNA
gctgcttcacagatttttgca

SEQ ID NO: 7553 - RNA, 21 nt, synthetic construct
  source 1..21: mol_type = other RNA
ctgcttcacagatttttgcaa

SEQ ID NO: 7554 - RNA, 21 nt, synthetic construct
  source 1..21: mol_type = other RNA
tgcttcacagatttttgcaaa

SEQ ID NO: 7555 - RNA, 21 nt, synthetic construct
  source 1..21: mol_type = other RNA
gcttcacagatttttgcaaca

SEQ ID NO: 7556 - RNA, 21 nt, synthetic construct
  source 1..21: mol_type = other RNA
cttcacagatttttgcaacaa

SEQ ID NO: 7557 - RNA, 21 nt, synthetic construct
  source 1..21: mol_type = other RNA
ttcacagatttttgcaacaaa

SEQ ID NO: 7558 - RNA, 21 nt, synthetic construct
  source 1..21: mol_type = other RNA
tcacagatttttgcaacaaca

SEQ ID NO: 7559 - RNA, 21 nt, synthetic construct
  source 1..21: mol_type = other RNA
cacagatttttgcaacaacaa

SEQ ID NO: 7560 - RNA, 21 nt, synthetic construct
  source 1..21: mol_type = other RNA
acagatttttgcaacaacata

SEQ ID NO: 7561 - RNA, 21 nt, synthetic construct
  source 1..21: mol_type = other RNA
tttgcaacaacataacactga

SEQ ID NO: 7562 - RNA, 21 nt, synthetic construct
  source 1..21: mol_type = other RNA
ttccaacagcatcaccaaata

SEQ ID NO: 7563 - RNA, 21 nt, synthetic construct
  source 1..21: mol_type = other RNA
cagatttttgcaacaacataa

SEQ ID NO: 7564 - RNA, 21 nt, synthetic construct
  source 1..21: mol_type = other RNA
agatttttgcaacaacataaa

SEQ ID NO: 7565 - RNA, 21 nt, synthetic construct
  source 1..21: mol_type = other RNA
gatttttgcaacaacataaca

SEQ ID NO: 7566 - RNA, 21 nt, synthetic construct
  source 1..21: mol_type = other RNA
atttttgcaacaacataacaa

SEQ ID NO: 7567 - RNA, 21 nt, synthetic construct
  source 1..21: mol_type = other RNA
tttttgcaacaacataacaca

SEQ ID NO: 7568 - RNA, 21 nt, synthetic construct
  source 1..21: mol_type = other RNA
ttttgcaacaacataacacta

SEQ ID NO: 7569 - RNA, 21 nt, synthetic construct
  source 1..21: mol_type = other RNA
ttgcaacaacataacactgca

SEQ ID NO: 7570 - RNA, 21 nt, synthetic construct
  source 1..21: mol_type = other RNA
tgcaacaacataacactgcaa

SEQ ID NO: 7571 - RNA, 21 nt, synthetic construct
  source 1..21: mol_type = other RNA
gcaacaacataacactgcaca

SEQ ID NO: 7572 - RNA, 21 nt, synthetic construct
  source 1..21: mol_type = other RNA
caacaacataacactgcacca

SEQ ID NO: 7573 - RNA, 21 nt, synthetic construct
  source 1..21: mol_type = other RNA
aacaacataacactgcaccta

SEQ ID NO: 7574 - RNA, 21 nt, synthetic construct
  source 1..21: mol_type = other RNA
acaacataacactgcacctta

SEQ ID NO: 7575 - RNA, 21 nt, synthetic construct
  source 1..21: mol_type = other RNA
caacataacactgcaccttca

SEQ ID NO: 7576 - RNA, 21 nt, synthetic construct
  source 1..21: mol_type = other RNA
aacataacactgcaccttcca

SEQ ID NO: 7577 - RNA, 21 nt, synthetic construct
  source 1..21: mol_type = other RNA
acataacactgcaccttccaa

SEQ ID NO: 7578 - RNA, 21 nt, synthetic construct
  source 1..21: mol_type = other RNA
cataacactgcaccttccaaa

SEQ ID NO: 7579 - RNA, 21 nt, synthetic construct
  source 1..21: mol_type = other RNA
ataacactgcaccttccaaca

SEQ ID NO: 7580 - RNA, 21 nt, synthetic construct
  source 1..21: mol_type = other RNA
taacactgcaccttccaacaa

SEQ ID NO: 7581 - RNA, 21 nt, synthetic construct
  source 1..21: mol_type = other RNA
aacactgcaccttccaacaga

SEQ ID NO: 7582 - RNA, 21 nt, synthetic construct
  source 1..21: mol_type = other RNA
acactgcaccttccaacagca

SEQ ID NO: 7583 - RNA, 21 nt, synthetic construct
  source 1..21: mol_type = other RNA
cactgcaccttccaacagcaa

SEQ ID NO: 7584 - RNA, 21 nt, synthetic construct
  source 1..21: mol_type = other RNA
actgcaccttccaacagcata

SEQ ID NO: 7585 - RNA, 21 nt, synthetic construct
  source 1..21: mol_type = other RNA
ctgcaccttccaacagcatca

SEQ ID NO: 7586 - RNA, 21 nt, synthetic construct
  source 1..21: mol_type = other RNA
tgcaccttccaacagcatcaa

SEQ ID NO: 7587 - RNA, 21 nt, synthetic construct
  source 1..21: mol_type = other RNA
gcaccttccaacagcatcaca

SEQ ID NO: 7588 - RNA, 21 nt, synthetic construct
  source 1..21: mol_type = other RNA
caccttccaacagcatcacca

SEQ ID NO: 7589 - RNA, 21 nt, synthetic construct
  source 1..21: mol_type = other RNA
accttccaacagcatcaccaa

SEQ ID NO: 7590 - RNA, 21 nt, synthetic construct
  source 1..21: mol_type = other RNA
ccttccaacagcatcaccaaa

SEQ ID NO: 7591 - RNA, 21 nt, synthetic construct
  source 1..21: mol_type = other RNA
cttccaacagcatcaccaaaa

SEQ ID NO: 7592 - RNA, 21 nt, synthetic construct
  source 1..21: mol_type = other RNA
tccaacagcatcaccaaatga

SEQ ID NO: 7593 - RNA, 21 nt, synthetic construct
  source 1..21: mol_type = other RNA
ccaacagcatcaccaaatgca

SEQ ID NO: 7594 - RNA, 21 nt, synthetic construct
  source 1..21: mol_type = other RNA
caacagcatcaccaaatgcca

SEQ ID NO: 7595 - RNA, 21 nt, synthetic construct
  source 1..21: mol_type = other RNA
ggagctggccatcattattaa

SEQ ID NO: 7596 - RNA, 21 nt, synthetic construct
  source 1..21: mol_type = other RNA
ctggccatcattattactgta

SEQ ID NO: 7597 - RNA, 21 nt, synthetic construct
  source 1..21: mol_type = other RNA
gctggccatcattattactga

SEQ ID NO: 7598 - RNA, 21 nt, synthetic construct
  source 1..21: mol_type = other RNA
ggccatcattattactgtgca

SEQ ID NO: 7599 - RNA, 21 nt, synthetic construct
  source 1..21: mol_type = other RNA
cattattactgtgcctgttta

SEQ ID NO: 7600 - RNA, 21 nt, synthetic construct
  source 1..21: mol_type = other RNA
attactgtgcctgtttgccta

SEQ ID NO: 7601 - RNA, 21 nt, synthetic construct
  source 1..21: mol_type = other RNA
gcctgtttgcctcctgtccaa

SEQ ID NO: 7602 - RNA, 21 nt, synthetic construct
  source 1..21: mol_type = other RNA
agctgcgatgctgacagtata

SEQ ID NO: 7603 - RNA, 21 nt, synthetic construct
  source 1..21: mol_type = other RNA
gtgctcctacaggaagaaaaa

SEQ ID NO: 7604 - RNA, 21 nt, synthetic construct
  source 1..21: mol_type = other RNA
tgctcctacaggaagaaaaaa

SEQ ID NO: 7605 - RNA, 21 nt, synthetic construct
  source 1..21: mol_type = other RNA
ctcctacaggaagaaaaagaa

SEQ ID NO: 7606 - RNA, 21 nt, synthetic construct
  source 1..21: mol_type = other RNA
ctacaggaagaaaaagagaca

SEQ ID NO: 7607 - RNA, 21 nt, synthetic construct
  source 1..21: mol_type = other RNA
aatctggtaaatgctggaaaa

SEQ ID NO: 7608 - RNA, 21 nt, synthetic construct
  source 1..21: mol_type = other RNA
cactctctgagtgcaatctga

SEQ ID NO: 7609 - RNA, 21 nt, synthetic construct
  source 1..21: mol_type = other RNA
ctctgagtgcaatctggtaaa

SEQ ID NO: 7610 - RNA, 21 nt, synthetic construct
  source 1..21: mol_type = other RNA
tgagtgcaatctggtaaatga

SEQ ID NO: 7611 - RNA, 21 nt, synthetic construct
  source 1..21: mol_type = other RNA
ctggtaaatgctggaaaaaca

SEQ ID NO: 7612 - RNA, 21 nt, synthetic construct
  source 1..21: mol_type = other RNA
gctggaaaaactctgaaagaa

SEQ ID NO: 7613 - RNA, 21 nt, synthetic construct
  source 1..21: mol_type = other RNA
tggaaaaactctgaaagatca

SEQ ID NO: 7614 - RNA, 21 nt, synthetic construct
  source 1..21: mol_type = other RNA
ggaaaaactctgaaagatcta

SEQ ID NO: 7615 - RNA, 21 nt, synthetic construct
  source 1..21: mol_type = other RNA
gaaaaactctgaaagatctga

SEQ ID NO: 7616 - RNA, 21 nt, synthetic construct
  source 1..21: mol_type = other RNA
actctgaaagatctgatttaa

SEQ ID NO: 7617 - RNA, 21 nt, synthetic construct
  source 1..21: mol_type = other RNA
aaaaactctgaaagatctgaa

SEQ ID NO: 7618 - RNA, 21 nt, synthetic construct
  source 1..21: mol_type = other RNA
aaaactctgaaagatctgata

SEQ ID NO: 7619 - RNA, 21 nt, synthetic construct
  source 1..21: mol_type = other RNA
aaactctgaaagatctgatta

SEQ ID NO: 7620 - RNA, 21 nt, synthetic construct
  source 1..21: mol_type = other RNA
aactctgaaagatctgattta

SEQ ID NO: 7621 - RNA, 21 nt, synthetic construct
  source 1..21: mol_type = other RNA
ctctgaaagatctgatttata

SEQ ID NO: 7622 - RNA, 21 nt, synthetic construct
  source 1..21: mol_type = other RNA
tctgaaagatctgatttatga

SEQ ID NO: 7623 - RNA, 21 nt, synthetic construct
  source 1..21: mol_type = other RNA
ctgaaagatctgatttatgaa

SEQ ID NO: 7624 - RNA, 21 nt, synthetic construct
  source 1..21: mol_type = other RNA
tgaaagatctgatttatgata

SEQ ID NO: 7625 - RNA, 21 nt, synthetic construct
  source 1..21: mol_type = other RNA
gaaagatctgatttatgatga

SEQ ID NO: 7626 - RNA, 21 nt, synthetic construct
  source 1..21: mol_type = other RNA
aaagatctgatttatgatgta

SEQ ID NO: 7627 - RNA, 21 nt, synthetic construct
  source 1..21: mol_type = other RNA
aagatctgatttatgatgtga

SEQ ID NO: 7628 - RNA, 21 nt, synthetic construct
  source 1..21: mol_type = other RNA
agatctgatttatgatgtgaa

SEQ ID NO: 7629 - RNA, 21 nt, synthetic construct
  source 1..21: mol_type = other RNA
gatctgatttatgatgtgaca

SEQ ID NO: 7630 - RNA, 21 nt, synthetic construct
  source 1..21: mol_type = other RNA
tgttggttcaaaggacaatta

SEQ ID NO: 7631 - RNA, 21 nt, synthetic construct
  source 1..21: mol_type = other RNA
gtctacctctgttggttcaaa

SEQ ID NO: 7632 - RNA, 21 nt, synthetic construct
  source 1..21: mol_type = other RNA
tctacctctgttggttcaaaa

SEQ ID NO: 7633 - RNA, 21 nt, synthetic construct
  source 1..21: mol_type = other RNA
acctctgttggttcaaaggaa

SEQ ID NO: 7634 - RNA, 21 nt, synthetic construct
  source 1..21: mol_type = other RNA
cctctgttggttcaaaggaca

SEQ ID NO: 7635 - RNA, 21 nt, synthetic construct
  source 1..21: mol_type = other RNA
ctgttggttcaaaggacaata

SEQ ID NO: 7636 - RNA, 21 nt, synthetic construct
  source 1..21: mol_type = other RNA
ggttcaaaggacaattgcaaa

SEQ ID NO: 7637 - RNA, 21 nt, synthetic construct
  source 1..21: mol_type = other RNA
tcaaaggacaattgcaaggaa

SEQ ID NO: 7638 - RNA, 21 nt, synthetic construct
  source 1..21: mol_type = other RNA
tagtaggaaaaggtagattta

SEQ ID NO: 7639 - RNA, 21 nt, synthetic construct
  source 1..21: mol_type = other RNA
taggaaaaggtagatttggta

SEQ ID NO: 7640 - RNA, 21 nt, synthetic construct
  source 1..21: mol_type = other RNA
gaagatgtggctgtgaaaata

SEQ ID NO: 7641 - RNA, 21 nt, synthetic construct
  source 1..21: mol_type = other RNA
aagatgtggctgtgaaaataa

SEQ ID NO: 7642 - RNA, 21 nt, synthetic construct
  source 1..21: mol_type = other RNA
agatgtggctgtgaaaatata

SEQ ID NO: 7643 - RNA, 21 nt, synthetic construct
  source 1..21: mol_type = other RNA
cctccagagatgaaagatcta

SEQ ID NO: 7644 - RNA, 21 nt, synthetic construct
  source 1..21: mol_type = other RNA
ctcctccagagatgaaagata

SEQ ID NO: 7645 - RNA, 21 nt, synthetic construct
  source 1..21: mol_type = other RNA
tcctccagagatgaaagatca

SEQ ID NO: 7646 - RNA, 21 nt, synthetic construct
  source 1..21: mol_type = other RNA
ctccagagatgaaagatctta

SEQ ID NO: 7647 - RNA, 21 nt, synthetic construct
  source 1..21: mol_type = other RNA
tccagagatgaaagatcttga

SEQ ID NO: 7648 - RNA, 21 nt, synthetic construct
  source 1..21: mol_type = other RNA
ccagagatgaaagatcttgga

SEQ ID NO: 7649 - RNA, 21 nt, synthetic construct
  source 1..21: mol_type = other RNA
agagatgaaagatcttggtta

SEQ ID NO: 7650 - RNA, 21 nt, synthetic construct
  source 1..21: mol_type = other RNA
gagatgaaagatcttggttta

SEQ ID NO: 7651 - RNA, 21 nt, synthetic construct
  source 1..21: mol_type = other RNA
atgaaagatcttggtttcgta

SEQ ID NO: 7652 - RNA, 21 nt, synthetic construct
  source 1..21: mol_type = other RNA
tttcgtgaggcagaaatttaa

SEQ ID NO: 7653 - RNA, 21 nt, synthetic construct
  source 1..21: mol_type = other RNA
tgcgacatgaaaacatcctta

SEQ ID NO: 7654 - RNA, 21 nt, synthetic construct
  source 1..21: mol_type = other RNA
ttgctgctgacaacaaagata

SEQ ID NO: 7655 - RNA, 21 nt, synthetic construct
  source 1..21: mol_type = other RNA
atgctgcgacatgaaaacata

SEQ ID NO: 7656 - RNA, 21 nt, synthetic construct
  source 1..21: mol_type = other RNA
ctgcgacatgaaaacatccta

SEQ ID NO: 7657 - RNA, 21 nt, synthetic construct
  source 1..21: mol_type = other RNA
gcgacatgaaaacatccttga

SEQ ID NO: 7658 - RNA, 21 nt, synthetic construct
  source 1..21: mol_type = other RNA
gacatgaaaacatccttggta

SEQ ID NO: 7659 - RNA, 21 nt, synthetic construct
  source 1..21: mol_type = other RNA
acatgaaaacatccttggtta

SEQ ID NO: 7660 - RNA, 21 nt, synthetic construct
  source 1..21: mol_type = other RNA
catgaaaacatccttggttta

SEQ ID NO: 7661 - RNA, 21 nt, synthetic construct
  source 1..21: mol_type = other RNA
gaaaacatccttggtttcata

SEQ ID NO: 7662 - RNA, 21 nt, synthetic construct
  source 1..21: mol_type = other RNA
catccttggtttcattgctga

SEQ ID NO: 7663 - RNA, 21 nt, synthetic construct
  source 1..21: mol_type = other RNA
cttggtttcattgctgctgaa

SEQ ID NO: 7664 - RNA, 21 nt, synthetic construct
  source 1..21: mol_type = other RNA
ggtttcattgctgctgacaaa

SEQ ID NO: 7665 - RNA, 21 nt, synthetic construct
  source 1..21: mol_type = other RNA
ttcattgctgctgacaacaaa

SEQ ID NO: 7666 - RNA, 21 nt, synthetic construct
  source 1..21: mol_type = other RNA
tcattgctgctgacaacaaaa

SEQ ID NO: 7667 - RNA, 21 nt, synthetic construct
  source 1..21: mol_type = other RNA
tgctgacaacaaagataatga

SEQ ID NO: 7668 - RNA, 21 nt, synthetic construct
  source 1..21: mol_type = other RNA
gctgacaacaaagataatgga

SEQ ID NO: 7669 - RNA, 21 nt, synthetic construct
  source 1..21: mol_type = other RNA
tgacaacaaagataatggaaa

SEQ ID NO: 7670 - RNA, 21 nt, synthetic construct
  source 1..21: mol_type = other RNA
gacaacaaagataatggaaca

SEQ ID NO: 7671 - RNA, 21 nt, synthetic construct
  source 1..21: mol_type = other RNA
tggtatctgaatatcatgaaa

SEQ ID NO: 7672 - RNA, 21 nt, synthetic construct
  source 1..21: mol_type = other RNA
aacaaagataatggaacttga

SEQ ID NO: 7673 - RNA, 21 nt, synthetic construct
  source 1..21: mol_type = other RNA
actttggctggtatctgaata

SEQ ID NO: 7674 - RNA, 21 nt, synthetic construct
  source 1..21: mol_type = other RNA
tttggctggtatctgaatata

SEQ ID NO: 7675 - RNA, 21 nt, synthetic construct
  source 1..21: mol_type = other RNA
ttggctggtatctgaatatca

SEQ ID NO: 7676 - RNA, 21 nt, synthetic construct
  source 1..21: mol_type = other RNA
tggctggtatctgaatatcaa

SEQ ID NO: 7677 - RNA, 21 nt, synthetic construct
  source 1..21: mol_type = other RNA
gtatctgaatatcatgaacaa

SEQ ID NO: 7678 - RNA, 21 nt, synthetic construct
  source 1..21: mol_type = other RNA
catgaacagggctccttataa

SEQ ID NO: 7679 - RNA, 21 nt, synthetic construct
  source 1..21: mol_type = other RNA
atgaacagggctccttatata

SEQ ID NO: 7680 - RNA, 21 nt, synthetic construct
  source 1..21: mol_type = other RNA
ctccttatatgactatttgaa

SEQ ID NO: 7681 - RNA, 21 nt, synthetic construct
  source 1..21: mol_type = other RNA
acagggctccttatatgacta

SEQ ID NO: 7682 - RNA, 21 nt, synthetic construct
  source 1..21: mol_type = other RNA
cagggctccttatatgactaa

SEQ ID NO: 7683 - RNA, 21 nt, synthetic construct
  source 1..21: mol_type = other RNA
agggctccttatatgactata

SEQ ID NO: 7684 - RNA, 21 nt, synthetic construct
  source 1..21: mol_type = other RNA
gggctccttatatgactatta

SEQ ID NO: 7685 - RNA, 21 nt, synthetic construct
  source 1..21: mol_type = other RNA
ggctccttatatgactattta

SEQ ID NO: 7686 - RNA, 21 nt, synthetic construct
  source 1..21: mol_type = other RNA
gctccttatatgactatttga

SEQ ID NO: 7687 - RNA, 21 nt, synthetic construct
  source 1..21: mol_type = other RNA
tccttatatgactatttgaaa

SEQ ID NO: 7688 - RNA, 21 nt, synthetic construct
  source 1..21: mol_type = other RNA
ccttatatgactatttgaata

SEQ ID NO: 7689 - RNA, 21 nt, synthetic construct
  source 1..21: mol_type = other RNA
ttatatgactatttgaataga

SEQ ID NO: 7690 - RNA, 21 nt, synthetic construct
  source 1..21: mol_type = other RNA
gtgaccgtggctggaatgata

SEQ ID NO: 7691 - RNA, 21 nt, synthetic construct
  source 1..21: mol_type = other RNA
cgtggctggaatgatcaagca

SEQ ID NO: 7692 - RNA, 21 nt, synthetic construct
  source 1..21: mol_type = other RNA
tggctggaatgatcaagctga

SEQ ID NO: 7693 - RNA, 21 nt, synthetic construct
  source 1..21: mol_type = other RNA
cacaccttcatatggagatta

SEQ ID NO: 7694 - RNA, 21 nt, synthetic construct
  source 1..21: mol_type = other RNA
ggcgctctcaattgctagtga

SEQ ID NO: 7695 - RNA, 21 nt, synthetic construct
  source 1..21: mol_type = other RNA
ctctcaattgctagtggtcta

SEQ ID NO: 7696 - RNA, 21 nt, synthetic construct
  source 1..21: mol_type = other RNA
ctggcacaccttcatatggaa

SEQ ID NO: 7697 - RNA, 21 nt, synthetic construct
  source 1..21: mol_type = other RNA
tggcacaccttcatatggaga

SEQ ID NO: 7698 - RNA, 21 nt, synthetic construct
  source 1..21: mol_type = other RNA
ggcacaccttcatatggagaa

SEQ ID NO: 7699 - RNA, 21 nt, synthetic construct
  source 1..21: mol_type = other RNA
gcacaccttcatatggagata

SEQ ID NO: 7700 - RNA, 21 nt, synthetic construct
  source 1..21: mol_type = other RNA
acaccttcatatggagattga

SEQ ID NO: 7701 - RNA, 21 nt, synthetic construct
  source 1..21: mol_type = other RNA
caccttcatatggagattgta

SEQ ID NO: 7702 - RNA, 21 nt, synthetic construct
  source 1..21: mol_type = other RNA
accttcatatggagattgtta

SEQ ID NO: 7703 - RNA, 21 nt, synthetic construct
  source 1..21: mol_type = other RNA
ccttcatatggagattgttga

SEQ ID NO: 7704 - RNA, 21 nt, synthetic construct
  source 1..21: mol_type = other RNA
cttcatatggagattgttgga

SEQ ID NO: 7705 - RNA, 21 nt, synthetic construct
  source 1..21: mol_type = other RNA
ttcatatggagattgttggta

SEQ ID NO: 7706 - RNA, 21 nt, synthetic construct
  source 1..21: mol_type = other RNA
tcatatggagattgttggtaa

SEQ ID NO: 7707 - RNA, 21 nt, synthetic construct
  source 1..21: mol_type = other RNA
catatggagattgttggtaca

SEQ ID NO: 7708 - RNA, 21 nt, synthetic construct
  source 1..21: mol_type = other RNA
atatggagattgttggtacaa

SEQ ID NO: 7709 - RNA, 21 nt, synthetic construct
  source 1..21: mol_type = other RNA
tatggagattgttggtacaca

SEQ ID NO: 7710 - RNA, 21 nt, synthetic construct
  source 1..21: mol_type = other RNA
atggagattgttggtacacaa

SEQ ID NO: 7711 - RNA, 21 nt, synthetic construct
  source 1..21: mol_type = other RNA
tggagattgttggtacacaaa

SEQ ID NO: 7712 - RNA, 21 nt, synthetic construct
  source 1..21: mol_type = other RNA
attgctcatcgagacataaaa

SEQ ID NO: 7713 - RNA, 21 nt, synthetic construct
  source 1..21: mol_type = other RNA
ggagattgttggtacacaaga

SEQ ID NO: 7714 - RNA, 21 nt, synthetic construct
  source 1..21: mol_type = other RNA
gagattgttggtacacaagga

SEQ ID NO: 7715 - RNA, 21 nt, synthetic construct
  source 1..21: mol_type = other RNA
attgttggtacacaaggtaaa

SEQ ID NO: 7716 - RNA, 21 nt, synthetic construct
  source 1..21: mol_type = other RNA
ttggtacacaaggtaaaccta

SEQ ID NO: 7717 - RNA, 21 nt, synthetic construct
  source 1..21: mol_type = other RNA
gtacacaaggtaaacctgcta

SEQ ID NO: 7718 - RNA, 21 nt, synthetic construct
  source 1..21: mol_type = other RNA
tacacaaggtaaacctgctaa

SEQ ID NO: 7719 - RNA, 21 nt, synthetic construct
  source 1..21: mol_type = other RNA
acacaaggtaaacctgctata

SEQ ID NO: 7720 - RNA, 21 nt, synthetic construct
  source 1..21: mol_type = other RNA
cacaaggtaaacctgctatta

SEQ ID NO: 7721 - RNA, 21 nt, synthetic construct
  source 1..21: mol_type = other RNA
acaaggtaaacctgctattga

SEQ ID NO: 7722 - RNA, 21 nt, synthetic construct
  source 1..21: mol_type = other RNA
caaggtaaacctgctattgca

SEQ ID NO: 7723 - RNA, 21 nt, synthetic construct
  source 1..21: mol_type = other RNA
aaggtaaacctgctattgcta

SEQ ID NO: 7724 - RNA, 21 nt, synthetic construct
  source 1..21: mol_type = other RNA
aggtaaacctgctattgctca

SEQ ID NO: 7725 - RNA, 21 nt, synthetic construct
  source 1..21: mol_type = other RNA
ggtaaacctgctattgctcaa

SEQ ID NO: 7726 - RNA, 21 nt, synthetic construct
  source 1..21: mol_type = other RNA
gtaaacctgctattgctcata

SEQ ID NO: 7727 - RNA, 21 nt, synthetic construct
  source 1..21: mol_type = other RNA
taaacctgctattgctcatca

SEQ ID NO: 7728 - RNA, 21 nt, synthetic construct
  source 1..21: mol_type = other RNA
aaacctgctattgctcatcga

SEQ ID NO: 7729 - RNA, 21 nt, synthetic construct
  source 1..21: mol_type = other RNA
aacctgctattgctcatcgaa

SEQ ID NO: 7730 - RNA, 21 nt, synthetic construct
  source 1..21: mol_type = other RNA
acctgctattgctcatcgaga

SEQ ID NO: 7731 - RNA, 21 nt, synthetic construct
  source 1..21: mol_type = other RNA
cctgctattgctcatcgagaa

SEQ ID NO: 7732 - RNA, 21 nt, synthetic construct
  source 1..21: mol_type = other RNA
ctgctattgctcatcgagaca

SEQ ID NO: 7733 - RNA, 21 nt, synthetic construct
  source 1..21: mol_type = other RNA
tgctattgctcatcgagacaa

SEQ ID NO: 7734 - RNA, 21 nt, synthetic construct
  source 1..21: mol_type = other RNA
gctattgctcatcgagacata

SEQ ID NO: 7735 - RNA, 21 nt, synthetic construct
  source 1..21: mol_type = other RNA
ctattgctcatcgagacataa

SEQ ID NO: 7736 - RNA, 21 nt, synthetic construct
  source 1..21: mol_type = other RNA
tattgctcatcgagacataaa

SEQ ID NO: 7737 - RNA, 21 nt, synthetic construct
  source 1..21: mol_type = other RNA
ttgctcatcgagacataaaaa

SEQ ID NO: 7738 - RNA, 21 nt, synthetic construct
  source 1..21: mol_type = other RNA
tgctcatcgagacataaaata

SEQ ID NO: 7739 - RNA, 21 nt, synthetic construct
  source 1..21: mol_type = other RNA
gctcatcgagacataaaatca

SEQ ID NO: 7740 - RNA, 21 nt, synthetic construct
  source 1..21: mol_type = other RNA
ctcatcgagacataaaatcaa

SEQ ID NO: 7741 - RNA, 21 nt, synthetic construct
  source 1..21: mol_type = other RNA
tcatcgagacataaaatcaaa

SEQ ID NO: 7742 - RNA, 21 nt, synthetic construct
  source 1..21: mol_type = other RNA
catcgagacataaaatcaaaa

SEQ ID NO: 7743 - RNA, 21 nt, synthetic construct
  source 1..21: mol_type = other RNA
atcgagacataaaatcaaaga

SEQ ID NO: 7744 - RNA, 21 nt, synthetic construct
  source 1..21: mol_type = other RNA
tcgagacataaaatcaaagaa

SEQ ID NO: 7745 - RNA, 21 nt, synthetic construct
  source 1..21: mol_type = other RNA
cgagacataaaatcaaagaaa

SEQ ID NO: 7746 - RNA, 21 nt, synthetic construct
  source 1..21: mol_type = other RNA
gagacataaaatcaaagaata

SEQ ID NO: 7747 - RNA, 21 nt, synthetic construct
  source 1..21: mol_type = other RNA
agacataaaatcaaagaataa

SEQ ID NO: 7748 - RNA, 21 nt, synthetic construct
  source 1..21: mol_type = other RNA
agtgtgaaacttgtgccataa

SEQ ID NO: 7749 - RNA, 21 nt, synthetic construct
  source 1..21: mol_type = other RNA
aatatcttagtgaaaaagtga

SEQ ID NO: 7750 - RNA, 21 nt, synthetic construct
  source 1..21: mol_type = other RNA
atatcttagtgaaaaagtgta

SEQ ID NO: 7751 - RNA, 21 nt, synthetic construct
  source 1..21: mol_type = other RNA
tatcttagtgaaaaagtgtga

SEQ ID NO: 7752 - RNA, 21 nt, synthetic construct
  source 1..21: mol_type = other RNA
atcttagtgaaaaagtgtgaa

SEQ ID NO: 7753 - RNA, 21 nt, synthetic construct
  source 1..21: mol_type = other RNA
tcttagtgaaaaagtgtgaaa

SEQ ID NO: 7754 - RNA, 21 nt, synthetic construct
  source 1..21: mol_type = other RNA
cttagtgaaaaagtgtgaaaa

SEQ ID NO: 7755 - RNA, 21 nt, synthetic construct
  source 1..21: mol_type = other RNA
ttagtgaaaaagtgtgaaaca

SEQ ID NO: 7756 - RNA, 21 nt, synthetic construct
  source 1..21: mol_type = other RNA
tagtgaaaaagtgtgaaacta

SEQ ID NO: 7757 - RNA, 21 nt, synthetic construct
  source 1..21: mol_type = other RNA
agtgaaaaagtgtgaaactta

SEQ ID NO: 7758 - RNA, 21 nt, synthetic construct
  source 1..21: mol_type = other RNA
gtgaaaaagtgtgaaacttga

SEQ ID NO: 7759 - RNA, 21 nt, synthetic construct
  source 1..21: mol_type = other RNA
tgaaaaagtgtgaaacttgta

SEQ ID NO: 7760 - RNA, 21 nt, synthetic construct
  source 1..21: mol_type = other RNA
gaaaaagtgtgaaacttgtga

SEQ ID NO: 7761 - RNA, 21 nt, synthetic construct
  source 1..21: mol_type = other RNA
aaaaagtgtgaaacttgtgca

SEQ ID NO: 7762 - RNA, 21 nt, synthetic construct
  source 1..21: mol_type = other RNA
aaaagtgtgaaacttgtgcca

SEQ ID NO: 7763 - RNA, 21 nt, synthetic construct
  source 1..21: mol_type = other RNA
aagtgtgaaacttgtgccata

SEQ ID NO: 7764 - RNA, 21 nt, synthetic construct
  source 1..21: mol_type = other RNA
gtgaagcatgattcaatacta

SEQ ID NO: 7765 - RNA, 21 nt, synthetic construct
  source 1..21: mol_type = other RNA
gctgtgaagcatgattcaata

SEQ ID NO: 7766 - RNA, 21 nt, synthetic construct
  source 1..21: mol_type = other RNA
ctgtgaagcatgattcaataa

SEQ ID NO: 7767 - RNA, 21 nt, synthetic construct
  source 1..21: mol_type = other RNA
tgaagcatgattcaatactga

SEQ ID NO: 7768 - RNA, 21 nt, synthetic construct
  source 1..21: mol_type = other RNA
gcatgattcaatactgaacaa

SEQ ID NO: 7769 - RNA, 21 nt, synthetic construct
  source 1..21: mol_type = other RNA
atgattcaatactgaacacta

SEQ ID NO: 7770 - RNA, 21 nt, synthetic construct
  source 1..21: mol_type = other RNA
tgattcaatactgaacactaa

SEQ ID NO: 7771 - RNA, 21 nt, synthetic construct
  source 1..21: mol_type = other RNA
atactgaacactatcgacata

SEQ ID NO: 7772 - RNA, 21 nt, synthetic construct
  source 1..21: mol_type = other RNA
actgaacactatcgacataca

SEQ ID NO: 7773 - RNA, 21 nt, synthetic construct
  source 1..21: mol_type = other RNA
atacctcagaatcctaaagta

SEQ ID NO: 7774 - RNA, 21 nt, synthetic construct
  source 1..21: mol_type = other RNA
tgcttgatgatacaatgaata

SEQ ID NO: 7775 - RNA, 21 nt, synthetic construct
  source 1..21: mol_type = other RNA
tatatggctcctgaaatgcta

SEQ ID NO: 7776 - RNA, 21 nt, synthetic construct
  source 1..21: mol_type = other RNA
tggctcctgaaatgcttgata

SEQ ID NO: 7777 - RNA, 21 nt, synthetic construct
  source 1..21: mol_type = other RNA
ggctcctgaaatgcttgatga

SEQ ID NO: 7778 - RNA, 21 nt, synthetic construct
  source 1..21: mol_type = other RNA
gctcctgaaatgcttgatgaa

SEQ ID NO: 7779 - RNA, 21 nt, synthetic construct
  source 1..21: mol_type = other RNA
ctcctgaaatgcttgatgata

SEQ ID NO: 7780 - RNA, 21 nt, synthetic construct
  source 1..21: mol_type = other RNA
tcctgaaatgcttgatgataa

SEQ ID NO: 7781 - RNA, 21 nt, synthetic construct
  source 1..21: mol_type = other RNA
cctgaaatgcttgatgataca

SEQ ID NO: 7782 - RNA, 21 nt, synthetic construct
  source 1..21: mol_type = other RNA
ctgaaatgcttgatgatacaa

SEQ ID NO: 7783 - RNA, 21 nt, synthetic construct
  source 1..21: mol_type = other RNA
tgaaatgcttgatgatacaaa

SEQ ID NO: 7784 - RNA, 21 nt, synthetic construct
  source 1..21: mol_type = other RNA
gaaatgcttgatgatacaata

SEQ ID NO: 7785 - RNA, 21 nt, synthetic construct
  source 1..21: mol_type = other RNA
aaatgcttgatgatacaatga

SEQ ID NO: 7786 - RNA, 21 nt, synthetic construct
  source 1..21: mol_type = other RNA
aatgcttgatgatacaatgaa

SEQ ID NO: 7787 - RNA, 21 nt, synthetic construct
  source 1..21: mol_type = other RNA
atgcttgatgatacaatgaaa

SEQ ID NO: 7788 - RNA, 21 nt, synthetic construct
  source 1..21: mol_type = other RNA
gcttgatgatacaatgaatga

SEQ ID NO: 7789 - RNA, 21 nt, synthetic construct
  source 1..21: mol_type = other RNA
cttgatgatacaatgaatgta

SEQ ID NO: 7790 - RNA, 21 nt, synthetic construct
  source 1..21: mol_type = other RNA
ttgatgatacaatgaatgtga

SEQ ID NO: 7791 - RNA, 21 nt, synthetic construct
  source 1..21: mol_type = other RNA
tgatgatacaatgaatgtgaa

SEQ ID NO: 7792 - RNA, 21 nt, synthetic construct
  source 1..21: mol_type = other RNA
gatgatacaatgaatgtgaaa

SEQ ID NO: 7793 - RNA, 21 nt, synthetic construct
  source 1..21: mol_type = other RNA
atgatacaatgaatgtgaata

SEQ ID NO: 7794 - RNA, 21 nt, synthetic construct
  source 1..21: mol_type = other RNA
tgatacaatgaatgtgaataa

SEQ ID NO: 7795 - RNA, 21 nt, synthetic construct
  source 1..21: mol_type = other RNA
atacaatgaatgtgaatatca

SEQ ID NO: 7796 - RNA, 21 nt, synthetic construct
  source 1..21: mol_type = other RNA
tacaatgaatgtgaatatcta

SEQ ID NO: 7797 - RNA, 21 nt, synthetic construct
  source 1..21: mol_type = other RNA
gaatatctttgagtccttcaa

SEQ ID NO: 7798 - RNA, 21 nt, synthetic construct
  source 1..21: mol_type = other RNA
gacatctattctgttggtcta

SEQ ID NO: 7799 - RNA, 21 nt, synthetic construct
  source 1..21: mol_type = other RNA
aatgaatgtgaatatctttga

SEQ ID NO: 7800 - RNA, 21 nt, synthetic construct
  source 1..21: mol_type = other RNA
atgaatgtgaatatctttgaa

SEQ ID NO: 7801 - RNA, 21 nt, synthetic construct
  source 1..21: mol_type = other RNA
tgaatgtgaatatctttgaga

SEQ ID NO: 7802 - RNA, 21 nt, synthetic construct
  source 1..21: mol_type = other RNA
gaatgtgaatatctttgagta

SEQ ID NO: 7803 - RNA, 21 nt, synthetic construct
  source 1..21: mol_type = other RNA
aatgtgaatatctttgagtca

SEQ ID NO: 7804 - RNA, 21 nt, synthetic construct
  source 1..21: mol_type = other RNA
atgtgaatatctttgagtcca

SEQ ID NO: 7805 - RNA, 21 nt, synthetic construct
  source 1..21: mol_type = other RNA
tgtgaatatctttgagtccta

SEQ ID NO: 7806 - RNA, 21 nt, synthetic construct
  source 1..21: mol_type = other RNA
gtgaatatctttgagtcctta

SEQ ID NO: 7807 - RNA, 21 nt, synthetic construct
  source 1..21: mol_type = other RNA
tgaatatctttgagtccttca

SEQ ID NO: 7808 - RNA, 21 nt, synthetic construct
  source 1..21: mol_type = other RNA
aatatctttgagtccttcaaa

SEQ ID NO: 7809 - RNA, 21 nt, synthetic construct
  source 1..21: mol_type = other RNA
atatctttgagtccttcaaaa

SEQ ID NO: 7810 - RNA, 21 nt, synthetic construct
  source 1..21: mol_type = other RNA
tatctttgagtccttcaaaca

SEQ ID NO: 7811 - RNA, 21 nt, synthetic construct
  source 1..21: mol_type = other RNA
atctttgagtccttcaaacga

SEQ ID NO: 7812 - RNA, 21 nt, synthetic construct
  source 1..21: mol_type = other RNA
tctttgagtccttcaaacgaa

SEQ ID NO: 7813 - RNA, 21 nt, synthetic construct
  source 1..21: mol_type = other RNA
ctttgagtccttcaaacgaga

SEQ ID NO: 7814 - RNA, 21 nt, synthetic construct
  source 1..21: mol_type = other RNA
ttcaaacgagctgacatctaa

SEQ ID NO: 7815 - RNA, 21 nt, synthetic construct
  source 1..21: mol_type = other RNA
aacgagctgacatctattcta

SEQ ID NO: 7816 - RNA, 21 nt, synthetic construct
  source 1..21: mol_type = other RNA
acgagctgacatctattctga

SEQ ID NO: 7817 - RNA, 21 nt, synthetic construct
  source 1..21: mol_type = other RNA
cgagctgacatctattctgta

SEQ ID NO: 7818 - RNA, 21 nt, synthetic construct
  source 1..21: mol_type = other RNA
agctgacatctattctgttga

SEQ ID NO: 7819 - RNA, 21 nt, synthetic construct
  source 1..21: mol_type = other RNA
gctgacatctattctgttgga

SEQ ID NO: 7820 - RNA, 21 nt, synthetic construct
  source 1..21: mol_type = other RNA
tattctgttggtctggtttaa

SEQ ID NO: 7821 - RNA, 21 nt, synthetic construct
  source 1..21: mol_type = other RNA
gtctggtttactgggaaataa

SEQ ID NO: 7822 - RNA, 21 nt, synthetic construct
  source 1..21: mol_type = other RNA
tgaggagtaccaattgcctta

SEQ ID NO: 7823 - RNA, 21 nt, synthetic construct
  source 1..21: mol_type = other RNA
gagtaccaattgccttattaa

SEQ ID NO: 7824 - RNA, 21 nt, synthetic construct
  source 1..21: mol_type = other RNA
gaggagtaccaattgccttaa

SEQ ID NO: 7825 - RNA, 21 nt, synthetic construct
  source 1..21: mol_type = other RNA
aggagtaccaattgccttata

SEQ ID NO: 7826 - RNA, 21 nt, synthetic construct
  source 1..21: mol_type = other RNA
ggagtaccaattgccttatta

SEQ ID NO: 7827 - RNA, 21 nt, synthetic construct
  source 1..21: mol_type = other RNA
agtaccaattgccttattata

SEQ ID NO: 7828 - RNA, 21 nt, synthetic construct
  source 1..21: mol_type = other RNA
gtaccaattgccttattatga

SEQ ID NO: 7829 - RNA, 21 nt, synthetic construct
  source 1..21: mol_type = other RNA
taccaattgccttattatgaa

SEQ ID NO: 7830 - RNA, 21 nt, synthetic construct
  source 1..21: mol_type = other RNA
accaattgccttattatgaca

SEQ ID NO: 7831 - RNA, 21 nt, synthetic construct
  source 1..21: mol_type = other RNA
ccaattgccttattatgacaa

SEQ ID NO: 7832 - RNA, 21 nt, synthetic construct
  source 1..21: mol_type = other RNA
caattgccttattatgacata

SEQ ID NO: 7833 - RNA, 21 nt, synthetic construct
  source 1..21: mol_type = other RNA
aattgccttattatgacatga

SEQ ID NO: 7834 - RNA, 21 nt, synthetic construct
  source 1..21: mol_type = other RNA
attgccttattatgacatgga

SEQ ID NO: 7835 - RNA, 21 nt, synthetic construct
  source 1..21: mol_type = other RNA
ttgccttattatgacatggta

SEQ ID NO: 7836 - RNA, 21 nt, synthetic construct
  source 1..21: mol_type = other RNA
tgccttattatgacatggtga

SEQ ID NO: 7837 - RNA, 21 nt, synthetic construct
  source 1..21: mol_type = other RNA
gccttattatgacatggtgca

SEQ ID NO: 7838 - RNA, 21 nt, synthetic construct
  source 1..21: mol_type = other RNA
ccttattatgacatggtgcca

SEQ ID NO: 7839 - RNA, 21 nt, synthetic construct
  source 1..21: mol_type = other RNA
cttattatgacatggtgccta

SEQ ID NO: 7840 - RNA, 21 nt, synthetic construct
  source 1..21: mol_type = other RNA
ttattatgacatggtgcctta

SEQ ID NO: 7841 - RNA, 21 nt, synthetic construct
  source 1..21: mol_type = other RNA
tattatgacatggtgccttca

SEQ ID NO: 7842 - RNA, 21 nt, synthetic construct
  source 1..21: mol_type = other RNA
attatgacatggtgccttcaa

SEQ ID NO: 7843 - RNA, 21 nt, synthetic construct
  source 1..21: mol_type = other RNA
atagaggaaatgagaaaggta

SEQ ID NO: 7844 - RNA, 21 nt, synthetic construct
  source 1..21: mol_type = other RNA
gaggaaatgagaaaggttgta

SEQ ID NO: 7845 - RNA, 21 nt, synthetic construct
  source 1..21: mol_type = other RNA
aaggttgtttgtgaccagaaa

SEQ ID NO: 7846 - RNA, 21 nt, synthetic construct
  source 1..21: mol_type = other RNA
aggaaatgagaaaggttgtta

SEQ ID NO: 7847 - RNA, 21 nt, synthetic construct
  source 1..21: mol_type = other RNA
ggaaatgagaaaggttgttta

SEQ ID NO: 7848 - RNA, 21 nt, synthetic construct
  source 1..21: mol_type = other RNA
gaaatgagaaaggttgtttga

SEQ ID NO: 7849 - RNA, 21 nt, synthetic construct
  source 1..21: mol_type = other RNA
aaatgagaaaggttgtttgta

SEQ ID NO: 7850 - RNA, 21 nt, synthetic construct
  source 1..21: mol_type = other RNA
aatgagaaaggttgtttgtga

SEQ ID NO: 7851 - RNA, 21 nt, synthetic construct
  source 1..21: mol_type = other RNA
atgagaaaggttgtttgtgaa

SEQ ID NO: 7852 - RNA, 21 nt, synthetic construct
  source 1..21: mol_type = other RNA
tgagaaaggttgtttgtgaca

SEQ ID NO: 7853 - RNA, 21 nt, synthetic construct
  source 1..21: mol_type = other RNA
gagaaaggttgtttgtgacca

SEQ ID NO: 7854 - RNA, 21 nt, synthetic construct
  source 1..21: mol_type = other RNA
agaaaggttgtttgtgaccaa

SEQ ID NO: 7855 - RNA, 21 nt, synthetic construct
  source 1..21: mol_type = other RNA
gaaaggttgtttgtgaccaga

SEQ ID NO: 7856 - RNA, 21 nt, synthetic construct
  source 1..21: mol_type = other RNA
aaaggttgtttgtgaccagaa

SEQ ID NO: 7857 - RNA, 21 nt, synthetic construct
  source 1..21: mol_type = other RNA
aggttgtttgtgaccagaaga

SEQ ID NO: 7858 - RNA, 21 nt, synthetic construct
  source 1..21: mol_type = other RNA
ggttgtttgtgaccagaagta

SEQ ID NO: 7859 - RNA, 21 nt, synthetic construct
  source 1..21: mol_type = other RNA
gttgtttgtgaccagaagtta

SEQ ID NO: 7860 - RNA, 21 nt, synthetic construct
  source 1..21: mol_type = other RNA
ttgtttgtgaccagaagttta

SEQ ID NO: 7861 - RNA, 21 nt, synthetic construct
  source 1..21: mol_type = other RNA
cagaagtttcgaccaagtata

SEQ ID NO: 7862 - RNA, 21 nt, synthetic construct
  source 1..21: mol_type = other RNA
agtggcaaagttgtgaagcaa

SEQ ID NO: 7863 - RNA, 21 nt, synthetic construct
  source 1..21: mol_type = other RNA
tggcaaagttgtgaagcacta

SEQ ID NO: 7864 - RNA, 21 nt, synthetic construct
  source 1..21: mol_type = other RNA
taatgcgtgagtgttggtata

SEQ ID NO: 7865 - RNA, 21 nt, synthetic construct
  source 1..21: mol_type = other RNA
gcctaactgctcttcgtatta

SEQ ID NO: 7866 - RNA, 21 nt, synthetic construct
  source 1..21: mol_type = other RNA
cctaactgctcttcgtattaa

SEQ ID NO: 7867 - RNA, 21 nt, synthetic construct
  source 1..21: mol_type = other RNA
ctaactgctcttcgtattaaa

SEQ ID NO: 7868 - RNA, 21 nt, synthetic construct
  source 1..21: mol_type = other RNA
actgctcttcgtattaagaaa

SEQ ID NO: 7869 - RNA, 21 nt, synthetic construct
  source 1..21: mol_type = other RNA
gctcttcgtattaagaagaca

SEQ ID NO: 7870 - RNA, 21 nt, synthetic construct
  source 1..21: mol_type = other RNA
ctcttcgtattaagaagacta

SEQ ID NO: 7871 - RNA, 21 nt, synthetic construct
  source 1..21: mol_type = other RNA
tatatctcaactttgtgtcaa

SEQ ID NO: 7872 - RNA, 21 nt, synthetic construct
  source 1..21: mol_type = other RNA
atatctcaactttgtgtcaaa

SEQ ID NO: 7873 - RNA, 21 nt, synthetic construct
  source 1..21: mol_type = other RNA
tatctcaactttgtgtcaaaa

SEQ ID NO: 7874 - RNA, 21 nt, synthetic construct
  source 1..21: mol_type = other RNA
ctcaactttgtgtcaaagaaa

SEQ ID NO: 7875 - RNA, 21 nt, synthetic construct
  source 1..21: mol_type = other RNA
aagcctaatgatgataattaa

SEQ ID NO: 7876 - RNA, 21 nt, synthetic construct
  source 1..21: mol_type = other RNA
aaatctctcatagctttctta

SEQ ID NO: 7877 - RNA, 21 nt, synthetic construct
  source 1..21: mol_type = other RNA
actgcaaagcctaatgatgaa

SEQ ID NO: 7878 - RNA, 21 nt, synthetic construct
  source 1..21: mol_type = other RNA
ctgcaaagcctaatgatgata

SEQ ID NO: 7879 - RNA, 21 nt, synthetic construct
  source 1..21: mol_type = other RNA
tgcaaagcctaatgatgataa

SEQ ID NO: 7880 - RNA, 21 nt, synthetic construct
  source 1..21: mol_type = other RNA
gcaaagcctaatgatgataaa

SEQ ID NO: 7881 - RNA, 21 nt, synthetic construct
  source 1..21: mol_type = other RNA
caaagcctaatgatgataata

SEQ ID NO: 7882 - RNA, 21 nt, synthetic construct
  source 1..21: mol_type = other RNA
aaagcctaatgatgataatta

SEQ ID NO: 7883 - RNA, 21 nt, synthetic construct
  source 1..21: mol_type = other RNA
gcctaatgatgataattatga

SEQ ID NO: 7884 - RNA, 21 nt, synthetic construct
  source 1..21: mol_type = other RNA
cctaatgatgataattatgta

SEQ ID NO: 7885 - RNA, 21 nt, synthetic construct
  source 1..21: mol_type = other RNA
ctaatgatgataattatgtta

SEQ ID NO: 7886 - RNA, 21 nt, synthetic construct
  source 1..21: mol_type = other RNA
taaaaagaaatctctcataga

SEQ ID NO: 7887 - RNA, 21 nt, synthetic construct
  source 1..21: mol_type = other RNA
aaaaagaaatctctcatagca

SEQ ID NO: 7888 - RNA, 21 nt, synthetic construct
  source 1..21: mol_type = other RNA
atctctcatagctttctttta

SEQ ID NO: 7889 - RNA, 21 nt, synthetic construct
  source 1..21: mol_type = other RNA
tcatagctttcttttccatta

SEQ ID NO: 7890 - RNA, 21 nt, synthetic construct
  source 1..21: mol_type = other RNA
catagctttcttttccattta

SEQ ID NO: 7891 - RNA, 21 nt, synthetic construct
  source 1..21: mol_type = other RNA
gtgaatgtttttgccatttta

SEQ ID NO: 7892 - RNA, 21 nt, synthetic construct
  source 1..21: mol_type = other RNA
ctttatgtgaatgtttttgca

SEQ ID NO: 7893 - RNA, 21 nt, synthetic construct
  source 1..21: mol_type = other RNA
atgtgaatgtttttgccatta

SEQ ID NO: 7894 - RNA, 21 nt, synthetic construct
  source 1..21: mol_type = other RNA
gaatgtttttgccatttttta

SEQ ID NO: 7895 - RNA, 21 nt, synthetic construct
  source 1..21: mol_type = other RNA
agataagacagtacagtatta

SEQ ID NO: 7896 - RNA, 21 nt, synthetic construct
  source 1..21: mol_type = other RNA
taagacagtacagtatttaaa

SEQ ID NO: 7897 - RNA, 21 nt, synthetic construct
  source 1..21: mol_type = other RNA
agacagtacagtatttaagta

SEQ ID NO: 7898 - RNA, 21 nt, synthetic construct
  source 1..21: mol_type = other RNA
cagcatgaaaagataactcta

SEQ ID NO: 7899 - RNA, 21 nt, synthetic construct
  source 1..21: mol_type = other RNA
ttcatccaatctctatgttaa

SEQ ID NO: 7900 - RNA, 21 nt, synthetic construct
  source 1..21: mol_type = other RNA
caacacctcaactcatcttta

SEQ ID NO: 7901 - RNA, 21 nt, synthetic construct
  source 1..21: mol_type = other RNA
aagcaacacctcaactcatca

SEQ ID NO: 7902 - RNA, 21 nt, synthetic construct
  source 1..21: mol_type = other RNA
cacctcaactcatctttttaa

SEQ ID NO: 7903 - RNA, 21 nt, synthetic construct
  source 1..21: mol_type = other RNA
cctcaactcatctttttatta

SEQ ID NO: 7904 - RNA, 21 nt, synthetic construct
  source 1..21: mol_type = other RNA
ctcaactcatctttttattta

SEQ ID NO: 7905 - RNA, 21 nt, synthetic construct
  source 1..21: mol_type = other RNA
tctataaaaatgttatagtca

SEQ ID NO: 7906 - RNA, 21 nt, synthetic construct
  source 1..21: mol_type = other RNA
ttgaaccaagagcacatgaaa

SEQ ID NO: 7907 - RNA, 21 nt, synthetic construct
  source 1..21: mol_type = other RNA
attttacttgaaccaagagca

SEQ ID NO: 7908 - RNA, 21 nt, synthetic construct
  source 1..21: mol_type = other RNA
ttttacttgaaccaagagcaa

SEQ ID NO: 7909 - RNA, 21 nt, synthetic construct
  source 1..21: mol_type = other RNA
tttacttgaaccaagagcaca

SEQ ID NO: 7910 - RNA, 21 nt, synthetic construct
  source 1..21: mol_type = other RNA
ttacttgaaccaagagcacaa

SEQ ID NO: 7911 - RNA, 21 nt, synthetic construct
  source 1..21: mol_type = other RNA
tacttgaaccaagagcacata

SEQ ID NO: 7912 - RNA, 21 nt, synthetic construct
  source 1..21: mol_type = other RNA
acttgaaccaagagcacatga

SEQ ID NO: 7913 - RNA, 21 nt, synthetic construct
  source 1..21: mol_type = other RNA
cttgaaccaagagcacatgaa

SEQ ID NO: 7914 - RNA, 21 nt, synthetic construct
  source 1..21: mol_type = other RNA
tgaaccaagagcacatgaata

SEQ ID NO: 7915 - RNA, 21 nt, synthetic construct
  source 1..21: mol_type = other RNA
gaaccaagagcacatgaatga

SEQ ID NO: 7916 - RNA, 21 nt, synthetic construct
  source 1..21: mol_type = other RNA
aaccaagagcacatgaatgaa

SEQ ID NO: 7917 - RNA, 21 nt, synthetic construct
  source 1..21: mol_type = other RNA
accaagagcacatgaatgaaa

SEQ ID NO: 7918 - RNA, 21 nt, synthetic construct
  source 1..21: mol_type = other RNA
ccaagagcacatgaatgaaca

SEQ ID NO: 7919 - RNA, 21 nt, synthetic construct
  source 1..21: mol_type = other RNA
caagagcacatgaatgaacaa

SEQ ID NO: 7920 - RNA, 21 nt, synthetic construct
  source 1..21: mol_type = other RNA
aagagcacatgaatgaacaga

SEQ ID NO: 7921 - RNA, 21 nt, synthetic construct
  source 1..21: mol_type = other RNA
ggaaaagatgtaaaaacatta

SEQ ID NO: 7922 - RNA, 21 nt, synthetic construct
  source 1..21: mol_type = other RNA
tttttttctgagatgaaaaca

SEQ ID NO: 7923 - RNA, 21 nt, synthetic construct
  source 1..21: mol_type = other RNA
atgcaaattagagcatgctaa

SEQ ID NO: 7924 - RNA, 21 nt, synthetic construct
  source 1..21: mol_type = other RNA
tgcaaattagagcatgctata

SEQ ID NO: 7925 - RNA, 21 nt, synthetic construct
  source 1..21: mol_type = other RNA
aaattagagcatgctatctta

SEQ ID NO: 7926 - RNA, 21 nt, synthetic construct
  source 1..21: mol_type = other RNA
agagcatgctatctttaggta

SEQ ID NO: 7927 - RNA, 21 nt, synthetic construct
  source 1..21: mol_type = other RNA
gcatgctatctttaggtgata

SEQ ID NO: 7928 - RNA, 21 nt, synthetic construct
  source 1..21: mol_type = other RNA
tctttaggtgatgcaatctaa

SEQ ID NO: 7929 - RNA, 21 nt, synthetic construct
  source 1..21: mol_type = other RNA
agttagcaggactttttaaaa

SEQ ID NO: 7930 - RNA, 21 nt, synthetic construct
  source 1..21: mol_type = other RNA
gttagcaggactttttaaaaa

SEQ ID NO: 7931 - RNA, 21 nt, synthetic construct
  source 1..21: mol_type = other RNA
ttagcaggactttttaaaaaa

SEQ ID NO: 7932 - RNA, 21 nt, synthetic construct
  source 1..21: mol_type = other RNA
tagcaggactttttaaaaata

SEQ ID NO: 7933 - RNA, 21 nt, synthetic construct
  source 1..21: mol_type = other RNA
tctaaactttaatatatcgaa

SEQ ID NO: 7934 - RNA, 21 nt, synthetic construct
  source 1..21: mol_type = other RNA
ctctaaactttaatatatcga

SEQ ID NO: 7935 - RNA, 21 nt, synthetic construct
  source 1..21: mol_type = other RNA
aaactttaatatatcgaacga

SEQ ID NO: 7936 - RNA, 21 nt, synthetic construct
  source 1..21: mol_type = other RNA
actttaatatatcgaacgtga

SEQ ID NO: 7937 - RNA, 21 nt, synthetic construct
  source 1..21: mol_type = other RNA
ctttaatatatcgaacgtgaa

SEQ ID NO: 7938 - RNA, 21 nt, synthetic construct
  source 1..21: mol_type = other RNA
tttaatatatcgaacgtgaga

SEQ ID NO: 7939 - RNA, 21 nt, synthetic construct
  source 1..21: mol_type = other RNA
ttaatatatcgaacgtgagaa

SEQ ID NO: 7940 - RNA, 21 nt, synthetic construct
  source 1..21: mol_type = other RNA
taatatatcgaacgtgagaga

SEQ ID NO: 7941 - RNA, 21 nt, synthetic construct
  source 1..21: mol_type = other RNA
aatatatcgaacgtgagagta

SEQ ID NO: 7942 - RNA, 21 nt, synthetic construct
  source 1..21: mol_type = other RNA
atatatcgaacgtgagagtga

SEQ ID NO: 7943 - RNA, 21 nt, synthetic construct
  source 1..21: mol_type = other RNA
tatatcgaacgtgagagtgga

SEQ ID NO: 7944 - RNA, 21 nt, synthetic construct
  source 1..21: mol_type = other RNA
gttcttcataatccactacta

SEQ ID NO: 7945 - RNA, 21 nt, synthetic construct
  source 1..21: mol_type = other RNA
accactaaacttgttccttta

SEQ ID NO: 7946 - RNA, 21 nt, synthetic construct
  source 1..21: mol_type = other RNA
tgaaccactaaacttgttcca

SEQ ID NO: 7947 - RNA, 21 nt, synthetic construct
  source 1..21: mol_type = other RNA
gaaccactaaacttgttccta

SEQ ID NO: 7948 - RNA, 21 nt, synthetic construct
  source 1..21: mol_type = other RNA
aaccactaaacttgttcctta

SEQ ID NO: 7949 - RNA, 21 nt, synthetic construct
  source 1..21: mol_type = other RNA
ccactaaacttgttcctttca

SEQ ID NO: 7950 - RNA, 21 nt, synthetic construct
  source 1..21: mol_type = other RNA
cactaaacttgttcctttcaa

SEQ ID NO: 7951 - RNA, 21 nt, synthetic construct
  source 1..21: mol_type = other RNA
actaaacttgttcctttcata

SEQ ID NO: 7952 - RNA, 21 nt, synthetic construct
  source 1..21: mol_type = other RNA
ctaaacttgttcctttcatta

SEQ ID NO: 7953 - RNA, 21 nt, synthetic construct
  source 1..21: mol_type = other RNA
taaacttgttcctttcattta

SEQ ID NO: 7954 - RNA, 21 nt, synthetic construct
  source 1..21: mol_type = other RNA
aaacttgttcctttcatttaa

SEQ ID NO: 7955 - RNA, 21 nt, synthetic construct
  source 1..21: mol_type = other RNA
aacttgttcctttcatttaca

SEQ ID NO: 7956 - RNA, 21 nt, synthetic construct
  source 1..21: mol_type = other RNA
acttgttcctttcatttacaa

SEQ ID NO: 7957 - RNA, 21 nt, synthetic construct
  source 1..21: mol_type = other RNA
cttgttcctttcatttacaaa

SEQ ID NO: 7958 - RNA, 21 nt, synthetic construct
  source 1..21: mol_type = other RNA
ttgttcctttcatttacaaaa

SEQ ID NO: 7959 - RNA, 21 nt, synthetic construct
  source 1..21: mol_type = other RNA
tgttcctttcatttacaaaaa

SEQ ID NO: 7960 - RNA, 21 nt, synthetic construct
  source 1..21: mol_type = other RNA
gttcctttcatttacaaaaga

SEQ ID NO: 7961 - RNA, 21 nt, synthetic construct
  source 1..21: mol_type = other RNA
ttcctttcatttacaaaagaa

SEQ ID NO: 7962 - RNA, 21 nt, synthetic construct
  source 1..21: mol_type = other RNA
tcctttcatttacaaaagaga

SEQ ID NO: 7963 - RNA, 21 nt, synthetic construct
  source 1..21: mol_type = other RNA
cctttcatttacaaaagagaa

SEQ ID NO: 7964 - RNA, 21 nt, synthetic construct
  source 1..21: mol_type = other RNA
ctttcatttacaaaagagata

SEQ ID NO: 7965 - RNA, 21 nt, synthetic construct
  source 1..21: mol_type = other RNA
tttcatttacaaaagagataa

SEQ ID NO: 7966 - RNA, 21 nt, synthetic construct
  source 1..21: mol_type = other RNA
ttcatttacaaaagagataca

SEQ ID NO: 7967 - RNA, 21 nt, synthetic construct
  source 1..21: mol_type = other RNA
tcatttacaaaagagatacca

SEQ ID NO: 7968 - RNA, 21 nt, synthetic construct
  source 1..21: mol_type = other RNA
catttacaaaagagataccta

SEQ ID NO: 7969 - RNA, 21 nt, synthetic construct
  source 1..21: mol_type = other RNA
atttacaaaagagatacctga

SEQ ID NO: 7970 - RNA, 21 nt, synthetic construct
  source 1..21: mol_type = other RNA
tttacaaaagagatacctgaa

SEQ ID NO: 7971 - RNA, 21 nt, synthetic construct
  source 1..21: mol_type = other RNA
ttacaaaagagatacctgaca

SEQ ID NO: 7972 - RNA, 21 nt, synthetic construct
  source 1..21: mol_type = other RNA
tacaaaagagatacctgacaa

SEQ ID NO: 7973 - RNA, 21 nt, synthetic construct
  source 1..21: mol_type = other RNA
acaaaagagatacctgacata

SEQ ID NO: 7974 - RNA, 21 nt, synthetic construct
  source 1..21: mol_type = other RNA
caaaagagatacctgacatca

SEQ ID NO: 7975 - RNA, 21 nt, synthetic construct
  source 1..21: mol_type = other RNA
aaaagagatacctgacatcca

SEQ ID NO: 7976 - RNA, 21 nt, synthetic construct
  source 1..21: mol_type = other RNA
ctgagacactgagaaatgtca

SEQ ID NO: 7977 - RNA, 21 nt, synthetic construct
  source 1..21: mol_type = other RNA
cctgaagtcacacagctaata

SEQ ID NO: 7978 - RNA, 21 nt, synthetic construct
  source 1..21: mol_type = other RNA
tcctgagacactgagaaatga

SEQ ID NO: 7979 - RNA, 21 nt, synthetic construct
  source 1..21: mol_type = other RNA
gagacactgagaaatgtccta

SEQ ID NO: 7980 - RNA, 21 nt, synthetic construct
  source 1..21: mol_type = other RNA
agaaatgtcctgaagtcacaa

SEQ ID NO: 7981 - RNA, 21 nt, synthetic construct
  source 1..21: mol_type = other RNA
tgtgataatgaacaccgtaaa

SEQ ID NO: 7982 - RNA, 21 nt, synthetic construct
  source 1..21: mol_type = other RNA
taggtccaaatcttgtgataa

SEQ ID NO: 7983 - RNA, 21 nt, synthetic construct
  source 1..21: mol_type = other RNA
aggtccaaatcttgtgataaa

SEQ ID NO: 7984 - RNA, 21 nt, synthetic construct
  source 1..21: mol_type = other RNA
gtccaaatcttgtgataatga

SEQ ID NO: 7985 - RNA, 21 nt, synthetic construct
  source 1..21: mol_type = other RNA
ccaaatcttgtgataatgaaa

SEQ ID NO: 7986 - RNA, 21 nt, synthetic construct
  source 1..21: mol_type = other RNA
aaatcttgtgataatgaacaa

SEQ ID NO: 7987 - RNA, 21 nt, synthetic construct
  source 1..21: mol_type = other RNA
ggttagctagcttcctactta

SEQ ID NO: 7988 - RNA, 21 nt, synthetic construct
  source 1..21: mol_type = other RNA
gttagctagcttcctacttta

SEQ ID NO: 7989 - RNA, 21 nt, synthetic construct
  source 1..21: mol_type = other RNA
agcttcctactttcccttgaa

SEQ ID NO: 7990 - RNA, 21 nt, synthetic construct
  source 1..21: mol_type = other RNA
cctactttcccttgaatagta

SEQ ID NO: 7991 - RNA, 21 nt, synthetic construct
  source 1..21: mol_type = other RNA
ctactttcccttgaatagtga

SEQ ID NO: 7992 - RNA, 21 nt, synthetic construct
  source 1..21: mol_type = other RNA
tcccttgaatagtgcttttca

SEQ ID NO: 7993 - RNA, 21 nt, synthetic construct
  source 1..21: mol_type = other RNA
cccttgaatagtgcttttcta

SEQ ID NO: 7994 - RNA, 21 nt, synthetic construct
  source 1..21: mol_type = other RNA
ccttgaatagtgcttttctca

SEQ ID NO: 7995 - RNA, 21 nt, synthetic construct
  source 1..21: mol_type = other RNA
cttgaatagtgcttttctcca

SEQ ID NO: 7996 - RNA, 21 nt, synthetic construct
  source 1..21: mol_type = other RNA
tgaatagtgcttttctcccta

SEQ ID NO: 7997 - RNA, 21 nt, synthetic construct
  source 1..21: mol_type = other RNA
gcttttctccctatgtaataa

SEQ ID NO: 7998 - RNA, 21 nt, synthetic construct
  source 1..21: mol_type = other RNA
agaaggcatattgagttatta

SEQ ID NO: 7999 - RNA, 21 nt, synthetic construct
  source 1..21: mol_type = other RNA
tgtggtttagaaggcatatta

SEQ ID NO: 8000 - RNA, 21 nt, synthetic construct
  source 1..21: mol_type = other RNA
tttagaaggcatattgagtta

SEQ ID NO: 8001 - RNA, 21 nt, synthetic construct
  source 1..21: mol_type = other RNA
tagaaggcatattgagttata

SEQ ID NO: 8002 - RNA, 21 nt, synthetic construct
  source 1..21: mol_type = other RNA
catattgagttattttgcaga

SEQ ID NO: 8003 - RNA, 21 nt, synthetic construct
  source 1..21: mol_type = other RNA
tattttgcagaatcataatga

SEQ ID NO: 8004 - RNA, 21 nt, synthetic construct
  source 1..21: mol_type = other RNA
attttgcagaatcataatgga

SEQ ID NO: 8005 - RNA, 21 nt, synthetic construct
  source 1..21: mol_type = other RNA
ttttgcagaatcataatggaa

SEQ ID NO: 8006 - RNA, 21 nt, synthetic construct
  source 1..21: mol_type = other RNA
tttgcagaatcataatggaca

SEQ ID NO: 8007 - RNA, 21 nt, synthetic construct
  source 1..21: mol_type = other RNA
ttgcagaatcataatggacca

SEQ ID NO: 8008 - RNA, 21 nt, synthetic construct
  source 1..21: mol_type = other RNA
tgcagaatcataatggaccca

SEQ ID NO: 8009 - RNA, 21 nt, synthetic construct
  source 1..21: mol_type = other RNA
gcagaatcataatggacccga

SEQ ID NO: 8010 - RNA, 21 nt, synthetic construct
  source 1..21: mol_type = other RNA
cagaatcataatggacccgca

SEQ ID NO: 8011 - RNA, 21 nt, synthetic construct
  source 1..21: mol_type = other RNA
agaatcataatggacccgcaa

SEQ ID NO: 8012 - RNA, 21 nt, synthetic construct
  source 1..21: mol_type = other RNA
gaatcataatggacccgcaca

SEQ ID NO: 8013 - RNA, 21 nt, synthetic construct
  source 1..21: mol_type = other RNA
aatcataatggacccgcacaa

SEQ ID NO: 8014 - RNA, 21 nt, synthetic construct
  source 1..21: mol_type = other RNA
atcataatggacccgcacaaa

SEQ ID NO: 8015 - RNA, 21 nt, synthetic construct
  source 1..21: mol_type = other RNA
tcataatggacccgcacaaaa

SEQ ID NO: 8016 - RNA, 21 nt, synthetic construct
  source 1..21: mol_type = other RNA
cataatggacccgcacaaaaa

SEQ ID NO: 8017 - RNA, 21 nt, synthetic construct
  source 1..21: mol_type = other RNA
ataatggacccgcacaaaata

SEQ ID NO: 8018 - RNA, 21 nt, synthetic construct
  source 1..21: mol_type = other RNA
atctcagaaccatatctgtta

SEQ ID NO: 8019 - RNA, 21 nt, synthetic construct
  source 1..21: mol_type = other RNA
tgacattttttctcatagaaa

SEQ ID NO: 8020 - RNA, 21 nt, synthetic construct
  source 1..21: mol_type = other RNA
taatggacccgcacaaaatca

SEQ ID NO: 8021 - RNA, 21 nt, synthetic construct
  source 1..21: mol_type = other RNA
aatggacccgcacaaaatcta

SEQ ID NO: 8022 - RNA, 21 nt, synthetic construct
  source 1..21: mol_type = other RNA
atggacccgcacaaaatctca

SEQ ID NO: 8023 - RNA, 21 nt, synthetic construct
  source 1..21: mol_type = other RNA
tggacccgcacaaaatctcaa

SEQ ID NO: 8024 - RNA, 21 nt, synthetic construct
  source 1..21: mol_type = other RNA
ggacccgcacaaaatctcaga

SEQ ID NO: 8025 - RNA, 21 nt, synthetic construct
  source 1..21: mol_type = other RNA
gacccgcacaaaatctcagaa

SEQ ID NO: 8026 - RNA, 21 nt, synthetic construct
  source 1..21: mol_type = other RNA
acccgcacaaaatctcagaaa

SEQ ID NO: 8027 - RNA, 21 nt, synthetic construct
  source 1..21: mol_type = other RNA
cccgcacaaaatctcagaaca

SEQ ID NO: 8028 - RNA, 21 nt, synthetic construct
  source 1..21: mol_type = other RNA
ccgcacaaaatctcagaacca

SEQ ID NO: 8029 - RNA, 21 nt, synthetic construct
  source 1..21: mol_type = other RNA
cgcacaaaatctcagaaccaa

SEQ ID NO: 8030 - RNA, 21 nt, synthetic construct
  source 1..21: mol_type = other RNA
gcacaaaatctcagaaccata

SEQ ID NO: 8031 - RNA, 21 nt, synthetic construct
  source 1..21: mol_type = other RNA
cacaaaatctcagaaccataa

SEQ ID NO: 8032 - RNA, 21 nt, synthetic construct
  source 1..21: mol_type = other RNA
acaaaatctcagaaccatata

SEQ ID NO: 8033 - RNA, 21 nt, synthetic construct
  source 1..21: mol_type = other RNA
caaaatctcagaaccatatca

SEQ ID NO: 8034 - RNA, 21 nt, synthetic construct
  source 1..21: mol_type = other RNA
aaaatctcagaaccatatcta

SEQ ID NO: 8035 - RNA, 21 nt, synthetic construct
  source 1..21: mol_type = other RNA
aaatctcagaaccatatctga

SEQ ID NO: 8036 - RNA, 21 nt, synthetic construct
  source 1..21: mol_type = other RNA
aatctcagaaccatatctgta

SEQ ID NO: 8037 - RNA, 21 nt, synthetic construct
  source 1..21: mol_type = other RNA
tctcagaaccatatctgttga

SEQ ID NO: 8038 - RNA, 21 nt, synthetic construct
  source 1..21: mol_type = other RNA
ctcagaaccatatctgttgaa

SEQ ID NO: 8039 - RNA, 21 nt, synthetic construct
  source 1..21: mol_type = other RNA
tcagaaccatatctgttgaca

SEQ ID NO: 8040 - RNA, 21 nt, synthetic construct
  source 1..21: mol_type = other RNA
cagaaccatatctgttgacaa

SEQ ID NO: 8041 - RNA, 21 nt, synthetic construct
  source 1..21: mol_type = other RNA
agaaccatatctgttgacata

SEQ ID NO: 8042 - RNA, 21 nt, synthetic construct
  source 1..21: mol_type = other RNA
gaaccatatctgttgacatta

SEQ ID NO: 8043 - RNA, 21 nt, synthetic construct
  source 1..21: mol_type = other RNA
aaccatatctgttgacattta

SEQ ID NO: 8044 - RNA, 21 nt, synthetic construct
  source 1..21: mol_type = other RNA
accatatctgttgacatttta

SEQ ID NO: 8045 - RNA, 21 nt, synthetic construct
  source 1..21: mol_type = other RNA
ccatatctgttgacattttta

SEQ ID NO: 8046 - RNA, 21 nt, synthetic construct
  source 1..21: mol_type = other RNA
catatctgttgacatttttta

SEQ ID NO: 8047 - RNA, 21 nt, synthetic construct
  source 1..21: mol_type = other RNA
atatctgttgacattttttca

SEQ ID NO: 8048 - RNA, 21 nt, synthetic construct
  source 1..21: mol_type = other RNA
tatctgttgacattttttcta

SEQ ID NO: 8049 - RNA, 21 nt, synthetic construct
  source 1..21: mol_type = other RNA
atctgttgacattttttctca

SEQ ID NO: 8050 - RNA, 21 nt, synthetic construct
  source 1..21: mol_type = other RNA
tctgttgacattttttctcaa

SEQ ID NO: 8051 - RNA, 21 nt, synthetic construct
  source 1..21: mol_type = other RNA
ctgttgacattttttctcata

SEQ ID NO: 8052 - RNA, 21 nt, synthetic construct
  source 1..21: mol_type = other RNA
tgttgacattttttctcataa

SEQ ID NO: 8053 - RNA, 21 nt, synthetic construct
  source 1..21: mol_type = other RNA
gttgacattttttctcataga

SEQ ID NO: 8054 - RNA, 21 nt, synthetic construct
  source 1..21: mol_type = other RNA
ttgacattttttctcatagaa

SEQ ID NO: 8055 - RNA, 21 nt, synthetic construct
  source 1..21: mol_type = other RNA
tctcatagaaatatcatggta

SEQ ID NO: 8056 - RNA, 21 nt, synthetic construct
  source 1..21: mol_type = other RNA
ctcatagaaatatcatggtta

SEQ ID NO: 8057 - RNA, 21 nt, synthetic construct
  source 1..21: mol_type = other RNA
tcatagaaatatcatggttaa

SEQ ID NO: 8058 - RNA, 21 nt, synthetic construct
  source 1..21: mol_type = other RNA
catttgttaatgagcattaaa

SEQ ID NO: 8059 - RNA, 21 nt, synthetic construct
  source 1..21: mol_type = other RNA
atgagcattaatgttttctga

SEQ ID NO: 8060 - RNA, 21 nt, synthetic construct
  source 1..21: mol_type = other RNA
gaacacttccaaagattaata

SEQ ID NO: 8061 - RNA, 21 nt, synthetic construct
  source 1..21: mol_type = other RNA
tttgttaatgagcattaatga

SEQ ID NO: 8062 - RNA, 21 nt, synthetic construct
  source 1..21: mol_type = other RNA
taatgagcattaatgttttca

SEQ ID NO: 8063 - RNA, 21 nt, synthetic construct
  source 1..21: mol_type = other RNA
tgagcattaatgttttctgaa

SEQ ID NO: 8064 - RNA, 21 nt, synthetic construct
  source 1..21: mol_type = other RNA
gagcattaatgttttctgaaa

SEQ ID NO: 8065 - RNA, 21 nt, synthetic construct
  source 1..21: mol_type = other RNA
agcattaatgttttctgaaca

SEQ ID NO: 8066 - RNA, 21 nt, synthetic construct
  source 1..21: mol_type = other RNA
gcattaatgttttctgaacaa

SEQ ID NO: 8067 - RNA, 21 nt, synthetic construct
  source 1..21: mol_type = other RNA
cattaatgttttctgaacaca

SEQ ID NO: 8068 - RNA, 21 nt, synthetic construct
  source 1..21: mol_type = other RNA
attaatgttttctgaacacta

SEQ ID NO: 8069 - RNA, 21 nt, synthetic construct
  source 1..21: mol_type = other RNA
ttaatgttttctgaacactta

SEQ ID NO: 8070 - RNA, 21 nt, synthetic construct
  source 1..21: mol_type = other RNA
tctgaacacttccaaagatta

SEQ ID NO: 8071 - RNA, 21 nt, synthetic construct
  source 1..21: mol_type = other RNA
ctgaacacttccaaagattaa

SEQ ID NO: 8072 - RNA, 21 nt, synthetic construct
  source 1..21: mol_type = other RNA
tgaacacttccaaagattaaa

SEQ ID NO: 8073 - RNA, 21 nt, synthetic construct
  source 1..21: mol_type = other RNA
aacacttccaaagattaatca

SEQ ID NO: 8074 - RNA, 21 nt, synthetic construct
  source 1..21: mol_type = other RNA
acacttccaaagattaatcaa

SEQ ID NO: 8075 - RNA, 21 nt, synthetic construct
  source 1..21: mol_type = other RNA
cacttccaaagattaatcaaa

SEQ ID NO: 8076 - RNA, 21 nt, synthetic construct
  source 1..21: mol_type = other RNA
acttccaaagattaatcaaaa

SEQ ID NO: 8077 - RNA, 21 nt, synthetic construct
  source 1..21: mol_type = other RNA
cttccaaagattaatcaaaca

SEQ ID NO: 8078 - RNA, 21 nt, synthetic construct
  source 1..21: mol_type = other RNA
ttccaaagattaatcaaacaa

SEQ ID NO: 8079 - RNA, 21 nt, synthetic construct
  source 1..21: mol_type = other RNA
tccaaagattaatcaaacata

SEQ ID NO: 8080 - RNA, 21 nt, synthetic construct
  source 1..21: mol_type = other RNA
ttgtctgaaaatgtctttaaa

SEQ ID NO: 8081 - RNA, 21 nt, synthetic construct
  source 1..21: mol_type = other RNA
attcattgtctgaaaatgtca

SEQ ID NO: 8082 - RNA, 21 nt, synthetic construct
  source 1..21: mol_type = other RNA
cattgtctgaaaatgtcttta

SEQ ID NO: 8083 - RNA, 21 nt, synthetic construct
  source 1..21: mol_type = other RNA
attgtctgaaaatgtctttaa

SEQ ID NO: 8084 - RNA, 21 nt, synthetic construct
  source 1..21: mol_type = other RNA
gtctgaaaatgtctttaagaa

SEQ ID NO: 8085 - RNA, 21 nt, synthetic construct
  source 1..21: mol_type = other RNA
ctgaaaatgtctttaagataa

SEQ ID NO: 8086 - RNA, 21 nt, synthetic construct
  source 1..21: mol_type = other RNA
aggtccctatttcctttgtaa

SEQ ID NO: 8087 - RNA, 21 nt, synthetic construct
  source 1..21: mol_type = other RNA
ggtccctatttcctttgtaca

SEQ ID NO: 8088 - RNA, 21 nt, synthetic construct
  source 1..21: mol_type = other RNA
gtccctatttcctttgtacaa

SEQ ID NO: 8089 - RNA, 21 nt, synthetic construct
  source 1..21: mol_type = other RNA
tccctatttcctttgtacata

SEQ ID NO: 8090 - RNA, 21 nt, synthetic construct
  source 1..21: mol_type = other RNA
ccctatttcctttgtacataa

SEQ ID NO: 8091 - RNA, 21 nt, synthetic construct
  source 1..21: mol_type = other RNA
cctatttcctttgtacataca

SEQ ID NO: 8092 - RNA, 21 nt, synthetic construct
  source 1..21: mol_type = other RNA
ctatttcctttgtacatacaa

SEQ ID NO: 8093 - RNA, 21 nt, synthetic construct
  source 1..21: mol_type = other RNA
tatttcctttgtacatacaca

SEQ ID NO: 8094 - RNA, 21 nt, synthetic construct
  source 1..21: mol_type = other RNA
cacttagaaagaaaagacaga

SEQ ID NO: 8095 - RNA, 21 nt, synthetic construct
  source 1..21: mol_type = other RNA
acttagaaagaaaagacagaa

SEQ ID NO: 8096 - RNA, 21 nt, synthetic construct
  source 1..21: mol_type = other RNA
cttagaaagaaaagacagaaa

SEQ ID NO: 8097 - RNA, 21 nt, synthetic construct
  source 1..21: mol_type = other RNA
ttagaaagaaaagacagaaaa

SEQ ID NO: 8098 - RNA, 21 nt, synthetic construct
  source 1..21: mol_type = other RNA
tagaaagaaaagacagaaaaa

SEQ ID NO: 8099 - RNA, 21 nt, synthetic construct
  source 1..21: mol_type = other RNA
gaggaaggaaggaaatattta

SEQ ID NO: 8100 - RNA, 21 nt, synthetic construct
  source 1..21: mol_type = other RNA
aggaaggaaggaaatatttta

SEQ ID NO: 8101 - RNA, 21 nt, synthetic construct
  source 1..21: mol_type = other RNA
ggaaggaaatattttgagaaa

SEQ ID NO: 8102 - RNA, 21 nt, synthetic construct
  source 1..21: mol_type = other RNA
cttcaatgaagtgttaacaaa

SEQ ID NO: 8103 - RNA, 21 nt, synthetic construct
  source 1..21: mol_type = other RNA
gaagaattaagaaaactctta

SEQ ID NO: 8104 - RNA, 21 nt, synthetic construct
  source 1..21: mol_type = other RNA
aaactcttcaatgaagtgtta

SEQ ID NO: 8105 - RNA, 21 nt, synthetic construct
  source 1..21: mol_type = other RNA
aatgaagtgttaacaaccaaa

SEQ ID NO: 8106 - RNA, 21 nt, synthetic construct
  source 1..21: mol_type = other RNA
atgaagtgttaacaaccaaaa

SEQ ID NO: 8107 - RNA, 21 nt, synthetic construct
  source 1..21: mol_type = other RNA
cggtatcagaaacagcaaata

SEQ ID NO: 8108 - RNA, 21 nt, synthetic construct
  source 1..21: mol_type = other RNA
tacagacggtatcagaaacaa

SEQ ID NO: 8109 - RNA, 21 nt, synthetic construct
  source 1..21: mol_type = other RNA
atcagaaacagcaaatagata

SEQ ID NO: 8110 - RNA, 21 nt, synthetic construct
  source 1..21: mol_type = other RNA
cagaaacagcaaatagatata

SEQ ID NO: 8111 - RNA, 21 nt, synthetic construct
  source 1..21: mol_type = other RNA
agaaacagcaaatagatatta

SEQ ID NO: 8112 - RNA, 21 nt, synthetic construct
  source 1..21: mol_type = other RNA
gaaacagcaaatagatattca

SEQ ID NO: 8113 - RNA, 21 nt, synthetic construct
  source 1..21: mol_type = other RNA
aacagcaaatagatattccta

SEQ ID NO: 8114 - RNA, 21 nt, synthetic construct
  source 1..21: mol_type = other RNA
cagcaaatagatattcctcta

SEQ ID NO: 8115 - RNA, 21 nt, synthetic construct
  source 1..21: mol_type = other RNA
agcaaatagatattcctctaa

SEQ ID NO: 8116 - RNA, 21 nt, synthetic construct
  source 1..21: mol_type = other RNA
caaatagatattcctctacca

SEQ ID NO: 8117 - RNA, 21 nt, synthetic construct
  source 1..21: mol_type = other RNA
tgagtacagaagaatgctcaa

SEQ ID NO: 8118 - RNA, 21 nt, synthetic construct
  source 1..21: mol_type = other RNA
gtacagaagaatgctcatgaa

SEQ ID NO: 8119 - RNA, 21 nt, synthetic construct
  source 1..21: mol_type = other RNA
tacagaagaatgctcatgata

SEQ ID NO: 8120 - RNA, 21 nt, synthetic construct
  source 1..21: mol_type = other RNA
acagaagaatgctcatgataa

SEQ ID NO: 8121 - RNA, 21 nt, synthetic construct
  source 1..21: mol_type = other RNA
aagaatgctcatgatagttta

SEQ ID NO: 8122 - RNA, 21 nt, synthetic construct
  source 1..21: mol_type = other RNA
agaatgctcatgatagtttta

SEQ ID NO: 8123 - RNA, 21 nt, synthetic construct
  source 1..21: mol_type = other RNA
aatgctcatgatagttttgca

SEQ ID NO: 8124 - RNA, 21 nt, synthetic construct
  source 1..21: mol_type = other RNA
gctcatgatagttttgcctta

SEQ ID NO: 8125 - RNA, 21 nt, synthetic construct
  source 1..21: mol_type = other RNA
tcatgatagttttgccttcaa

SEQ ID NO: 8126 - RNA, 21 nt, synthetic construct
  source 1..21: mol_type = other RNA
atgatagttttgccttcatta

SEQ ID NO: 8127 - RNA, 21 nt, synthetic construct
  source 1..21: mol_type = other RNA
tgatagttttgccttcattca

SEQ ID NO: 8128 - RNA, 21 nt, synthetic construct
  source 1..21: mol_type = other RNA
atagttttgccttcattctaa

SEQ ID NO: 8129 - RNA, 21 nt, synthetic construct
  source 1..21: mol_type = other RNA
tggacacagagtaatgaataa

SEQ ID NO: 8130 - RNA, 21 nt, synthetic construct
  source 1..21: mol_type = other RNA
acacagagtaatgaatattta

SEQ ID NO: 8131 - RNA, 21 nt, synthetic construct
  source 1..21: mol_type = other RNA
agtaatgaatatttaatggga

SEQ ID NO: 8132 - RNA, 21 nt, synthetic construct
  source 1..21: mol_type = other RNA
aatgggacattaaatatgcca

SEQ ID NO: 8133 - RNA, 21 nt, synthetic construct
  source 1..21: mol_type = other RNA
atgggacattaaatatgccca

SEQ ID NO: 8134 - RNA, 21 nt, synthetic construct
  source 1..21: mol_type = other RNA
tgggacattaaatatgcccta

SEQ ID NO: 8135 - RNA, 21 nt, synthetic construct
  source 1..21: mol_type = other RNA
gggacattaaatatgccctta

SEQ ID NO: 8136 - RNA, 21 nt, synthetic construct
  source 1..21: mol_type = other RNA
ttggtaaacgagatttaacaa

SEQ ID NO: 8137 - RNA, 21 nt, synthetic construct
  source 1..21: mol_type = other RNA
ggacattaaatatgcccttca

SEQ ID NO: 8138 - RNA, 21 nt, synthetic construct
  source 1..21: mol_type = other RNA
gacattaaatatgcccttcaa

SEQ ID NO: 8139 - RNA, 21 nt, synthetic construct
  source 1..21: mol_type = other RNA
acattaaatatgcccttcaaa

SEQ ID NO: 8140 - RNA, 21 nt, synthetic construct
  source 1..21: mol_type = other RNA
cattaaatatgcccttcaaaa

SEQ ID NO: 8141 - RNA, 21 nt, synthetic construct
  source 1..21: mol_type = other RNA
attaaatatgcccttcaaata

SEQ ID NO: 8142 - RNA, 21 nt, synthetic construct
  source 1..21: mol_type = other RNA
ttaaatatgcccttcaaatca

SEQ ID NO: 8143 - RNA, 21 nt, synthetic construct
  source 1..21: mol_type = other RNA
taaatatgcccttcaaatcta

SEQ ID NO: 8144 - RNA, 21 nt, synthetic construct
  source 1..21: mol_type = other RNA
gcccttcaaatctataattta

SEQ ID NO: 8145 - RNA, 21 nt, synthetic construct
  source 1..21: mol_type = other RNA
cccttcaaatctataatttta

SEQ ID NO: 8146 - RNA, 21 nt, synthetic construct
  source 1..21: mol_type = other RNA
attttactttggtaaacgaga

SEQ ID NO: 8147 - RNA, 21 nt, synthetic construct
  source 1..21: mol_type = other RNA
ttttactttggtaaacgagaa

SEQ ID NO: 8148 - RNA, 21 nt, synthetic construct
  source 1..21: mol_type = other RNA
tttactttggtaaacgagata

SEQ ID NO: 8149 - RNA, 21 nt, synthetic construct
  source 1..21: mol_type = other RNA
ttactttggtaaacgagatta

SEQ ID NO: 8150 - RNA, 21 nt, synthetic construct
  source 1..21: mol_type = other RNA
tactttggtaaacgagattta

SEQ ID NO: 8151 - RNA, 21 nt, synthetic construct
  source 1..21: mol_type = other RNA
ctttggtaaacgagatttaaa

SEQ ID NO: 8152 - RNA, 21 nt, synthetic construct
  source 1..21: mol_type = other RNA
ggtaaacgagatttaacatga

SEQ ID NO: 8153 - RNA, 21 nt, synthetic construct
  source 1..21: mol_type = other RNA
gagatttaacatgatgtctta

SEQ ID NO: 8154 - RNA, 21 nt, synthetic construct
  source 1..21: mol_type = other RNA
ttttttcaaactccattccta

SEQ ID NO: 8155 - RNA, 21 nt, synthetic construct
  source 1..21: mol_type = other RNA
gtcttttatgctcctaaaaca

SEQ ID NO: 8156 - RNA, 21 nt, synthetic construct
  source 1..21: mol_type = other RNA
tcttttttcaaactccattca

SEQ ID NO: 8157 - RNA, 21 nt, synthetic construct
  source 1..21: mol_type = other RNA
cttttttcaaactccattcca

SEQ ID NO: 8158 - RNA, 21 nt, synthetic construct
  source 1..21: mol_type = other RNA
tttttcaaactccattcctta

SEQ ID NO: 8159 - RNA, 21 nt, synthetic construct
  source 1..21: mol_type = other RNA
ttttcaaactccattccttaa

SEQ ID NO: 8160 - RNA, 21 nt, synthetic construct
  source 1..21: mol_type = other RNA
tttcaaactccattccttaga

SEQ ID NO: 8161 - RNA, 21 nt, synthetic construct
  source 1..21: mol_type = other RNA
ttcaaactccattccttagaa

SEQ ID NO: 8162 - RNA, 21 nt, synthetic construct
  source 1..21: mol_type = other RNA
tcaaactccattccttagaaa

SEQ ID NO: 8163 - RNA, 21 nt, synthetic construct
  source 1..21: mol_type = other RNA
caaactccattccttagaaca

SEQ ID NO: 8164 - RNA, 21 nt, synthetic construct
  source 1..21: mol_type = other RNA
aaactccattccttagaacaa

SEQ ID NO: 8165 - RNA, 21 nt, synthetic construct
  source 1..21: mol_type = other RNA
aactccattccttagaacata

SEQ ID NO: 8166 - RNA, 21 nt, synthetic construct
  source 1..21: mol_type = other RNA
actccattccttagaacatta

SEQ ID NO: 8167 - RNA, 21 nt, synthetic construct
  source 1..21: mol_type = other RNA
ctccattccttagaacattca

SEQ ID NO: 8168 - RNA, 21 nt, synthetic construct
  source 1..21: mol_type = other RNA
tccattccttagaacattcta

SEQ ID NO: 8169 - RNA, 21 nt, synthetic construct
  source 1..21: mol_type = other RNA
ccattccttagaacattctta

SEQ ID NO: 8170 - RNA, 21 nt, synthetic construct
  source 1..21: mol_type = other RNA
cattccttagaacattcttca

SEQ ID NO: 8171 - RNA, 21 nt, synthetic construct
  source 1..21: mol_type = other RNA
attccttagaacattcttcta

SEQ ID NO: 8172 - RNA, 21 nt, synthetic construct
  source 1..21: mol_type = other RNA
ttccttagaacattcttctaa

SEQ ID NO: 8173 - RNA, 21 nt, synthetic construct
  source 1..21: mol_type = other RNA
tccttagaacattcttctaca

SEQ ID NO: 8174 - RNA, 21 nt, synthetic construct
  source 1..21: mol_type = other RNA
ccttagaacattcttctacta

SEQ ID NO: 8175 - RNA, 21 nt, synthetic construct
  source 1..21: mol_type = other RNA
cttagaacattcttctactga

SEQ ID NO: 8176 - RNA, 21 nt, synthetic construct
  source 1..21: mol_type = other RNA
ttagaacattcttctactgaa

SEQ ID NO: 8177 - RNA, 21 nt, synthetic construct
  source 1..21: mol_type = other RNA
cttctactgagatgatccaaa

SEQ ID NO: 8178 - RNA, 21 nt, synthetic construct
  source 1..21: mol_type = other RNA
tacttgcttataaagtgataa

SEQ ID NO: 8179 - RNA, 21 nt, synthetic construct
  source 1..21: mol_type = other RNA
tagaacattcttctactgaga

SEQ ID NO: 8180 - RNA, 21 nt, synthetic construct
  source 1..21: mol_type = other RNA
agaacattcttctactgagaa

SEQ ID NO: 8181 - RNA, 21 nt, synthetic construct
  source 1..21: mol_type = other RNA
gaacattcttctactgagata

SEQ ID NO: 8182 - RNA, 21 nt, synthetic construct
  source 1..21: mol_type = other RNA
cattcttctactgagatgata

SEQ ID NO: 8183 - RNA, 21 nt, synthetic construct
  source 1..21: mol_type = other RNA
attcttctactgagatgatca

SEQ ID NO: 8184 - RNA, 21 nt, synthetic construct
  source 1..21: mol_type = other RNA
ttcttctactgagatgatcca

SEQ ID NO: 8185 - RNA, 21 nt, synthetic construct
  source 1..21: mol_type = other RNA
tcttctactgagatgatccaa

SEQ ID NO: 8186 - RNA, 21 nt, synthetic construct
  source 1..21: mol_type = other RNA
ttctactgagatgatccaaga

SEQ ID NO: 8187 - RNA, 21 nt, synthetic construct
  source 1..21: mol_type = other RNA
tctactgagatgatccaagaa

SEQ ID NO: 8188 - RNA, 21 nt, synthetic construct
  source 1..21: mol_type = other RNA
ctactgagatgatccaagaca

SEQ ID NO: 8189 - RNA, 21 nt, synthetic construct
  source 1..21: mol_type = other RNA
tactgagatgatccaagacca

SEQ ID NO: 8190 - RNA, 21 nt, synthetic construct
  source 1..21: mol_type = other RNA
actgagatgatccaagaccaa

SEQ ID NO: 8191 - RNA, 21 nt, synthetic construct
  source 1..21: mol_type = other RNA
ctgagatgatccaagaccaaa

SEQ ID NO: 8192 - RNA, 21 nt, synthetic construct
  source 1..21: mol_type = other RNA
ccaagaccaaaagtgttctta

SEQ ID NO: 8193 - RNA, 21 nt, synthetic construct
  source 1..21: mol_type = other RNA
caagaccaaaagtgttcttta

SEQ ID NO: 8194 - RNA, 21 nt, synthetic construct
  source 1..21: mol_type = other RNA
aagaccaaaagtgttctttga

SEQ ID NO: 8195 - RNA, 21 nt, synthetic construct
  source 1..21: mol_type = other RNA
agaccaaaagtgttctttgga

SEQ ID NO: 8196 - RNA, 21 nt, synthetic construct
  source 1..21: mol_type = other RNA
gaccaaaagtgttctttggta

SEQ ID NO: 8197 - RNA, 21 nt, synthetic construct
  source 1..21: mol_type = other RNA
accaaaagtgttctttggtaa

SEQ ID NO: 8198 - RNA, 21 nt, synthetic construct
  source 1..21: mol_type = other RNA
ccaaaagtgttctttggtaca

SEQ ID NO: 8199 - RNA, 21 nt, synthetic construct
  source 1..21: mol_type = other RNA
caaaagtgttctttggtacta

SEQ ID NO: 8200 - RNA, 21 nt, synthetic construct
  source 1..21: mol_type = other RNA
aaaagtgttctttggtactta

SEQ ID NO: 8201 - RNA, 21 nt, synthetic construct
  source 1..21: mol_type = other RNA
aaagtgttctttggtacttga

SEQ ID NO: 8202 - RNA, 21 nt, synthetic construct
  source 1..21: mol_type = other RNA
aagtgttctttggtacttgca

SEQ ID NO: 8203 - RNA, 21 nt, synthetic construct
  source 1..21: mol_type = other RNA
tctttggtacttgcttataaa

SEQ ID NO: 8204 - RNA, 21 nt, synthetic construct
  source 1..21: mol_type = other RNA
ctttggtacttgcttataaaa

SEQ ID NO: 8205 - RNA, 21 nt, synthetic construct
  source 1..21: mol_type = other RNA
ttggtacttgcttataaagta

SEQ ID NO: 8206 - RNA, 21 nt, synthetic construct
  source 1..21: mol_type = other RNA
tggtacttgcttataaagtga

SEQ ID NO: 8207 - RNA, 21 nt, synthetic construct
  source 1..21: mol_type = other RNA
ttgcttataaagtgatagtaa

SEQ ID NO: 8208 - RNA, 21 nt, synthetic construct
  source 1..21: mol_type = other RNA
acatgttagcatataatgtaa

SEQ ID NO: 8209 - RNA, 21 nt, synthetic construct
  source 1..21: mol_type = other RNA
cttataaagtgatagtacata

SEQ ID NO: 8210 - RNA, 21 nt, synthetic construct
  source 1..21: mol_type = other RNA
ttataaagtgatagtacatga

SEQ ID NO: 8211 - RNA, 21 nt, synthetic construct
  source 1..21: mol_type = other RNA
tataaagtgatagtacatgta

SEQ ID NO: 8212 - RNA, 21 nt, synthetic construct
  source 1..21: mol_type = other RNA
aaagtgatagtacatgttaga

SEQ ID NO: 8213 - RNA, 21 nt, synthetic construct
  source 1..21: mol_type = other RNA
aagtgatagtacatgttagca

SEQ ID NO: 8214 - RNA, 21 nt, synthetic construct
  source 1..21: mol_type = other RNA
agtgatagtacatgttagcaa

SEQ ID NO: 8215 - RNA, 21 nt, synthetic construct
  source 1..21: mol_type = other RNA
gtgatagtacatgttagcata

SEQ ID NO: 8216 - RNA, 21 nt, synthetic construct
  source 1..21: mol_type = other RNA
tgatagtacatgttagcataa

SEQ ID NO: 8217 - RNA, 21 nt, synthetic construct
  source 1..21: mol_type = other RNA
gatagtacatgttagcatata

SEQ ID NO: 8218 - RNA, 21 nt, synthetic construct
  source 1..21: mol_type = other RNA
atagtacatgttagcatataa

SEQ ID NO: 8219 - RNA, 21 nt, synthetic construct
  source 1..21: mol_type = other RNA
tagtacatgttagcatataaa

SEQ ID NO: 8220 - RNA, 21 nt, synthetic construct
  source 1..21: mol_type = other RNA
gtacatgttagcatataatga

SEQ ID NO: 8221 - RNA, 21 nt, synthetic construct
  source 1..21: mol_type = other RNA
tacatgttagcatataatgta

SEQ ID NO: 8222 - RNA, 21 nt, synthetic construct
  source 1..21: mol_type = other RNA
atataatgtattttgaagaga

SEQ ID NO: 8223 - RNA, 21 nt, synthetic construct
  source 1..21: mol_type = other RNA
attttgaagagtgaagtaaaa

SEQ ID NO: 8224 - RNA, 21 nt, synthetic construct
  source 1..21: mol_type = other RNA
tttgaagagtgaagtaaatga

SEQ ID NO: 8225 - RNA, 21 nt, synthetic construct
  source 1..21: mol_type = other RNA
ttgaagagtgaagtaaatgca

SEQ ID NO: 8226 - RNA, 21 nt, synthetic construct
  source 1..21: mol_type = other RNA
tgaagagtgaagtaaatgcta

SEQ ID NO: 8227 - RNA, 21 nt, synthetic construct
  source 1..21: mol_type = other RNA
gaagagtgaagtaaatgctaa

SEQ ID NO: 8228 - RNA, 21 nt, synthetic construct
  source 1..21: mol_type = other RNA
aagagtgaagtaaatgctata

SEQ ID NO: 8229 - RNA, 21 nt, synthetic construct
  source 1..21: mol_type = other RNA
agagtgaagtaaatgctatta

SEQ ID NO: 8230 - RNA, 21 nt, synthetic construct
  source 1..21: mol_type = other RNA
gagtgaagtaaatgctattga

SEQ ID NO: 8231 - RNA, 21 nt, synthetic construct
  source 1..21: mol_type = other RNA
agtgaagtaaatgctattgaa

SEQ ID NO: 8232 - RNA, 21 nt, synthetic construct
  source 1..21: mol_type = other RNA
gtgaagtaaatgctattgata

SEQ ID NO: 8233 - RNA, 21 nt, synthetic construct
  source 1..21: mol_type = other RNA
tgaagtaaatgctattgataa

SEQ ID NO: 8234 - RNA, 21 nt, synthetic construct
  source 1..21: mol_type = other RNA
gaagtaaatgctattgataaa

SEQ ID NO: 8235 - RNA, 21 nt, synthetic construct
  source 1..21: mol_type = other RNA
aacagtaaagaaatgctacta

SEQ ID NO: 8236 - RNA, 21 nt, synthetic construct
  source 1..21: mol_type = other RNA
taataacagtaaagaaatgca

SEQ ID NO: 8237 - RNA, 21 nt, synthetic construct
  source 1..21: mol_type = other RNA
aataacagtaaagaaatgcta

SEQ ID NO: 8238 - RNA, 21 nt, synthetic construct
  source 1..21: mol_type = other RNA
taacagtaaagaaatgctaca

SEQ ID NO: 8239 - RNA, 21 nt, synthetic construct
  source 1..21: mol_type = other RNA
acagtaaagaaatgctactta

SEQ ID NO: 8240 - RNA, 21 nt, synthetic construct
  source 1..21: mol_type = other RNA
cagtaaagaaatgctacttga

SEQ ID NO: 8241 - RNA, 21 nt, synthetic construct
  source 1..21: mol_type = other RNA
agtaaagaaatgctacttgaa

SEQ ID NO: 8242 - RNA, 21 nt, synthetic construct
  source 1..21: mol_type = other RNA
gtaaagaaatgctacttgata

SEQ ID NO: 8243 - RNA, 21 nt, synthetic construct
  source 1..21: mol_type = other RNA
taaagaaatgctacttgatta

SEQ ID NO: 8244 - RNA, 21 nt, synthetic construct
  source 1..21: mol_type = other RNA
aaagaaatgctacttgattta

SEQ ID NO: 8245 - RNA, 21 nt, synthetic construct
  source 1..21: mol_type = other RNA
aactggattgctcagattaca

SEQ ID NO: 8246 - RNA, 21 nt, synthetic construct
  source 1..21: mol_type = other RNA
attgctcagattacctgatca

SEQ ID NO: 8247 - RNA, 21 nt, synthetic construct
  source 1..21: mol_type = other RNA
cagattacctgatcgtggtga

SEQ ID NO: 8248 - RNA, 21 nt, synthetic construct
  source 1..21: mol_type = other RNA
agattacctgatcgtggtgga

SEQ ID NO: 8249 - RNA, 21 nt, synthetic construct
  source 1..21: mol_type = other RNA
gattacctgatcgtggtggaa

SEQ ID NO: 8250 - RNA, 21 nt, synthetic construct
  source 1..21: mol_type = other RNA
attacctgatcgtggtggaaa

SEQ ID NO: 8251 - RNA, 21 nt, synthetic construct
  source 1..21: mol_type = other RNA
ttacctgatcgtggtggaaca

SEQ ID NO: 8252 - RNA, 21 nt, synthetic construct
  source 1..21: mol_type = other RNA
tacctgatcgtggtggaacca

SEQ ID NO: 8253 - RNA, 21 nt, synthetic construct
  source 1..21: mol_type = other RNA
acctgatcgtggtggaaccca

SEQ ID NO: 8254 - RNA, 21 nt, synthetic construct
  source 1..21: mol_type = other RNA
cctgatcgtggtggaacccta

SEQ ID NO: 8255 - RNA, 21 nt, synthetic construct
  source 1..21: mol_type = other RNA
aactgttctataaagcaaaga

SEQ ID NO: 8256 - RNA, 21 nt, synthetic construct
  source 1..21: mol_type = other RNA
tatcccatatttaactgttca

SEQ ID NO: 8257 - RNA, 21 nt, synthetic construct
  source 1..21: mol_type = other RNA
atcccatatttaactgttcta

SEQ ID NO: 8258 - RNA, 21 nt, synthetic construct
  source 1..21: mol_type = other RNA
tcccatatttaactgttctaa

SEQ ID NO: 8259 - RNA, 21 nt, synthetic construct
  source 1..21: mol_type = other RNA
cccatatttaactgttctata

SEQ ID NO: 8260 - RNA, 21 nt, synthetic construct
  source 1..21: mol_type = other RNA
ccatatttaactgttctataa

SEQ ID NO: 8261 - RNA, 21 nt, synthetic construct
  source 1..21: mol_type = other RNA
catatttaactgttctataaa

SEQ ID NO: 8262 - RNA, 21 nt, synthetic construct
  source 1..21: mol_type = other RNA
actgttctataaagcaaagca

SEQ ID NO: 8263 - RNA, 21 nt, synthetic construct
  source 1..21: mol_type = other RNA
ctgttctataaagcaaagcaa

SEQ ID NO: 8264 - RNA, 21 nt, synthetic construct
  source 1..21: mol_type = other RNA
tgttctataaagcaaagcaca

SEQ ID NO: 8265 - RNA, 21 nt, synthetic construct
  source 1..21: mol_type = other RNA
gttctataaagcaaagcacaa

SEQ ID NO: 8266 - RNA, 21 nt, synthetic construct
  source 1..21: mol_type = other RNA
ttctataaagcaaagcacaga

SEQ ID NO: 8267 - RNA, 21 nt, synthetic construct
  source 1..21: mol_type = other RNA
tctataaagcaaagcacagca

SEQ ID NO: 8268 - RNA, 21 nt, synthetic construct
  source 1..21: mol_type = other RNA
ctataaagcaaagcacagcta

SEQ ID NO: 8269 - RNA, 21 nt, synthetic construct
  source 1..21: mol_type = other RNA
tataaagcaaagcacagctta

SEQ ID NO: 8270 - RNA, 21 nt, synthetic construct
  source 1..21: mol_type = other RNA
gttctgaaggatatacttcta

SEQ ID NO: 8271 - RNA, 21 nt, synthetic construct
  source 1..21: mol_type = other RNA
ctgtattttctcatagagtaa

SEQ ID NO: 8272 - RNA, 21 nt, synthetic construct
  source 1..21: mol_type = other RNA
cagcttgggtaatagcgttca

SEQ ID NO: 8273 - RNA, 21 nt, synthetic construct
  source 1..21: mol_type = other RNA
agcttgggtaatagcgttcta

SEQ ID NO: 8274 - RNA, 21 nt, synthetic construct
  source 1..21: mol_type = other RNA
gcttgggtaatagcgttctga

SEQ ID NO: 8275 - RNA, 21 nt, synthetic construct
  source 1..21: mol_type = other RNA
cttgggtaatagcgttctgaa

SEQ ID NO: 8276 - RNA, 21 nt, synthetic construct
  source 1..21: mol_type = other RNA
ttgggtaatagcgttctgaaa

SEQ ID NO: 8277 - RNA, 21 nt, synthetic construct
  source 1..21: mol_type = other RNA
tgggtaatagcgttctgaaga

SEQ ID NO: 8278 - RNA, 21 nt, synthetic construct
  source 1..21: mol_type = other RNA
gggtaatagcgttctgaagga

SEQ ID NO: 8279 - RNA, 21 nt, synthetic construct
  source 1..21: mol_type = other RNA
ggtaatagcgttctgaaggaa

SEQ ID NO: 8280 - RNA, 21 nt, synthetic construct
  source 1..21: mol_type = other RNA
gtaatagcgttctgaaggata

SEQ ID NO: 8281 - RNA, 21 nt, synthetic construct
  source 1..21: mol_type = other RNA
taatagcgttctgaaggataa

SEQ ID NO: 8282 - RNA, 21 nt, synthetic construct
  source 1..21: mol_type = other RNA
aatagcgttctgaaggatata

SEQ ID NO: 8283 - RNA, 21 nt, synthetic construct
  source 1..21: mol_type = other RNA
atagcgttctgaaggatataa

SEQ ID NO: 8284 - RNA, 21 nt, synthetic construct
  source 1..21: mol_type = other RNA
tagcgttctgaaggatataca

SEQ ID NO: 8285 - RNA, 21 nt, synthetic construct
  source 1..21: mol_type = other RNA
agcgttctgaaggatatacta

SEQ ID NO: 8286 - RNA, 21 nt, synthetic construct
  source 1..21: mol_type = other RNA
gcgttctgaaggatatactta

SEQ ID NO: 8287 - RNA, 21 nt, synthetic construct
  source 1..21: mol_type = other RNA
cgttctgaaggatatacttca

SEQ ID NO: 8288 - RNA, 21 nt, synthetic construct
  source 1..21: mol_type = other RNA
ttctgaaggatatacttctga

SEQ ID NO: 8289 - RNA, 21 nt, synthetic construct
  source 1..21: mol_type = other RNA
tctgaaggatatacttctgta

SEQ ID NO: 8290 - RNA, 21 nt, synthetic construct
  source 1..21: mol_type = other RNA
ctgaaggatatacttctgtaa

SEQ ID NO: 8291 - RNA, 21 nt, synthetic construct
  source 1..21: mol_type = other RNA
tgaaggatatacttctgtata

SEQ ID NO: 8292 - RNA, 21 nt, synthetic construct
  source 1..21: mol_type = other RNA
gaaggatatacttctgtatta

SEQ ID NO: 8293 - RNA, 21 nt, synthetic construct
  source 1..21: mol_type = other RNA
aaggatatacttctgtattta

SEQ ID NO: 8294 - RNA, 21 nt, synthetic construct
  source 1..21: mol_type = other RNA
aggatatacttctgtatttta

SEQ ID NO: 8295 - RNA, 21 nt, synthetic construct
  source 1..21: mol_type = other RNA
ggatatacttctgtattttca

SEQ ID NO: 8296 - RNA, 21 nt, synthetic construct
  source 1..21: mol_type = other RNA
gatatacttctgtattttcta

SEQ ID NO: 8297 - RNA, 21 nt, synthetic construct
  source 1..21: mol_type = other RNA
atatacttctgtattttctca

SEQ ID NO: 8298 - RNA, 21 nt, synthetic construct
  source 1..21: mol_type = other RNA
tatacttctgtattttctcaa

SEQ ID NO: 8299 - RNA, 21 nt, synthetic construct
  source 1..21: mol_type = other RNA
acttctgtattttctcataga

SEQ ID NO: 8300 - RNA, 21 nt, synthetic construct
  source 1..21: mol_type = other RNA
cttctgtattttctcatagaa

SEQ ID NO: 8301 - RNA, 21 nt, synthetic construct
  source 1..21: mol_type = other RNA
ttctgtattttctcatagaga

SEQ ID NO: 8302 - RNA, 21 nt, synthetic construct
  source 1..21: mol_type = other RNA
tctgtattttctcatagagta

SEQ ID NO: 8303 - RNA, 21 nt, synthetic construct
  source 1..21: mol_type = other RNA
ctcatagagtacaatttagta

SEQ ID NO: 8304 - RNA, 21 nt, synthetic construct
  source 1..21: mol_type = other RNA
tcatagagtacaatttagtga

SEQ ID NO: 8305 - RNA, 21 nt, synthetic construct
  source 1..21: mol_type = other RNA
catagagtacaatttagtgaa

SEQ ID NO: 8306 - RNA, 21 nt, synthetic construct
  source 1..21: mol_type = other RNA
atagagtacaatttagtgata

SEQ ID NO: 8307 - RNA, 21 nt, synthetic construct
  source 1..21: mol_type = other RNA
tagagtacaatttagtgatta

SEQ ID NO: 8308 - RNA, 21 nt, synthetic construct
  source 1..21: mol_type = other RNA
agtacaatttagtgattatga

SEQ ID NO: 8309 - RNA, 21 nt, synthetic construct
  source 1..21: mol_type = other RNA
attatgcttcatttcactata

SEQ ID NO: 8310 - RNA, 21 nt, synthetic construct
  source 1..21: mol_type = other RNA
gtacaatttagtgattatgca

SEQ ID NO: 8311 - RNA, 21 nt, synthetic construct
  source 1..21: mol_type = other RNA
tacaatttagtgattatgcta

SEQ ID NO: 8312 - RNA, 21 nt, synthetic construct
  source 1..21: mol_type = other RNA
acaatttagtgattatgctta

SEQ ID NO: 8313 - RNA, 21 nt, synthetic construct
  source 1..21: mol_type = other RNA
agtgattatgcttcatttcaa

SEQ ID NO: 8314 - RNA, 21 nt, synthetic construct
  source 1..21: mol_type = other RNA
gtgattatgcttcatttcaca

SEQ ID NO: 8315 - RNA, 21 nt, synthetic construct
  source 1..21: mol_type = other RNA
tgattatgcttcatttcacta

SEQ ID NO: 8316 - RNA, 21 nt, synthetic construct
  source 1..21: mol_type = other RNA
gattatgcttcatttcactaa

SEQ ID NO: 8317 - RNA, 21 nt, synthetic construct
  source 1..21: mol_type = other RNA
ttatgcttcatttcactatga

SEQ ID NO: 8318 - RNA, 21 nt, synthetic construct
  source 1..21: mol_type = other RNA
tatgcttcatttcactatgga

SEQ ID NO: 8319 - RNA, 21 nt, synthetic construct
  source 1..21: mol_type = other RNA
atgcttcatttcactatggaa

SEQ ID NO: 8320 - RNA, 21 nt, synthetic construct
  source 1..21: mol_type = other RNA
tgcttcatttcactatggaaa

SEQ ID NO: 8321 - RNA, 21 nt, synthetic construct
  source 1..21: mol_type = other RNA
gcttcatttcactatggaaaa

SEQ ID NO: 8322 - RNA, 21 nt, synthetic construct
  source 1..21: mol_type = other RNA
cttcatttcactatggaaata

SEQ ID NO: 8323 - RNA, 21 nt, synthetic construct
  source 1..21: mol_type = other RNA
ttcatttcactatggaaataa

SEQ ID NO: 8324 - RNA, 21 nt, synthetic construct
  source 1..21: mol_type = other RNA
tcatttcactatggaaatata

SEQ ID NO: 8325 - RNA, 21 nt, synthetic construct
  source 1..21: mol_type = other RNA
tttcactatggaaatatgtta

SEQ ID NO: 8326 - RNA, 21 nt, synthetic construct
  source 1..21: mol_type = other RNA
actatggaaatatgttactga

SEQ ID NO: 8327 - RNA, 21 nt, synthetic construct
  source 1..21: mol_type = other RNA
ctatggaaatatgttactgaa

SEQ ID NO: 8328 - RNA, 21 nt, synthetic construct
  source 1..21: mol_type = other RNA
tatggaaatatgttactgaaa

SEQ ID NO: 8329 - RNA, 21 nt, synthetic construct
  source 1..21: mol_type = other RNA
atggaaatatgttactgaata

SEQ ID NO: 8330 - RNA, 21 nt, synthetic construct
  source 1..21: mol_type = other RNA
gacagctatggagtttgcgta

SEQ ID NO: 8331 - RNA, 21 nt, synthetic construct
  source 1..21: mol_type = other RNA
actgacagctatggagtttga

SEQ ID NO: 8332 - RNA, 21 nt, synthetic construct
  source 1..21: mol_type = other RNA
ctgacagctatggagtttgca

SEQ ID NO: 8333 - RNA, 21 nt, synthetic construct
  source 1..21: mol_type = other RNA
tgacagctatggagtttgcga

SEQ ID NO: 8334 - RNA, 21 nt, synthetic construct
  source 1..21: mol_type = other RNA
acagctatggagtttgcgtga

SEQ ID NO: 8335 - RNA, 21 nt, synthetic construct
  source 1..21: mol_type = other RNA
cagctatggagtttgcgtgta

SEQ ID NO: 8336 - RNA, 21 nt, synthetic construct
  source 1..21: mol_type = other RNA
agctatggagtttgcgtgtaa

SEQ ID NO: 8337 - RNA, 21 nt, synthetic construct
  source 1..21: mol_type = other RNA
gctatggagtttgcgtgtaca

SEQ ID NO: 8338 - RNA, 21 nt, synthetic construct
  source 1..21: mol_type = other RNA
ctatggagtttgcgtgtacta

SEQ ID NO: 8339 - RNA, 21 nt, synthetic construct
  source 1..21: mol_type = other RNA
tatggagtttgcgtgtactta

SEQ ID NO: 8340 - RNA, 21 nt, synthetic construct
  source 1..21: mol_type = other RNA
atggagtttgcgtgtacttca

SEQ ID NO: 8341 - RNA, 21 nt, synthetic construct
  source 1..21: mol_type = other RNA
ctcgttaatgctctcatccaa

SEQ ID NO: 8342 - RNA, 21 nt, synthetic construct
  source 1..21: mol_type = other RNA
tttgcgtgtacttccatacta

SEQ ID NO: 8343 - RNA, 21 nt, synthetic construct
  source 1..21: mol_type = other RNA
tgcgtgtacttccatactcga

SEQ ID NO: 8344 - RNA, 21 nt, synthetic construct
  source 1..21: mol_type = other RNA
gcgtgtacttccatactcgta

SEQ ID NO: 8345 - RNA, 21 nt, synthetic construct
  source 1..21: mol_type = other RNA
cgtgtacttccatactcgtta

SEQ ID NO: 8346 - RNA, 21 nt, synthetic construct
  source 1..21: mol_type = other RNA
gtgtacttccatactcgttaa

SEQ ID NO: 8347 - RNA, 21 nt, synthetic construct
  source 1..21: mol_type = other RNA
tgtacttccatactcgttaaa

SEQ ID NO: 8348 - RNA, 21 nt, synthetic construct
  source 1..21: mol_type = other RNA
gtacttccatactcgttaata

SEQ ID NO: 8349 - RNA, 21 nt, synthetic construct
  source 1..21: mol_type = other RNA
tacttccatactcgttaatga

SEQ ID NO: 8350 - RNA, 21 nt, synthetic construct
  source 1..21: mol_type = other RNA
acttccatactcgttaatgca

SEQ ID NO: 8351 - RNA, 21 nt, synthetic construct
  source 1..21: mol_type = other RNA
cttccatactcgttaatgcta

SEQ ID NO: 8352 - RNA, 21 nt, synthetic construct
  source 1..21: mol_type = other RNA
ttccatactcgttaatgctca

SEQ ID NO: 8353 - RNA, 21 nt, synthetic construct
  source 1..21: mol_type = other RNA
tccatactcgttaatgctcta

SEQ ID NO: 8354 - RNA, 21 nt, synthetic construct
  source 1..21: mol_type = other RNA
ccatactcgttaatgctctca

SEQ ID NO: 8355 - RNA, 21 nt, synthetic construct
  source 1..21: mol_type = other RNA
catactcgttaatgctctcaa

SEQ ID NO: 8356 - RNA, 21 nt, synthetic construct
  source 1..21: mol_type = other RNA
atactcgttaatgctctcata

SEQ ID NO: 8357 - RNA, 21 nt, synthetic construct
  source 1..21: mol_type = other RNA
tcgttaatgctctcatccaca

SEQ ID NO: 8358 - RNA, 21 nt, synthetic construct
  source 1..21: mol_type = other RNA
cgttaatgctctcatccacta

SEQ ID NO: 8359 - RNA, 21 nt, synthetic construct
  source 1..21: mol_type = other RNA
gttaatgctctcatccactta

SEQ ID NO: 8360 - RNA, 21 nt, synthetic construct
  source 1..21: mol_type = other RNA
ttaatgctctcatccacttaa

SEQ ID NO: 8361 - RNA, 21 nt, synthetic construct
  source 1..21: mol_type = other RNA
taatgctctcatccacttata

SEQ ID NO: 8362 - RNA, 21 nt, synthetic construct
  source 1..21: mol_type = other RNA
aatgctctcatccacttatta

SEQ ID NO: 8363 - RNA, 21 nt, synthetic construct
  source 1..21: mol_type = other RNA
atgctctcatccacttattaa

SEQ ID NO: 8364 - RNA, 21 nt, synthetic construct
  source 1..21: mol_type = other RNA
tgctctcatccacttattaaa

SEQ ID NO: 8365 - RNA, 21 nt, synthetic construct
  source 1..21: mol_type = other RNA
gctctcatccacttattaaaa

SEQ ID NO: 8366 - RNA, 21 nt, synthetic construct
  source 1..21: mol_type = other RNA
ctctcatccacttattaaata

SEQ ID NO: 8367 - RNA, 21 nt, synthetic construct
  source 1..21: mol_type = other RNA
tctcatccacttattaaataa

SEQ ID NO: 8368 - RNA, 21 nt, synthetic construct
  source 1..21: mol_type = other RNA
ctcatccacttattaaataaa

SEQ ID NO: 8369 - RNA, 21 nt, synthetic construct
  source 1..21: mol_type = other RNA
ttaaataatcatagagcacca

SEQ ID NO: 8370 - RNA, 21 nt, synthetic construct
  source 1..21: mol_type = other RNA
taaataatcatagagcaccca

SEQ ID NO: 8371 - RNA, 21 nt, synthetic construct
  source 1..21: mol_type = other RNA
aaataatcatagagcacccaa

SEQ ID NO: 8372 - RNA, 21 nt, synthetic construct
  source 1..21: mol_type = other RNA
aataatcatagagcacccata

SEQ ID NO: 8373 - RNA, 21 nt, synthetic construct
  source 1..21: mol_type = other RNA
ataatcatagagcacccataa

SEQ ID NO: 8374 - RNA, 21 nt, synthetic construct
  source 1..21: mol_type = other RNA
taatcatagagcacccatata

SEQ ID NO: 8375 - RNA, 21 nt, synthetic construct
  source 1..21: mol_type = other RNA
gagcacccatatcttgcttga

SEQ ID NO: 8376 - RNA, 21 nt, synthetic construct
  source 1..21: mol_type = other RNA
atatcttgcttgccacaataa

SEQ ID NO: 8377 - RNA, 21 nt, synthetic construct
  source 1..21: mol_type = other RNA
ataggtcctgccctcagggaa

SEQ ID NO: 8378 - RNA, 21 nt, synthetic construct
  source 1..21: mol_type = other RNA
taggtcctgccctcagggata

SEQ ID NO: 8379 - RNA, 21 nt, synthetic construct
  source 1..21: mol_type = other RNA
aggtcctgccctcagggatta

SEQ ID NO: 8380 - RNA, 21 nt, synthetic construct
  source 1..21: mol_type = other RNA
ggtcctgccctcagggattta

SEQ ID NO: 8381 - RNA, 21 nt, synthetic construct
  source 1..21: mol_type = other RNA
gtcctgccctcagggatttta

SEQ ID NO: 8382 - RNA, 21 nt, synthetic construct
  source 1..21: mol_type = other RNA
tcctgccctcagggattttaa

SEQ ID NO: 8383 - RNA, 21 nt, synthetic construct
  source 1..21: mol_type = other RNA
cctgccctcagggattttaaa

SEQ ID NO: 8384 - RNA, 21 nt, synthetic construct
  source 1..21: mol_type = other RNA
ctgccctcagggattttaaaa

SEQ ID NO: 8385 - RNA, 21 nt, synthetic construct
  source 1..21: mol_type = other RNA
tgccctcagggattttaaaga

SEQ ID NO: 8386 - RNA, 21 nt, synthetic construct
  source 1..21: mol_type = other RNA
gccctcagggattttaaagta

SEQ ID NO: 8387 - RNA, 21 nt, synthetic construct
  source 1..21: mol_type = other RNA
ccctcagggattttaaagtca

SEQ ID NO: 8388 - RNA, 21 nt, synthetic construct
  source 1..21: mol_type = other RNA
agggattttaaagtctaatta

SEQ ID NO: 8389 - RNA, 21 nt, synthetic construct
  source 1..21: mol_type = other RNA
gggattttaaagtctaattta

SEQ ID NO: 8390 - RNA, 21 nt, synthetic construct
  source 1..21: mol_type = other RNA
ttgacagataaaatacgaaga

SEQ ID NO: 8391 - RNA, 21 nt, synthetic construct
  source 1..21: mol_type = other RNA
gaagagattaaattgacagaa

SEQ ID NO: 8392 - RNA, 21 nt, synthetic construct
  source 1..21: mol_type = other RNA
aagagattaaattgacagata

SEQ ID NO: 8393 - RNA, 21 nt, synthetic construct
  source 1..21: mol_type = other RNA
agagattaaattgacagataa

SEQ ID NO: 8394 - RNA, 21 nt, synthetic construct
  source 1..21: mol_type = other RNA
tgacagataaaatacgaagta

SEQ ID NO: 8395 - RNA, 21 nt, synthetic construct
  source 1..21: mol_type = other RNA
gacagataaaatacgaagtga

SEQ ID NO: 8396 - RNA, 21 nt, synthetic construct
  source 1..21: mol_type = other RNA
acagataaaatacgaagtgga

SEQ ID NO: 8397 - RNA, 21 nt, synthetic construct
  source 1..21: mol_type = other RNA
gaagtgggatgtcttgagtta

SEQ ID NO: 8398 - RNA, 21 nt, synthetic construct
  source 1..21: mol_type = other RNA
agtgggatgtcttgagttcta

SEQ ID NO: 8399 - RNA, 21 nt, synthetic construct
  source 1..21: mol_type = other RNA
gatgtcttgagttctgcatga

SEQ ID NO: 8400 - RNA, 21 nt, synthetic construct
  source 1..21: mol_type = other RNA
agtgggtttctaggataggta

SEQ ID NO: 8401 - RNA, 21 nt, synthetic construct
  source 1..21: mol_type = other RNA
gtgggtttctaggataggtca

SEQ ID NO: 8402 - RNA, 21 nt, synthetic construct
  source 1..21: mol_type = other RNA
tgggtttctaggataggtcta

SEQ ID NO: 8403 - RNA, 21 nt, synthetic construct
  source 1..21: mol_type = other RNA
gggtttctaggataggtctga

SEQ ID NO: 8404 - RNA, 21 nt, synthetic construct
  source 1..21: mol_type = other RNA
ggtttctaggataggtctgaa

SEQ ID NO: 8405 - RNA, 21 nt, synthetic construct
  source 1..21: mol_type = other RNA
gtttctaggataggtctgaaa

SEQ ID NO: 8406 - RNA, 21 nt, synthetic construct
  source 1..21: mol_type = other RNA
tttctaggataggtctgaaaa

SEQ ID NO: 8407 - RNA, 21 nt, synthetic construct
  source 1..21: mol_type = other RNA
ttctaggataggtctgaaaaa

SEQ ID NO: 8408 - RNA, 21 nt, synthetic construct
  source 1..21: mol_type = other RNA
tctaggataggtctgaaaata

SEQ ID NO: 8409 - RNA, 21 nt, synthetic construct
  source 1..21: mol_type = other RNA
ctaggataggtctgaaaatta

SEQ ID NO: 8410 - RNA, 21 nt, synthetic construct
  source 1..21: mol_type = other RNA
taggataggtctgaaaattga

SEQ ID NO: 8411 - RNA, 21 nt, synthetic construct
  source 1..21: mol_type = other RNA
ctgaaaattgctttcatttga

SEQ ID NO: 8412 - RNA, 21 nt, synthetic construct
  source 1..21: mol_type = other RNA
attgctttcatttgcaacaca

SEQ ID NO: 8413 - RNA, 21 nt, synthetic construct
  source 1..21: mol_type = other RNA
ttgctttcatttgcaacacaa

SEQ ID NO: 8414 - RNA, 21 nt, synthetic construct
  source 1..21: mol_type = other RNA
tgctttcatttgcaacacata

SEQ ID NO: 8415 - RNA, 21 nt, synthetic construct
  source 1..21: mol_type = other RNA
gctttcatttgcaacacatta

SEQ ID NO: 8416 - RNA, 21 nt, synthetic construct
  source 1..21: mol_type = other RNA
ctttcatttgcaacacattta

SEQ ID NO: 8417 - RNA, 21 nt, synthetic construct
  source 1..21: mol_type = other RNA
gacaatctaaatatatcatca

SEQ ID NO: 8418 - RNA, 21 nt, synthetic construct
  source 1..21: mol_type = other RNA
agaaagtagctttatttggaa

SEQ ID NO: 8419 - RNA, 21 nt, synthetic construct
  source 1..21: mol_type = other RNA
aagtagctttatttggatata

SEQ ID NO: 8420 - RNA, 21 nt, synthetic construct
  source 1..21: mol_type = other RNA
caatctaaatatatcatcaga

SEQ ID NO: 8421 - RNA, 21 nt, synthetic construct
  source 1..21: mol_type = other RNA
aagtgcctatgtgaagtgata

SEQ ID NO: 8422 - RNA, 21 nt, synthetic construct
  source 1..21: mol_type = other RNA
tcatcagtttttaaaagtgca

SEQ ID NO: 8423 - RNA, 21 nt, synthetic construct
  source 1..21: mol_type = other RNA
catcagtttttaaaagtgcca

SEQ ID NO: 8424 - RNA, 21 nt, synthetic construct
  source 1..21: mol_type = other RNA
atcagtttttaaaagtgccta

SEQ ID NO: 8425 - RNA, 21 nt, synthetic construct
  source 1..21: mol_type = other RNA
tcagtttttaaaagtgcctaa

SEQ ID NO: 8426 - RNA, 21 nt, synthetic construct
  source 1..21: mol_type = other RNA
cagtttttaaaagtgcctata

SEQ ID NO: 8427 - RNA, 21 nt, synthetic construct
  source 1..21: mol_type = other RNA
agtttttaaaagtgcctatga

SEQ ID NO: 8428 - RNA, 21 nt, synthetic construct
  source 1..21: mol_type = other RNA
gtttttaaaagtgcctatgta

SEQ ID NO: 8429 - RNA, 21 nt, synthetic construct
  source 1..21: mol_type = other RNA
tttttaaaagtgcctatgtga

SEQ ID NO: 8430 - RNA, 21 nt, synthetic construct
  source 1..21: mol_type = other RNA
agtgcctatgtgaagtgatta

SEQ ID NO: 8431 - RNA, 21 nt, synthetic construct
  source 1..21: mol_type = other RNA
gtgcctatgtgaagtgattta

SEQ ID NO: 8432 - RNA, 21 nt, synthetic construct
  source 1..21: mol_type = other RNA
tgcctatgtgaagtgatttta

SEQ ID NO: 8433 - RNA, 21 nt, synthetic construct
  source 1..21: mol_type = other RNA
gcctatgtgaagtgattttta

SEQ ID NO: 8434 - RNA, 21 nt, synthetic construct
  source 1..21: mol_type = other RNA
cctatgtgaagtgatttttaa

SEQ ID NO: 8435 - RNA, 21 nt, synthetic construct
  source 1..21: mol_type = other RNA
ctatgtgaagtgatttttaaa

SEQ ID NO: 8436 - RNA, 21 nt, synthetic construct
  source 1..21: mol_type = other RNA
tatgtgaagtgatttttaaaa

SEQ ID NO: 8437 - RNA, 21 nt, synthetic construct
  source 1..21: mol_type = other RNA
gaagtgatttttaaaaagaga

SEQ ID NO: 8438 - RNA, 21 nt, synthetic construct
  source 1..21: mol_type = other RNA
aagtgatttttaaaaagagca

SEQ ID NO: 8439 - RNA, 21 nt, synthetic construct
  source 1..21: mol_type = other RNA
tgatttttaaaaagagcctaa

SEQ ID NO: 8440 - RNA, 21 nt, synthetic construct
  source 1..21: mol_type = other RNA
gatttttaaaaagagcctata

SEQ ID NO: 8441 - RNA, 21 nt, synthetic construct
  source 1..21: mol_type = other RNA
atttttaaaaagagcctatga

SEQ ID NO: 8442 - RNA, 21 nt, synthetic construct
  source 1..21: mol_type = other RNA
tttttaaaaagagcctatgta

SEQ ID NO: 8443 - RNA, 21 nt, synthetic construct
  source 1..21: mol_type = other RNA
ttttaaaaagagcctatgtga

SEQ ID NO: 8444 - RNA, 21 nt, synthetic construct
  source 1..21: mol_type = other RNA
tttaaaaagagcctatgtgaa

SEQ ID NO: 8445 - RNA, 21 nt, synthetic construct
  source 1..21: mol_type = other RNA
ttaaaaagagcctatgtgaaa

SEQ ID NO: 8446 - RNA, 21 nt, synthetic construct
  source 1..21: mol_type = other RNA
taaaaagagcctatgtgaaga

SEQ ID NO: 8447 - RNA, 21 nt, synthetic construct
  source 1..21: mol_type = other RNA
aaaaagagcctatgtgaagga

SEQ ID NO: 8448 - RNA, 21 nt, synthetic construct
  source 1..21: mol_type = other RNA
gtaatcttgcttgttcttgta

SEQ ID NO: 8449 - RNA, 21 nt, synthetic construct
  source 1..21: mol_type = other RNA
taatcttgcttgttcttgtta

SEQ ID NO: 8450 - RNA, 21 nt, synthetic construct
  source 1..21: mol_type = other RNA
aatcttgcttgttcttgttaa

SEQ ID NO: 8451 - RNA, 21 nt, synthetic construct
  source 1..21: mol_type = other RNA
atcttgcttgttcttgttaca

SEQ ID NO: 8452 - RNA, 21 nt, synthetic construct
  source 1..21: mol_type = other RNA
tcttgcttgttcttgttacta

SEQ ID NO: 8453 - RNA, 21 nt, synthetic construct
  source 1..21: mol_type = other RNA
cttgcttgttcttgttactaa

SEQ ID NO: 8454 - RNA, 21 nt, synthetic construct
  source 1..21: mol_type = other RNA
ttgcttgttcttgttactaaa

SEQ ID NO: 8455 - RNA, 21 nt, synthetic construct
  source 1..21: mol_type = other RNA
tgcttgttcttgttactaata

SEQ ID NO: 8456 - RNA, 21 nt, synthetic construct
  source 1..21: mol_type = other RNA
gcttgttcttgttactaatta

SEQ ID NO: 8457 - RNA, 21 nt, synthetic construct
  source 1..21: mol_type = other RNA
cttgttcttgttactaattta

SEQ ID NO: 8458 - RNA, 21 nt, synthetic construct
  source 1..21: mol_type = other RNA
ttgttcttgttactaatttca

SEQ ID NO: 8459 - RNA, 21 nt, synthetic construct
  source 1..21: mol_type = other RNA
tctgcatatataagaacgaaa

SEQ ID NO: 8460 - RNA, 21 nt, synthetic construct
  source 1..21: mol_type = other RNA
agaatgatatttcctgtttta

SEQ ID NO: 8461 - RNA, 21 nt, synthetic construct
  source 1..21: mol_type = other RNA
ttgtacgtgcctcaaataaaa

SEQ ID NO: 8462 - RNA, 21 nt, synthetic construct
  source 1..21: mol_type = other RNA
tgcctcaaataaacaagaata

SEQ ID NO: 8463 - RNA, 21 nt, synthetic construct
  source 1..21: mol_type = other RNA
gcctcaaataaacaagaatga

SEQ ID NO: 8464 - RNA, 21 nt, synthetic construct
  source 1..21: mol_type = other RNA
cctcaaataaacaagaatgaa

SEQ ID NO: 8465 - RNA, 21 nt, synthetic construct
  source 1..21: mol_type = other RNA
ctcaaataaacaagaatgata

SEQ ID NO: 8466 - RNA, 21 nt, synthetic construct
  source 1..21: mol_type = other RNA
tcaaataaacaagaatgataa

SEQ ID NO: 8467 - RNA, 21 nt, synthetic construct
  source 1..21: mol_type = other RNA
aacaagaatgatatttcctga

SEQ ID NO: 8468 - RNA, 21 nt, synthetic construct
  source 1..21: mol_type = other RNA
acaagaatgatatttcctgta

SEQ ID NO: 8469 - RNA, 21 nt, synthetic construct
  source 1..21: mol_type = other RNA
caagaatgatatttcctgtta

SEQ ID NO: 8470 - RNA, 21 nt, synthetic construct
  source 1..21: mol_type = other RNA
aagaatgatatttcctgttta

SEQ ID NO: 8471 - RNA, 21 nt, synthetic construct
  source 1..21: mol_type = other RNA
gttgggtaaatatgcttatta

SEQ ID NO: 8472 - RNA, 21 nt, synthetic construct
  source 1..21: mol_type = other RNA
acttatgttgggtaaatatga

SEQ ID NO: 8473 - RNA, 21 nt, synthetic construct
  source 1..21: mol_type = other RNA
cttatgttgggtaaatatgca

SEQ ID NO: 8474 - RNA, 21 nt, synthetic construct
  source 1..21: mol_type = other RNA
ttatgttgggtaaatatgcta

SEQ ID NO: 8475 - RNA, 21 nt, synthetic construct
  source 1..21: mol_type = other RNA
tatgttgggtaaatatgctta

SEQ ID NO: 8476 - RNA, 21 nt, synthetic construct
  source 1..21: mol_type = other RNA
atgttgggtaaatatgcttaa

SEQ ID NO: 8477 - RNA, 21 nt, synthetic construct
  source 1..21: mol_type = other RNA
tgttgggtaaatatgcttata

SEQ ID NO: 8478 - RNA, 21 nt, synthetic construct
  source 1..21: mol_type = other RNA
ttggttcaactttcactctga

SEQ ID NO: 8479 - RNA, 21 nt, synthetic construct
  source 1..21: mol_type = other RNA
aactttcactctgaagaaata

SEQ ID NO: 8480 - RNA, 21 nt, synthetic construct
  source 1..21: mol_type = other RNA
ctctgaagaaatccgtatgta

SEQ ID NO: 8481 - RNA, 21 nt, synthetic construct
  source 1..21: mol_type = other RNA
ctgaagaaatccgtatgttaa

SEQ ID NO: 8482 - RNA, 21 nt, synthetic construct
  source 1..21: mol_type = other RNA
gtgttgtttaactatgactca

SEQ ID NO: 8483 - RNA, 21 nt, synthetic construct
  source 1..21: mol_type = other RNA
taactgagtagtcttatatta

SEQ ID NO: 8484 - RNA, 21 nt, synthetic construct
  source 1..21: mol_type = other RNA
tgactcctaactgagtagtca

SEQ ID NO: 8485 - RNA, 21 nt, synthetic construct
  source 1..21: mol_type = other RNA
gactcctaactgagtagtcta

SEQ ID NO: 8486 - RNA, 21 nt, synthetic construct
  source 1..21: mol_type = other RNA
actcctaactgagtagtctta

SEQ ID NO: 8487 - RNA, 21 nt, synthetic construct
  source 1..21: mol_type = other RNA
ctcctaactgagtagtcttaa

SEQ ID NO: 8488 - RNA, 21 nt, synthetic construct
  source 1..21: mol_type = other RNA
tcctaactgagtagtcttata

SEQ ID NO: 8489 - RNA, 21 nt, synthetic construct
  source 1..21: mol_type = other RNA
cctaactgagtagtcttataa

SEQ ID NO: 8490 - RNA, 21 nt, synthetic construct
  source 1..21: mol_type = other RNA
ctaactgagtagtcttatata

SEQ ID NO: 8491 - RNA, 21 nt, synthetic construct
  source 1..21: mol_type = other RNA
aactgagtagtcttatattta

SEQ ID NO: 8492 - RNA, 21 nt, synthetic construct
  source 1..21: mol_type = other RNA
actgagtagtcttatatttca

SEQ ID NO: 8493 - RNA, 21 nt, synthetic construct
  source 1..21: mol_type = other RNA
ctgagtagtcttatatttcaa

SEQ ID NO: 8494 - RNA, 21 nt, synthetic construct
  source 1..21: mol_type = other RNA
tgagtagtcttatatttcaaa

SEQ ID NO: 8495 - RNA, 21 nt, synthetic construct
  source 1..21: mol_type = other RNA
gagtagtcttatatttcaata

SEQ ID NO: 8496 - RNA, 21 nt, synthetic construct
  source 1..21: mol_type = other RNA
ctttactcttaacaggattaa

SEQ ID NO: 8497 - RNA, 21 nt, synthetic construct
  source 1..21: mol_type = other RNA
ttcctttactcttaacaggaa

SEQ ID NO: 8498 - RNA, 21 nt, synthetic construct
  source 1..21: mol_type = other RNA
tcctttactcttaacaggata

SEQ ID NO: 8499 - RNA, 21 nt, synthetic construct
  source 1..21: mol_type = other RNA
cctttactcttaacaggatta

SEQ ID NO: 8500 - RNA, 21 nt, synthetic construct
  source 1..21: mol_type = other RNA
tttactcttaacaggattata

SEQ ID NO: 8501 - RNA, 21 nt, synthetic construct
  source 1..21: mol_type = other RNA
ttactcttaacaggattataa

SEQ ID NO: 8502 - RNA, 21 nt, synthetic construct
  source 1..21: mol_type = other RNA
cttaacaggattatatataga

SEQ ID NO: 8503 - RNA, 21 nt, synthetic construct
  source 1..21: mol_type = other RNA
aggattatatatagaacatga

SEQ ID NO: 8504 - RNA, 21 nt, synthetic construct
  source 1..21: mol_type = other RNA
catgctcacttacaaaaataa

SEQ ID NO: 8505 - RNA, 21 nt, synthetic construct
  source 1..21: mol_type = other RNA
acttacaaaaataggatgata

SEQ ID NO: 8506 - RNA, 21 nt, synthetic construct
  source 1..21: mol_type = other RNA
ataaggcaggcttcttgtata

SEQ ID NO: 8507 - RNA, 21 nt, synthetic construct
  source 1..21: mol_type = other RNA
caggcttcttgtatatactta

SEQ ID NO: 8508 - RNA, 21 nt, synthetic construct
  source 1..21: mol_type = other RNA
tatatacttatgctgtcaaaa

SEQ ID NO: 8509 - RNA, 21 nt, synthetic construct
  source 1..21: mol_type = other RNA
atatacttatgctgtcaaata

SEQ ID NO: 8510 - RNA, 21 nt, synthetic construct
  source 1..21: mol_type = other RNA
tatacttatgctgtcaaatga

SEQ ID NO: 8511 - RNA, 21 nt, synthetic construct
  source 1..21: mol_type = other RNA
atacttatgctgtcaaatgta

SEQ ID NO: 8512 - RNA, 21 nt, synthetic construct
  source 1..21: mol_type = other RNA
tacttatgctgtcaaatgtta

SEQ ID NO: 8513 - RNA, 21 nt, synthetic construct
  source 1..21: mol_type = other RNA
acttatgctgtcaaatgttaa

SEQ ID NO: 8514 - RNA, 21 nt, synthetic construct
  source 1..21: mol_type = other RNA
cttatgctgtcaaatgttata

SEQ ID NO: 8515 - RNA, 21 nt, synthetic construct
  source 1..21: mol_type = other RNA
gctgtcaaatgttatattgta

SEQ ID NO: 8516 - RNA, 21 nt, synthetic construct
  source 1..21: mol_type = other RNA
ttatgctgtcaaatgttataa

SEQ ID NO: 8517 - RNA, 21 nt, synthetic construct
  source 1..21: mol_type = other RNA
tatgctgtcaaatgttatata

SEQ ID NO: 8518 - RNA, 21 nt, synthetic construct
  source 1..21: mol_type = other RNA
tgctgtcaaatgttatattga

SEQ ID NO: 8519 - RNA, 21 nt, synthetic construct
  source 1..21: mol_type = other RNA
ctgtcaaatgttatattgtta

SEQ ID NO: 8520 - RNA, 21 nt, synthetic construct
  source 1..21: mol_type = other RNA
tgtcaaatgttatattgttta

SEQ ID NO: 8521 - RNA, 21 nt, synthetic construct
  source 1..21: mol_type = other RNA
tatgttcagagtatcagtgta

SEQ ID NO: 8522 - RNA, 21 nt, synthetic construct
  source 1..21: mol_type = other RNA
atgttcagagtatcagtgtta

SEQ ID NO: 8523 - RNA, 21 nt, synthetic construct
  source 1..21: mol_type = other RNA
tgttcagagtatcagtgttca

SEQ ID NO: 8524 - RNA, 21 nt, synthetic construct
  source 1..21: mol_type = other RNA
gttcagagtatcagtgttcta

SEQ ID NO: 8525 - RNA, 21 nt, synthetic construct
  source 1..21: mol_type = other RNA
ttcagagtatcagtgttctta

SEQ ID NO: 8526 - RNA, 21 nt, synthetic construct
  source 1..21: mol_type = other RNA
tcagagtatcagtgttcttta

SEQ ID NO: 8527 - RNA, 21 nt, synthetic construct
  source 1..21: mol_type = other RNA
cagagtatcagtgttctttaa

SEQ ID NO: 8528 - RNA, 21 nt, synthetic construct
  source 1..21: mol_type = other RNA
agagtatcagtgttctttaca

SEQ ID NO: 8529 - RNA, 21 nt, synthetic construct
  source 1..21: mol_type = other RNA
gagtatcagtgttctttacta

SEQ ID NO: 8530 - RNA, 21 nt, synthetic construct
  source 1..21: mol_type = other RNA
agtatcagtgttctttactca

SEQ ID NO: 8531 - RNA, 21 nt, synthetic construct
  source 1..21: mol_type = other RNA
gtatcagtgttctttactcca

SEQ ID NO: 8532 - RNA, 21 nt, synthetic construct
  source 1..21: mol_type = other RNA
tctttactccttacagatata

SEQ ID NO: 8533 - RNA, 21 nt, synthetic construct
  source 1..21: mol_type = other RNA
ttactccttacagatatttta

SEQ ID NO: 8534 - RNA, 21 nt, synthetic construct
  source 1..21: mol_type = other RNA
taaatgcagcatcactttcta

SEQ ID NO: 8535 - RNA, 21 nt, synthetic construct
  source 1..21: mol_type = other RNA
gcatcactttctgaaaataaa

SEQ ID NO: 8536 - RNA, 21 nt, synthetic construct
  source 1..21: mol_type = other RNA
gagaaacattatttgttgtca

SEQ ID NO: 8537 - RNA, 21 nt, synthetic construct
  source 1..21: mol_type = other RNA
tgttgtcagtatttcagcata

SEQ ID NO: 8538 - RNA, 21 nt, synthetic construct
  source 1..21: mol_type = other RNA
gtatttcagcatgaacttgta

SEQ ID NO: 8539 - RNA, 21 nt, synthetic construct
  source 1..21: mol_type = other RNA
taattggtacagattctgtta

SEQ ID NO: 8540 - RNA, 21 nt, synthetic construct
  source 1..21: mol_type = other RNA
ttgtaattggtacagattcta

SEQ ID NO: 8541 - RNA, 21 nt, synthetic construct
  source 1..21: mol_type = other RNA
tgtaattggtacagattctga

SEQ ID NO: 8542 - RNA, 21 nt, synthetic construct
  source 1..21: mol_type = other RNA
gtaattggtacagattctgta

SEQ ID NO: 8543 - RNA, 21 nt, synthetic construct
  source 1..21: mol_type = other RNA
aattggtacagattctgttga

SEQ ID NO: 8544 - RNA, 21 nt, synthetic construct
  source 1..21: mol_type = other RNA
attggtacagattctgttgta

SEQ ID NO: 8545 - RNA, 21 nt, synthetic construct
  source 1..21: mol_type = other RNA
ttggtacagattctgttgtaa

SEQ ID NO: 8546 - RNA, 21 nt, synthetic construct
  source 1..21: mol_type = other RNA
tggtacagattctgttgtata

SEQ ID NO: 8547 - RNA, 21 nt, synthetic construct
  source 1..21: mol_type = other RNA
ggtacagattctgttgtatga

SEQ ID NO: 8548 - RNA, 21 nt, synthetic construct
  source 1..21: mol_type = other RNA
gtacagattctgttgtatgca

SEQ ID NO: 8549 - RNA, 21 nt, synthetic construct
  source 1..21: mol_type = other RNA
tacagattctgttgtatgcta

SEQ ID NO: 8550 - RNA, 21 nt, synthetic construct
  source 1..21: mol_type = other RNA
acagattctgttgtatgctta

SEQ ID NO: 8551 - RNA, 21 nt, synthetic construct
  source 1..21: mol_type = other RNA
cagattctgttgtatgcttta

SEQ ID NO: 8552 - RNA, 21 nt, synthetic construct
  source 1..21: mol_type = other RNA
cacatctagaattcttaatta

SEQ ID NO: 8553 - RNA, 21 nt, synthetic construct
  source 1..21: mol_type = other RNA
agattctgttgtatgctttca

SEQ ID NO: 8554 - RNA, 21 nt, synthetic construct
  source 1..21: mol_type = other RNA
gattctgttgtatgctttcta

SEQ ID NO: 8555 - RNA, 21 nt, synthetic construct
  source 1..21: mol_type = other RNA
tggcatgtcacatctagaata

SEQ ID NO: 8556 - RNA, 21 nt, synthetic construct
  source 1..21: mol_type = other RNA
ggcatgtcacatctagaatta

SEQ ID NO: 8557 - RNA, 21 nt, synthetic construct
  source 1..21: mol_type = other RNA
gcatgtcacatctagaattca

SEQ ID NO: 8558 - RNA, 21 nt, synthetic construct
  source 1..21: mol_type = other RNA
catgtcacatctagaattcta

SEQ ID NO: 8559 - RNA, 21 nt, synthetic construct
  source 1..21: mol_type = other RNA
atgtcacatctagaattctta

SEQ ID NO: 8560 - RNA, 21 nt, synthetic construct
  source 1..21: mol_type = other RNA
tgtcacatctagaattcttaa

SEQ ID NO: 8561 - RNA, 21 nt, synthetic construct
  source 1..21: mol_type = other RNA
gtcacatctagaattcttaaa

SEQ ID NO: 8562 - RNA, 21 nt, synthetic construct
  source 1..21: mol_type = other RNA
tcacatctagaattcttaata

SEQ ID NO: 8563 - RNA, 21 nt, synthetic construct
  source 1..21: mol_type = other RNA
tgacttgagagttaagtgaaa

SEQ ID NO: 8564 - RNA, 21 nt, synthetic construct
  source 1..21: mol_type = other RNA
ttgagagttaagtgaaacata

SEQ ID NO: 8565 - RNA, 21 nt, synthetic construct
  source 1..21: mol_type = other RNA
tagcacttgcttttcatctta

SEQ ID NO: 8566 - RNA, 21 nt, synthetic construct
  source 1..21: mol_type = other RNA
ttgcattttaaatttccatga

SEQ ID NO: 8567 - RNA, 21 nt, synthetic construct
  source 1..21: mol_type = other RNA
attttaaatttccatgattga

SEQ ID NO: 8568 - RNA, 21 nt, synthetic construct
  source 1..21: mol_type = other RNA
tggttgcagtatctgaaaaaa

SEQ ID NO: 8569 - RNA, 21 nt, synthetic construct
  source 1..21: mol_type = other RNA
ggttgcagtatctgaaaaaaa

SEQ ID NO: 8570 - RNA, 21 nt, synthetic construct
  source 1..21: mol_type = other RNA
gttgcagtatctgaaaaaata

SEQ ID NO: 8571 - RNA, 21 nt, synthetic construct
  source 1..21: mol_type = other RNA
ttgcagtatctgaaaaaatta

SEQ ID NO: 8572 - RNA, 21 nt, synthetic construct
  source 1..21: mol_type = other RNA
tgcagtatctgaaaaaattaa

SEQ ID NO: 8573 - RNA, 21 nt, synthetic construct
  source 1..21: mol_type = other RNA
attcattaggttagaagttca

SEQ ID NO: 8574 - RNA, 21 nt, synthetic construct
  source 1..21: mol_type = other RNA
tagaagttccagaataattta

SEQ ID NO: 8575 - RNA, 21 nt, synthetic construct
  source 1..21: mol_type = other RNA
acctactattgtagaattaca

SEQ ID NO: 8576 - RNA, 21 nt, synthetic construct
  source 1..21: mol_type = other RNA
caaaacaaaactactcctata

SEQ ID NO: 8577 - RNA, 21 nt, synthetic construct
  source 1..21: mol_type = other RNA
aaacaaaacaaaactactcca

SEQ ID NO: 8578 - RNA, 21 nt, synthetic construct
  source 1..21: mol_type = other RNA
acaaaacaaaactactcctaa

SEQ ID NO: 8579 - RNA, 21 nt, synthetic construct
  source 1..21: mol_type = other RNA
aaaacaaaactactcctatta

SEQ ID NO: 8580 - RNA, 21 nt, synthetic construct
  source 1..21: mol_type = other RNA
aaacaaaactactcctattta

SEQ ID NO: 8581 - RNA, 21 nt, synthetic construct
  source 1..21: mol_type = other RNA
acaaaactactcctattttca

SEQ ID NO: 8582 - RNA, 21 nt, synthetic construct
  source 1..21: mol_type = other RNA
caaaactactcctattttcca

SEQ ID NO: 8583 - RNA, 21 nt, synthetic construct
  source 1..21: mol_type = other RNA
aaaactactcctattttccta

SEQ ID NO: 8584 - RNA, 21 nt, synthetic construct
  source 1..21: mol_type = other RNA
attttcctggaattttgccaa

SEQ ID NO: 8585 - RNA, 21 nt, synthetic construct
  source 1..21: mol_type = other RNA
gatgtttgccattatacaaaa

SEQ ID NO: 8586 - RNA, 21 nt, synthetic construct
  source 1..21: mol_type = other RNA
gtaaacaacttaaaattgcta

SEQ ID NO: 8587 - RNA, 21 nt, synthetic construct
  source 1..21: mol_type = other RNA
caaagtttgagtaaacaacta

SEQ ID NO: 8588 - RNA, 21 nt, synthetic construct
  source 1..21: mol_type = other RNA
aaagtttgagtaaacaactta

SEQ ID NO: 8589 - RNA, 21 nt, synthetic construct
  source 1..21: mol_type = other RNA
aagtttgagtaaacaacttaa

SEQ ID NO: 8590 - RNA, 21 nt, synthetic construct
  source 1..21: mol_type = other RNA
agtaaacaacttaaaattgca

SEQ ID NO: 8591 - RNA, 21 nt, synthetic construct
  source 1..21: mol_type = other RNA
aaacaacttaaaattgcttga

SEQ ID NO: 8592 - RNA, 21 nt, synthetic construct
  source 1..21: mol_type = other RNA
atagtctttgattgaaataaa

SEQ ID NO: 8593 - RNA, 21 nt, synthetic construct
  source 1..21: mol_type = other RNA
gagaatgtatttggctaaata

SEQ ID NO: 8594 - RNA, 21 nt, synthetic construct
  source 1..21: mol_type = other RNA
cttcaataatcattcctttaa

SEQ ID NO: 8595 - RNA, 21 nt, synthetic construct
  source 1..21: mol_type = other RNA
tcacaaacacatcattacaaa

SEQ ID NO: 8596 - RNA, 21 nt, synthetic construct
  source 1..21: mol_type = other RNA
ctggcagttgatgtcttcaaa

SEQ ID NO: 8597 - RNA, 21 nt, synthetic construct
  source 1..21: mol_type = other RNA
ggcagttgatgtcttcaataa

SEQ ID NO: 8598 - RNA, 21 nt, synthetic construct
  source 1..21: mol_type = other RNA
gcagttgatgtcttcaataaa

SEQ ID NO: 8599 - RNA, 21 nt, synthetic construct
  source 1..21: mol_type = other RNA
cagttgatgtcttcaataata

SEQ ID NO: 8600 - RNA, 21 nt, synthetic construct
  source 1..21: mol_type = other RNA
agttgatgtcttcaataatca

SEQ ID NO: 8601 - RNA, 21 nt, synthetic construct
  source 1..21: mol_type = other RNA
gttgatgtcttcaataatcaa

SEQ ID NO: 8602 - RNA, 21 nt, synthetic construct
  source 1..21: mol_type = other RNA
ttgatgtcttcaataatcata

SEQ ID NO: 8603 - RNA, 21 nt, synthetic construct
  source 1..21: mol_type = other RNA
tgatgtcttcaataatcatta

SEQ ID NO: 8604 - RNA, 21 nt, synthetic construct
  source 1..21: mol_type = other RNA
gatgtcttcaataatcattca

SEQ ID NO: 8605 - RNA, 21 nt, synthetic construct
  source 1..21: mol_type = other RNA
atgtcttcaataatcattcca

SEQ ID NO: 8606 - RNA, 21 nt, synthetic construct
  source 1..21: mol_type = other RNA
tgtcttcaataatcattccta

SEQ ID NO: 8607 - RNA, 21 nt, synthetic construct
  source 1..21: mol_type = other RNA
gtcttcaataatcattcctta

SEQ ID NO: 8608 - RNA, 21 nt, synthetic construct
  source 1..21: mol_type = other RNA
tcttcaataatcattccttta

SEQ ID NO: 8609 - RNA, 21 nt, synthetic construct
  source 1..21: mol_type = other RNA
attcacaaacacatcattaca

SEQ ID NO: 8610 - RNA, 21 nt, synthetic construct
  source 1..21: mol_type = other RNA
ttcacaaacacatcattacaa

SEQ ID NO: 8611 - RNA, 21 nt, synthetic construct
  source 1..21: mol_type = other RNA
cacaaacacatcattacaaga

SEQ ID NO: 8612 - RNA, 21 nt, synthetic construct
  source 1..21: mol_type = other RNA
acaaacacatcattacaagca

SEQ ID NO: 8613 - RNA, 21 nt, synthetic construct
  source 1..21: mol_type = other RNA
caaacacatcattacaagcta

SEQ ID NO: 8614 - RNA, 21 nt, synthetic construct
  source 1..21: mol_type = other RNA
aaacacatcattacaagctaa

SEQ ID NO: 8615 - RNA, 21 nt, synthetic construct
  source 1..21: mol_type = other RNA
aacacatcattacaagctaca

SEQ ID NO: 8616 - RNA, 21 nt, synthetic construct
  source 1..21: mol_type = other RNA
acacatcattacaagctacta

SEQ ID NO: 8617 - RNA, 21 nt, synthetic construct
  source 1..21: mol_type = other RNA
cacatcattacaagctactta

SEQ ID NO: 8618 - RNA, 21 nt, synthetic construct
  source 1..21: mol_type = other RNA
aagctacttagaaatgtttaa

SEQ ID NO: 8619 - RNA, 21 nt, synthetic construct
  source 1..21: mol_type = other RNA
tcattacaagctacttagaaa

SEQ ID NO: 8620 - RNA, 21 nt, synthetic construct
  source 1..21: mol_type = other RNA
acaagctacttagaaatgtta

SEQ ID NO: 8621 - RNA, 21 nt, synthetic construct
  source 1..21: mol_type = other RNA
ctacttagaaatgtttagtaa

SEQ ID NO: 8622 - RNA, 21 nt, synthetic construct
  source 1..21: mol_type = other RNA
gaaacatactatttctgttta

SEQ ID NO: 8623 - RNA, 21 nt, synthetic construct
  source 1..21: mol_type = other RNA
ctgcttctaaataacaaaaaa

SEQ ID NO: 8624 - RNA, 21 nt, synthetic construct
  source 1..21: mol_type = other RNA
tgcttctaaataacaaaaaaa

SEQ ID NO: 8625 - RNA, 21 nt, synthetic construct
  source 1..21: mol_type = other RNA
tgggcatttttcaaaacatta

SEQ ID NO: 8626 - RNA, 21 nt, synthetic construct
  source 1..21: mol_type = other RNA
ctttttttcatctagccttga

SEQ ID NO: 8627 - RNA, 21 nt, synthetic construct
  source 1..21: mol_type = other RNA
actttctttttttcatctaga

SEQ ID NO: 8628 - RNA, 21 nt, synthetic construct
  source 1..21: mol_type = other RNA
ctttctttttttcatctagca

SEQ ID NO: 8629 - RNA, 21 nt, synthetic construct
  source 1..21: mol_type = other RNA
tttctttttttcatctagcca

SEQ ID NO: 8630 - RNA, 21 nt, synthetic construct
  source 1..21: mol_type = other RNA
ttctttttttcatctagccta

SEQ ID NO: 8631 - RNA, 21 nt, synthetic construct
  source 1..21: mol_type = other RNA
tctttttttcatctagcctta

SEQ ID NO: 8632 - RNA, 21 nt, synthetic construct
  source 1..21: mol_type = other RNA
tttttttcatctagccttgca

SEQ ID NO: 8633 - RNA, 21 nt, synthetic construct
  source 1..21: mol_type = other RNA
ttttttcatctagccttgcta

SEQ ID NO: 8634 - RNA, 21 nt, synthetic construct
  source 1..21: mol_type = other RNA
tttttcatctagccttgctta

SEQ ID NO: 8635 - RNA, 21 nt, synthetic construct
  source 1..21: mol_type = other RNA
ttttcatctagccttgcttta

SEQ ID NO: 8636 - RNA, 21 nt, synthetic construct
  source 1..21: mol_type = other RNA
ttcatctagccttgctttata

SEQ ID NO: 8637 - RNA, 21 nt, synthetic construct
  source 1..21: mol_type = other RNA
ccttagtactctcagagatta

SEQ ID NO: 8638 - RNA, 21 nt, synthetic construct
  source 1..21: mol_type = other RNA
tactctcagagattatataaa

SEQ ID NO: 8639 - RNA, 21 nt, synthetic construct
  source 1..21: mol_type = other RNA
actctcagagattatataaaa

SEQ ID NO: 8640 - RNA, 21 nt, synthetic construct
  source 1..21: mol_type = other RNA
agttactagcagaactcttaa

SEQ ID NO: 8641 - RNA, 21 nt, synthetic construct
  source 1..21: mol_type = other RNA
cagcactgttccctgccataa

SEQ ID NO: 8642 - RNA, 21 nt, synthetic construct
  source 1..21: mol_type = other RNA
agcactgttccctgccatata

SEQ ID NO: 8643 - RNA, 21 nt, synthetic construct
  source 1..21: mol_type = other RNA
gcactgttccctgccatatca

SEQ ID NO: 8644 - RNA, 21 nt, synthetic construct
  source 1..21: mol_type = other RNA
cactgttccctgccatatcca

SEQ ID NO: 8645 - RNA, 21 nt, synthetic construct
  source 1..21: mol_type = other RNA
caacttttactgattaaaaaa

SEQ ID NO: 8646 - RNA, 21 nt, synthetic construct
  source 1..21: mol_type = other RNA
gtaatgtgccattcaatgata

SEQ ID NO: 8647 - RNA, 21 nt, synthetic construct
  source 1..21: mol_type = other RNA
tgatgataaaatcccacttta

SEQ ID NO: 8648 - RNA, 21 nt, synthetic construct
  source 1..21: mol_type = other RNA
gatgataaaatcccactttta

SEQ ID NO: 8649 - RNA, 21 nt, synthetic construct
  source 1..21: mol_type = other RNA
ccacttttctttgggtttcta

SEQ ID NO: 8650 - RNA, 21 nt, synthetic construct
  source 1..21: mol_type = other RNA
cacttttctttgggtttctaa

SEQ ID NO: 8651 - RNA, 21 nt, synthetic construct
  source 1..21: mol_type = other RNA
acttttctttgggtttctaca

SEQ ID NO: 8652 - RNA, 21 nt, synthetic construct
  source 1..21: mol_type = other RNA
cttttctttgggtttctacta

SEQ ID NO: 8653 - RNA, 21 nt, synthetic construct
  source 1..21: mol_type = other RNA
ttttctttgggtttctactaa

SEQ ID NO: 8654 - RNA, 21 nt, synthetic construct
  source 1..21: mol_type = other RNA
tttctttgggtttctactaaa

SEQ ID NO: 8655 - RNA, 21 nt, synthetic construct
  source 1..21: mol_type = other RNA
ttctttgggtttctactaaaa

SEQ ID NO: 8656 - RNA, 21 nt, synthetic construct
  source 1..21: mol_type = other RNA
tctttgggtttctactaaaaa

SEQ ID NO: 8657 - RNA, 21 nt, synthetic construct
  source 1..21: mol_type = other RNA
ctttgggtttctactaaaata

SEQ ID NO: 8658 - RNA, 21 nt, synthetic construct
  source 1..21: mol_type = other RNA
tttgggtttctactaaaataa

SEQ ID NO: 8659 - RNA, 21 nt, synthetic construct
  source 1..21: mol_type = other RNA
ttgggtttctactaaaataaa

SEQ ID NO: 8660 - RNA, 21 nt, synthetic construct
  source 1..21: mol_type = other RNA
aaaataatttactcactcaga

SEQ ID NO: 8661 - RNA, 21 nt, synthetic construct
  source 1..21: mol_type = other RNA
aataatttactcactcagaga

SEQ ID NO: 8662 - RNA, 21 nt, synthetic construct
  source 1..21: mol_type = other RNA
ataatttactcactcagagta

SEQ ID NO: 8663 - RNA, 21 nt, synthetic construct
  source 1..21: mol_type = other RNA
taatttactcactcagagtga

SEQ ID NO: 8664 - RNA, 21 nt, synthetic construct
  source 1..21: mol_type = other RNA
aatttactcactcagagtgaa

SEQ ID NO: 8665 - RNA, 21 nt, synthetic construct
  source 1..21: mol_type = other RNA
atttactcactcagagtgaga

SEQ ID NO: 8666 - RNA, 21 nt, synthetic construct
  source 1..21: mol_type = other RNA
agtgaggtcaatgagaaaaaa

SEQ ID NO: 8667 - RNA, 21 nt, synthetic construct
  source 1..21: mol_type = other RNA
gctgataaaattaatggataa

SEQ ID NO: 8668 - RNA, 21 nt, synthetic construct
  source 1..21: mol_type = other RNA
ctaagaaagagttgtagaata

SEQ ID NO: 8669 - RNA, 21 nt, synthetic construct
  source 1..21: mol_type = other RNA
gaaagagttgtagaatggtta

SEQ ID NO: 8670 - RNA, 21 nt, synthetic construct
  source 1..21: mol_type = other RNA
gtgctgataaaattaatggaa

SEQ ID NO: 8671 - RNA, 21 nt, synthetic construct
  source 1..21: mol_type = other RNA
tgctgataaaattaatggata

SEQ ID NO: 8672 - RNA, 21 nt, synthetic construct
  source 1..21: mol_type = other RNA
tgtgagagtatagaatttcta

SEQ ID NO: 8673 - RNA, 21 nt, synthetic construct
  source 1..21: mol_type = other RNA
ggaactgtgagagtatagaaa

SEQ ID NO: 8674 - RNA, 21 nt, synthetic construct
  source 1..21: mol_type = other RNA
gaactgtgagagtatagaata

SEQ ID NO: 8675 - RNA, 21 nt, synthetic construct
  source 1..21: mol_type = other RNA
aactgtgagagtatagaatta

SEQ ID NO: 8676 - RNA, 21 nt, synthetic construct
  source 1..21: mol_type = other RNA
actgtgagagtatagaattta

SEQ ID NO: 8677 - RNA, 21 nt, synthetic construct
  source 1..21: mol_type = other RNA
ctgtgagagtatagaatttca

SEQ ID NO: 8678 - RNA, 21 nt, synthetic construct
  source 1..21: mol_type = other RNA
gtgagagtatagaatttctta

SEQ ID NO: 8679 - RNA, 21 nt, synthetic construct
  source 1..21: mol_type = other RNA
tgagagtatagaatttcttaa

SEQ ID NO: 8680 - RNA, 21 nt, synthetic construct
  source 1..21: mol_type = other RNA
gagagtatagaatttcttaga

SEQ ID NO: 8681 - RNA, 21 nt, synthetic construct
  source 1..21: mol_type = other RNA
agagtatagaatttcttagta

SEQ ID NO: 8682 - RNA, 21 nt, synthetic construct
  source 1..21: mol_type = other RNA
gagtatagaatttcttagtga

SEQ ID NO: 8683 - RNA, 21 nt, synthetic construct
  source 1..21: mol_type = other RNA
agtatagaatttcttagtgca

SEQ ID NO: 8684 - RNA, 21 nt, synthetic construct
  source 1..21: mol_type = other RNA
gtatagaatttcttagtgcaa

SEQ ID NO: 8685 - RNA, 21 nt, synthetic construct
  source 1..21: mol_type = other RNA
tgtaaggactgttctttctca

SEQ ID NO: 8686 - RNA, 21 nt, synthetic construct
  source 1..21: mol_type = other RNA
tgggatattatctaactttta

SEQ ID NO: 8687 - RNA, 21 nt, synthetic construct
  source 1..21: mol_type = other RNA
tgtctttggcattcatcttca

SEQ ID NO: 8688 - RNA, 21 nt, synthetic construct
  source 1..21: mol_type = other RNA
tttggcattcatcttctttta

SEQ ID NO: 8689 - RNA, 21 nt, synthetic construct
  source 1..21: mol_type = other RNA
gcattaaaaaatgtttggcaa

SEQ ID NO: 8690 - RNA, 21 nt, synthetic construct
  source 1..21: mol_type = other RNA
tcactctataattcctgtata

SEQ ID NO: 8691 - RNA, 21 nt, synthetic construct
  source 1..21: mol_type = other RNA
tagttgtcgtttaacctgtca

SEQ ID NO: 8692 - RNA, 21 nt, synthetic construct
  source 1..21: mol_type = other RNA
agttgtcgtttaacctgtcca

SEQ ID NO: 8693 - RNA, 21 nt, synthetic construct
  source 1..21: mol_type = other RNA
gttgtcgtttaacctgtccaa

SEQ ID NO: 8694 - RNA, 21 nt, synthetic construct
  source 1..21: mol_type = other RNA
gtttaacctgtccaaacttca

SEQ ID NO: 8695 - RNA, 21 nt, synthetic construct
  source 1..21: mol_type = other RNA
ctacacaatgaacttcttaaa

SEQ ID NO: 8696 - RNA, 21 nt, synthetic construct
  source 1..21: mol_type = other RNA
ttgtcgtttaacctgtccaaa

SEQ ID NO: 8697 - RNA, 21 nt, synthetic construct
  source 1..21: mol_type = other RNA
tgtcgtttaacctgtccaaaa

SEQ ID NO: 8698 - RNA, 21 nt, synthetic construct
  source 1..21: mol_type = other RNA
gtcgtttaacctgtccaaaca

SEQ ID NO: 8699 - RNA, 21 nt, synthetic construct
  source 1..21: mol_type = other RNA
tcgtttaacctgtccaaacta

SEQ ID NO: 8700 - RNA, 21 nt, synthetic construct
  source 1..21: mol_type = other RNA
cgtttaacctgtccaaactta

SEQ ID NO: 8701 - RNA, 21 nt, synthetic construct
  source 1..21: mol_type = other RNA
tttaacctgtccaaacttcta

SEQ ID NO: 8702 - RNA, 21 nt, synthetic construct
  source 1..21: mol_type = other RNA
ttaacctgtccaaacttctaa

SEQ ID NO: 8703 - RNA, 21 nt, synthetic construct
  source 1..21: mol_type = other RNA
taacctgtccaaacttctaca

SEQ ID NO: 8704 - RNA, 21 nt, synthetic construct
  source 1..21: mol_type = other RNA
aacctgtccaaacttctacaa

SEQ ID NO: 8705 - RNA, 21 nt, synthetic construct
  source 1..21: mol_type = other RNA
acctgtccaaacttctacaca

SEQ ID NO: 8706 - RNA, 21 nt, synthetic construct
  source 1..21: mol_type = other RNA
cctgtccaaacttctacacaa

SEQ ID NO: 8707 - RNA, 21 nt, synthetic construct
  source 1..21: mol_type = other RNA
ctgtccaaacttctacacaaa

SEQ ID NO: 8708 - RNA, 21 nt, synthetic construct
  source 1..21: mol_type = other RNA
tgtccaaacttctacacaata

SEQ ID NO: 8709 - RNA, 21 nt, synthetic construct
  source 1..21: mol_type = other RNA
gtccaaacttctacacaatga

SEQ ID NO: 8710 - RNA, 21 nt, synthetic construct
  source 1..21: mol_type = other RNA
tccaaacttctacacaatgaa

SEQ ID NO: 8711 - RNA, 21 nt, synthetic construct
  source 1..21: mol_type = other RNA
ccaaacttctacacaatgaaa

SEQ ID NO: 8712 - RNA, 21 nt, synthetic construct
  source 1..21: mol_type = other RNA
caaacttctacacaatgaaca

SEQ ID NO: 8713 - RNA, 21 nt, synthetic construct
  source 1..21: mol_type = other RNA
aaacttctacacaatgaacta

SEQ ID NO: 8714 - RNA, 21 nt, synthetic construct
  source 1..21: mol_type = other RNA
aacttctacacaatgaactta

SEQ ID NO: 8715 - RNA, 21 nt, synthetic construct
  source 1..21: mol_type = other RNA
acttctacacaatgaacttca

SEQ ID NO: 8716 - RNA, 21 nt, synthetic construct
  source 1..21: mol_type = other RNA
cttctacacaatgaacttcta

SEQ ID NO: 8717 - RNA, 21 nt, synthetic construct
  source 1..21: mol_type = other RNA
ttctacacaatgaacttctta

SEQ ID NO: 8718 - RNA, 21 nt, synthetic construct
  source 1..21: mol_type = other RNA
tctacacaatgaacttcttaa

SEQ ID NO: 8719 - RNA, 21 nt, synthetic construct
  source 1..21: mol_type = other RNA
tacacaatgaacttcttaaca

SEQ ID NO: 8720 - RNA, 21 nt, synthetic construct
  source 1..21: mol_type = other RNA
acacaatgaacttcttaacaa

SEQ ID NO: 8721 - RNA, 21 nt, synthetic construct
  source 1..21: mol_type = other RNA
cacaatgaacttcttaacaaa

SEQ ID NO: 8722 - RNA, 21 nt, synthetic construct
  source 1..21: mol_type = other RNA
acaatgaacttcttaacaaga

SEQ ID NO: 8723 - RNA, 21 nt, synthetic construct
  source 1..21: mol_type = other RNA
caatgaacttcttaacaagaa

SEQ ID NO: 8724 - RNA, 21 nt, synthetic construct
  source 1..21: mol_type = other RNA
aatgaacttcttaacaagata

SEQ ID NO: 8725 - RNA, 21 nt, synthetic construct
  source 1..21: mol_type = other RNA
atgaacttcttaacaagatta

SEQ ID NO: 8726 - RNA, 21 nt, synthetic construct
  source 1..21: mol_type = other RNA
taacaagattttaagttctca

SEQ ID NO: 8727 - RNA, 21 nt, synthetic construct
  source 1..21: mol_type = other RNA
acaagattttaagttctctga

SEQ ID NO: 8728 - RNA, 21 nt, synthetic construct
  source 1..21: mol_type = other RNA
agttctctgtataagaggtta

SEQ ID NO: 8729 - RNA, 21 nt, synthetic construct
  source 1..21: mol_type = other RNA
gtataagaggtttcacctcaa

SEQ ID NO: 8730 - RNA, 21 nt, synthetic construct
  source 1..21: mol_type = other RNA
atttggcactatagagtatta

SEQ ID NO: 8731 - RNA, 21 nt, synthetic construct
  source 1..21: mol_type = other RNA
tttggcactatagagtattta

SEQ ID NO: 8732 - RNA, 21 nt, synthetic construct
  source 1..21: mol_type = other RNA
cagagatgatttttcttttaa

SEQ ID NO: 8733 - RNA, 21 nt, synthetic construct
  source 1..21: mol_type = other RNA
ttggcactatagagtatttga

SEQ ID NO: 8734 - RNA, 21 nt, synthetic construct
  source 1..21: mol_type = other RNA
tggcactatagagtatttgta

SEQ ID NO: 8735 - RNA, 21 nt, synthetic construct
  source 1..21: mol_type = other RNA
ggcactatagagtatttgtta

SEQ ID NO: 8736 - RNA, 21 nt, synthetic construct
  source 1..21: mol_type = other RNA
gcactatagagtatttgttaa

SEQ ID NO: 8737 - RNA, 21 nt, synthetic construct
  source 1..21: mol_type = other RNA
cactatagagtatttgttaaa

SEQ ID NO: 8738 - RNA, 21 nt, synthetic construct
  source 1..21: mol_type = other RNA
actatagagtatttgttaata

SEQ ID NO: 8739 - RNA, 21 nt, synthetic construct
  source 1..21: mol_type = other RNA
ctatagagtatttgttaatga

SEQ ID NO: 8740 - RNA, 21 nt, synthetic construct
  source 1..21: mol_type = other RNA
tatagagtatttgttaatgga

SEQ ID NO: 8741 - RNA, 21 nt, synthetic construct
  source 1..21: mol_type = other RNA
atagagtatttgttaatggca

SEQ ID NO: 8742 - RNA, 21 nt, synthetic construct
  source 1..21: mol_type = other RNA
tagagtatttgttaatggcaa

SEQ ID NO: 8743 - RNA, 21 nt, synthetic construct
  source 1..21: mol_type = other RNA
agagtatttgttaatggcaga

SEQ ID NO: 8744 - RNA, 21 nt, synthetic construct
  source 1..21: mol_type = other RNA
gagtatttgttaatggcagaa

SEQ ID NO: 8745 - RNA, 21 nt, synthetic construct
  source 1..21: mol_type = other RNA
gcagagatgatttttctttta

SEQ ID NO: 8746 - RNA, 21 nt, synthetic construct
  source 1..21: mol_type = other RNA
agagatgatttttcttttaaa

SEQ ID NO: 8747 - RNA, 21 nt, synthetic construct
  source 1..21: mol_type = other RNA
agactagctgttatttgtata

SEQ ID NO: 8748 - RNA, 21 nt, synthetic construct
  source 1..21: mol_type = other RNA
gctaacatataaagaatgtca

SEQ ID NO: 8749 - RNA, 21 nt, synthetic construct
  source 1..21: mol_type = other RNA
aagaatgtctacttttgctta

SEQ ID NO: 8750 - RNA, 21 nt, synthetic construct
  source 1..21: mol_type = other RNA
aatgtctacttttgctttaaa

SEQ ID NO: 8751 - RNA, 21 nt, synthetic construct
  source 1..21: mol_type = other RNA
ctaagccattatgctattaga

SEQ ID NO: 8752 - RNA, 21 nt, synthetic construct
  source 1..21: mol_type = other RNA
aatccctattttaaaattcca

SEQ ID NO: 8753 - RNA, 21 nt, synthetic construct
  source 1..21: mol_type = other RNA
taacaataatagaactgccaa

SEQ ID NO: 8754 - RNA, 21 nt, synthetic construct
  source 1..21: mol_type = other RNA
acttttctctttcagttgtaa

SEQ ID NO: 8755 - RNA, 21 nt, synthetic construct
  source 1..21: mol_type = other RNA
ttaggtaacaatccctattta

SEQ ID NO: 8756 - RNA, 21 nt, synthetic construct
  source 1..21: mol_type = other RNA
taggtaacaatccctatttta

SEQ ID NO: 8757 - RNA, 21 nt, synthetic construct
  source 1..21: mol_type = other RNA
aggtaacaatccctattttaa

SEQ ID NO: 8758 - RNA, 21 nt, synthetic construct
  source 1..21: mol_type = other RNA
ggtaacaatccctattttaaa

SEQ ID NO: 8759 - RNA, 21 nt, synthetic construct
  source 1..21: mol_type = other RNA
gtaacaatccctattttaaaa

SEQ ID NO: 8760 - RNA, 21 nt, synthetic construct
  source 1..21: mol_type = other RNA
taacaatccctattttaaaaa

SEQ ID NO: 8761 - RNA, 21 nt, synthetic construct
  source 1..21: mol_type = other RNA
ctaacaataatagaactgcca

SEQ ID NO: 8762 - RNA, 21 nt, synthetic construct
  source 1..21: mol_type = other RNA
aacaataatagaactgccaga

SEQ ID NO: 8763 - RNA, 21 nt, synthetic construct
  source 1..21: mol_type = other RNA
acaataatagaactgccagca

SEQ ID NO: 8764 - RNA, 21 nt, synthetic construct
  source 1..21: mol_type = other RNA
aactgccagcatacttttcta

SEQ ID NO: 8765 - RNA, 21 nt, synthetic construct
  source 1..21: mol_type = other RNA
actgccagcatacttttctca

SEQ ID NO: 8766 - RNA, 21 nt, synthetic construct
  source 1..21: mol_type = other RNA
ctgccagcatacttttctcta

SEQ ID NO: 8767 - RNA, 21 nt, synthetic construct
  source 1..21: mol_type = other RNA
tgccagcatacttttctctta

SEQ ID NO: 8768 - RNA, 21 nt, synthetic construct
  source 1..21: mol_type = other RNA
gccagcatacttttctcttta

SEQ ID NO: 8769 - RNA, 21 nt, synthetic construct
  source 1..21: mol_type = other RNA
ccagcatacttttctctttca

SEQ ID NO: 8770 - RNA, 21 nt, synthetic construct
  source 1..21: mol_type = other RNA
cagcatacttttctctttcaa

SEQ ID NO: 8771 - RNA, 21 nt, synthetic construct
  source 1..21: mol_type = other RNA
agcatacttttctctttcaga

SEQ ID NO: 8772 - RNA, 21 nt, synthetic construct
  source 1..21: mol_type = other RNA
gcatacttttctctttcagta

SEQ ID NO: 8773 - RNA, 21 nt, synthetic construct
  source 1..21: mol_type = other RNA
catacttttctctttcagtta

SEQ ID NO: 8774 - RNA, 21 nt, synthetic construct
  source 1..21: mol_type = other RNA
atacttttctctttcagttga

SEQ ID NO: 8775 - RNA, 21 nt, synthetic construct
  source 1..21: mol_type = other RNA
tacttttctctttcagttgta

SEQ ID NO: 8776 - RNA, 21 nt, synthetic construct
  source 1..21: mol_type = other RNA
tcagttgtagatgaatacata

SEQ ID NO: 8777 - RNA, 21 nt, synthetic construct
  source 1..21: mol_type = other RNA
cagttgtagatgaatacatta

SEQ ID NO: 8778 - RNA, 21 nt, synthetic construct
  source 1..21: mol_type = other RNA
tgactgtatttcctgatcata

SEQ ID NO: 8779 - RNA, 21 nt, synthetic construct
  source 1..21: mol_type = other RNA
ttttcagatgtgactgtatta

SEQ ID NO: 8780 - RNA, 21 nt, synthetic construct
  source 1..21: mol_type = other RNA
tttcagatgtgactgtattta

SEQ ID NO: 8781 - RNA, 21 nt, synthetic construct
  source 1..21: mol_type = other RNA
ttcagatgtgactgtatttca

SEQ ID NO: 8782 - RNA, 21 nt, synthetic construct
  source 1..21: mol_type = other RNA
tcagatgtgactgtatttcca

SEQ ID NO: 8783 - RNA, 21 nt, synthetic construct
  source 1..21: mol_type = other RNA
cagatgtgactgtatttccta

SEQ ID NO: 8784 - RNA, 21 nt, synthetic construct
  source 1..21: mol_type = other RNA
agatgtgactgtatttcctga

SEQ ID NO: 8785 - RNA, 21 nt, synthetic construct
  source 1..21: mol_type = other RNA
gatgtgactgtatttcctgaa

SEQ ID NO: 8786 - RNA, 21 nt, synthetic construct
  source 1..21: mol_type = other RNA
atgtgactgtatttcctgata

SEQ ID NO: 8787 - RNA, 21 nt, synthetic construct
  source 1..21: mol_type = other RNA
tgtgactgtatttcctgatca

SEQ ID NO: 8788 - RNA, 21 nt, synthetic construct
  source 1..21: mol_type = other RNA
gtgactgtatttcctgatcaa

SEQ ID NO: 8789 - RNA, 21 nt, synthetic construct
  source 1..21: mol_type = other RNA
gactgtatttcctgatcatta

SEQ ID NO: 8790 - RNA, 21 nt, synthetic construct
  source 1..21: mol_type = other RNA
actgtatttcctgatcattga

SEQ ID NO: 8791 - RNA, 21 nt, synthetic construct
  source 1..21: mol_type = other RNA
ctgtatttcctgatcattgga

SEQ ID NO: 8792 - RNA, 21 nt, synthetic construct
  source 1..21: mol_type = other RNA
tgtatttcctgatcattggta

SEQ ID NO: 8793 - RNA, 21 nt, synthetic construct
  source 1..21: mol_type = other RNA
gtatttcctgatcattggtca

SEQ ID NO: 8794 - RNA, 21 nt, synthetic construct
  source 1..21: mol_type = other RNA
ggagattacccttatacccaa

SEQ ID NO: 8795 - RNA, 21 nt, synthetic construct
  source 1..21: mol_type = other RNA
gctaaaatccaactgcaatta

SEQ ID NO: 8796 - RNA, 21 nt, synthetic construct
  source 1..21: mol_type = other RNA
gtgcgggctaaaatccaacta

SEQ ID NO: 8797 - RNA, 21 nt, synthetic construct
  source 1..21: mol_type = other RNA
tgcgggctaaaatccaactga

SEQ ID NO: 8798 - RNA, 21 nt, synthetic construct
  source 1..21: mol_type = other RNA
gcgggctaaaatccaactgca

SEQ ID NO: 8799 - RNA, 21 nt, synthetic construct
  source 1..21: mol_type = other RNA
cgggctaaaatccaactgcaa

SEQ ID NO: 8800 - RNA, 21 nt, synthetic construct
  source 1..21: mol_type = other RNA
gggctaaaatccaactgcaaa

SEQ ID NO: 8801 - RNA, 21 nt, synthetic construct
  source 1..21: mol_type = other RNA
ggctaaaatccaactgcaata

SEQ ID NO: 8802 - RNA, 21 nt, synthetic construct
  source 1..21: mol_type = other RNA
ctaaaatccaactgcaattga

SEQ ID NO: 8803 - RNA, 21 nt, synthetic construct
  source 1..21: mol_type = other RNA
taaaatccaactgcaattgga

SEQ ID NO: 8804 - RNA, 21 nt, synthetic construct
  source 1..21: mol_type = other RNA
aaaatccaactgcaattggca

SEQ ID NO: 8805 - RNA, 21 nt, synthetic construct
  source 1..21: mol_type = other RNA
aaatccaactgcaattggcta

SEQ ID NO: 8806 - RNA, 21 nt, synthetic construct
  source 1..21: mol_type = other RNA
aatccaactgcaattggctca

SEQ ID NO: 8807 - RNA, 21 nt, synthetic construct
  source 1..21: mol_type = other RNA
atccaactgcaattggctcca

SEQ ID NO: 8808 - RNA, 21 nt, synthetic construct
  source 1..21: mol_type = other RNA
tccaactgcaattggctccca

SEQ ID NO: 8809 - RNA, 21 nt, synthetic construct
  source 1..21: mol_type = other RNA
gagaagcatcttattggctta

SEQ ID NO: 8810 - RNA, 21 nt, synthetic construct
  source 1..21: mol_type = other RNA
aagcatcttattggcttataa

SEQ ID NO: 8811 - RNA, 21 nt, synthetic construct
  source 1..21: mol_type = other RNA
agcatcttattggcttatata

SEQ ID NO: 8812 - RNA, 21 nt, synthetic construct
  source 1..21: mol_type = other RNA
tacatcttcagaaaatgagaa

SEQ ID NO: 8813 - RNA, 21 nt, synthetic construct
  source 1..21: mol_type = other RNA
acatcttcagaaaatgagaaa

SEQ ID NO: 8814 - RNA, 21 nt, synthetic construct
  source 1..21: mol_type = other RNA
catcttcagaaaatgagaata

SEQ ID NO: 8815 - RNA, 21 nt, synthetic construct
  source 1..21: mol_type = other RNA
atcttcagaaaatgagaatta

SEQ ID NO: 8816 - RNA, 21 nt, synthetic construct
  source 1..21: mol_type = other RNA
tcttcagaaaatgagaattaa

SEQ ID NO: 8817 - RNA, 21 nt, synthetic construct
  source 1..21: mol_type = other RNA
acagattgaacaaagaactta

SEQ ID NO: 8818 - RNA, 21 nt, synthetic construct
  source 1..21: mol_type = other RNA
cagattgaacaaagaacttaa

SEQ ID NO: 8819 - RNA, 21 nt, synthetic construct
  source 1..21: mol_type = other RNA
agattgaacaaagaacttaga

SEQ ID NO: 8820 - RNA, 21 nt, synthetic construct
  source 1..21: mol_type = other RNA
gattgaacaaagaacttagaa

SEQ ID NO: 8821 - RNA, 21 nt, synthetic construct
  source 1..21: mol_type = other RNA
attgaacaaagaacttagaaa

SEQ ID NO: 8822 - RNA, 21 nt, synthetic construct
  source 1..21: mol_type = other RNA
ttgaacaaagaacttagaaga

SEQ ID NO: 8823 - RNA, 21 nt, synthetic construct
  source 1..21: mol_type = other RNA
gaagagaaattgattgtttaa

SEQ ID NO: 8824 - RNA, 21 nt, synthetic construct
  source 1..21: mol_type = other RNA
tgttggtttaatttttcaaca

SEQ ID NO: 8825 - RNA, 21 nt, synthetic construct
  source 1..21: mol_type = other RNA
tcctgagagaagagaaattga

SEQ ID NO: 8826 - RNA, 21 nt, synthetic construct
  source 1..21: mol_type = other RNA
cctgagagaagagaaattgaa

SEQ ID NO: 8827 - RNA, 21 nt, synthetic construct
  source 1..21: mol_type = other RNA
ctgagagaagagaaattgata

SEQ ID NO: 8828 - RNA, 21 nt, synthetic construct
  source 1..21: mol_type = other RNA
tgagagaagagaaattgatta

SEQ ID NO: 8829 - RNA, 21 nt, synthetic construct
  source 1..21: mol_type = other RNA
gagagaagagaaattgattga

SEQ ID NO: 8830 - RNA, 21 nt, synthetic construct
  source 1..21: mol_type = other RNA
agagaagagaaattgattgta

SEQ ID NO: 8831 - RNA, 21 nt, synthetic construct
  source 1..21: mol_type = other RNA
gagaagagaaattgattgtta

SEQ ID NO: 8832 - RNA, 21 nt, synthetic construct
  source 1..21: mol_type = other RNA
agaagagaaattgattgttta

SEQ ID NO: 8833 - RNA, 21 nt, synthetic construct
  source 1..21: mol_type = other RNA
agagaaattgattgtttatca

SEQ ID NO: 8834 - RNA, 21 nt, synthetic construct
  source 1..21: mol_type = other RNA
gttggtttaatttttcaacca

SEQ ID NO: 8835 - RNA, 21 nt, synthetic construct
  source 1..21: mol_type = other RNA
ttggtttaatttttcaaccca

SEQ ID NO: 8836 - RNA, 21 nt, synthetic construct
  source 1..21: mol_type = other RNA
tggtttaatttttcaacccaa

SEQ ID NO: 8837 - RNA, 21 nt, synthetic construct
  source 1..21: mol_type = other RNA
tcgtccatacagttttcatta

SEQ ID NO: 8838 - RNA, 21 nt, synthetic construct
  source 1..21: mol_type = other RNA
cgtccatacagttttcattca

SEQ ID NO: 8839 - RNA, 21 nt, synthetic construct
  source 1..21: mol_type = other RNA
gtccatacagttttcattcta

SEQ ID NO: 8840 - RNA, 21 nt, synthetic construct
  source 1..21: mol_type = other RNA
tccatacagttttcattctaa

SEQ ID NO: 8841 - RNA, 21 nt, synthetic construct
  source 1..21: mol_type = other RNA
ccatacagttttcattctata

SEQ ID NO: 8842 - RNA, 21 nt, synthetic construct
  source 1..21: mol_type = other RNA
catacagttttcattctatga

SEQ ID NO: 8843 - RNA, 21 nt, synthetic construct
  source 1..21: mol_type = other RNA
atacagttttcattctatgca

SEQ ID NO: 8844 - RNA, 21 nt, synthetic construct
  source 1..21: mol_type = other RNA
tacagttttcattctatgcaa

SEQ ID NO: 8845 - RNA, 21 nt, synthetic construct
  source 1..21: mol_type = other RNA
acagttttcattctatgcata

SEQ ID NO: 8846 - RNA, 21 nt, synthetic construct
  source 1..21: mol_type = other RNA
cagttttcattctatgcatga

SEQ ID NO: 8847 - RNA, 21 nt, synthetic construct
  source 1..21: mol_type = other RNA
agttttcattctatgcatgga

SEQ ID NO: 8848 - RNA, 21 nt, synthetic construct
  source 1..21: mol_type = other RNA
ggattgtgtgcctaaatttta

SEQ ID NO: 8849 - RNA, 21 nt, synthetic construct
  source 1..21: mol_type = other RNA
ctaaattttgtctaacaaata

SEQ ID NO: 8850 - RNA, 21 nt, synthetic construct
  source 1..21: mol_type = other RNA
tagaatgacatttactaataa

SEQ ID NO: 8851 - RNA, 21 nt, synthetic construct
  source 1..21: mol_type = other RNA
tgcctaaattttgtctaacaa

SEQ ID NO: 8852 - RNA, 21 nt, synthetic construct
  source 1..21: mol_type = other RNA
taaattttgtctaacaaatga

SEQ ID NO: 8853 - RNA, 21 nt, synthetic construct
  source 1..21: mol_type = other RNA
aaattttgtctaacaaatgca

SEQ ID NO: 8854 - RNA, 21 nt, synthetic construct
  source 1..21: mol_type = other RNA
ttttgtctaacaaatgcaaga

SEQ ID NO: 8855 - RNA, 21 nt, synthetic construct
  source 1..21: mol_type = other RNA
cttccataggctaaataataa

SEQ ID NO: 8856 - RNA, 21 nt, synthetic construct
  source 1..21: mol_type = other RNA
gccaaaatattaaattctaga

SEQ ID NO: 8857 - RNA, 21 nt, synthetic construct
  source 1..21: mol_type = other RNA
taaattctagttcttttccga

SEQ ID NO: 8858 - RNA, 21 nt, synthetic construct
  source 1..21: mol_type = other RNA
aaattctagttcttttccgca

SEQ ID NO: 8859 - RNA, 21 nt, synthetic construct
  source 1..21: mol_type = other RNA
aattctagttcttttccgcaa

SEQ ID NO: 8860 - RNA, 21 nt, synthetic construct
  source 1..21: mol_type = other RNA
ctagttcttttccgcaatgaa

SEQ ID NO: 8861 - RNA, 21 nt, synthetic construct
  source 1..21: mol_type = other RNA
attctagttcttttccgcaaa

SEQ ID NO: 8862 - RNA, 21 nt, synthetic construct
  source 1..21: mol_type = other RNA
ttctagttcttttccgcaata

SEQ ID NO: 8863 - RNA, 21 nt, synthetic construct
  source 1..21: mol_type = other RNA
tctagttcttttccgcaatga

SEQ ID NO: 8864 - RNA, 21 nt, synthetic construct
  source 1..21: mol_type = other RNA
tagttcttttccgcaatgaca

SEQ ID NO: 8865 - RNA, 21 nt, synthetic construct
  source 1..21: mol_type = other RNA
agttcttttccgcaatgacta

SEQ ID NO: 8866 - RNA, 21 nt, synthetic construct
  source 1..21: mol_type = other RNA
gttcttttccgcaatgactaa

SEQ ID NO: 8867 - RNA, 21 nt, synthetic construct
  source 1..21: mol_type = other RNA
ttcttttccgcaatgactaga

SEQ ID NO: 8868 - RNA, 21 nt, synthetic construct
  source 1..21: mol_type = other RNA
tcttttccgcaatgactagta

SEQ ID NO: 8869 - RNA, 21 nt, synthetic construct
  source 1..21: mol_type = other RNA
ctggagaagattattcaaaca

SEQ ID NO: 8870 - RNA, 21 nt, synthetic construct
  source 1..21: mol_type = other RNA
ggagaagattattcaaactta

SEQ ID NO: 8871 - RNA, 21 nt, synthetic construct
  source 1..21: mol_type = other RNA
cttgatctgtgtttcaggtta

SEQ ID NO: 8872 - RNA, 21 nt, synthetic construct
  source 1..21: mol_type = other RNA
tctgtgtttcaggtttttaaa

SEQ ID NO: 8873 - RNA, 21 nt, synthetic construct
  source 1..21: mol_type = other RNA
caggtttttaaatgtcctaaa

SEQ ID NO: 8874 - RNA, 21 nt, synthetic construct
  source 1..21: mol_type = other RNA
gactttcaaagtactaataca

SEQ ID NO: 8875 - RNA, 21 nt, synthetic construct
  source 1..21: mol_type = other RNA
aaggaattttggattgactta

SEQ ID NO: 8876 - RNA, 21 nt, synthetic construct
  source 1..21: mol_type = other RNA
ttgactttcaaagtactaata

SEQ ID NO: 8877 - RNA, 21 nt, synthetic construct
  source 1..21: mol_type = other RNA
tagcgtgactcttcttataca

SEQ ID NO: 8878 - RNA, 21 nt, synthetic construct
  source 1..21: mol_type = other RNA
gtgactcttcttatacctaaa

SEQ ID NO: 8879 - RNA, 21 nt, synthetic construct
  source 1..21: mol_type = other RNA
taagaacatattacaaatgta

SEQ ID NO: 8880 - RNA, 21 nt, synthetic construct
  source 1..21: mol_type = other RNA
caaaacatgccttgaactcta

SEQ ID NO: 8881 - RNA, 21 nt, synthetic construct
  source 1..21: mol_type = other RNA
aaaacatgccttgaactctta

SEQ ID NO: 8882 - RNA, 21 nt, synthetic construct
  source 1..21: mol_type = other RNA
tgccttgaactcttgaactaa

SEQ ID NO: 8883 - RNA, 21 nt, synthetic construct
  source 1..21: mol_type = other RNA
ctcttgaactactgtgaaaaa

SEQ ID NO: 8884 - RNA, 21 nt, synthetic construct
  source 1..21: mol_type = other RNA
ttgaactactgtgaaaagaaa

SEQ ID NO: 8885 - RNA, 21 nt, synthetic construct
  source 1..21: mol_type = other RNA
gaactactgtgaaaagaatca

SEQ ID NO: 8886 - RNA, 21 nt, synthetic construct
  source 1..21: mol_type = other RNA
cgttgtaaagactttttgtaa

SEQ ID NO: 8887 - RNA, 21 nt, synthetic construct
  source 1..21: mol_type = other RNA
gttgtaaagactttttgtaaa

SEQ ID NO: 8888 - RNA, 21 nt, synthetic construct
  source 1..21: mol_type = other RNA
ctagctgatactcttaagtaa

SEQ ID NO: 8889 - RNA, 21 nt, synthetic construct
  source 1..21: mol_type = other RNA
aagctagctgatactcttaaa

SEQ ID NO: 8890 - RNA, 21 nt, synthetic construct
  source 1..21: mol_type = other RNA
gggcaataaactgtatcaaaa

SEQ ID NO: 8891 - RNA, 21 nt, synthetic construct
  source 1..21: mol_type = other RNA
aattgggcaataaactgtata

SEQ ID NO: 8892 - RNA, 21 nt, synthetic construct
  source 1..21: mol_type = other RNA
attgggcaataaactgtatca

SEQ ID NO: 8893 - RNA, 21 nt, synthetic construct
  source 1..21: mol_type = other RNA
ttgggcaataaactgtatcaa

SEQ ID NO: 8894 - RNA, 21 nt, synthetic construct
  source 1..21: mol_type = other RNA
tgggcaataaactgtatcaaa

SEQ ID NO: 8895 - RNA, 21 nt, synthetic construct
  source 1..21: mol_type = other RNA
ggcaataaactgtatcaaaaa

SEQ ID NO: 8896 - RNA, 21 nt, synthetic construct
  source 1..21: mol_type = other RNA
gcaataaactgtatcaaaaaa

SEQ ID NO: 8897 - RNA, 21 nt, synthetic construct
  source 1..21: mol_type = other RNA
caataaactgtatcaaaaata

SEQ ID NO: 8898 - RNA, 21 nt, synthetic construct
  source 1..21: mol_type = other RNA
gtatcaaaaatatgtagatga

SEQ ID NO: 8899 - RNA, 21 nt, synthetic construct
  source 1..21: mol_type = other RNA
tatcaaaaatatgtagatgga

SEQ ID NO: 8900 - RNA, 21 nt, synthetic construct
  source 1..21: mol_type = other RNA
atcaaaaatatgtagatggaa

SEQ ID NO: 8901 - RNA, 21 nt, synthetic construct
  source 1..21: mol_type = other RNA
aaggtgaagagaatttcaaaa

SEQ ID NO: 8902 - RNA, 21 nt, synthetic construct
  source 1..21: mol_type = other RNA
ggtgaagagaatttcaaacta

SEQ ID NO: 8903 - RNA, 21 nt, synthetic construct
  source 1..21: mol_type = other RNA
gtgaagagaatttcaaactca

SEQ ID NO: 8904 - RNA, 21 nt, synthetic construct
  source 1..21: mol_type = other RNA
gatgtttcattaatttctaga

SEQ ID NO: 8905 - RNA, 21 nt, synthetic construct
  source 1..21: mol_type = other RNA
ttctagtctgtgaaaatatga

SEQ ID NO: 8906 - RNA, 21 nt, synthetic construct
  source 1..21: mol_type = other RNA
tctagtctgtgaaaatatgca

SEQ ID NO: 8907 - RNA, 21 nt, synthetic construct
  source 1..21: mol_type = other RNA
ctagtctgtgaaaatatgcaa

SEQ ID NO: 8908 - RNA, 21 nt, synthetic construct
  source 1..21: mol_type = other RNA
tagtctgtgaaaatatgcata

SEQ ID NO: 8909 - RNA, 21 nt, synthetic construct
  source 1..21: mol_type = other RNA
agtctgtgaaaatatgcatta

SEQ ID NO: 8910 - RNA, 21 nt, synthetic construct
  source 1..21: mol_type = other RNA
gtctgtgaaaatatgcattta

SEQ ID NO: 8911 - RNA, 21 nt, synthetic construct
  source 1..21: mol_type = other RNA
tctgtgaaaatatgcatttta

SEQ ID NO: 8912 - RNA, 21 nt, synthetic construct
  source 1..21: mol_type = other RNA
ctgtgaaaatatgcattttaa

SEQ ID NO: 8913 - RNA, 21 nt, synthetic construct
  source 1..21: mol_type = other RNA
gatagcctttataccaaaata

SEQ ID NO: 8914 - RNA, 21 nt, synthetic construct
  source 1..21: mol_type = other RNA
caacagcaagtcataaaagta

SEQ ID NO: 8915 - RNA, 21 nt, synthetic construct
  source 1..21: mol_type = other RNA
aacagcaagtcataaaagtaa

SEQ ID NO: 8916 - RNA, 21 nt, synthetic construct
  source 1..21: mol_type = other RNA
acagcaagtcataaaagtata

SEQ ID NO: 8917 - RNA, 21 nt, synthetic construct
  source 1..21: mol_type = other RNA
cagcaagtcataaaagtatta

SEQ ID NO: 8918 - RNA, 21 nt, synthetic construct
  source 1..21: mol_type = other RNA
agcaagtcataaaagtattta

SEQ ID NO: 8919 - RNA, 21 nt, synthetic construct
  source 1..21: mol_type = other RNA
gcaagtcataaaagtatttaa

SEQ ID NO: 8920 - RNA, 21 nt, synthetic construct
  source 1..21: mol_type = other RNA
gtcttcagatgtaaataatta

SEQ ID NO: 8921 - RNA, 21 nt, synthetic construct
  source 1..21: mol_type = other RNA
cattttctgaaaatgtattga

SEQ ID NO: 8922 - RNA, 21 nt, synthetic construct
  source 1..21: mol_type = other RNA
gaagcatatagaactctatta

SEQ ID NO: 8923 - RNA, 21 nt, synthetic construct
  source 1..21: mol_type = other RNA
ctgtgaagcatatagaactca

SEQ ID NO: 8924 - RNA, 21 nt, synthetic construct
  source 1..21: mol_type = other RNA
tgtgaagcatatagaactcta

SEQ ID NO: 8925 - RNA, 21 nt, synthetic construct
  source 1..21: mol_type = other RNA
gtgaagcatatagaactctaa

SEQ ID NO: 8926 - RNA, 21 nt, synthetic construct
  source 1..21: mol_type = other RNA
tgaagcatatagaactctata

SEQ ID NO: 8927 - RNA, 21 nt, synthetic construct
  source 1..21: mol_type = other RNA
aagcatatagaactctattta

SEQ ID NO: 8928 - RNA, 21 nt, synthetic construct
  source 1..21: mol_type = other RNA
agcatatagaactctatttta

SEQ ID NO: 8929 - RNA, 21 nt, synthetic construct
  source 1..21: mol_type = other RNA
taaataaaggaagatgtgtca

SEQ ID NO: 8930 - RNA, 23 nt, synthetic construct
  source 1..23: mol_type = other RNA
tttttgaagtgcgcggttggctc

SEQ ID NO: 8931 - RNA, 23 nt, synthetic construct
  source 1..23: mol_type = other RNA
tcttttgaagtgcgcggttggct

SEQ ID NO: 8932 - RNA, 23 nt, synthetic construct
  source 1..23: mol_type = other RNA
tccttttgaagtgcgcggttggc

SEQ ID NO: 8933 - RNA, 23 nt, synthetic construct
  source 1..23: mol_type = other RNA
tcccttttgaagtgcgcggttgg

SEQ ID NO: 8934 - RNA, 23 nt, synthetic construct
  source 1..23: mol_type = other RNA
tacccttttgaagtgcgcggttg

SEQ ID NO: 8935 - RNA, 23 nt, synthetic construct
  source 1..23: mol_type = other RNA
tcacccttttgaagtgcgcggtt

SEQ ID NO: 8936 - RNA, 23 nt, synthetic construct
  source 1..23: mol_type = other RNA
tacacccttttgaagtgcgcggt

SEQ ID NO: 8937 - RNA, 23 nt, synthetic construct
  source 1..23: mol_type = other RNA
tgacacccttttgaagtgcgcgg

SEQ ID NO: 8938 - RNA, 23 nt, synthetic construct
  source 1..23: mol_type = other RNA
tcgacacccttttgaagtgcgcg

SEQ ID NO: 8939 - RNA, 23 nt, synthetic construct
  source 1..23: mol_type = other RNA
tccgacacccttttgaagtgcgc

SEQ ID NO: 8940 - RNA, 23 nt, synthetic construct
  source 1..23: mol_type = other RNA
taccgacacccttttgaagtgcg

SEQ ID NO: 8941 - RNA, 23 nt, synthetic construct
  source 1..23: mol_type = other RNA
tacatacacacttcagtcctggc

SEQ ID NO: 8942 - RNA, 23 nt, synthetic construct
  source 1..23: mol_type = other RNA
tgaagaatcacacaaaagacata

SEQ ID NO: 8943 - RNA, 23 nt, synthetic construct
  source 1..23: mol_type = other RNA
taagtttgaagaatcacacaaaa

SEQ ID NO: 8944 - RNA, 23 nt, synthetic construct
  source 1..23: mol_type = other RNA
ttacacacttcagtcctggcgag

SEQ ID NO: 8945 - RNA, 23 nt, synthetic construct
  source 1..23: mol_type = other RNA
tatacacacttcagtcctggcga

SEQ ID NO: 8946 - RNA, 23 nt, synthetic construct
  source 1..23: mol_type = other RNA
tcatacacacttcagtcctggcg

SEQ ID NO: 8947 - RNA, 23 nt, synthetic construct
  source 1..23: mol_type = other RNA
tgacatacacacttcagtcctgg

SEQ ID NO: 8948 - RNA, 23 nt, synthetic construct
  source 1..23: mol_type = other RNA
tagacatacacacttcagtcctg

SEQ ID NO: 8949 - RNA, 23 nt, synthetic construct
  source 1..23: mol_type = other RNA
taagacatacacacttcagtcct

SEQ ID NO: 8950 - RNA, 23 nt, synthetic construct
  source 1..23: mol_type = other RNA
taaagacatacacacttcagtcc

SEQ ID NO: 8951 - RNA, 23 nt, synthetic construct
  source 1..23: mol_type = other RNA
taaaagacatacacacttcagtc

SEQ ID NO: 8952 - RNA, 23 nt, synthetic construct
  source 1..23: mol_type = other RNA
tcaaaagacatacacacttcagt

SEQ ID NO: 8953 - RNA, 23 nt, synthetic construct
  source 1..23: mol_type = other RNA
tacaaaagacatacacacttcag

SEQ ID NO: 8954 - RNA, 23 nt, synthetic construct
  source 1..23: mol_type = other RNA
tcacaaaagacatacacacttca

SEQ ID NO: 8955 - RNA, 23 nt, synthetic construct
  source 1..23: mol_type = other RNA
tacacaaaagacatacacacttc

SEQ ID NO: 8956 - RNA, 23 nt, synthetic construct
  source 1..23: mol_type = other RNA
tcacacaaaagacatacacactt

SEQ ID NO: 8957 - RNA, 23 nt, synthetic construct
  source 1..23: mol_type = other RNA
ttcacacaaaagacatacacact

SEQ ID NO: 8958 - RNA, 23 nt, synthetic construct
  source 1..23: mol_type = other RNA
tatcacacaaaagacatacacac

SEQ ID NO: 8959 - RNA, 23 nt, synthetic construct
  source 1..23: mol_type = other RNA
taatcacacaaaagacatacaca

SEQ ID NO: 8960 - RNA, 23 nt, synthetic construct
  source 1..23: mol_type = other RNA
tgaatcacacaaaagacatacac

SEQ ID NO: 8961 - RNA, 23 nt, synthetic construct
  source 1..23: mol_type = other RNA
tagaatcacacaaaagacataca

SEQ ID NO: 8962 - RNA, 23 nt, synthetic construct
  source 1..23: mol_type = other RNA
taagaatcacacaaaagacatac

SEQ ID NO: 8963 - RNA, 23 nt, synthetic construct
  source 1..23: mol_type = other RNA
ttgaagaatcacacaaaagacat

SEQ ID NO: 8964 - RNA, 23 nt, synthetic construct
  source 1..23: mol_type = other RNA
tttgaagaatcacacaaaagaca

SEQ ID NO: 8965 - RNA, 23 nt, synthetic construct
  source 1..23: mol_type = other RNA
ttttgaagaatcacacaaaagac

SEQ ID NO: 8966 - RNA, 23 nt, synthetic construct
  source 1..23: mol_type = other RNA
tgtttgaagaatcacacaaaaga

SEQ ID NO: 8967 - RNA, 23 nt, synthetic construct
  source 1..23: mol_type = other RNA
tagtttgaagaatcacacaaaag

SEQ ID NO: 8968 - RNA, 23 nt, synthetic construct
  source 1..23: mol_type = other RNA
taacatgctccttctgtttggca

SEQ ID NO: 8969 - RNA, 23 nt, synthetic construct
  source 1..23: mol_type = other RNA
tcaacatgctccttctgtttggc

SEQ ID NO: 8970 - RNA, 23 nt, synthetic construct
  source 1..23: mol_type = other RNA
tttagcatgactgatgcccaaca

SEQ ID NO: 8971 - RNA, 23 nt, synthetic construct
  source 1..23: mol_type = other RNA
ttggttagcatgactgatgccca

SEQ ID NO: 8972 - RNA, 23 nt, synthetic construct
  source 1..23: mol_type = other RNA
tcattggttagcatgactgatgc

SEQ ID NO: 8973 - RNA, 23 nt, synthetic construct
  source 1..23: mol_type = other RNA
ttttccattggttagcatgactg

SEQ ID NO: 8974 - RNA, 23 nt, synthetic construct
  source 1..23: mol_type = other RNA
ttcttttccattggttagcatga

SEQ ID NO: 8975 - RNA, 23 nt, synthetic construct
  source 1..23: mol_type = other RNA
tgacttgagcattcagttctgga

SEQ ID NO: 8976 - RNA, 23 nt, synthetic construct
  source 1..23: mol_type = other RNA
tatttgatcacctgctcttttcc

SEQ ID NO: 8977 - RNA, 23 nt, synthetic construct
  source 1..23: mol_type = other RNA
tcattcagttctggaagggagac

SEQ ID NO: 8978 - RNA, 23 nt, synthetic construct
  source 1..23: mol_type = other RNA
tgcattcagttctggaagggaga

SEQ ID NO: 8979 - RNA, 23 nt, synthetic construct
  source 1..23: mol_type = other RNA
tagcattcagttctggaagggag

SEQ ID NO: 8980 - RNA, 23 nt, synthetic construct
  source 1..23: mol_type = other RNA
tgagcattcagttctggaaggga

SEQ ID NO: 8981 - RNA, 23 nt, synthetic construct
  source 1..23: mol_type = other RNA
ttgagcattcagttctggaaggg

SEQ ID NO: 8982 - RNA, 23 nt, synthetic construct
  source 1..23: mol_type = other RNA
tttgagcattcagttctggaagg

SEQ ID NO: 8983 - RNA, 23 nt, synthetic construct
  source 1..23: mol_type = other RNA
tcttgagcattcagttctggaag

SEQ ID NO: 8984 - RNA, 23 nt, synthetic construct
  source 1..23: mol_type = other RNA
tacttgagcattcagttctggaa

SEQ ID NO: 8985 - RNA, 23 nt, synthetic construct
  source 1..23: mol_type = other RNA
tagacttgagcattcagttctgg

SEQ ID NO: 8986 - RNA, 23 nt, synthetic construct
  source 1..23: mol_type = other RNA
taagacttgagcattcagttctg

SEQ ID NO: 8987 - RNA, 23 nt, synthetic construct
  source 1..23: mol_type = other RNA
tgaagacttgagcattcagttct

SEQ ID NO: 8988 - RNA, 23 nt, synthetic construct
  source 1..23: mol_type = other RNA
tagaagacttgagcattcagttc

SEQ ID NO: 8989 - RNA, 23 nt, synthetic construct
  source 1..23: mol_type = other RNA
tcagaagacttgagcattcagtt

SEQ ID NO: 8990 - RNA, 23 nt, synthetic construct
  source 1..23: mol_type = other RNA
tacagaagacttgagcattcagt

SEQ ID NO: 8991 - RNA, 23 nt, synthetic construct
  source 1..23: mol_type = other RNA
tgacagaagacttgagcattcag

SEQ ID NO: 8992 - RNA, 23 nt, synthetic construct
  source 1..23: mol_type = other RNA
ttgacagaagacttgagcattca

SEQ ID NO: 8993 - RNA, 23 nt, synthetic construct
  source 1..23: mol_type = other RNA
tatgacagaagacttgagcattc

SEQ ID NO: 8994 - RNA, 23 nt, synthetic construct
  source 1..23: mol_type = other RNA
ttatgacagaagacttgagcatt

SEQ ID NO: 8995 - RNA, 23 nt, synthetic construct
  source 1..23: mol_type = other RNA
tctatgacagaagacttgagcat

SEQ ID NO: 8996 - RNA, 23 nt, synthetic construct
  source 1..23: mol_type = other RNA
tactatgacagaagacttgagca

SEQ ID NO: 8997 - RNA, 23 nt, synthetic construct
  source 1..23: mol_type = other RNA
taactatgacagaagacttgagc

SEQ ID NO: 8998 - RNA, 23 nt, synthetic construct
  source 1..23: mol_type = other RNA
tgttggaactatgacagaagact

SEQ ID NO: 8999 - RNA, 23 nt, synthetic construct
  source 1..23: mol_type = other RNA
tgaactatgacagaagacttgag

SEQ ID NO: 9000 - RNA, 23 nt, synthetic construct
  source 1..23: mol_type = other RNA
tggaactatgacagaagacttga

SEQ ID NO: 9001 - RNA, 23 nt, synthetic construct
  source 1..23: mol_type = other RNA
ttggaactatgacagaagacttg

SEQ ID NO: 9002 - RNA, 23 nt, synthetic construct
  source 1..23: mol_type = other RNA
tttggaactatgacagaagactt

SEQ ID NO: 9003 - RNA, 23 nt, synthetic construct
  source 1..23: mol_type = other RNA
ttgttggaactatgacagaagac

SEQ ID NO: 9004 - RNA, 23 nt, synthetic construct
  source 1..23: mol_type = other RNA
tttgttggaactatgacagaaga

SEQ ID NO: 9005 - RNA, 23 nt, synthetic construct
  source 1..23: mol_type = other RNA
tattgttggaactatgacagaag

SEQ ID NO: 9006 - RNA, 23 nt, synthetic construct
  source 1..23: mol_type = other RNA
tcattgttggaactatgacagaa

SEQ ID NO: 9007 - RNA, 23 nt, synthetic construct
  source 1..23: mol_type = other RNA
tacattgttggaactatgacaga

SEQ ID NO: 9008 - RNA, 23 nt, synthetic construct
  source 1..23: mol_type = other RNA
taacattgttggaactatgacag

SEQ ID NO: 9009 - RNA, 23 nt, synthetic construct
  source 1..23: mol_type = other RNA
ttaacattgttggaactatgaca

SEQ ID NO: 9010 - RNA, 23 nt, synthetic construct
  source 1..23: mol_type = other RNA
tgtaacattgttggaactatgac

SEQ ID NO: 9011 - RNA, 23 nt, synthetic construct
  source 1..23: mol_type = other RNA
tggtaacattgttggaactatga

SEQ ID NO: 9012 - RNA, 23 nt, synthetic construct
  source 1..23: mol_type = other RNA
ttggtaacattgttggaactatg

SEQ ID NO: 9013 - RNA, 23 nt, synthetic construct
  source 1..23: mol_type = other RNA
tttggtaacattgttggaactat

SEQ ID NO: 9014 - RNA, 23 nt, synthetic construct
  source 1..23: mol_type = other RNA
ttttggtaacattgttggaacta

SEQ ID NO: 9015 - RNA, 23 nt, synthetic construct
  source 1..23: mol_type = other RNA
tttttggtaacattgttggaact

SEQ ID NO: 9016 - RNA, 23 nt, synthetic construct
  source 1..23: mol_type = other RNA
tgttttggtaacattgttggaac

SEQ ID NO: 9017 - RNA, 23 nt, synthetic construct
  source 1..23: mol_type = other RNA
tggttttggtaacattgttggaa

SEQ ID NO: 9018 - RNA, 23 nt, synthetic construct
  source 1..23: mol_type = other RNA
tcggttttggtaacattgttgga

SEQ ID NO: 9019 - RNA, 23 nt, synthetic construct
  source 1..23: mol_type = other RNA
ttcggttttggtaacattgttgg

SEQ ID NO: 9020 - RNA, 23 nt, synthetic construct
  source 1..23: mol_type = other RNA
tttcggttttggtaacattgttg

SEQ ID NO: 9021 - RNA, 23 nt, synthetic construct
  source 1..23: mol_type = other RNA
tattcggttttggtaacattgtt

SEQ ID NO: 9022 - RNA, 23 nt, synthetic construct
  source 1..23: mol_type = other RNA
tcattcggttttggtaacattgt

SEQ ID NO: 9023 - RNA, 23 nt, synthetic construct
  source 1..23: mol_type = other RNA
tgcattcggttttggtaacattg

SEQ ID NO: 9024 - RNA, 23 nt, synthetic construct
  source 1..23: mol_type = other RNA
tagcattcggttttggtaacatt

SEQ ID NO: 9025 - RNA, 23 nt, synthetic construct
  source 1..23: mol_type = other RNA
tcagcattcggttttggtaacat

SEQ ID NO: 9026 - RNA, 23 nt, synthetic construct
  source 1..23: mol_type = other RNA
tgcagcattcggttttggtaaca

SEQ ID NO: 9027 - RNA, 23 nt, synthetic construct
  source 1..23: mol_type = other RNA
tagcagcattcggttttggtaac

SEQ ID NO: 9028 - RNA, 23 nt, synthetic construct
  source 1..23: mol_type = other RNA
taagcagcattcggttttggtaa

SEQ ID NO: 9029 - RNA, 23 nt, synthetic construct
  source 1..23: mol_type = other RNA
tgaagcagcattcggttttggta

SEQ ID NO: 9030 - RNA, 23 nt, synthetic construct
  source 1..23: mol_type = other RNA
ttgaagcagcattcggttttggt

SEQ ID NO: 9031 - RNA, 23 nt, synthetic construct
  source 1..23: mol_type = other RNA
tgtgaagcagcattcggttttgg

SEQ ID NO: 9032 - RNA, 23 nt, synthetic construct
  source 1..23: mol_type = other RNA
ttgtgaagcagcattcggttttg

SEQ ID NO: 9033 - RNA, 23 nt, synthetic construct
  source 1..23: mol_type = other RNA
tctgtgaagcagcattcggtttt

SEQ ID NO: 9034 - RNA, 23 nt, synthetic construct
  source 1..23: mol_type = other RNA
ttctgtgaagcagcattcggttt

SEQ ID NO: 9035 - RNA, 23 nt, synthetic construct
  source 1..23: mol_type = other RNA
taatctgtgaagcagcattcggt

SEQ ID NO: 9036 - RNA, 23 nt, synthetic construct
  source 1..23: mol_type = other RNA
taaaaatctgtgaagcagcattc

SEQ ID NO: 9037 - RNA, 23 nt, synthetic construct
  source 1..23: mol_type = other RNA
tcaaaaatctgtgaagcagcatt

SEQ ID NO: 9038 - RNA, 23 nt, synthetic construct
  source 1..23: mol_type = other RNA
tgcaaaaatctgtgaagcagcat

SEQ ID NO: 9039 - RNA, 23 nt, synthetic construct
  source 1..23: mol_type = other RNA
ttgcaaaaatctgtgaagcagca

SEQ ID NO: 9040 - RNA, 23 nt, synthetic construct
  source 1..23: mol_type = other RNA
tttgcaaaaatctgtgaagcagc

SEQ ID NO: 9041 - RNA, 23 nt, synthetic construct
  source 1..23: mol_type = other RNA
tgttgcaaaaatctgtgaagcag

SEQ ID NO: 9042 - RNA, 23 nt, synthetic construct
  source 1..23: mol_type = other RNA
ttgttgcaaaaatctgtgaagca

SEQ ID NO: 9043 - RNA, 23 nt, synthetic construct
  source 1..23: mol_type = other RNA
tttgttgcaaaaatctgtgaagc

SEQ ID NO: 9044 - RNA, 23 nt, synthetic construct
  source 1..23: mol_type = other RNA
tgttgttgcaaaaatctgtgaag

SEQ ID NO: 9045 - RNA, 23 nt, synthetic construct
  source 1..23: mol_type = other RNA
ttgttgttgcaaaaatctgtgaa

SEQ ID NO: 9046 - RNA, 23 nt, synthetic construct
  source 1..23: mol_type = other RNA
tatgttgttgcaaaaatctgtga

SEQ ID NO: 9047 - RNA, 23 nt, synthetic construct
  source 1..23: mol_type = other RNA
tcagtgttatgttgttgcaaaaa

SEQ ID NO: 9048 - RNA, 23 nt, synthetic construct
  source 1..23: mol_type = other RNA
tatttggtgatgctgttggaagg

SEQ ID NO: 9049 - RNA, 23 nt, synthetic construct
  source 1..23: mol_type = other RNA
ttatgttgttgcaaaaatctgtg

SEQ ID NO: 9050 - RNA, 23 nt, synthetic construct
  source 1..23: mol_type = other RNA
tttatgttgttgcaaaaatctgt

SEQ ID NO: 9051 - RNA, 23 nt, synthetic construct
  source 1..23: mol_type = other RNA
tgttatgttgttgcaaaaatctg

SEQ ID NO: 9052 - RNA, 23 nt, synthetic construct
  source 1..23: mol_type = other RNA
ttgttatgttgttgcaaaaatct

SEQ ID NO: 9053 - RNA, 23 nt, synthetic construct
  source 1..23: mol_type = other RNA
tgtgttatgttgttgcaaaaatc

SEQ ID NO: 9054 - RNA, 23 nt, synthetic construct
  source 1..23: mol_type = other RNA
tagtgttatgttgttgcaaaaat

SEQ ID NO: 9055 - RNA, 23 nt, synthetic construct
  source 1..23: mol_type = other RNA
tgcagtgttatgttgttgcaaaa

SEQ ID NO: 9056 - RNA, 23 nt, synthetic construct
  source 1..23: mol_type = other RNA
ttgcagtgttatgttgttgcaaa

SEQ ID NO: 9057 - RNA, 23 nt, synthetic construct
  source 1..23: mol_type = other RNA
tgtgcagtgttatgttgttgcaa

SEQ ID NO: 9058 - RNA, 23 nt, synthetic construct
  source 1..23: mol_type = other RNA
tggtgcagtgttatgttgttgca

SEQ ID NO: 9059 - RNA, 23 nt, synthetic construct
  source 1..23: mol_type = other RNA
taggtgcagtgttatgttgttgc

SEQ ID NO: 9060 - RNA, 23 nt, synthetic construct
  source 1..23: mol_type = other RNA
taaggtgcagtgttatgttgttg

SEQ ID NO: 9061 - RNA, 23 nt, synthetic construct
  source 1..23: mol_type = other RNA
tgaaggtgcagtgttatgttgtt

SEQ ID NO: 9062 - RNA, 23 nt, synthetic construct
  source 1..23: mol_type = other RNA
tggaaggtgcagtgttatgttgt

SEQ ID NO: 9063 - RNA, 23 nt, synthetic construct
  source 1..23: mol_type = other RNA
ttggaaggtgcagtgttatgttg

SEQ ID NO: 9064 - RNA, 23 nt, synthetic construct
  source 1..23: mol_type = other RNA
tttggaaggtgcagtgttatgtt

SEQ ID NO: 9065 - RNA, 23 nt, synthetic construct
  source 1..23: mol_type = other RNA
tgttggaaggtgcagtgttatgt

SEQ ID NO: 9066 - RNA, 23 nt, synthetic construct
  source 1..23: mol_type = other RNA
ttgttggaaggtgcagtgttatg

SEQ ID NO: 9067 - RNA, 23 nt, synthetic construct
  source 1..23: mol_type = other RNA
tctgttggaaggtgcagtgttat

SEQ ID NO: 9068 - RNA, 23 nt, synthetic construct
  source 1..23: mol_type = other RNA
tgctgttggaaggtgcagtgtta

SEQ ID NO: 9069 - RNA, 23 nt, synthetic construct
  source 1..23: mol_type = other RNA
ttgctgttggaaggtgcagtgtt

SEQ ID NO: 9070 - RNA, 23 nt, synthetic construct
  source 1..23: mol_type = other RNA
tatgctgttggaaggtgcagtgt

SEQ ID NO: 9071 - RNA, 23 nt, synthetic construct
  source 1..23: mol_type = other RNA
tgatgctgttggaaggtgcagtg

SEQ ID NO: 9072 - RNA, 23 nt, synthetic construct
  source 1..23: mol_type = other RNA
ttgatgctgttggaaggtgcagt

SEQ ID NO: 9073 - RNA, 23 nt, synthetic construct
  source 1..23: mol_type = other RNA
tgtgatgctgttggaaggtgcag

SEQ ID NO: 9074 - RNA, 23 nt, synthetic construct
  source 1..23: mol_type = other RNA
tggtgatgctgttggaaggtgca

SEQ ID NO: 9075 - RNA, 23 nt, synthetic construct
  source 1..23: mol_type = other RNA
ttggtgatgctgttggaaggtgc

SEQ ID NO: 9076 - RNA, 23 nt, synthetic construct
  source 1..23: mol_type = other RNA
tttggtgatgctgttggaaggtg

SEQ ID NO: 9077 - RNA, 23 nt, synthetic construct
  source 1..23: mol_type = other RNA
ttttggtgatgctgttggaaggt

SEQ ID NO: 9078 - RNA, 23 nt, synthetic construct
  source 1..23: mol_type = other RNA
tcatttggtgatgctgttggaag

SEQ ID NO: 9079 - RNA, 23 nt, synthetic construct
  source 1..23: mol_type = other RNA
tgcatttggtgatgctgttggaa

SEQ ID NO: 9080 - RNA, 23 nt, synthetic construct
  source 1..23: mol_type = other RNA
tggcatttggtgatgctgttgga

SEQ ID NO: 9081 - RNA, 23 nt, synthetic construct
  source 1..23: mol_type = other RNA
ttaataatgatggccagctccat

SEQ ID NO: 9082 - RNA, 23 nt, synthetic construct
  source 1..23: mol_type = other RNA
tacagtaataatgatggccagct

SEQ ID NO: 9083 - RNA, 23 nt, synthetic construct
  source 1..23: mol_type = other RNA
tcagtaataatgatggccagctc

SEQ ID NO: 9084 - RNA, 23 nt, synthetic construct
  source 1..23: mol_type = other RNA
tgcacagtaataatgatggccag

SEQ ID NO: 9085 - RNA, 23 nt, synthetic construct
  source 1..23: mol_type = other RNA
taaacaggcacagtaataatgat

SEQ ID NO: 9086 - RNA, 23 nt, synthetic construct
  source 1..23: mol_type = other RNA
taggcaaacaggcacagtaataa

SEQ ID NO: 9087 - RNA, 23 nt, synthetic construct
  source 1..23: mol_type = other RNA
ttggacaggaggcaaacaggcac

SEQ ID NO: 9088 - RNA, 23 nt, synthetic construct
  source 1..23: mol_type = other RNA
tatactgtcagcatcgcagctat

SEQ ID NO: 9089 - RNA, 23 nt, synthetic construct
  source 1..23: mol_type = other RNA
tttttcttcctgtaggagcactg

SEQ ID NO: 9090 - RNA, 23 nt, synthetic construct
  source 1..23: mol_type = other RNA
ttttttcttcctgtaggagcact

SEQ ID NO: 9091 - RNA, 23 nt, synthetic construct
  source 1..23: mol_type = other RNA
ttctttttcttcctgtaggagca

SEQ ID NO: 9092 - RNA, 23 nt, synthetic construct
  source 1..23: mol_type = other RNA
tgtctctttttcttcctgtagga

SEQ ID NO: 9093 - RNA, 23 nt, synthetic construct
  source 1..23: mol_type = other RNA
ttttccagcatttaccagattgc

SEQ ID NO: 9094 - RNA, 23 nt, synthetic construct
  source 1..23: mol_type = other RNA
tcagattgcactcagagagtggt

SEQ ID NO: 9095 - RNA, 23 nt, synthetic construct
  source 1..23: mol_type = other RNA
tttaccagattgcactcagagag

SEQ ID NO: 9096 - RNA, 23 nt, synthetic construct
  source 1..23: mol_type = other RNA
tcatttaccagattgcactcaga

SEQ ID NO: 9097 - RNA, 23 nt, synthetic construct
  source 1..23: mol_type = other RNA
tgtttttccagcatttaccagat

SEQ ID NO: 9098 - RNA, 23 nt, synthetic construct
  source 1..23: mol_type = other RNA
ttctttcagagtttttccagcat

SEQ ID NO: 9099 - RNA, 23 nt, synthetic construct
  source 1..23: mol_type = other RNA
tgatctttcagagtttttccagc

SEQ ID NO: 9100 - RNA, 23 nt, synthetic construct
  source 1..23: mol_type = other RNA
tagatctttcagagtttttccag

SEQ ID NO: 9101 - RNA, 23 nt, synthetic construct
  source 1..23: mol_type = other RNA
tcagatctttcagagtttttcca

SEQ ID NO: 9102 - RNA, 23 nt, synthetic construct
  source 1..23: mol_type = other RNA
ttaaatcagatctttcagagttt

SEQ ID NO: 9103 - RNA, 23 nt, synthetic construct
  source 1..23: mol_type = other RNA
ttcagatctttcagagtttttcc

SEQ ID NO: 9104 - RNA, 23 nt, synthetic construct
  source 1..23: mol_type = other RNA
tatcagatctttcagagtttttc

SEQ ID NO: 9105 - RNA, 23 nt, synthetic construct
  source 1..23: mol_type = other RNA
taatcagatctttcagagttttt

SEQ ID NO: 9106 - RNA, 23 nt, synthetic construct
  source 1..23: mol_type = other RNA
taaatcagatctttcagagtttt

SEQ ID NO: 9107 - RNA, 23 nt, synthetic construct
  source 1..23: mol_type = other RNA
tataaatcagatctttcagagtt

SEQ ID NO: 9108 - RNA, 23 nt, synthetic construct
  source 1..23: mol_type = other RNA
tcataaatcagatctttcagagt

SEQ ID NO: 9109 - RNA, 23 nt, synthetic construct
  source 1..23: mol_type = other RNA
ttcataaatcagatctttcagag

SEQ ID NO: 9110 - RNA, 23 nt, synthetic construct
  source 1..23: mol_type = other RNA
tatcataaatcagatctttcaga

SEQ ID NO: 9111 - RNA, 23 nt, synthetic construct
  source 1..23: mol_type = other RNA
tcatcataaatcagatctttcag

SEQ ID NO: 9112 - RNA, 23 nt, synthetic construct
  source 1..23: mol_type = other RNA
tacatcataaatcagatctttca

SEQ ID NO: 9113 - RNA, 23 nt, synthetic construct
  source 1..23: mol_type = other RNA
tcacatcataaatcagatctttc

SEQ ID NO: 9114 - RNA, 23 nt, synthetic construct
  source 1..23: mol_type = other RNA
ttcacatcataaatcagatcttt

SEQ ID NO: 9115 - RNA, 23 nt, synthetic construct
  source 1..23: mol_type = other RNA
tgtcacatcataaatcagatctt

SEQ ID NO: 9116 - RNA, 23 nt, synthetic construct
  source 1..23: mol_type = other RNA
taattgtcctttgaaccaacaga

SEQ ID NO: 9117 - RNA, 23 nt, synthetic construct
  source 1..23: mol_type = other RNA
tttgaaccaacagaggtagacca

SEQ ID NO: 9118 - RNA, 23 nt, synthetic construct
  source 1..23: mol_type = other RNA
ttttgaaccaacagaggtagacc

SEQ ID NO: 9119 - RNA, 23 nt, synthetic construct
  source 1..23: mol_type = other RNA
ttcctttgaaccaacagaggtag

SEQ ID NO: 9120 - RNA, 23 nt, synthetic construct
  source 1..23: mol_type = other RNA
tgtcctttgaaccaacagaggta

SEQ ID NO: 9121 - RNA, 23 nt, synthetic construct
  source 1..23: mol_type = other RNA
tattgtcctttgaaccaacagag

SEQ ID NO: 9122 - RNA, 23 nt, synthetic construct
  source 1..23: mol_type = other RNA
tttgcaattgtcctttgaaccaa

SEQ ID NO: 9123 - RNA, 23 nt, synthetic construct
  source 1..23: mol_type = other RNA
ttccttgcaattgtcctttgaac

SEQ ID NO: 9124 - RNA, 23 nt, synthetic construct
  source 1..23: mol_type = other RNA
taaatctaccttttcctactatt

SEQ ID NO: 9125 - RNA, 23 nt, synthetic construct
  source 1..23: mol_type = other RNA
taccaaatctaccttttcctact

SEQ ID NO: 9126 - RNA, 23 nt, synthetic construct
  source 1..23: mol_type = other RNA
tattttcacagccacatcttccc

SEQ ID NO: 9127 - RNA, 23 nt, synthetic construct
  source 1..23: mol_type = other RNA
ttattttcacagccacatcttcc

SEQ ID NO: 9128 - RNA, 23 nt, synthetic construct
  source 1..23: mol_type = other RNA
tatattttcacagccacatcttc

SEQ ID NO: 9129 - RNA, 23 nt, synthetic construct
  source 1..23: mol_type = other RNA
tagatctttcatctctggaggag

SEQ ID NO: 9130 - RNA, 23 nt, synthetic construct
  source 1..23: mol_type = other RNA
tatctttcatctctggaggagaa

SEQ ID NO: 9131 - RNA, 23 nt, synthetic construct
  source 1..23: mol_type = other RNA
tgatctttcatctctggaggaga

SEQ ID NO: 9132 - RNA, 23 nt, synthetic construct
  source 1..23: mol_type = other RNA
taagatctttcatctctggagga

SEQ ID NO: 9133 - RNA, 23 nt, synthetic construct
  source 1..23: mol_type = other RNA
tcaagatctttcatctctggagg

SEQ ID NO: 9134 - RNA, 23 nt, synthetic construct
  source 1..23: mol_type = other RNA
tccaagatctttcatctctggag

SEQ ID NO: 9135 - RNA, 23 nt, synthetic construct
  source 1..23: mol_type = other RNA
taaccaagatctttcatctctgg

SEQ ID NO: 9136 - RNA, 23 nt, synthetic construct
  source 1..23: mol_type = other RNA
taaaccaagatctttcatctctg

SEQ ID NO: 9137 - RNA, 23 nt, synthetic construct
  source 1..23: mol_type = other RNA
tacgaaaccaagatctttcatct

SEQ ID NO: 9138 - RNA, 23 nt, synthetic construct
  source 1..23: mol_type = other RNA
ttaaatttctgcctcacgaaacc

SEQ ID NO: 9139 - RNA, 23 nt, synthetic construct
  source 1..23: mol_type = other RNA
taaggatgttttcatgtcgcagc

SEQ ID NO: 9140 - RNA, 23 nt, synthetic construct
  source 1..23: mol_type = other RNA
tatctttgttgtcagcagcaatg

SEQ ID NO: 9141 - RNA, 23 nt, synthetic construct
  source 1..23: mol_type = other RNA
tatgttttcatgtcgcagcatga

SEQ ID NO: 9142 - RNA, 23 nt, synthetic construct
  source 1..23: mol_type = other RNA
taggatgttttcatgtcgcagca

SEQ ID NO: 9143 - RNA, 23 nt, synthetic construct
  source 1..23: mol_type = other RNA
tcaaggatgttttcatgtcgcag

SEQ ID NO: 9144 - RNA, 23 nt, synthetic construct
  source 1..23: mol_type = other RNA
taccaaggatgttttcatgtcgc

SEQ ID NO: 9145 - RNA, 23 nt, synthetic construct
  source 1..23: mol_type = other RNA
taaccaaggatgttttcatgtcg

SEQ ID NO: 9146 - RNA, 23 nt, synthetic construct
  source 1..23: mol_type = other RNA
taaaccaaggatgttttcatgtc

SEQ ID NO: 9147 - RNA, 23 nt, synthetic construct
  source 1..23: mol_type = other RNA
tatgaaaccaaggatgttttcat

SEQ ID NO: 9148 - RNA, 23 nt, synthetic construct
  source 1..23: mol_type = other RNA
tcagcaatgaaaccaaggatgtt

SEQ ID NO: 9149 - RNA, 23 nt, synthetic construct
  source 1..23: mol_type = other RNA
ttcagcagcaatgaaaccaagga

SEQ ID NO: 9150 - RNA, 23 nt, synthetic construct
  source 1..23: mol_type = other RNA
tttgtcagcagcaatgaaaccaa

SEQ ID NO: 9151 - RNA, 23 nt, synthetic construct
  source 1..23: mol_type = other RNA
tttgttgtcagcagcaatgaaac

SEQ ID NO: 9152 - RNA, 23 nt, synthetic construct
  source 1..23: mol_type = other RNA
ttttgttgtcagcagcaatgaaa

SEQ ID NO: 9153 - RNA, 23 nt, synthetic construct
  source 1..23: mol_type = other RNA
tcattatctttgttgtcagcagc

SEQ ID NO: 9154 - RNA, 23 nt, synthetic construct
  source 1..23: mol_type = other RNA
tccattatctttgttgtcagcag

SEQ ID NO: 9155 - RNA, 23 nt, synthetic construct
  source 1..23: mol_type = other RNA
tttccattatctttgttgtcagc

SEQ ID NO: 9156 - RNA, 23 nt, synthetic construct
  source 1..23: mol_type = other RNA
tgttccattatctttgttgtcag

SEQ ID NO: 9157 - RNA, 23 nt, synthetic construct
  source 1..23: mol_type = other RNA
tttcatgatattcagataccagc

SEQ ID NO: 9158 - RNA, 23 nt, synthetic construct
  source 1..23: mol_type = other RNA
tcaagttccattatctttgttgt

SEQ ID NO: 9159 - RNA, 23 nt, synthetic construct
  source 1..23: mol_type = other RNA
tattcagataccagccaaagttg

SEQ ID NO: 9160 - RNA, 23 nt, synthetic construct
  source 1..23: mol_type = other RNA
tatattcagataccagccaaagt

SEQ ID NO: 9161 - RNA, 23 nt, synthetic construct
  source 1..23: mol_type = other RNA
tgatattcagataccagccaaag

SEQ ID NO: 9162 - RNA, 23 nt, synthetic construct
  source 1..23: mol_type = other RNA
ttgatattcagataccagccaaa

SEQ ID NO: 9163 - RNA, 23 nt, synthetic construct
  source 1..23: mol_type = other RNA
ttgttcatgatattcagatacca

SEQ ID NO: 9164 - RNA, 23 nt, synthetic construct
  source 1..23: mol_type = other RNA
ttataaggagccctgttcatgat

SEQ ID NO: 9165 - RNA, 23 nt, synthetic construct
  source 1..23: mol_type = other RNA
tatataaggagccctgttcatga

SEQ ID NO: 9166 - RNA, 23 nt, synthetic construct
  source 1..23: mol_type = other RNA
ttcaaatagtcatataaggagcc

SEQ ID NO: 9167 - RNA, 23 nt, synthetic construct
  source 1..23: mol_type = other RNA
tagtcatataaggagccctgttc

SEQ ID NO: 9168 - RNA, 23 nt, synthetic construct
  source 1..23: mol_type = other RNA
ttagtcatataaggagccctgtt

SEQ ID NO: 9169 - RNA, 23 nt, synthetic construct
  source 1..23: mol_type = other RNA
tatagtcatataaggagccctgt

SEQ ID NO: 9170 - RNA, 23 nt, synthetic construct
  source 1..23: mol_type = other RNA
taatagtcatataaggagccctg

SEQ ID NO: 9171 - RNA, 23 nt, synthetic construct
  source 1..23: mol_type = other RNA
taaatagtcatataaggagccct

SEQ ID NO: 9172 - RNA, 23 nt, synthetic construct
  source 1..23: mol_type = other RNA
tcaaatagtcatataaggagccc

SEQ ID NO: 9173 - RNA, 23 nt, synthetic construct
  source 1..23: mol_type = other RNA
tttcaaatagtcatataaggagc

SEQ ID NO: 9174 - RNA, 23 nt, synthetic construct
  source 1..23: mol_type = other RNA
tattcaaatagtcatataaggag

SEQ ID NO: 9175 - RNA, 23 nt, synthetic construct
  source 1..23: mol_type = other RNA
tctattcaaatagtcatataagg

SEQ ID NO: 9176 - RNA, 23 nt, synthetic construct
  source 1..23: mol_type = other RNA
tatcattccagccacggtcacta

SEQ ID NO: 9177 - RNA, 23 nt, synthetic construct
  source 1..23: mol_type = other RNA
tgcttgatcattccagccacggt

SEQ ID NO: 9178 - RNA, 23 nt, synthetic construct
  source 1..23: mol_type = other RNA
tcagcttgatcattccagccacg

SEQ ID NO: 9179 - RNA, 23 nt, synthetic construct
  source 1..23: mol_type = other RNA
taatctccatatgaaggtgtgcc

SEQ ID NO: 9180 - RNA, 23 nt, synthetic construct
  source 1..23: mol_type = other RNA
tcactagcaattgagagcgccag

SEQ ID NO: 9181 - RNA, 23 nt, synthetic construct
  source 1..23: mol_type = other RNA
tagaccactagcaattgagagcg

SEQ ID NO: 9182 - RNA, 23 nt, synthetic construct
  source 1..23: mol_type = other RNA
ttccatatgaaggtgtgccagac

SEQ ID NO: 9183 - RNA, 23 nt, synthetic construct
  source 1..23: mol_type = other RNA
tctccatatgaaggtgtgccaga

SEQ ID NO: 9184 - RNA, 23 nt, synthetic construct
  source 1..23: mol_type = other RNA
ttctccatatgaaggtgtgccag

SEQ ID NO: 9185 - RNA, 23 nt, synthetic construct
  source 1..23: mol_type = other RNA
tatctccatatgaaggtgtgcca

SEQ ID NO: 9186 - RNA, 23 nt, synthetic construct
  source 1..23: mol_type = other RNA
tcaatctccatatgaaggtgtgc

SEQ ID NO: 9187 - RNA, 23 nt, synthetic construct
  source 1..23: mol_type = other RNA
tacaatctccatatgaaggtgtg

SEQ ID NO: 9188 - RNA, 23 nt, synthetic construct
  source 1..23: mol_type = other RNA
taacaatctccatatgaaggtgt

SEQ ID NO: 9189 - RNA, 23 nt, synthetic construct
  source 1..23: mol_type = other RNA
tcaacaatctccatatgaaggtg

SEQ ID NO: 9190 - RNA, 23 nt, synthetic construct
  source 1..23: mol_type = other RNA
tccaacaatctccatatgaaggt

SEQ ID NO: 9191 - RNA, 23 nt, synthetic construct
  source 1..23: mol_type = other RNA
taccaacaatctccatatgaagg

SEQ ID NO: 9192 - RNA, 23 nt, synthetic construct
  source 1..23: mol_type = other RNA
ttaccaacaatctccatatgaag

SEQ ID NO: 9193 - RNA, 23 nt, synthetic construct
  source 1..23: mol_type = other RNA
tgtaccaacaatctccatatgaa

SEQ ID NO: 9194 - RNA, 23 nt, synthetic construct
  source 1..23: mol_type = other RNA
ttgtaccaacaatctccatatga

SEQ ID NO: 9195 - RNA, 23 nt, synthetic construct
  source 1..23: mol_type = other RNA
tgtgtaccaacaatctccatatg

SEQ ID NO: 9196 - RNA, 23 nt, synthetic construct
  source 1..23: mol_type = other RNA
ttgtgtaccaacaatctccatat

SEQ ID NO: 9197 - RNA, 23 nt, synthetic construct
  source 1..23: mol_type = other RNA
tttgtgtaccaacaatctccata

SEQ ID NO: 9198 - RNA, 23 nt, synthetic construct
  source 1..23: mol_type = other RNA
ttttatgtctcgatgagcaatag

SEQ ID NO: 9199 - RNA, 23 nt, synthetic construct
  source 1..23: mol_type = other RNA
tcttgtgtaccaacaatctccat

SEQ ID NO: 9200 - RNA, 23 nt, synthetic construct
  source 1..23: mol_type = other RNA
tccttgtgtaccaacaatctcca

SEQ ID NO: 9201 - RNA, 23 nt, synthetic construct
  source 1..23: mol_type = other RNA
tttaccttgtgtaccaacaatct

SEQ ID NO: 9202 - RNA, 23 nt, synthetic construct
  source 1..23: mol_type = other RNA
taggtttaccttgtgtaccaaca

SEQ ID NO: 9203 - RNA, 23 nt, synthetic construct
  source 1..23: mol_type = other RNA
tagcaggtttaccttgtgtacca

SEQ ID NO: 9204 - RNA, 23 nt, synthetic construct
  source 1..23: mol_type = other RNA
ttagcaggtttaccttgtgtacc

SEQ ID NO: 9205 - RNA, 23 nt, synthetic construct
  source 1..23: mol_type = other RNA
tatagcaggtttaccttgtgtac

SEQ ID NO: 9206 - RNA, 23 nt, synthetic construct
  source 1..23: mol_type = other RNA
taatagcaggtttaccttgtgta

SEQ ID NO: 9207 - RNA, 23 nt, synthetic construct
  source 1..23: mol_type = other RNA
tcaatagcaggtttaccttgtgt

SEQ ID NO: 9208 - RNA, 23 nt, synthetic construct
  source 1..23: mol_type = other RNA
tgcaatagcaggtttaccttgtg

SEQ ID NO: 9209 - RNA, 23 nt, synthetic construct
  source 1..23: mol_type = other RNA
tagcaatagcaggtttaccttgt

SEQ ID NO: 9210 - RNA, 23 nt, synthetic construct
  source 1..23: mol_type = other RNA
tgagcaatagcaggtttaccttg

SEQ ID NO: 9211 - RNA, 23 nt, synthetic construct
  source 1..23: mol_type = other RNA
ttgagcaatagcaggtttacctt

SEQ ID NO: 9212 - RNA, 23 nt, synthetic construct
  source 1..23: mol_type = other RNA
tatgagcaatagcaggtttacct

SEQ ID NO: 9213 - RNA, 23 nt, synthetic construct
  source 1..23: mol_type = other RNA
tgatgagcaatagcaggtttacc

SEQ ID NO: 9214 - RNA, 23 nt, synthetic construct
  source 1..23: mol_type = other RNA
tcgatgagcaatagcaggtttac

SEQ ID NO: 9215 - RNA, 23 nt, synthetic construct
  source 1..23: mol_type = other RNA
ttcgatgagcaatagcaggttta

SEQ ID NO: 9216 - RNA, 23 nt, synthetic construct
  source 1..23: mol_type = other RNA
tctcgatgagcaatagcaggttt

SEQ ID NO: 9217 - RNA, 23 nt, synthetic construct
  source 1..23: mol_type = other RNA
ttctcgatgagcaatagcaggtt

SEQ ID NO: 9218 - RNA, 23 nt, synthetic construct
  source 1..23: mol_type = other RNA
tgtctcgatgagcaatagcaggt

SEQ ID NO: 9219 - RNA, 23 nt, synthetic construct
  source 1..23: mol_type = other RNA
ttgtctcgatgagcaatagcagg

SEQ ID NO: 9220 - RNA, 23 nt, synthetic construct
  source 1..23: mol_type = other RNA
tatgtctcgatgagcaatagcag

SEQ ID NO: 9221 - RNA, 23 nt, synthetic construct
  source 1..23: mol_type = other RNA
ttatgtctcgatgagcaatagca

SEQ ID NO: 9222 - RNA, 23 nt, synthetic construct
  source 1..23: mol_type = other RNA
tttatgtctcgatgagcaatagc

SEQ ID NO: 9223 - RNA, 23 nt, synthetic construct
  source 1..23: mol_type = other RNA
tttttatgtctcgatgagcaata

SEQ ID NO: 9224 - RNA, 23 nt, synthetic construct
  source 1..23: mol_type = other RNA
tattttatgtctcgatgagcaat

SEQ ID NO: 9225 - RNA, 23 nt, synthetic construct
  source 1..23: mol_type = other RNA
tgattttatgtctcgatgagcaa

SEQ ID NO: 9226 - RNA, 23 nt, synthetic construct
  source 1..23: mol_type = other RNA
ttgattttatgtctcgatgagca

SEQ ID NO: 9227 - RNA, 23 nt, synthetic construct
  source 1..23: mol_type = other RNA
tttgattttatgtctcgatgagc

SEQ ID NO: 9228 - RNA, 23 nt, synthetic construct
  source 1..23: mol_type = other RNA
ttttgattttatgtctcgatgag

SEQ ID NO: 9229 - RNA, 23 nt, synthetic construct
  source 1..23: mol_type = other RNA
tctttgattttatgtctcgatga

SEQ ID NO: 9230 - RNA, 23 nt, synthetic construct
  source 1..23: mol_type = other RNA
ttctttgattttatgtctcgatg

SEQ ID NO: 9231 - RNA, 23 nt, synthetic construct
  source 1..23: mol_type = other RNA
tttctttgattttatgtctcgat

SEQ ID NO: 9232 - RNA, 23 nt, synthetic construct
  source 1..23: mol_type = other RNA
tattctttgattttatgtctcga

SEQ ID NO: 9233 - RNA, 23 nt, synthetic construct
  source 1..23: mol_type = other RNA
ttattctttgattttatgtctcg

SEQ ID NO: 9234 - RNA, 23 nt, synthetic construct
  source 1..23: mol_type = other RNA
ttatggcacaagtttcacacttt

SEQ ID NO: 9235 - RNA, 23 nt, synthetic construct
  source 1..23: mol_type = other RNA
tcactttttcactaagatattct

SEQ ID NO: 9236 - RNA, 23 nt, synthetic construct
  source 1..23: mol_type = other RNA
tacactttttcactaagatattc

SEQ ID NO: 9237 - RNA, 23 nt, synthetic construct
  source 1..23: mol_type = other RNA
tcacactttttcactaagatatt

SEQ ID NO: 9238 - RNA, 23 nt, synthetic construct
  source 1..23: mol_type = other RNA
ttcacactttttcactaagatat

SEQ ID NO: 9239 - RNA, 23 nt, synthetic construct
  source 1..23: mol_type = other RNA
tttcacactttttcactaagata

SEQ ID NO: 9240 - RNA, 23 nt, synthetic construct
  source 1..23: mol_type = other RNA
ttttcacactttttcactaagat

SEQ ID NO: 9241 - RNA, 23 nt, synthetic construct
  source 1..23: mol_type = other RNA
tgtttcacactttttcactaaga

SEQ ID NO: 9242 - RNA, 23 nt, synthetic construct
  source 1..23: mol_type = other RNA
tagtttcacactttttcactaag

SEQ ID NO: 9243 - RNA, 23 nt, synthetic construct
  source 1..23: mol_type = other RNA
taagtttcacactttttcactaa

SEQ ID NO: 9244 - RNA, 23 nt, synthetic construct
  source 1..23: mol_type = other RNA
tcaagtttcacactttttcacta

SEQ ID NO: 9245 - RNA, 23 nt, synthetic construct
  source 1..23: mol_type = other RNA
tacaagtttcacactttttcact

SEQ ID NO: 9246 - RNA, 23 nt, synthetic construct
  source 1..23: mol_type = other RNA
tcacaagtttcacactttttcac

SEQ ID NO: 9247 - RNA, 23 nt, synthetic construct
  source 1..23: mol_type = other RNA
tgcacaagtttcacactttttca

SEQ ID NO: 9248 - RNA, 23 nt, synthetic construct
  source 1..23: mol_type = other RNA
tggcacaagtttcacactttttc

SEQ ID NO: 9249 - RNA, 23 nt, synthetic construct
  source 1..23: mol_type = other RNA
tatggcacaagtttcacactttt

SEQ ID NO: 9250 - RNA, 23 nt, synthetic construct
  source 1..23: mol_type = other RNA
tagtattgaatcatgcttcacag

SEQ ID NO: 9251 - RNA, 23 nt, synthetic construct
  source 1..23: mol_type = other RNA
tattgaatcatgcttcacagcca

SEQ ID NO: 9252 - RNA, 23 nt, synthetic construct
  source 1..23: mol_type = other RNA
ttattgaatcatgcttcacagcc

SEQ ID NO: 9253 - RNA, 23 nt, synthetic construct
  source 1..23: mol_type = other RNA
tcagtattgaatcatgcttcaca

SEQ ID NO: 9254 - RNA, 23 nt, synthetic construct
  source 1..23: mol_type = other RNA
ttgttcagtattgaatcatgctt

SEQ ID NO: 9255 - RNA, 23 nt, synthetic construct
  source 1..23: mol_type = other RNA
tagtgttcagtattgaatcatgc

SEQ ID NO: 9256 - RNA, 23 nt, synthetic construct
  source 1..23: mol_type = other RNA
ttagtgttcagtattgaatcatg

SEQ ID NO: 9257 - RNA, 23 nt, synthetic construct
  source 1..23: mol_type = other RNA
tatgtcgatagtgttcagtattg

SEQ ID NO: 9258 - RNA, 23 nt, synthetic construct
  source 1..23: mol_type = other RNA
tgtatgtcgatagtgttcagtat

SEQ ID NO: 9259 - RNA, 23 nt, synthetic construct
  source 1..23: mol_type = other RNA
tactttaggattctgaggtatgt

SEQ ID NO: 9260 - RNA, 23 nt, synthetic construct
  source 1..23: mol_type = other RNA
tattcattgtatcatcaagcatt

SEQ ID NO: 9261 - RNA, 23 nt, synthetic construct
  source 1..23: mol_type = other RNA
tagcatttcaggagccatatacc

SEQ ID NO: 9262 - RNA, 23 nt, synthetic construct
  source 1..23: mol_type = other RNA
tatcaagcatttcaggagccata

SEQ ID NO: 9263 - RNA, 23 nt, synthetic construct
  source 1..23: mol_type = other RNA
tcatcaagcatttcaggagccat

SEQ ID NO: 9264 - RNA, 23 nt, synthetic construct
  source 1..23: mol_type = other RNA
ttcatcaagcatttcaggagcca

SEQ ID NO: 9265 - RNA, 23 nt, synthetic construct
  source 1..23: mol_type = other RNA
tatcatcaagcatttcaggagcc

SEQ ID NO: 9266 - RNA, 23 nt, synthetic construct
  source 1..23: mol_type = other RNA
ttatcatcaagcatttcaggagc

SEQ ID NO: 9267 - RNA, 23 nt, synthetic construct
  source 1..23: mol_type = other RNA
tgtatcatcaagcatttcaggag

SEQ ID NO: 9268 - RNA, 23 nt, synthetic construct
  source 1..23: mol_type = other RNA
ttgtatcatcaagcatttcagga

SEQ ID NO: 9269 - RNA, 23 nt, synthetic construct
  source 1..23: mol_type = other RNA
tttgtatcatcaagcatttcagg

SEQ ID NO: 9270 - RNA, 23 nt, synthetic construct
  source 1..23: mol_type = other RNA
tattgtatcatcaagcatttcag

SEQ ID NO: 9271 - RNA, 23 nt, synthetic construct
  source 1..23: mol_type = other RNA
tcattgtatcatcaagcatttca

SEQ ID NO: 9272 - RNA, 23 nt, synthetic construct
  source 1..23: mol_type = other RNA
ttcattgtatcatcaagcatttc

SEQ ID NO: 9273 - RNA, 23 nt, synthetic construct
  source 1..23: mol_type = other RNA
tttcattgtatcatcaagcattt

SEQ ID NO: 9274 - RNA, 23 nt, synthetic construct
  source 1..23: mol_type = other RNA
tcattcattgtatcatcaagcat

SEQ ID NO: 9275 - RNA, 23 nt, synthetic construct
  source 1..23: mol_type = other RNA
tacattcattgtatcatcaagca

SEQ ID NO: 9276 - RNA, 23 nt, synthetic construct
  source 1..23: mol_type = other RNA
tcacattcattgtatcatcaagc

SEQ ID NO: 9277 - RNA, 23 nt, synthetic construct
  source 1..23: mol_type = other RNA
ttcacattcattgtatcatcaag

SEQ ID NO: 9278 - RNA, 23 nt, synthetic construct
  source 1..23: mol_type = other RNA
tttcacattcattgtatcatcaa

SEQ ID NO: 9279 - RNA, 23 nt, synthetic construct
  source 1..23: mol_type = other RNA
tattcacattcattgtatcatca

SEQ ID NO: 9280 - RNA, 23 nt, synthetic construct
  source 1..23: mol_type = other RNA
ttattcacattcattgtatcatc

SEQ ID NO: 9281 - RNA, 23 nt, synthetic construct
  source 1..23: mol_type = other RNA
tgatattcacattcattgtatca

SEQ ID NO: 9282 - RNA, 23 nt, synthetic construct
  source 1..23: mol_type = other RNA
tagatattcacattcattgtatc

SEQ ID NO: 9283 - RNA, 23 nt, synthetic construct
  source 1..23: mol_type = other RNA
ttgaaggactcaaagatattcac

SEQ ID NO: 9284 - RNA, 23 nt, synthetic construct
  source 1..23: mol_type = other RNA
tagaccaacagaatagatgtcag

SEQ ID NO: 9285 - RNA, 23 nt, synthetic construct
  source 1..23: mol_type = other RNA
tcaaagatattcacattcattgt

SEQ ID NO: 9286 - RNA, 23 nt, synthetic construct
  source 1..23: mol_type = other RNA
ttcaaagatattcacattcattg

SEQ ID NO: 9287 - RNA, 23 nt, synthetic construct
  source 1..23: mol_type = other RNA
tctcaaagatattcacattcatt

SEQ ID NO: 9288 - RNA, 23 nt, synthetic construct
  source 1..23: mol_type = other RNA
tactcaaagatattcacattcat

SEQ ID NO: 9289 - RNA, 23 nt, synthetic construct
  source 1..23: mol_type = other RNA
tgactcaaagatattcacattca

SEQ ID NO: 9290 - RNA, 23 nt, synthetic construct
  source 1..23: mol_type = other RNA
tggactcaaagatattcacattc

SEQ ID NO: 9291 - RNA, 23 nt, synthetic construct
  source 1..23: mol_type = other RNA
taggactcaaagatattcacatt

SEQ ID NO: 9292 - RNA, 23 nt, synthetic construct
  source 1..23: mol_type = other RNA
taaggactcaaagatattcacat

SEQ ID NO: 9293 - RNA, 23 nt, synthetic construct
  source 1..23: mol_type = other RNA
tgaaggactcaaagatattcaca

SEQ ID NO: 9294 - RNA, 23 nt, synthetic construct
  source 1..23: mol_type = other RNA
tttgaaggactcaaagatattca

SEQ ID NO: 9295 - RNA, 23 nt, synthetic construct
  source 1..23: mol_type = other RNA
ttttgaaggactcaaagatattc

SEQ ID NO: 9296 - RNA, 23 nt, synthetic construct
  source 1..23: mol_type = other RNA
tgtttgaaggactcaaagatatt

SEQ ID NO: 9297 - RNA, 23 nt, synthetic construct
  source 1..23: mol_type = other RNA
tcgtttgaaggactcaaagatat

SEQ ID NO: 9298 - RNA, 23 nt, synthetic construct
  source 1..23: mol_type = other RNA
ttcgtttgaaggactcaaagata

SEQ ID NO: 9299 - RNA, 23 nt, synthetic construct
  source 1..23: mol_type = other RNA
tctcgtttgaaggactcaaagat

SEQ ID NO: 9300 - RNA, 23 nt, synthetic construct
  source 1..23: mol_type = other RNA
ttagatgtcagctcgtttgaagg

SEQ ID NO: 9301 - RNA, 23 nt, synthetic construct
  source 1..23: mol_type = other RNA
tagaatagatgtcagctcgtttg

SEQ ID NO: 9302 - RNA, 23 nt, synthetic construct
  source 1..23: mol_type = other RNA
tcagaatagatgtcagctcgttt

SEQ ID NO: 9303 - RNA, 23 nt, synthetic construct
  source 1..23: mol_type = other RNA
tacagaatagatgtcagctcgtt

SEQ ID NO: 9304 - RNA, 23 nt, synthetic construct
  source 1..23: mol_type = other RNA
tcaacagaatagatgtcagctcg

SEQ ID NO: 9305 - RNA, 23 nt, synthetic construct
  source 1..23: mol_type = other RNA
tccaacagaatagatgtcagctc

SEQ ID NO: 9306 - RNA, 23 nt, synthetic construct
  source 1..23: mol_type = other RNA
ttaaaccagaccaacagaataga

SEQ ID NO: 9307 - RNA, 23 nt, synthetic construct
  source 1..23: mol_type = other RNA
ttatttcccagtaaaccagacca

SEQ ID NO: 9308 - RNA, 23 nt, synthetic construct
  source 1..23: mol_type = other RNA
taaggcaattggtactcctcaac

SEQ ID NO: 9309 - RNA, 23 nt, synthetic construct
  source 1..23: mol_type = other RNA
ttaataaggcaattggtactcct

SEQ ID NO: 9310 - RNA, 23 nt, synthetic construct
  source 1..23: mol_type = other RNA
ttaaggcaattggtactcctcaa

SEQ ID NO: 9311 - RNA, 23 nt, synthetic construct
  source 1..23: mol_type = other RNA
tataaggcaattggtactcctca

SEQ ID NO: 9312 - RNA, 23 nt, synthetic construct
  source 1..23: mol_type = other RNA
taataaggcaattggtactcctc

SEQ ID NO: 9313 - RNA, 23 nt, synthetic construct
  source 1..23: mol_type = other RNA
tataataaggcaattggtactcc

SEQ ID NO: 9314 - RNA, 23 nt, synthetic construct
  source 1..23: mol_type = other RNA
tcataataaggcaattggtactc

SEQ ID NO: 9315 - RNA, 23 nt, synthetic construct
  source 1..23: mol_type = other RNA
ttcataataaggcaattggtact

SEQ ID NO: 9316 - RNA, 23 nt, synthetic construct
  source 1..23: mol_type = other RNA
tgtcataataaggcaattggtac

SEQ ID NO: 9317 - RNA, 23 nt, synthetic construct
  source 1..23: mol_type = other RNA
ttgtcataataaggcaattggta

SEQ ID NO: 9318 - RNA, 23 nt, synthetic construct
  source 1..23: mol_type = other RNA
tatgtcataataaggcaattggt

SEQ ID NO: 9319 - RNA, 23 nt, synthetic construct
  source 1..23: mol_type = other RNA
tcatgtcataataaggcaattgg

SEQ ID NO: 9320 - RNA, 23 nt, synthetic construct
  source 1..23: mol_type = other RNA
tccatgtcataataaggcaattg

SEQ ID NO: 9321 - RNA, 23 nt, synthetic construct
  source 1..23: mol_type = other RNA
taccatgtcataataaggcaatt

SEQ ID NO: 9322 - RNA, 23 nt, synthetic construct
  source 1..23: mol_type = other RNA
tcaccatgtcataataaggcaat

SEQ ID NO: 9323 - RNA, 23 nt, synthetic construct
  source 1..23: mol_type = other RNA
tgcaccatgtcataataaggcaa

SEQ ID NO: 9324 - RNA, 23 nt, synthetic construct
  source 1..23: mol_type = other RNA
tggcaccatgtcataataaggca

SEQ ID NO: 9325 - RNA, 23 nt, synthetic construct
  source 1..23: mol_type = other RNA
taggcaccatgtcataataaggc

SEQ ID NO: 9326 - RNA, 23 nt, synthetic construct
  source 1..23: mol_type = other RNA
taaggcaccatgtcataataagg

SEQ ID NO: 9327 - RNA, 23 nt, synthetic construct
  source 1..23: mol_type = other RNA
tgaaggcaccatgtcataataag

SEQ ID NO: 9328 - RNA, 23 nt, synthetic construct
  source 1..23: mol_type = other RNA
ttgaaggcaccatgtcataataa

SEQ ID NO: 9329 - RNA, 23 nt, synthetic construct
  source 1..23: mol_type = other RNA
tacctttctcatttcctctatcg

SEQ ID NO: 9330 - RNA, 23 nt, synthetic construct
  source 1..23: mol_type = other RNA
tacaacctttctcatttcctcta

SEQ ID NO: 9331 - RNA, 23 nt, synthetic construct
  source 1..23: mol_type = other RNA
tttctggtcacaaacaacctttc

SEQ ID NO: 9332 - RNA, 23 nt, synthetic construct
  source 1..23: mol_type = other RNA
taacaacctttctcatttcctct

SEQ ID NO: 9333 - RNA, 23 nt, synthetic construct
  source 1..23: mol_type = other RNA
taaacaacctttctcatttcctc

SEQ ID NO: 9334 - RNA, 23 nt, synthetic construct
  source 1..23: mol_type = other RNA
tcaaacaacctttctcatttcct

SEQ ID NO: 9335 - RNA, 23 nt, synthetic construct
  source 1..23: mol_type = other RNA
tacaaacaacctttctcatttcc

SEQ ID NO: 9336 - RNA, 23 nt, synthetic construct
  source 1..23: mol_type = other RNA
tcacaaacaacctttctcatttc

SEQ ID NO: 9337 - RNA, 23 nt, synthetic construct
  source 1..23: mol_type = other RNA
ttcacaaacaacctttctcattt

SEQ ID NO: 9338 - RNA, 23 nt, synthetic construct
  source 1..23: mol_type = other RNA
tgtcacaaacaacctttctcatt

SEQ ID NO: 9339 - RNA, 23 nt, synthetic construct
  source 1..23: mol_type = other RNA
tggtcacaaacaacctttctcat

SEQ ID NO: 9340 - RNA, 23 nt, synthetic construct
  source 1..23: mol_type = other RNA
ttggtcacaaacaacctttctca

SEQ ID NO: 9341 - RNA, 23 nt, synthetic construct
  source 1..23: mol_type = other RNA
tctggtcacaaacaacctttctc

SEQ ID NO: 9342 - RNA, 23 nt, synthetic construct
  source 1..23: mol_type = other RNA
ttctggtcacaaacaacctttct

SEQ ID NO: 9343 - RNA, 23 nt, synthetic construct
  source 1..23: mol_type = other RNA
tcttctggtcacaaacaaccttt

SEQ ID NO: 9344 - RNA, 23 nt, synthetic construct
  source 1..23: mol_type = other RNA
tacttctggtcacaaacaacctt

SEQ ID NO: 9345 - RNA, 23 nt, synthetic construct
  source 1..23: mol_type = other RNA
taacttctggtcacaaacaacct

SEQ ID NO: 9346 - RNA, 23 nt, synthetic construct
  source 1..23: mol_type = other RNA
taaacttctggtcacaaacaacc

SEQ ID NO: 9347 - RNA, 23 nt, synthetic construct
  source 1..23: mol_type = other RNA
tatacttggtcgaaacttctggt

SEQ ID NO: 9348 - RNA, 23 nt, synthetic construct
  source 1..23: mol_type = other RNA
ttgcttcacaactttgccactgg

SEQ ID NO: 9349 - RNA, 23 nt, synthetic construct
  source 1..23: mol_type = other RNA
tagtgcttcacaactttgccact

SEQ ID NO: 9350 - RNA, 23 nt, synthetic construct
  source 1..23: mol_type = other RNA
tataccaacactcacgcattatt

SEQ ID NO: 9351 - RNA, 23 nt, synthetic construct
  source 1..23: mol_type = other RNA
taatacgaagagcagttaggcgg

SEQ ID NO: 9352 - RNA, 23 nt, synthetic construct
  source 1..23: mol_type = other RNA
ttaatacgaagagcagttaggcg

SEQ ID NO: 9353 - RNA, 23 nt, synthetic construct
  source 1..23: mol_type = other RNA
tttaatacgaagagcagttaggc

SEQ ID NO: 9354 - RNA, 23 nt, synthetic construct
  source 1..23: mol_type = other RNA
tttcttaatacgaagagcagtta

SEQ ID NO: 9355 - RNA, 23 nt, synthetic construct
  source 1..23: mol_type = other RNA
tgtcttcttaatacgaagagcag

SEQ ID NO: 9356 - RNA, 23 nt, synthetic construct
  source 1..23: mol_type = other RNA
tagtcttcttaatacgaagagca

SEQ ID NO: 9357 - RNA, 23 nt, synthetic construct
  source 1..23: mol_type = other RNA
ttgacacaaagttgagatatagt

SEQ ID NO: 9358 - RNA, 23 nt, synthetic construct
  source 1..23: mol_type = other RNA
tttgacacaaagttgagatatag

SEQ ID NO: 9359 - RNA, 23 nt, synthetic construct
  source 1..23: mol_type = other RNA
ttttgacacaaagttgagatata

SEQ ID NO: 9360 - RNA, 23 nt, synthetic construct
  source 1..23: mol_type = other RNA
tttctttgacacaaagttgagat

SEQ ID NO: 9361 - RNA, 23 nt, synthetic construct
  source 1..23: mol_type = other RNA
ttaattatcatcattaggctttg

SEQ ID NO: 9362 - RNA, 23 nt, synthetic construct
  source 1..23: mol_type = other RNA
taagaaagctatgagagatttct

SEQ ID NO: 9363 - RNA, 23 nt, synthetic construct
  source 1..23: mol_type = other RNA
ttcatcattaggctttgcagtct

SEQ ID NO: 9364 - RNA, 23 nt, synthetic construct
  source 1..23: mol_type = other RNA
tatcatcattaggctttgcagtc

SEQ ID NO: 9365 - RNA, 23 nt, synthetic construct
  source 1..23: mol_type = other RNA
ttatcatcattaggctttgcagt

SEQ ID NO: 9366 - RNA, 23 nt, synthetic construct
  source 1..23: mol_type = other RNA
tttatcatcattaggctttgcag

SEQ ID NO: 9367 - RNA, 23 nt, synthetic construct
  source 1..23: mol_type = other RNA
tattatcatcattaggctttgca

SEQ ID NO: 9368 - RNA, 23 nt, synthetic construct
  source 1..23: mol_type = other RNA
taattatcatcattaggctttgc

SEQ ID NO: 9369 - RNA, 23 nt, synthetic construct
  source 1..23: mol_type = other RNA
tcataattatcatcattaggctt

SEQ ID NO: 9370 - RNA, 23 nt, synthetic construct
  source 1..23: mol_type = other RNA
tacataattatcatcattaggct

SEQ ID NO: 9371 - RNA, 23 nt, synthetic construct
  source 1..23: mol_type = other RNA
taacataattatcatcattaggc

SEQ ID NO: 9372 - RNA, 23 nt, synthetic construct
  source 1..23: mol_type = other RNA
tctatgagagatttctttttaac

SEQ ID NO: 9373 - RNA, 23 nt, synthetic construct
  source 1..23: mol_type = other RNA
tgctatgagagatttctttttaa

SEQ ID NO: 9374 - RNA, 23 nt, synthetic construct
  source 1..23: mol_type = other RNA
taaaagaaagctatgagagattt

SEQ ID NO: 9375 - RNA, 23 nt, synthetic construct
  source 1..23: mol_type = other RNA
taatggaaaagaaagctatgaga

SEQ ID NO: 9376 - RNA, 23 nt, synthetic construct
  source 1..23: mol_type = other RNA
taaatggaaaagaaagctatgag

SEQ ID NO: 9377 - RNA, 23 nt, synthetic construct
  source 1..23: mol_type = other RNA
taaaatggcaaaaacattcacat

SEQ ID NO: 9378 - RNA, 23 nt, synthetic construct
  source 1..23: mol_type = other RNA
tgcaaaaacattcacataaaggg

SEQ ID NO: 9379 - RNA, 23 nt, synthetic construct
  source 1..23: mol_type = other RNA
taatggcaaaaacattcacataa

SEQ ID NO: 9380 - RNA, 23 nt, synthetic construct
  source 1..23: mol_type = other RNA
taaaaaatggcaaaaacattcac

SEQ ID NO: 9381 - RNA, 23 nt, synthetic construct
  source 1..23: mol_type = other RNA
taatactgtactgtcttatcttt

SEQ ID NO: 9382 - RNA, 23 nt, synthetic construct
  source 1..23: mol_type = other RNA
tttaaatactgtactgtcttatc

SEQ ID NO: 9383 - RNA, 23 nt, synthetic construct
  source 1..23: mol_type = other RNA
tacttaaatactgtactgtctta

SEQ ID NO: 9384 - RNA, 23 nt, synthetic construct
  source 1..23: mol_type = other RNA
tagagttatcttttcatgctgcc

SEQ ID NO: 9385 - RNA, 23 nt, synthetic construct
  source 1..23: mol_type = other RNA
ttaacatagagattggatgaagt

SEQ ID NO: 9386 - RNA, 23 nt, synthetic construct
  source 1..23: mol_type = other RNA
taaagatgagttgaggtgttgct

SEQ ID NO: 9387 - RNA, 23 nt, synthetic construct
  source 1..23: mol_type = other RNA
tgatgagttgaggtgttgctttc

SEQ ID NO: 9388 - RNA, 23 nt, synthetic construct
  source 1..23: mol_type = other RNA
ttaaaaagatgagttgaggtgtt

SEQ ID NO: 9389 - RNA, 23 nt, synthetic construct
  source 1..23: mol_type = other RNA
taataaaaagatgagttgaggtg

SEQ ID NO: 9390 - RNA, 23 nt, synthetic construct
  source 1..23: mol_type = other RNA
taaataaaaagatgagttgaggt

SEQ ID NO: 9391 - RNA, 23 nt, synthetic construct
  source 1..23: mol_type = other RNA
tgactataacatttttatagagc

SEQ ID NO: 9392 - RNA, 23 nt, synthetic construct
  source 1..23: mol_type = other RNA
tttcatgtgctcttggttcaagt

SEQ ID NO: 9393 - RNA, 23 nt, synthetic construct
  source 1..23: mol_type = other RNA
tgctcttggttcaagtaaaataa

SEQ ID NO: 9394 - RNA, 23 nt, synthetic construct
  source 1..23: mol_type = other RNA
ttgctcttggttcaagtaaaata

SEQ ID NO: 9395 - RNA, 23 nt, synthetic construct
  source 1..23: mol_type = other RNA
tgtgctcttggttcaagtaaaat

SEQ ID NO: 9396 - RNA, 23 nt, synthetic construct
  source 1..23: mol_type = other RNA
ttgtgctcttggttcaagtaaaa

SEQ ID NO: 9397 - RNA, 23 nt, synthetic construct
  source 1..23: mol_type = other RNA
tatgtgctcttggttcaagtaaa

SEQ ID NO: 9398 - RNA, 23 nt, synthetic construct
  source 1..23: mol_type = other RNA
tcatgtgctcttggttcaagtaa

SEQ ID NO: 9399 - RNA, 23 nt, synthetic construct
  source 1..23: mol_type = other RNA
ttcatgtgctcttggttcaagta

SEQ ID NO: 9400 - RNA, 23 nt, synthetic construct
  source 1..23: mol_type = other RNA
tattcatgtgctcttggttcaag

SEQ ID NO: 9401 - RNA, 23 nt, synthetic construct
  source 1..23: mol_type = other RNA
tcattcatgtgctcttggttcaa

SEQ ID NO: 9402 - RNA, 23 nt, synthetic construct
  source 1..23: mol_type = other RNA
ttcattcatgtgctcttggttca

SEQ ID NO: 9403 - RNA, 23 nt, synthetic construct
  source 1..23: mol_type = other RNA
tttcattcatgtgctcttggttc

SEQ ID NO: 9404 - RNA, 23 nt, synthetic construct
  source 1..23: mol_type = other RNA
tgttcattcatgtgctcttggtt

SEQ ID NO: 9405 - RNA, 23 nt, synthetic construct
  source 1..23: mol_type = other RNA
ttgttcattcatgtgctcttggt

SEQ ID NO: 9406 - RNA, 23 nt, synthetic construct
  source 1..23: mol_type = other RNA
tctgttcattcatgtgctcttgg

SEQ ID NO: 9407 - RNA, 23 nt, synthetic construct
  source 1..23: mol_type = other RNA
taatgtttttacatcttttcctg

SEQ ID NO: 9408 - RNA, 23 nt, synthetic construct
  source 1..23: mol_type = other RNA
tgttttcatctcagaaaaaaatg

SEQ ID NO: 9409 - RNA, 23 nt, synthetic construct
  source 1..23: mol_type = other RNA
ttagcatgctctaatttgcatgt

SEQ ID NO: 9410 - RNA, 23 nt, synthetic construct
  source 1..23: mol_type = other RNA
tatagcatgctctaatttgcatg

SEQ ID NO: 9411 - RNA, 23 nt, synthetic construct
  source 1..23: mol_type = other RNA
taagatagcatgctctaatttgc

SEQ ID NO: 9412 - RNA, 23 nt, synthetic construct
  source 1..23: mol_type = other RNA
tacctaaagatagcatgctctaa

SEQ ID NO: 9413 - RNA, 23 nt, synthetic construct
  source 1..23: mol_type = other RNA
tatcacctaaagatagcatgctc

SEQ ID NO: 9414 - RNA, 23 nt, synthetic construct
  source 1..23: mol_type = other RNA
ttagattgcatcacctaaagata

SEQ ID NO: 9415 - RNA, 23 nt, synthetic construct
  source 1..23: mol_type = other RNA
ttttaaaaagtcctgctaactta

SEQ ID NO: 9416 - RNA, 23 nt, synthetic construct
  source 1..23: mol_type = other RNA
tttttaaaaagtcctgctaactt

SEQ ID NO: 9417 - RNA, 23 nt, synthetic construct
  source 1..23: mol_type = other RNA
ttttttaaaaagtcctgctaact

SEQ ID NO: 9418 - RNA, 23 nt, synthetic construct
  source 1..23: mol_type = other RNA
tatttttaaaaagtcctgctaac

SEQ ID NO: 9419 - RNA, 23 nt, synthetic construct
  source 1..23: mol_type = other RNA
ttcgatatattaaagtttagagc

SEQ ID NO: 9420 - RNA, 23 nt, synthetic construct
  source 1..23: mol_type = other RNA
tcgatatattaaagtttagagca

SEQ ID NO: 9421 - RNA, 23 nt, synthetic construct
  source 1..23: mol_type = other RNA
tcgttcgatatattaaagtttag

SEQ ID NO: 9422 - RNA, 23 nt, synthetic construct
  source 1..23: mol_type = other RNA
tcacgttcgatatattaaagttt

SEQ ID NO: 9423 - RNA, 23 nt, synthetic construct
  source 1..23: mol_type = other RNA
ttcacgttcgatatattaaagtt

SEQ ID NO: 9424 - RNA, 23 nt, synthetic construct
  source 1..23: mol_type = other RNA
tctcacgttcgatatattaaagt

SEQ ID NO: 9425 - RNA, 23 nt, synthetic construct
  source 1..23: mol_type = other RNA
ttctcacgttcgatatattaaag

SEQ ID NO: 9426 - RNA, 23 nt, synthetic construct
  source 1..23: mol_type = other RNA
tctctcacgttcgatatattaaa

SEQ ID NO: 9427 - RNA, 23 nt, synthetic construct
  source 1..23: mol_type = other RNA
tactctcacgttcgatatattaa

SEQ ID NO: 9428 - RNA, 23 nt, synthetic construct
  source 1..23: mol_type = other RNA
tcactctcacgttcgatatatta

SEQ ID NO: 9429 - RNA, 23 nt, synthetic construct
  source 1..23: mol_type = other RNA
tccactctcacgttcgatatatt

SEQ ID NO: 9430 - RNA, 23 nt, synthetic construct
  source 1..23: mol_type = other RNA
tagtagtggattatgaagaacag

SEQ ID NO: 9431 - RNA, 23 nt, synthetic construct
  source 1..23: mol_type = other RNA
taaaggaacaagtttagtggttc

SEQ ID NO: 9432 - RNA, 23 nt, synthetic construct
  source 1..23: mol_type = other RNA
tggaacaagtttagtggttcagg

SEQ ID NO: 9433 - RNA, 23 nt, synthetic construct
  source 1..23: mol_type = other RNA
taggaacaagtttagtggttcag

SEQ ID NO: 9434 - RNA, 23 nt, synthetic construct
  source 1..23: mol_type = other RNA
taaggaacaagtttagtggttca

SEQ ID NO: 9435 - RNA, 23 nt, synthetic construct
  source 1..23: mol_type = other RNA
tgaaaggaacaagtttagtggtt

SEQ ID NO: 9436 - RNA, 23 nt, synthetic construct
  source 1..23: mol_type = other RNA
ttgaaaggaacaagtttagtggt

SEQ ID NO: 9437 - RNA, 23 nt, synthetic construct
  source 1..23: mol_type = other RNA
tatgaaaggaacaagtttagtgg

SEQ ID NO: 9438 - RNA, 23 nt, synthetic construct
  source 1..23: mol_type = other RNA
taatgaaaggaacaagtttagtg

SEQ ID NO: 9439 - RNA, 23 nt, synthetic construct
  source 1..23: mol_type = other RNA
taaatgaaaggaacaagtttagt

SEQ ID NO: 9440 - RNA, 23 nt, synthetic construct
  source 1..23: mol_type = other RNA
ttaaatgaaaggaacaagtttag

SEQ ID NO: 9441 - RNA, 23 nt, synthetic construct
  source 1..23: mol_type = other RNA
tgtaaatgaaaggaacaagttta

SEQ ID NO: 9442 - RNA, 23 nt, synthetic construct
  source 1..23: mol_type = other RNA
ttgtaaatgaaaggaacaagttt

SEQ ID NO: 9443 - RNA, 23 nt, synthetic construct
  source 1..23: mol_type = other RNA
tttgtaaatgaaaggaacaagtt

SEQ ID NO: 9444 - RNA, 23 nt, synthetic construct
  source 1..23: mol_type = other RNA
ttttgtaaatgaaaggaacaagt

SEQ ID NO: 9445 - RNA, 23 nt, synthetic construct
  source 1..23: mol_type = other RNA
tttttgtaaatgaaaggaacaag

SEQ ID NO: 9446 - RNA, 23 nt, synthetic construct
  source 1..23: mol_type = other RNA
tcttttgtaaatgaaaggaacaa

SEQ ID NO: 9447 - RNA, 23 nt, synthetic construct
  source 1..23: mol_type = other RNA
ttcttttgtaaatgaaaggaaca

SEQ ID NO: 9448 - RNA, 23 nt, synthetic construct
  source 1..23: mol_type = other RNA
tctcttttgtaaatgaaaggaac

SEQ ID NO: 9449 - RNA, 23 nt, synthetic construct
  source 1..23: mol_type = other RNA
ttctcttttgtaaatgaaaggaa

SEQ ID NO: 9450 - RNA, 23 nt, synthetic construct
  source 1..23: mol_type = other RNA
tatctcttttgtaaatgaaagga

SEQ ID NO: 9451 - RNA, 23 nt, synthetic construct
  source 1..23: mol_type = other RNA
ttatctcttttgtaaatgaaagg

SEQ ID NO: 9452 - RNA, 23 nt, synthetic construct
  source 1..23: mol_type = other RNA
tgtatctcttttgtaaatgaaag

SEQ ID NO: 9453 - RNA, 23 nt, synthetic construct
  source 1..23: mol_type = other RNA
tggtatctcttttgtaaatgaaa

SEQ ID NO: 9454 - RNA, 23 nt, synthetic construct
  source 1..23: mol_type = other RNA
taggtatctcttttgtaaatgaa

SEQ ID NO: 9455 - RNA, 23 nt, synthetic construct
  source 1..23: mol_type = other RNA
tcaggtatctcttttgtaaatga

SEQ ID NO: 9456 - RNA, 23 nt, synthetic construct
  source 1..23: mol_type = other RNA
ttcaggtatctcttttgtaaatg

SEQ ID NO: 9457 - RNA, 23 nt, synthetic construct
  source 1..23: mol_type = other RNA
tgtcaggtatctcttttgtaaat

SEQ ID NO: 9458 - RNA, 23 nt, synthetic construct
  source 1..23: mol_type = other RNA
ttgtcaggtatctcttttgtaaa

SEQ ID NO: 9459 - RNA, 23 nt, synthetic construct
  source 1..23: mol_type = other RNA
tatgtcaggtatctcttttgtaa

SEQ ID NO: 9460 - RNA, 23 nt, synthetic construct
  source 1..23: mol_type = other RNA
tgatgtcaggtatctcttttgta

SEQ ID NO: 9461 - RNA, 23 nt, synthetic construct
  source 1..23: mol_type = other RNA
tggatgtcaggtatctcttttgt

SEQ ID NO: 9462 - RNA, 23 nt, synthetic construct
  source 1..23: mol_type = other RNA
tgacatttctcagtgtctcagga

SEQ ID NO: 9463 - RNA, 23 nt, synthetic construct
  source 1..23: mol_type = other RNA
tattagctgtgtgacttcaggac

SEQ ID NO: 9464 - RNA, 23 nt, synthetic construct
  source 1..23: mol_type = other RNA
tcatttctcagtgtctcaggatg

SEQ ID NO: 9465 - RNA, 23 nt, synthetic construct
  source 1..23: mol_type = other RNA
taggacatttctcagtgtctcag

SEQ ID NO: 9466 - RNA, 23 nt, synthetic construct
  source 1..23: mol_type = other RNA
ttgtgacttcaggacatttctca

SEQ ID NO: 9467 - RNA, 23 nt, synthetic construct
  source 1..23: mol_type = other RNA
tttacggtgttcattatcacaag

SEQ ID NO: 9468 - RNA, 23 nt, synthetic construct
  source 1..23: mol_type = other RNA
ttatcacaagatttggacctagt

SEQ ID NO: 9469 - RNA, 23 nt, synthetic construct
  source 1..23: mol_type = other RNA
tttatcacaagatttggacctag

SEQ ID NO: 9470 - RNA, 23 nt, synthetic construct
  source 1..23: mol_type = other RNA
tcattatcacaagatttggacct

SEQ ID NO: 9471 - RNA, 23 nt, synthetic construct
  source 1..23: mol_type = other RNA
tttcattatcacaagatttggac

SEQ ID NO: 9472 - RNA, 23 nt, synthetic construct
  source 1..23: mol_type = other RNA
ttgttcattatcacaagatttgg

SEQ ID NO: 9473 - RNA, 23 nt, synthetic construct
  source 1..23: mol_type = other RNA
taagtaggaagctagctaacctt

SEQ ID NO: 9474 - RNA, 23 nt, synthetic construct
  source 1..23: mol_type = other RNA
taaagtaggaagctagctaacct

SEQ ID NO: 9475 - RNA, 23 nt, synthetic construct
  source 1..23: mol_type = other RNA
ttcaagggaaagtaggaagctag

SEQ ID NO: 9476 - RNA, 23 nt, synthetic construct
  source 1..23: mol_type = other RNA
tactattcaagggaaagtaggaa

SEQ ID NO: 9477 - RNA, 23 nt, synthetic construct
  source 1..23: mol_type = other RNA
tcactattcaagggaaagtagga

SEQ ID NO: 9478 - RNA, 23 nt, synthetic construct
  source 1..23: mol_type = other RNA
tgaaaagcactattcaagggaaa

SEQ ID NO: 9479 - RNA, 23 nt, synthetic construct
  source 1..23: mol_type = other RNA
tagaaaagcactattcaagggaa

SEQ ID NO: 9480 - RNA, 23 nt, synthetic construct
  source 1..23: mol_type = other RNA
tgagaaaagcactattcaaggga

SEQ ID NO: 9481 - RNA, 23 nt, synthetic construct
  source 1..23: mol_type = other RNA
tggagaaaagcactattcaaggg

SEQ ID NO: 9482 - RNA, 23 nt, synthetic construct
  source 1..23: mol_type = other RNA
tagggagaaaagcactattcaag

SEQ ID NO: 9483 - RNA, 23 nt, synthetic construct
  source 1..23: mol_type = other RNA
ttattacatagggagaaaagcac

SEQ ID NO: 9484 - RNA, 23 nt, synthetic construct
  source 1..23: mol_type = other RNA
taataactcaatatgccttctaa

SEQ ID NO: 9485 - RNA, 23 nt, synthetic construct
  source 1..23: mol_type = other RNA
taatatgccttctaaaccacaaa

SEQ ID NO: 9486 - RNA, 23 nt, synthetic construct
  source 1..23: mol_type = other RNA
taactcaatatgccttctaaacc

SEQ ID NO: 9487 - RNA, 23 nt, synthetic construct
  source 1..23: mol_type = other RNA
tataactcaatatgccttctaaa

SEQ ID NO: 9488 - RNA, 23 nt, synthetic construct
  source 1..23: mol_type = other RNA
tctgcaaaataactcaatatgcc

SEQ ID NO: 9489 - RNA, 23 nt, synthetic construct
  source 1..23: mol_type = other RNA
tcattatgattctgcaaaataac

SEQ ID NO: 9490 - RNA, 23 nt, synthetic construct
  source 1..23: mol_type = other RNA
tccattatgattctgcaaaataa

SEQ ID NO: 9491 - RNA, 23 nt, synthetic construct
  source 1..23: mol_type = other RNA
ttccattatgattctgcaaaata

SEQ ID NO: 9492 - RNA, 23 nt, synthetic construct
  source 1..23: mol_type = other RNA
tgtccattatgattctgcaaaat

SEQ ID NO: 9493 - RNA, 23 nt, synthetic construct
  source 1..23: mol_type = other RNA
tggtccattatgattctgcaaaa

SEQ ID NO: 9494 - RNA, 23 nt, synthetic construct
  source 1..23: mol_type = other RNA
tgggtccattatgattctgcaaa

SEQ ID NO: 9495 - RNA, 23 nt, synthetic construct
  source 1..23: mol_type = other RNA
tcgggtccattatgattctgcaa

SEQ ID NO: 9496 - RNA, 23 nt, synthetic construct
  source 1..23: mol_type = other RNA
tgcgggtccattatgattctgca

SEQ ID NO: 9497 - RNA, 23 nt, synthetic construct
  source 1..23: mol_type = other RNA
ttgcgggtccattatgattctgc

SEQ ID NO: 9498 - RNA, 23 nt, synthetic construct
  source 1..23: mol_type = other RNA
tgtgcgggtccattatgattctg

SEQ ID NO: 9499 - RNA, 23 nt, synthetic construct
  source 1..23: mol_type = other RNA
ttgtgcgggtccattatgattct

SEQ ID NO: 9500 - RNA, 23 nt, synthetic construct
  source 1..23: mol_type = other RNA
tttgtgcgggtccattatgattc

SEQ ID NO: 9501 - RNA, 23 nt, synthetic construct
  source 1..23: mol_type = other RNA
ttttgtgcgggtccattatgatt

SEQ ID NO: 9502 - RNA, 23 nt, synthetic construct
  source 1..23: mol_type = other RNA
tttttgtgcgggtccattatgat

SEQ ID NO: 9503 - RNA, 23 nt, synthetic construct
  source 1..23: mol_type = other RNA
tattttgtgcgggtccattatga

SEQ ID NO: 9504 - RNA, 23 nt, synthetic construct
  source 1..23: mol_type = other RNA
taacagatatggttctgagattt

SEQ ID NO: 9505 - RNA, 23 nt, synthetic construct
  source 1..23: mol_type = other RNA
tttctatgagaaaaaatgtcaac

SEQ ID NO: 9506 - RNA, 23 nt, synthetic construct
  source 1..23: mol_type = other RNA
tgattttgtgcgggtccattatg

SEQ ID NO: 9507 - RNA, 23 nt, synthetic construct
  source 1..23: mol_type = other RNA
tagattttgtgcgggtccattat

SEQ ID NO: 9508 - RNA, 23 nt, synthetic construct
  source 1..23: mol_type = other RNA
tgagattttgtgcgggtccatta

SEQ ID NO: 9509 - RNA, 23 nt, synthetic construct
  source 1..23: mol_type = other RNA
ttgagattttgtgcgggtccatt

SEQ ID NO: 9510 - RNA, 23 nt, synthetic construct
  source 1..23: mol_type = other RNA
tctgagattttgtgcgggtccat

SEQ ID NO: 9511 - RNA, 23 nt, synthetic construct
  source 1..23: mol_type = other RNA
ttctgagattttgtgcgggtcca

SEQ ID NO: 9512 - RNA, 23 nt, synthetic construct
  source 1..23: mol_type = other RNA
tttctgagattttgtgcgggtcc

SEQ ID NO: 9513 - RNA, 23 nt, synthetic construct
  source 1..23: mol_type = other RNA
tgttctgagattttgtgcgggtc

SEQ ID NO: 9514 - RNA, 23 nt, synthetic construct
  source 1..23: mol_type = other RNA
tggttctgagattttgtgcgggt

SEQ ID NO: 9515 - RNA, 23 nt, synthetic construct
  source 1..23: mol_type = other RNA
ttggttctgagattttgtgcggg

SEQ ID NO: 9516 - RNA, 23 nt, synthetic construct
  source 1..23: mol_type = other RNA
tatggttctgagattttgtgcgg

SEQ ID NO: 9517 - RNA, 23 nt, synthetic construct
  source 1..23: mol_type = other RNA
ttatggttctgagattttgtgcg

SEQ ID NO: 9518 - RNA, 23 nt, synthetic construct
  source 1..23: mol_type = other RNA
tatatggttctgagattttgtgc

SEQ ID NO: 9519 - RNA, 23 nt, synthetic construct
  source 1..23: mol_type = other RNA
tgatatggttctgagattttgtg

SEQ ID NO: 9520 - RNA, 23 nt, synthetic construct
  source 1..23: mol_type = other RNA
tagatatggttctgagattttgt

SEQ ID NO: 9521 - RNA, 23 nt, synthetic construct
  source 1..23: mol_type = other RNA
tcagatatggttctgagattttg

SEQ ID NO: 9522 - RNA, 23 nt, synthetic construct
  source 1..23: mol_type = other RNA
tacagatatggttctgagatttt

SEQ ID NO: 9523 - RNA, 23 nt, synthetic construct
  source 1..23: mol_type = other RNA
tcaacagatatggttctgagatt

SEQ ID NO: 9524 - RNA, 23 nt, synthetic construct
  source 1..23: mol_type = other RNA
ttcaacagatatggttctgagat

SEQ ID NO: 9525 - RNA, 23 nt, synthetic construct
  source 1..23: mol_type = other RNA
tgtcaacagatatggttctgaga

SEQ ID NO: 9526 - RNA, 23 nt, synthetic construct
  source 1..23: mol_type = other RNA
ttgtcaacagatatggttctgag

SEQ ID NO: 9527 - RNA, 23 nt, synthetic construct
  source 1..23: mol_type = other RNA
tatgtcaacagatatggttctga

SEQ ID NO: 9528 - RNA, 23 nt, synthetic construct
  source 1..23: mol_type = other RNA
taatgtcaacagatatggttctg

SEQ ID NO: 9529 - RNA, 23 nt, synthetic construct
  source 1..23: mol_type = other RNA
taaatgtcaacagatatggttct

SEQ ID NO: 9530 - RNA, 23 nt, synthetic construct
  source 1..23: mol_type = other RNA
taaaatgtcaacagatatggttc

SEQ ID NO: 9531 - RNA, 23 nt, synthetic construct
  source 1..23: mol_type = other RNA
taaaaatgtcaacagatatggtt

SEQ ID NO: 9532 - RNA, 23 nt, synthetic construct
  source 1..23: mol_type = other RNA
taaaaaatgtcaacagatatggt

SEQ ID NO: 9533 - RNA, 23 nt, synthetic construct
  source 1..23: mol_type = other RNA
tgaaaaaatgtcaacagatatgg

SEQ ID NO: 9534 - RNA, 23 nt, synthetic construct
  source 1..23: mol_type = other RNA
tagaaaaaatgtcaacagatatg

SEQ ID NO: 9535 - RNA, 23 nt, synthetic construct
  source 1..23: mol_type = other RNA
tgagaaaaaatgtcaacagatat

SEQ ID NO: 9536 - RNA, 23 nt, synthetic construct
  source 1..23: mol_type = other RNA
ttgagaaaaaatgtcaacagata

SEQ ID NO: 9537 - RNA, 23 nt, synthetic construct
  source 1..23: mol_type = other RNA
tatgagaaaaaatgtcaacagat

SEQ ID NO: 9538 - RNA, 23 nt, synthetic construct
  source 1..23: mol_type = other RNA
ttatgagaaaaaatgtcaacaga

SEQ ID NO: 9539 - RNA, 23 nt, synthetic construct
  source 1..23: mol_type = other RNA
tctatgagaaaaaatgtcaacag

SEQ ID NO: 9540 - RNA, 23 nt, synthetic construct
  source 1..23: mol_type = other RNA
ttctatgagaaaaaatgtcaaca

SEQ ID NO: 9541 - RNA, 23 nt, synthetic construct
  source 1..23: mol_type = other RNA
taccatgatatttctatgagaaa

SEQ ID NO: 9542 - RNA, 23 nt, synthetic construct
  source 1..23: mol_type = other RNA
taaccatgatatttctatgagaa

SEQ ID NO: 9543 - RNA, 23 nt, synthetic construct
  source 1..23: mol_type = other RNA
ttaaccatgatatttctatgaga

SEQ ID NO: 9544 - RNA, 23 nt, synthetic construct
  source 1..23: mol_type = other RNA
tttaatgctcattaacaaatggg

SEQ ID NO: 9545 - RNA, 23 nt, synthetic construct
  source 1..23: mol_type = other RNA
tcagaaaacattaatgctcatta

SEQ ID NO: 9546 - RNA, 23 nt, synthetic construct
  source 1..23: mol_type = other RNA
tattaatctttggaagtgttcag

SEQ ID NO: 9547 - RNA, 23 nt, synthetic construct
  source 1..23: mol_type = other RNA
tcattaatgctcattaacaaatg

SEQ ID NO: 9548 - RNA, 23 nt, synthetic construct
  source 1..23: mol_type = other RNA
tgaaaacattaatgctcattaac

SEQ ID NO: 9549 - RNA, 23 nt, synthetic construct
  source 1..23: mol_type = other RNA
ttcagaaaacattaatgctcatt

SEQ ID NO: 9550 - RNA, 23 nt, synthetic construct
  source 1..23: mol_type = other RNA
tttcagaaaacattaatgctcat

SEQ ID NO: 9551 - RNA, 23 nt, synthetic construct
  source 1..23: mol_type = other RNA
tgttcagaaaacattaatgctca

SEQ ID NO: 9552 - RNA, 23 nt, synthetic construct
  source 1..23: mol_type = other RNA
ttgttcagaaaacattaatgctc

SEQ ID NO: 9553 - RNA, 23 nt, synthetic construct
  source 1..23: mol_type = other RNA
tgtgttcagaaaacattaatgct

SEQ ID NO: 9554 - RNA, 23 nt, synthetic construct
  source 1..23: mol_type = other RNA
tagtgttcagaaaacattaatgc

SEQ ID NO: 9555 - RNA, 23 nt, synthetic construct
  source 1..23: mol_type = other RNA
taagtgttcagaaaacattaatg

SEQ ID NO: 9556 - RNA, 23 nt, synthetic construct
  source 1..23: mol_type = other RNA
taatctttggaagtgttcagaaa

SEQ ID NO: 9557 - RNA, 23 nt, synthetic construct
  source 1..23: mol_type = other RNA
ttaatctttggaagtgttcagaa

SEQ ID NO: 9558 - RNA, 23 nt, synthetic construct
  source 1..23: mol_type = other RNA
tttaatctttggaagtgttcaga

SEQ ID NO: 9559 - RNA, 23 nt, synthetic construct
  source 1..23: mol_type = other RNA
tgattaatctttggaagtgttca

SEQ ID NO: 9560 - RNA, 23 nt, synthetic construct
  source 1..23: mol_type = other RNA
ttgattaatctttggaagtgttc

SEQ ID NO: 9561 - RNA, 23 nt, synthetic construct
  source 1..23: mol_type = other RNA
tttgattaatctttggaagtgtt

SEQ ID NO: 9562 - RNA, 23 nt, synthetic construct
  source 1..23: mol_type = other RNA
ttttgattaatctttggaagtgt

SEQ ID NO: 9563 - RNA, 23 nt, synthetic construct
  source 1..23: mol_type = other RNA
tgtttgattaatctttggaagtg

SEQ ID NO: 9564 - RNA, 23 nt, synthetic construct
  source 1..23: mol_type = other RNA
ttgtttgattaatctttggaagt

SEQ ID NO: 9565 - RNA, 23 nt, synthetic construct
  source 1..23: mol_type = other RNA
tatgtttgattaatctttggaag

SEQ ID NO: 9566 - RNA, 23 nt, synthetic construct
  source 1..23: mol_type = other RNA
tttaaagacattttcagacaatg

SEQ ID NO: 9567 - RNA, 23 nt, synthetic construct
  source 1..23: mol_type = other RNA
tgacattttcagacaatgaatat

SEQ ID NO: 9568 - RNA, 23 nt, synthetic construct
  source 1..23: mol_type = other RNA
taaagacattttcagacaatgaa

SEQ ID NO: 9569 - RNA, 23 nt, synthetic construct
  source 1..23: mol_type = other RNA
ttaaagacattttcagacaatga

SEQ ID NO: 9570 - RNA, 23 nt, synthetic construct
  source 1..23: mol_type = other RNA
ttcttaaagacattttcagacaa

SEQ ID NO: 9571 - RNA, 23 nt, synthetic construct
  source 1..23: mol_type = other RNA
ttatcttaaagacattttcagac

SEQ ID NO: 9572 - RNA, 23 nt, synthetic construct
  source 1..23: mol_type = other RNA
ttacaaaggaaatagggacctct

SEQ ID NO: 9573 - RNA, 23 nt, synthetic construct
  source 1..23: mol_type = other RNA
tgtacaaaggaaatagggacctc

SEQ ID NO: 9574 - RNA, 23 nt, synthetic construct
  source 1..23: mol_type = other RNA
ttgtacaaaggaaatagggacct

SEQ ID NO: 9575 - RNA, 23 nt, synthetic construct
  source 1..23: mol_type = other RNA
tatgtacaaaggaaatagggacc

SEQ ID NO: 9576 - RNA, 23 nt, synthetic construct
  source 1..23: mol_type = other RNA
ttatgtacaaaggaaatagggac

SEQ ID NO: 9577 - RNA, 23 nt, synthetic construct
  source 1..23: mol_type = other RNA
tgtatgtacaaaggaaataggga

SEQ ID NO: 9578 - RNA, 23 nt, synthetic construct
  source 1..23: mol_type = other RNA
ttgtatgtacaaaggaaataggg

SEQ ID NO: 9579 - RNA, 23 nt, synthetic construct
  source 1..23: mol_type = other RNA
tgtgtatgtacaaaggaaatagg

SEQ ID NO: 9580 - RNA, 23 nt, synthetic construct
  source 1..23: mol_type = other RNA
tctgtcttttctttctaagtgtg

SEQ ID NO: 9581 - RNA, 23 nt, synthetic construct
  source 1..23: mol_type = other RNA
ttctgtcttttctttctaagtgt

SEQ ID NO: 9582 - RNA, 23 nt, synthetic construct
  source 1..23: mol_type = other RNA
tttctgtcttttctttctaagtg

SEQ ID NO: 9583 - RNA, 23 nt, synthetic construct
  source 1..23: mol_type = other RNA
ttttctgtcttttctttctaagt

SEQ ID NO: 9584 - RNA, 23 nt, synthetic construct
  source 1..23: mol_type = other RNA
tttttctgtcttttctttctaag

SEQ ID NO: 9585 - RNA, 23 nt, synthetic construct
  source 1..23: mol_type = other RNA
taaatatttccttccttcctctt

SEQ ID NO: 9586 - RNA, 23 nt, synthetic construct
  source 1..23: mol_type = other RNA
taaaatatttccttccttcctct

SEQ ID NO: 9587 - RNA, 23 nt, synthetic construct
  source 1..23: mol_type = other RNA
tttctcaaaatatttccttcctt

SEQ ID NO: 9588 - RNA, 23 nt, synthetic construct
  source 1..23: mol_type = other RNA
tttgttaacacttcattgaagag

SEQ ID NO: 9589 - RNA, 23 nt, synthetic construct
  source 1..23: mol_type = other RNA
taagagttttcttaattcttctc

SEQ ID NO: 9590 - RNA, 23 nt, synthetic construct
  source 1..23: mol_type = other RNA
taacacttcattgaagagttttc

SEQ ID NO: 9591 - RNA, 23 nt, synthetic construct
  source 1..23: mol_type = other RNA
tttggttgttaacacttcattga

SEQ ID NO: 9592 - RNA, 23 nt, synthetic construct
  source 1..23: mol_type = other RNA
ttttggttgttaacacttcattg

SEQ ID NO: 9593 - RNA, 23 nt, synthetic construct
  source 1..23: mol_type = other RNA
tatttgctgtttctgataccgtc

SEQ ID NO: 9594 - RNA, 23 nt, synthetic construct
  source 1..23: mol_type = other RNA
ttgtttctgataccgtctgtagg

SEQ ID NO: 9595 - RNA, 23 nt, synthetic construct
  source 1..23: mol_type = other RNA
tatctatttgctgtttctgatac

SEQ ID NO: 9596 - RNA, 23 nt, synthetic construct
  source 1..23: mol_type = other RNA
tatatctatttgctgtttctgat

SEQ ID NO: 9597 - RNA, 23 nt, synthetic construct
  source 1..23: mol_type = other RNA
taatatctatttgctgtttctga

SEQ ID NO: 9598 - RNA, 23 nt, synthetic construct
  source 1..23: mol_type = other RNA
tgaatatctatttgctgtttctg

SEQ ID NO: 9599 - RNA, 23 nt, synthetic construct
  source 1..23: mol_type = other RNA
taggaatatctatttgctgtttc

SEQ ID NO: 9600 - RNA, 23 nt, synthetic construct
  source 1..23: mol_type = other RNA
tagaggaatatctatttgctgtt

SEQ ID NO: 9601 - RNA, 23 nt, synthetic construct
  source 1..23: mol_type = other RNA
ttagaggaatatctatttgctgt

SEQ ID NO: 9602 - RNA, 23 nt, synthetic construct
  source 1..23: mol_type = other RNA
tggtagaggaatatctatttgct

SEQ ID NO: 9603 - RNA, 23 nt, synthetic construct
  source 1..23: mol_type = other RNA
ttgagcattcttctgtactcact

SEQ ID NO: 9604 - RNA, 23 nt, synthetic construct
  source 1..23: mol_type = other RNA
ttcatgagcattcttctgtactc

SEQ ID NO: 9605 - RNA, 23 nt, synthetic construct
  source 1..23: mol_type = other RNA
tatcatgagcattcttctgtact

SEQ ID NO: 9606 - RNA, 23 nt, synthetic construct
  source 1..23: mol_type = other RNA
ttatcatgagcattcttctgtac

SEQ ID NO: 9607 - RNA, 23 nt, synthetic construct
  source 1..23: mol_type = other RNA
taaactatcatgagcattcttct

SEQ ID NO: 9608 - RNA, 23 nt, synthetic construct
  source 1..23: mol_type = other RNA
taaaactatcatgagcattcttc

SEQ ID NO: 9609 - RNA, 23 nt, synthetic construct
  source 1..23: mol_type = other RNA
tgcaaaactatcatgagcattct

SEQ ID NO: 9610 - RNA, 23 nt, synthetic construct
  source 1..23: mol_type = other RNA
taaggcaaaactatcatgagcat

SEQ ID NO: 9611 - RNA, 23 nt, synthetic construct
  source 1..23: mol_type = other RNA
ttgaaggcaaaactatcatgagc

SEQ ID NO: 9612 - RNA, 23 nt, synthetic construct
  source 1..23: mol_type = other RNA
taatgaaggcaaaactatcatga

SEQ ID NO: 9613 - RNA, 23 nt, synthetic construct
  source 1..23: mol_type = other RNA
tgaatgaaggcaaaactatcatg

SEQ ID NO: 9614 - RNA, 23 nt, synthetic construct
  source 1..23: mol_type = other RNA
ttagaatgaaggcaaaactatca

SEQ ID NO: 9615 - RNA, 23 nt, synthetic construct
  source 1..23: mol_type = other RNA
ttattcattactctgtgtccaca

SEQ ID NO: 9616 - RNA, 23 nt, synthetic construct
  source 1..23: mol_type = other RNA
taaatattcattactctgtgtcc

SEQ ID NO: 9617 - RNA, 23 nt, synthetic construct
  source 1..23: mol_type = other RNA
tcccattaaatattcattactct

SEQ ID NO: 9618 - RNA, 23 nt, synthetic construct
  source 1..23: mol_type = other RNA
tggcatatttaatgtcccattaa

SEQ ID NO: 9619 - RNA, 23 nt, synthetic construct
  source 1..23: mol_type = other RNA
tgggcatatttaatgtcccatta

SEQ ID NO: 9620 - RNA, 23 nt, synthetic construct
  source 1..23: mol_type = other RNA
tagggcatatttaatgtcccatt

SEQ ID NO: 9621 - RNA, 23 nt, synthetic construct
  source 1..23: mol_type = other RNA
taagggcatatttaatgtcccat

SEQ ID NO: 9622 - RNA, 23 nt, synthetic construct
  source 1..23: mol_type = other RNA
ttgttaaatctcgtttaccaaag

SEQ ID NO: 9623 - RNA, 23 nt, synthetic construct
  source 1..23: mol_type = other RNA
tgaagggcatatttaatgtccca

SEQ ID NO: 9624 - RNA, 23 nt, synthetic construct
  source 1..23: mol_type = other RNA
ttgaagggcatatttaatgtccc

SEQ ID NO: 9625 - RNA, 23 nt, synthetic construct
  source 1..23: mol_type = other RNA
tttgaagggcatatttaatgtcc

SEQ ID NO: 9626 - RNA, 23 nt, synthetic construct
  source 1..23: mol_type = other RNA
ttttgaagggcatatttaatgtc

SEQ ID NO: 9627 - RNA, 23 nt, synthetic construct
  source 1..23: mol_type = other RNA
tatttgaagggcatatttaatgt

SEQ ID NO: 9628 - RNA, 23 nt, synthetic construct
  source 1..23: mol_type = other RNA
tgatttgaagggcatatttaatg

SEQ ID NO: 9629 - RNA, 23 nt, synthetic construct
  source 1..23: mol_type = other RNA
tagatttgaagggcatatttaat

SEQ ID NO: 9630 - RNA, 23 nt, synthetic construct
  source 1..23: mol_type = other RNA
taaattatagatttgaagggcat

SEQ ID NO: 9631 - RNA, 23 nt, synthetic construct
  source 1..23: mol_type = other RNA
taaaattatagatttgaagggca

SEQ ID NO: 9632 - RNA, 23 nt, synthetic construct
  source 1..23: mol_type = other RNA
tctcgtttaccaaagtaaaatta

SEQ ID NO: 9633 - RNA, 23 nt, synthetic construct
  source 1..23: mol_type = other RNA
ttctcgtttaccaaagtaaaatt

SEQ ID NO: 9634 - RNA, 23 nt, synthetic construct
  source 1..23: mol_type = other RNA
tatctcgtttaccaaagtaaaat

SEQ ID NO: 9635 - RNA, 23 nt, synthetic construct
  source 1..23: mol_type = other RNA
taatctcgtttaccaaagtaaaa

SEQ ID NO: 9636 - RNA, 23 nt, synthetic construct
  source 1..23: mol_type = other RNA
taaatctcgtttaccaaagtaaa

SEQ ID NO: 9637 - RNA, 23 nt, synthetic construct
  source 1..23: mol_type = other RNA
tttaaatctcgtttaccaaagta

SEQ ID NO: 9638 - RNA, 23 nt, synthetic construct
  source 1..23: mol_type = other RNA
tcatgttaaatctcgtttaccaa

SEQ ID NO: 9639 - RNA, 23 nt, synthetic construct
  source 1..23: mol_type = other RNA
taagacatcatgttaaatctcgt

SEQ ID NO: 9640 - RNA, 23 nt, synthetic construct
  source 1..23: mol_type = other RNA
taggaatggagtttgaaaaaaga

SEQ ID NO: 9641 - RNA, 23 nt, synthetic construct
  source 1..23: mol_type = other RNA
tgttttaggagcataaaagacat

SEQ ID NO: 9642 - RNA, 23 nt, synthetic construct
  source 1..23: mol_type = other RNA
tgaatggagtttgaaaaaagatg

SEQ ID NO: 9643 - RNA, 23 nt, synthetic construct
  source 1..23: mol_type = other RNA
tggaatggagtttgaaaaaagat

SEQ ID NO: 9644 - RNA, 23 nt, synthetic construct
  source 1..23: mol_type = other RNA
taaggaatggagtttgaaaaaag

SEQ ID NO: 9645 - RNA, 23 nt, synthetic construct
  source 1..23: mol_type = other RNA
ttaaggaatggagtttgaaaaaa

SEQ ID NO: 9646 - RNA, 23 nt, synthetic construct
  source 1..23: mol_type = other RNA
tctaaggaatggagtttgaaaaa

SEQ ID NO: 9647 - RNA, 23 nt, synthetic construct
  source 1..23: mol_type = other RNA
ttctaaggaatggagtttgaaaa

SEQ ID NO: 9648 - RNA, 23 nt, synthetic construct
  source 1..23: mol_type = other RNA
tttctaaggaatggagtttgaaa

SEQ ID NO: 9649 - RNA, 23 nt, synthetic construct
  source 1..23: mol_type = other RNA
tgttctaaggaatggagtttgaa

SEQ ID NO: 9650 - RNA, 23 nt, synthetic construct
  source 1..23: mol_type = other RNA
ttgttctaaggaatggagtttga

SEQ ID NO: 9651 - RNA, 23 nt, synthetic construct
  source 1..23: mol_type = other RNA
tatgttctaaggaatggagtttg

SEQ ID NO: 9652 - RNA, 23 nt, synthetic construct
  source 1..23: mol_type = other RNA
taatgttctaaggaatggagttt

SEQ ID NO: 9653 - RNA, 23 nt, synthetic construct
  source 1..23: mol_type = other RNA
tgaatgttctaaggaatggagtt

SEQ ID NO: 9654 - RNA, 23 nt, synthetic construct
  source 1..23: mol_type = other RNA
tagaatgttctaaggaatggagt

SEQ ID NO: 9655 - RNA, 23 nt, synthetic construct
  source 1..23: mol_type = other RNA
taagaatgttctaaggaatggag

SEQ ID NO: 9656 - RNA, 23 nt, synthetic construct
  source 1..23: mol_type = other RNA
tgaagaatgttctaaggaatgga

SEQ ID NO: 9657 - RNA, 23 nt, synthetic construct
  source 1..23: mol_type = other RNA
tagaagaatgttctaaggaatgg

SEQ ID NO: 9658 - RNA, 23 nt, synthetic construct
  source 1..23: mol_type = other RNA
ttagaagaatgttctaaggaatg

SEQ ID NO: 9659 - RNA, 23 nt, synthetic construct
  source 1..23: mol_type = other RNA
tgtagaagaatgttctaaggaat

SEQ ID NO: 9660 - RNA, 23 nt, synthetic construct
  source 1..23: mol_type = other RNA
tagtagaagaatgttctaaggaa

SEQ ID NO: 9661 - RNA, 23 nt, synthetic construct
  source 1..23: mol_type = other RNA
tcagtagaagaatgttctaagga

SEQ ID NO: 9662 - RNA, 23 nt, synthetic construct
  source 1..23: mol_type = other RNA
ttcagtagaagaatgttctaagg

SEQ ID NO: 9663 - RNA, 23 nt, synthetic construct
  source 1..23: mol_type = other RNA
tttggatcatctcagtagaagaa

SEQ ID NO: 9664 - RNA, 23 nt, synthetic construct
  source 1..23: mol_type = other RNA
ttatcactttataagcaagtacc

SEQ ID NO: 9665 - RNA, 23 nt, synthetic construct
  source 1..23: mol_type = other RNA
tctcagtagaagaatgttctaag

SEQ ID NO: 9666 - RNA, 23 nt, synthetic construct
  source 1..23: mol_type = other RNA
ttctcagtagaagaatgttctaa

SEQ ID NO: 9667 - RNA, 23 nt, synthetic construct
  source 1..23: mol_type = other RNA
tatctcagtagaagaatgttcta

SEQ ID NO: 9668 - RNA, 23 nt, synthetic construct
  source 1..23: mol_type = other RNA
tatcatctcagtagaagaatgtt

SEQ ID NO: 9669 - RNA, 23 nt, synthetic construct
  source 1..23: mol_type = other RNA
tgatcatctcagtagaagaatgt

SEQ ID NO: 9670 - RNA, 23 nt, synthetic construct
  source 1..23: mol_type = other RNA
tggatcatctcagtagaagaatg

SEQ ID NO: 9671 - RNA, 23 nt, synthetic construct
  source 1..23: mol_type = other RNA
ttggatcatctcagtagaagaat

SEQ ID NO: 9672 - RNA, 23 nt, synthetic construct
  source 1..23: mol_type = other RNA
tcttggatcatctcagtagaaga

SEQ ID NO: 9673 - RNA, 23 nt, synthetic construct
  source 1..23: mol_type = other RNA
ttcttggatcatctcagtagaag

SEQ ID NO: 9674 - RNA, 23 nt, synthetic construct
  source 1..23: mol_type = other RNA
tgtcttggatcatctcagtagaa

SEQ ID NO: 9675 - RNA, 23 nt, synthetic construct
  source 1..23: mol_type = other RNA
tggtcttggatcatctcagtaga

SEQ ID NO: 9676 - RNA, 23 nt, synthetic construct
  source 1..23: mol_type = other RNA
ttggtcttggatcatctcagtag

SEQ ID NO: 9677 - RNA, 23 nt, synthetic construct
  source 1..23: mol_type = other RNA
tttggtcttggatcatctcagta

SEQ ID NO: 9678 - RNA, 23 nt, synthetic construct
  source 1..23: mol_type = other RNA
taagaacacttttggtcttggat

SEQ ID NO: 9679 - RNA, 23 nt, synthetic construct
  source 1..23: mol_type = other RNA
taaagaacacttttggtcttgga

SEQ ID NO: 9680 - RNA, 23 nt, synthetic construct
  source 1..23: mol_type = other RNA
tcaaagaacacttttggtcttgg

SEQ ID NO: 9681 - RNA, 23 nt, synthetic construct
  source 1..23: mol_type = other RNA
tccaaagaacacttttggtcttg

SEQ ID NO: 9682 - RNA, 23 nt, synthetic construct
  source 1..23: mol_type = other RNA
taccaaagaacacttttggtctt

SEQ ID NO: 9683 - RNA, 23 nt, synthetic construct
  source 1..23: mol_type = other RNA
ttaccaaagaacacttttggtct

SEQ ID NO: 9684 - RNA, 23 nt, synthetic construct
  source 1..23: mol_type = other RNA
tgtaccaaagaacacttttggtc

SEQ ID NO: 9685 - RNA, 23 nt, synthetic construct
  source 1..23: mol_type = other RNA
tagtaccaaagaacacttttggt

SEQ ID NO: 9686 - RNA, 23 nt, synthetic construct
  source 1..23: mol_type = other RNA
taagtaccaaagaacacttttgg

SEQ ID NO: 9687 - RNA, 23 nt, synthetic construct
  source 1..23: mol_type = other RNA
tcaagtaccaaagaacacttttg

SEQ ID NO: 9688 - RNA, 23 nt, synthetic construct
  source 1..23: mol_type = other RNA
tgcaagtaccaaagaacactttt

SEQ ID NO: 9689 - RNA, 23 nt, synthetic construct
  source 1..23: mol_type = other RNA
tttataagcaagtaccaaagaac

SEQ ID NO: 9690 - RNA, 23 nt, synthetic construct
  source 1..23: mol_type = other RNA
ttttataagcaagtaccaaagaa

SEQ ID NO: 9691 - RNA, 23 nt, synthetic construct
  source 1..23: mol_type = other RNA
tactttataagcaagtaccaaag

SEQ ID NO: 9692 - RNA, 23 nt, synthetic construct
  source 1..23: mol_type = other RNA
tcactttataagcaagtaccaaa

SEQ ID NO: 9693 - RNA, 23 nt, synthetic construct
  source 1..23: mol_type = other RNA
ttactatcactttataagcaagt

SEQ ID NO: 9694 - RNA, 23 nt, synthetic construct
  source 1..23: mol_type = other RNA
ttacattatatgctaacatgtac

SEQ ID NO: 9695 - RNA, 23 nt, synthetic construct
  source 1..23: mol_type = other RNA
tatgtactatcactttataagca

SEQ ID NO: 9696 - RNA, 23 nt, synthetic construct
  source 1..23: mol_type = other RNA
tcatgtactatcactttataagc

SEQ ID NO: 9697 - RNA, 23 nt, synthetic construct
  source 1..23: mol_type = other RNA
tacatgtactatcactttataag

SEQ ID NO: 9698 - RNA, 23 nt, synthetic construct
  source 1..23: mol_type = other RNA
tctaacatgtactatcactttat

SEQ ID NO: 9699 - RNA, 23 nt, synthetic construct
  source 1..23: mol_type = other RNA
tgctaacatgtactatcacttta

SEQ ID NO: 9700 - RNA, 23 nt, synthetic construct
  source 1..23: mol_type = other RNA
ttgctaacatgtactatcacttt

SEQ ID NO: 9701 - RNA, 23 nt, synthetic construct
  source 1..23: mol_type = other RNA
tatgctaacatgtactatcactt

SEQ ID NO: 9702 - RNA, 23 nt, synthetic construct
  source 1..23: mol_type = other RNA
ttatgctaacatgtactatcact

SEQ ID NO: 9703 - RNA, 23 nt, synthetic construct
  source 1..23: mol_type = other RNA
tatatgctaacatgtactatcac

SEQ ID NO: 9704 - RNA, 23 nt, synthetic construct
  source 1..23: mol_type = other RNA
ttatatgctaacatgtactatca

SEQ ID NO: 9705 - RNA, 23 nt, synthetic construct
  source 1..23: mol_type = other RNA
tttatatgctaacatgtactatc

SEQ ID NO: 9706 - RNA, 23 nt, synthetic construct
  source 1..23: mol_type = other RNA
tcattatatgctaacatgtacta

SEQ ID NO: 9707 - RNA, 23 nt, synthetic construct
  source 1..23: mol_type = other RNA
tacattatatgctaacatgtact

SEQ ID NO: 9708 - RNA, 23 nt, synthetic construct
  source 1..23: mol_type = other RNA
tctcttcaaaatacattatatgc

SEQ ID NO: 9709 - RNA, 23 nt, synthetic construct
  source 1..23: mol_type = other RNA
ttttacttcactcttcaaaatac

SEQ ID NO: 9710 - RNA, 23 nt, synthetic construct
  source 1..23: mol_type = other RNA
tcatttacttcactcttcaaaat

SEQ ID NO: 9711 - RNA, 23 nt, synthetic construct
  source 1..23: mol_type = other RNA
tgcatttacttcactcttcaaaa

SEQ ID NO: 9712 - RNA, 23 nt, synthetic construct
  source 1..23: mol_type = other RNA
tagcatttacttcactcttcaaa

SEQ ID NO: 9713 - RNA, 23 nt, synthetic construct
  source 1..23: mol_type = other RNA
ttagcatttacttcactcttcaa

SEQ ID NO: 9714 - RNA, 23 nt, synthetic construct
  source 1..23: mol_type = other RNA
tatagcatttacttcactcttca

SEQ ID NO: 9715 - RNA, 23 nt, synthetic construct
  source 1..23: mol_type = other RNA
taatagcatttacttcactcttc

SEQ ID NO: 9716 - RNA, 23 nt, synthetic construct
  source 1..23: mol_type = other RNA
tcaatagcatttacttcactctt

SEQ ID NO: 9717 - RNA, 23 nt, synthetic construct
  source 1..23: mol_type = other RNA
ttcaatagcatttacttcactct

SEQ ID NO: 9718 - RNA, 23 nt, synthetic construct
  source 1..23: mol_type = other RNA
tatcaatagcatttacttcactc

SEQ ID NO: 9719 - RNA, 23 nt, synthetic construct
  source 1..23: mol_type = other RNA
ttatcaatagcatttacttcact

SEQ ID NO: 9720 - RNA, 23 nt, synthetic construct
  source 1..23: mol_type = other RNA
tttatcaatagcatttacttcac

SEQ ID NO: 9721 - RNA, 23 nt, synthetic construct
  source 1..23: mol_type = other RNA
tagtagcatttctttactgttat

SEQ ID NO: 9722 - RNA, 23 nt, synthetic construct
  source 1..23: mol_type = other RNA
tgcatttctttactgttattagt

SEQ ID NO: 9723 - RNA, 23 nt, synthetic construct
  source 1..23: mol_type = other RNA
tagcatttctttactgttattag

SEQ ID NO: 9724 - RNA, 23 nt, synthetic construct
  source 1..23: mol_type = other RNA
tgtagcatttctttactgttatt

SEQ ID NO: 9725 - RNA, 23 nt, synthetic construct
  source 1..23: mol_type = other RNA
taagtagcatttctttactgtta

SEQ ID NO: 9726 - RNA, 23 nt, synthetic construct
  source 1..23: mol_type = other RNA
tcaagtagcatttctttactgtt

SEQ ID NO: 9727 - RNA, 23 nt, synthetic construct
  source 1..23: mol_type = other RNA
ttcaagtagcatttctttactgt

SEQ ID NO: 9728 - RNA, 23 nt, synthetic construct
  source 1..23: mol_type = other RNA
tatcaagtagcatttctttactg

SEQ ID NO: 9729 - RNA, 23 nt, synthetic construct
  source 1..23: mol_type = other RNA
taatcaagtagcatttctttact

SEQ ID NO: 9730 - RNA, 23 nt, synthetic construct
  source 1..23: mol_type = other RNA
taaatcaagtagcatttctttac

SEQ ID NO: 9731 - RNA, 23 nt, synthetic construct
  source 1..23: mol_type = other RNA
tgtaatctgagcaatccagttta

SEQ ID NO: 9732 - RNA, 23 nt, synthetic construct
  source 1..23: mol_type = other RNA
tgatcaggtaatctgagcaatcc

SEQ ID NO: 9733 - RNA, 23 nt, synthetic construct
  source 1..23: mol_type = other RNA
tcaccacgatcaggtaatctgag

SEQ ID NO: 9734 - RNA, 23 nt, synthetic construct
  source 1..23: mol_type = other RNA
tccaccacgatcaggtaatctga

SEQ ID NO: 9735 - RNA, 23 nt, synthetic construct
  source 1..23: mol_type = other RNA
ttccaccacgatcaggtaatctg

SEQ ID NO: 9736 - RNA, 23 nt, synthetic construct
  source 1..23: mol_type = other RNA
tttccaccacgatcaggtaatct

SEQ ID NO: 9737 - RNA, 23 nt, synthetic construct
  source 1..23: mol_type = other RNA
tgttccaccacgatcaggtaatc

SEQ ID NO: 9738 - RNA, 23 nt, synthetic construct
  source 1..23: mol_type = other RNA
tggttccaccacgatcaggtaat

SEQ ID NO: 9739 - RNA, 23 nt, synthetic construct
  source 1..23: mol_type = other RNA
tgggttccaccacgatcaggtaa

SEQ ID NO: 9740 - RNA, 23 nt, synthetic construct
  source 1..23: mol_type = other RNA
tagggttccaccacgatcaggta

SEQ ID NO: 9741 - RNA, 23 nt, synthetic construct
  source 1..23: mol_type = other RNA
tctttgctttatagaacagttaa

SEQ ID NO: 9742 - RNA, 23 nt, synthetic construct
  source 1..23: mol_type = other RNA
tgaacagttaaatatgggatagt

SEQ ID NO: 9743 - RNA, 23 nt, synthetic construct
  source 1..23: mol_type = other RNA
tagaacagttaaatatgggatag

SEQ ID NO: 9744 - RNA, 23 nt, synthetic construct
  source 1..23: mol_type = other RNA
ttagaacagttaaatatgggata

SEQ ID NO: 9745 - RNA, 23 nt, synthetic construct
  source 1..23: mol_type = other RNA
tatagaacagttaaatatgggat

SEQ ID NO: 9746 - RNA, 23 nt, synthetic construct
  source 1..23: mol_type = other RNA
ttatagaacagttaaatatggga

SEQ ID NO: 9747 - RNA, 23 nt, synthetic construct
  source 1..23: mol_type = other RNA
tttatagaacagttaaatatggg

SEQ ID NO: 9748 - RNA, 23 nt, synthetic construct
  source 1..23: mol_type = other RNA
tgctttgctttatagaacagtta

SEQ ID NO: 9749 - RNA, 23 nt, synthetic construct
  source 1..23: mol_type = other RNA
ttgctttgctttatagaacagtt

SEQ ID NO: 9750 - RNA, 23 nt, synthetic construct
  source 1..23: mol_type = other RNA
tgtgctttgctttatagaacagt

SEQ ID NO: 9751 - RNA, 23 nt, synthetic construct
  source 1..23: mol_type = other RNA
ttgtgctttgctttatagaacag

SEQ ID NO: 9752 - RNA, 23 nt, synthetic construct
  source 1..23: mol_type = other RNA
tctgtgctttgctttatagaaca

SEQ ID NO: 9753 - RNA, 23 nt, synthetic construct
  source 1..23: mol_type = other RNA
tgctgtgctttgctttatagaac

SEQ ID NO: 9754 - RNA, 23 nt, synthetic construct
  source 1..23: mol_type = other RNA
tagctgtgctttgctttatagaa

SEQ ID NO: 9755 - RNA, 23 nt, synthetic construct
  source 1..23: mol_type = other RNA
taagctgtgctttgctttataga

SEQ ID NO: 9756 - RNA, 23 nt, synthetic construct
  source 1..23: mol_type = other RNA
tagaagtatatccttcagaacgc

SEQ ID NO: 9757 - RNA, 23 nt, synthetic construct
  source 1..23: mol_type = other RNA
ttactctatgagaaaatacagaa

SEQ ID NO: 9758 - RNA, 23 nt, synthetic construct
  source 1..23: mol_type = other RNA
tgaacgctattacccaagctgtg

SEQ ID NO: 9759 - RNA, 23 nt, synthetic construct
  source 1..23: mol_type = other RNA
tagaacgctattacccaagctgt

SEQ ID NO: 9760 - RNA, 23 nt, synthetic construct
  source 1..23: mol_type = other RNA
tcagaacgctattacccaagctg

SEQ ID NO: 9761 - RNA, 23 nt, synthetic construct
  source 1..23: mol_type = other RNA
ttcagaacgctattacccaagct

SEQ ID NO: 9762 - RNA, 23 nt, synthetic construct
  source 1..23: mol_type = other RNA
tttcagaacgctattacccaagc

SEQ ID NO: 9763 - RNA, 23 nt, synthetic construct
  source 1..23: mol_type = other RNA
tcttcagaacgctattacccaag

SEQ ID NO: 9764 - RNA, 23 nt, synthetic construct
  source 1..23: mol_type = other RNA
tccttcagaacgctattacccaa

SEQ ID NO: 9765 - RNA, 23 nt, synthetic construct
  source 1..23: mol_type = other RNA
ttccttcagaacgctattaccca

SEQ ID NO: 9766 - RNA, 23 nt, synthetic construct
  source 1..23: mol_type = other RNA
tatccttcagaacgctattaccc

SEQ ID NO: 9767 - RNA, 23 nt, synthetic construct
  source 1..23: mol_type = other RNA
ttatccttcagaacgctattacc

SEQ ID NO: 9768 - RNA, 23 nt, synthetic construct
  source 1..23: mol_type = other RNA
tatatccttcagaacgctattac

SEQ ID NO: 9769 - RNA, 23 nt, synthetic construct
  source 1..23: mol_type = other RNA
ttatatccttcagaacgctatta

SEQ ID NO: 9770 - RNA, 23 nt, synthetic construct
  source 1..23: mol_type = other RNA
tgtatatccttcagaacgctatt

SEQ ID NO: 9771 - RNA, 23 nt, synthetic construct
  source 1..23: mol_type = other RNA
tagtatatccttcagaacgctat

SEQ ID NO: 9772 - RNA, 23 nt, synthetic construct
  source 1..23: mol_type = other RNA
taagtatatccttcagaacgcta

SEQ ID NO: 9773 - RNA, 23 nt, synthetic construct
  source 1..23: mol_type = other RNA
tgaagtatatccttcagaacgct

SEQ ID NO: 9774 - RNA, 23 nt, synthetic construct
  source 1..23: mol_type = other RNA
tcagaagtatatccttcagaacg

SEQ ID NO: 9775 - RNA, 23 nt, synthetic construct
  source 1..23: mol_type = other RNA
tacagaagtatatccttcagaac

SEQ ID NO: 9776 - RNA, 23 nt, synthetic construct
  source 1..23: mol_type = other RNA
ttacagaagtatatccttcagaa

SEQ ID NO: 9777 - RNA, 23 nt, synthetic construct
  source 1..23: mol_type = other RNA
tatacagaagtatatccttcaga

SEQ ID NO: 9778 - RNA, 23 nt, synthetic construct
  source 1..23: mol_type = other RNA
taatacagaagtatatccttcag

SEQ ID NO: 9779 - RNA, 23 nt, synthetic construct
  source 1..23: mol_type = other RNA
taaatacagaagtatatccttca

SEQ ID NO: 9780 - RNA, 23 nt, synthetic construct
  source 1..23: mol_type = other RNA
taaaatacagaagtatatccttc

SEQ ID NO: 9781 - RNA, 23 nt, synthetic construct
  source 1..23: mol_type = other RNA
tgaaaatacagaagtatatcctt

SEQ ID NO: 9782 - RNA, 23 nt, synthetic construct
  source 1..23: mol_type = other RNA
tagaaaatacagaagtatatcct

SEQ ID NO: 9783 - RNA, 23 nt, synthetic construct
  source 1..23: mol_type = other RNA
tgagaaaatacagaagtatatcc

SEQ ID NO: 9784 - RNA, 23 nt, synthetic construct
  source 1..23: mol_type = other RNA
ttgagaaaatacagaagtatatc

SEQ ID NO: 9785 - RNA, 23 nt, synthetic construct
  source 1..23: mol_type = other RNA
tctatgagaaaatacagaagtat

SEQ ID NO: 9786 - RNA, 23 nt, synthetic construct
  source 1..23: mol_type = other RNA
ttctatgagaaaatacagaagta

SEQ ID NO: 9787 - RNA, 23 nt, synthetic construct
  source 1..23: mol_type = other RNA
tctctatgagaaaatacagaagt

SEQ ID NO: 9788 - RNA, 23 nt, synthetic construct
  source 1..23: mol_type = other RNA
tactctatgagaaaatacagaag

SEQ ID NO: 9789 - RNA, 23 nt, synthetic construct
  source 1..23: mol_type = other RNA
tactaaattgtactctatgagaa

SEQ ID NO: 9790 - RNA, 23 nt, synthetic construct
  source 1..23: mol_type = other RNA
tcactaaattgtactctatgaga

SEQ ID NO: 9791 - RNA, 23 nt, synthetic construct
  source 1..23: mol_type = other RNA
ttcactaaattgtactctatgag

SEQ ID NO: 9792 - RNA, 23 nt, synthetic construct
  source 1..23: mol_type = other RNA
tatcactaaattgtactctatga

SEQ ID NO: 9793 - RNA, 23 nt, synthetic construct
  source 1..23: mol_type = other RNA
taatcactaaattgtactctatg

SEQ ID NO: 9794 - RNA, 23 nt, synthetic construct
  source 1..23: mol_type = other RNA
tcataatcactaaattgtactct

SEQ ID NO: 9795 - RNA, 23 nt, synthetic construct
  source 1..23: mol_type = other RNA
tatagtgaaatgaagcataatca

SEQ ID NO: 9796 - RNA, 23 nt, synthetic construct
  source 1..23: mol_type = other RNA
tgcataatcactaaattgtactc

SEQ ID NO: 9797 - RNA, 23 nt, synthetic construct
  source 1..23: mol_type = other RNA
tagcataatcactaaattgtact

SEQ ID NO: 9798 - RNA, 23 nt, synthetic construct
  source 1..23: mol_type = other RNA
taagcataatcactaaattgtac

SEQ ID NO: 9799 - RNA, 23 nt, synthetic construct
  source 1..23: mol_type = other RNA
ttgaaatgaagcataatcactaa

SEQ ID NO: 9800 - RNA, 23 nt, synthetic construct
  source 1..23: mol_type = other RNA
tgtgaaatgaagcataatcacta

SEQ ID NO: 9801 - RNA, 23 nt, synthetic construct
  source 1..23: mol_type = other RNA
tagtgaaatgaagcataatcact

SEQ ID NO: 9802 - RNA, 23 nt, synthetic construct
  source 1..23: mol_type = other RNA
ttagtgaaatgaagcataatcac

SEQ ID NO: 9803 - RNA, 23 nt, synthetic construct
  source 1..23: mol_type = other RNA
tcatagtgaaatgaagcataatc

SEQ ID NO: 9804 - RNA, 23 nt, synthetic construct
  source 1..23: mol_type = other RNA
tccatagtgaaatgaagcataat

SEQ ID NO: 9805 - RNA, 23 nt, synthetic construct
  source 1..23: mol_type = other RNA
ttccatagtgaaatgaagcataa

SEQ ID NO: 9806 - RNA, 23 nt, synthetic construct
  source 1..23: mol_type = other RNA
tttccatagtgaaatgaagcata

SEQ ID NO: 9807 - RNA, 23 nt, synthetic construct
  source 1..23: mol_type = other RNA
ttttccatagtgaaatgaagcat

SEQ ID NO: 9808 - RNA, 23 nt, synthetic construct
  source 1..23: mol_type = other RNA
tatttccatagtgaaatgaagca

SEQ ID NO: 9809 - RNA, 23 nt, synthetic construct
  source 1..23: mol_type = other RNA
ttatttccatagtgaaatgaagc

SEQ ID NO: 9810 - RNA, 23 nt, synthetic construct
  source 1..23: mol_type = other RNA
tatatttccatagtgaaatgaag

SEQ ID NO: 9811 - RNA, 23 nt, synthetic construct
  source 1..23: mol_type = other RNA
taacatatttccatagtgaaatg

SEQ ID NO: 9812 - RNA, 23 nt, synthetic construct
  source 1..23: mol_type = other RNA
tcagtaacatatttccatagtga

SEQ ID NO: 9813 - RNA, 23 nt, synthetic construct
  source 1..23: mol_type = other RNA
ttcagtaacatatttccatagtg

SEQ ID NO: 9814 - RNA, 23 nt, synthetic construct
  source 1..23: mol_type = other RNA
tttcagtaacatatttccatagt

SEQ ID NO: 9815 - RNA, 23 nt, synthetic construct
  source 1..23: mol_type = other RNA
tattcagtaacatatttccatag

SEQ ID NO: 9816 - RNA, 23 nt, synthetic construct
  source 1..23: mol_type = other RNA
tacgcaaactccatagctgtcag

SEQ ID NO: 9817 - RNA, 23 nt, synthetic construct
  source 1..23: mol_type = other RNA
tcaaactccatagctgtcagttt

SEQ ID NO: 9818 - RNA, 23 nt, synthetic construct
  source 1..23: mol_type = other RNA
tgcaaactccatagctgtcagtt

SEQ ID NO: 9819 - RNA, 23 nt, synthetic construct
  source 1..23: mol_type = other RNA
tcgcaaactccatagctgtcagt

SEQ ID NO: 9820 - RNA, 23 nt, synthetic construct
  source 1..23: mol_type = other RNA
tcacgcaaactccatagctgtca

SEQ ID NO: 9821 - RNA, 23 nt, synthetic construct
  source 1..23: mol_type = other RNA
tacacgcaaactccatagctgtc

SEQ ID NO: 9822 - RNA, 23 nt, synthetic construct
  source 1..23: mol_type = other RNA
ttacacgcaaactccatagctgt

SEQ ID NO: 9823 - RNA, 23 nt, synthetic construct
  source 1..23: mol_type = other RNA
tgtacacgcaaactccatagctg

SEQ ID NO: 9824 - RNA, 23 nt, synthetic construct
  source 1..23: mol_type = other RNA
tagtacacgcaaactccatagct

SEQ ID NO: 9825 - RNA, 23 nt, synthetic construct
  source 1..23: mol_type = other RNA
taagtacacgcaaactccatagc

SEQ ID NO: 9826 - RNA, 23 nt, synthetic construct
  source 1..23: mol_type = other RNA
tgaagtacacgcaaactccatag

SEQ ID NO: 9827 - RNA, 23 nt, synthetic construct
  source 1..23: mol_type = other RNA
ttggatgagagcattaacgagta

SEQ ID NO: 9828 - RNA, 23 nt, synthetic construct
  source 1..23: mol_type = other RNA
tagtatggaagtacacgcaaact

SEQ ID NO: 9829 - RNA, 23 nt, synthetic construct
  source 1..23: mol_type = other RNA
tcgagtatggaagtacacgcaaa

SEQ ID NO: 9830 - RNA, 23 nt, synthetic construct
  source 1..23: mol_type = other RNA
tacgagtatggaagtacacgcaa

SEQ ID NO: 9831 - RNA, 23 nt, synthetic construct
  source 1..23: mol_type = other RNA
taacgagtatggaagtacacgca

SEQ ID NO: 9832 - RNA, 23 nt, synthetic construct
  source 1..23: mol_type = other RNA
ttaacgagtatggaagtacacgc

SEQ ID NO: 9833 - RNA, 23 nt, synthetic construct
  source 1..23: mol_type = other RNA
tttaacgagtatggaagtacacg

SEQ ID NO: 9834 - RNA, 23 nt, synthetic construct
  source 1..23: mol_type = other RNA
tattaacgagtatggaagtacac

SEQ ID NO: 9835 - RNA, 23 nt, synthetic construct
  source 1..23: mol_type = other RNA
tcattaacgagtatggaagtaca

SEQ ID NO: 9836 - RNA, 23 nt, synthetic construct
  source 1..23: mol_type = other RNA
tgcattaacgagtatggaagtac

SEQ ID NO: 9837 - RNA, 23 nt, synthetic construct
  source 1..23: mol_type = other RNA
tagcattaacgagtatggaagta

SEQ ID NO: 9838 - RNA, 23 nt, synthetic construct
  source 1..23: mol_type = other RNA
tgagcattaacgagtatggaagt

SEQ ID NO: 9839 - RNA, 23 nt, synthetic construct
  source 1..23: mol_type = other RNA
tagagcattaacgagtatggaag

SEQ ID NO: 9840 - RNA, 23 nt, synthetic construct
  source 1..23: mol_type = other RNA
tgagagcattaacgagtatggaa

SEQ ID NO: 9841 - RNA, 23 nt, synthetic construct
  source 1..23: mol_type = other RNA
ttgagagcattaacgagtatgga

SEQ ID NO: 9842 - RNA, 23 nt, synthetic construct
  source 1..23: mol_type = other RNA
tatgagagcattaacgagtatgg

SEQ ID NO: 9843 - RNA, 23 nt, synthetic construct
  source 1..23: mol_type = other RNA
tgtggatgagagcattaacgagt

SEQ ID NO: 9844 - RNA, 23 nt, synthetic construct
  source 1..23: mol_type = other RNA
tagtggatgagagcattaacgag

SEQ ID NO: 9845 - RNA, 23 nt, synthetic construct
  source 1..23: mol_type = other RNA
taagtggatgagagcattaacga

SEQ ID NO: 9846 - RNA, 23 nt, synthetic construct
  source 1..23: mol_type = other RNA
ttaagtggatgagagcattaacg

SEQ ID NO: 9847 - RNA, 23 nt, synthetic construct
  source 1..23: mol_type = other RNA
tataagtggatgagagcattaac

SEQ ID NO: 9848 - RNA, 23 nt, synthetic construct
  source 1..23: mol_type = other RNA
taataagtggatgagagcattaa

SEQ ID NO: 9849 - RNA, 23 nt, synthetic construct
  source 1..23: mol_type = other RNA
ttaataagtggatgagagcatta

SEQ ID NO: 9850 - RNA, 23 nt, synthetic construct
  source 1..23: mol_type = other RNA
tttaataagtggatgagagcatt

SEQ ID NO: 9851 - RNA, 23 nt, synthetic construct
  source 1..23: mol_type = other RNA
ttttaataagtggatgagagcat

SEQ ID NO: 9852 - RNA, 23 nt, synthetic construct
  source 1..23: mol_type = other RNA
tatttaataagtggatgagagca

SEQ ID NO: 9853 - RNA, 23 nt, synthetic construct
  source 1..23: mol_type = other RNA
ttatttaataagtggatgagagc

SEQ ID NO: 9854 - RNA, 23 nt, synthetic construct
  source 1..23: mol_type = other RNA
tttatttaataagtggatgagag

SEQ ID NO: 9855 - RNA, 23 nt, synthetic construct
  source 1..23: mol_type = other RNA
tggtgctctatgattatttaata

SEQ ID NO: 9856 - RNA, 23 nt, synthetic construct
  source 1..23: mol_type = other RNA
tgggtgctctatgattatttaat

SEQ ID NO: 9857 - RNA, 23 nt, synthetic construct
  source 1..23: mol_type = other RNA
ttgggtgctctatgattatttaa

SEQ ID NO: 9858 - RNA, 23 nt, synthetic construct
  source 1..23: mol_type = other RNA
tatgggtgctctatgattattta

SEQ ID NO: 9859 - RNA, 23 nt, synthetic construct
  source 1..23: mol_type = other RNA
ttatgggtgctctatgattattt

SEQ ID NO: 9860 - RNA, 23 nt, synthetic construct
  source 1..23: mol_type = other RNA
tatatgggtgctctatgattatt

SEQ ID NO: 9861 - RNA, 23 nt, synthetic construct
  source 1..23: mol_type = other RNA
tcaagcaagatatgggtgctcta

SEQ ID NO: 9862 - RNA, 23 nt, synthetic construct
  source 1..23: mol_type = other RNA
ttattgtggcaagcaagatatgg

SEQ ID NO: 9863 - RNA, 23 nt, synthetic construct
  source 1..23: mol_type = other RNA
ttccctgagggcaggacctatct

SEQ ID NO: 9864 - RNA, 23 nt, synthetic construct
  source 1..23: mol_type = other RNA
tatccctgagggcaggacctatc

SEQ ID NO: 9865 - RNA, 23 nt, synthetic construct
  source 1..23: mol_type = other RNA
taatccctgagggcaggacctat

SEQ ID NO: 9866 - RNA, 23 nt, synthetic construct
  source 1..23: mol_type = other RNA
taaatccctgagggcaggaccta

SEQ ID NO: 9867 - RNA, 23 nt, synthetic construct
  source 1..23: mol_type = other RNA
taaaatccctgagggcaggacct

SEQ ID NO: 9868 - RNA, 23 nt, synthetic construct
  source 1..23: mol_type = other RNA
ttaaaatccctgagggcaggacc

SEQ ID NO: 9869 - RNA, 23 nt, synthetic construct
  source 1..23: mol_type = other RNA
tttaaaatccctgagggcaggac

SEQ ID NO: 9870 - RNA, 23 nt, synthetic construct
  source 1..23: mol_type = other RNA
ttttaaaatccctgagggcagga

SEQ ID NO: 9871 - RNA, 23 nt, synthetic construct
  source 1..23: mol_type = other RNA
tctttaaaatccctgagggcagg

SEQ ID NO: 9872 - RNA, 23 nt, synthetic construct
  source 1..23: mol_type = other RNA
tactttaaaatccctgagggcag

SEQ ID NO: 9873 - RNA, 23 nt, synthetic construct
  source 1..23: mol_type = other RNA
tgactttaaaatccctgagggca

SEQ ID NO: 9874 - RNA, 23 nt, synthetic construct
  source 1..23: mol_type = other RNA
taattagactttaaaatccctga

SEQ ID NO: 9875 - RNA, 23 nt, synthetic construct
  source 1..23: mol_type = other RNA
taaattagactttaaaatccctg

SEQ ID NO: 9876 - RNA, 23 nt, synthetic construct
  source 1..23: mol_type = other RNA
tcttcgtattttatctgtcaatt

SEQ ID NO: 9877 - RNA, 23 nt, synthetic construct
  source 1..23: mol_type = other RNA
ttctgtcaatttaatctcttccc

SEQ ID NO: 9878 - RNA, 23 nt, synthetic construct
  source 1..23: mol_type = other RNA
tatctgtcaatttaatctcttcc

SEQ ID NO: 9879 - RNA, 23 nt, synthetic construct
  source 1..23: mol_type = other RNA
ttatctgtcaatttaatctcttc

SEQ ID NO: 9880 - RNA, 23 nt, synthetic construct
  source 1..23: mol_type = other RNA
tacttcgtattttatctgtcaat

SEQ ID NO: 9881 - RNA, 23 nt, synthetic construct
  source 1..23: mol_type = other RNA
tcacttcgtattttatctgtcaa

SEQ ID NO: 9882 - RNA, 23 nt, synthetic construct
  source 1..23: mol_type = other RNA
tccacttcgtattttatctgtca

SEQ ID NO: 9883 - RNA, 23 nt, synthetic construct
  source 1..23: mol_type = other RNA
taactcaagacatcccacttcgt

SEQ ID NO: 9884 - RNA, 23 nt, synthetic construct
  source 1..23: mol_type = other RNA
tagaactcaagacatcccacttc

SEQ ID NO: 9885 - RNA, 23 nt, synthetic construct
  source 1..23: mol_type = other RNA
tcatgcagaactcaagacatccc

SEQ ID NO: 9886 - RNA, 23 nt, synthetic construct
  source 1..23: mol_type = other RNA
tacctatcctagaaacccactgt

SEQ ID NO: 9887 - RNA, 23 nt, synthetic construct
  source 1..23: mol_type = other RNA
tgacctatcctagaaacccactg

SEQ ID NO: 9888 - RNA, 23 nt, synthetic construct
  source 1..23: mol_type = other RNA
tagacctatcctagaaacccact

SEQ ID NO: 9889 - RNA, 23 nt, synthetic construct
  source 1..23: mol_type = other RNA
tcagacctatcctagaaacccac

SEQ ID NO: 9890 - RNA, 23 nt, synthetic construct
  source 1..23: mol_type = other RNA
ttcagacctatcctagaaaccca

SEQ ID NO: 9891 - RNA, 23 nt, synthetic construct
  source 1..23: mol_type = other RNA
tttcagacctatcctagaaaccc

SEQ ID NO: 9892 - RNA, 23 nt, synthetic construct
  source 1..23: mol_type = other RNA
ttttcagacctatcctagaaacc

SEQ ID NO: 9893 - RNA, 23 nt, synthetic construct
  source 1..23: mol_type = other RNA
tttttcagacctatcctagaaac

SEQ ID NO: 9894 - RNA, 23 nt, synthetic construct
  source 1..23: mol_type = other RNA
tattttcagacctatcctagaaa

SEQ ID NO: 9895 - RNA, 23 nt, synthetic construct
  source 1..23: mol_type = other RNA
taattttcagacctatcctagaa

SEQ ID NO: 9896 - RNA, 23 nt, synthetic construct
  source 1..23: mol_type = other RNA
tcaattttcagacctatcctaga

SEQ ID NO: 9897 - RNA, 23 nt, synthetic construct
  source 1..23: mol_type = other RNA
tcaaatgaaagcaattttcagac

SEQ ID NO: 9898 - RNA, 23 nt, synthetic construct
  source 1..23: mol_type = other RNA
tgtgttgcaaatgaaagcaattt

SEQ ID NO: 9899 - RNA, 23 nt, synthetic construct
  source 1..23: mol_type = other RNA
ttgtgttgcaaatgaaagcaatt

SEQ ID NO: 9900 - RNA, 23 nt, synthetic construct
  source 1..23: mol_type = other RNA
tatgtgttgcaaatgaaagcaat

SEQ ID NO: 9901 - RNA, 23 nt, synthetic construct
  source 1..23: mol_type = other RNA
taatgtgttgcaaatgaaagcaa

SEQ ID NO: 9902 - RNA, 23 nt, synthetic construct
  source 1..23: mol_type = other RNA
taaatgtgttgcaaatgaaagca

SEQ ID NO: 9903 - RNA, 23 nt, synthetic construct
  source 1..23: mol_type = other RNA
tgatgatatatttagattgtctg

SEQ ID NO: 9904 - RNA, 23 nt, synthetic construct
  source 1..23: mol_type = other RNA
ttccaaataaagctactttctaa

SEQ ID NO: 9905 - RNA, 23 nt, synthetic construct
  source 1..23: mol_type = other RNA
tatatccaaataaagctactttc

SEQ ID NO: 9906 - RNA, 23 nt, synthetic construct
  source 1..23: mol_type = other RNA
tctgatgatatatttagattgtc

SEQ ID NO: 9907 - RNA, 23 nt, synthetic construct
  source 1..23: mol_type = other RNA
tatcacttcacataggcactttt

SEQ ID NO: 9908 - RNA, 23 nt, synthetic construct
  source 1..23: mol_type = other RNA
tgcacttttaaaaactgatgata

SEQ ID NO: 9909 - RNA, 23 nt, synthetic construct
  source 1..23: mol_type = other RNA
tggcacttttaaaaactgatgat

SEQ ID NO: 9910 - RNA, 23 nt, synthetic construct
  source 1..23: mol_type = other RNA
taggcacttttaaaaactgatga

SEQ ID NO: 9911 - RNA, 23 nt, synthetic construct
  source 1..23: mol_type = other RNA
ttaggcacttttaaaaactgatg

SEQ ID NO: 9912 - RNA, 23 nt, synthetic construct
  source 1..23: mol_type = other RNA
tataggcacttttaaaaactgat

SEQ ID NO: 9913 - RNA, 23 nt, synthetic construct
  source 1..23: mol_type = other RNA
tcataggcacttttaaaaactga

SEQ ID NO: 9914 - RNA, 23 nt, synthetic construct
  source 1..23: mol_type = other RNA
tacataggcacttttaaaaactg

SEQ ID NO: 9915 - RNA, 23 nt, synthetic construct
  source 1..23: mol_type = other RNA
tcacataggcacttttaaaaact

SEQ ID NO: 9916 - RNA, 23 nt, synthetic construct
  source 1..23: mol_type = other RNA
taatcacttcacataggcacttt

SEQ ID NO: 9917 - RNA, 23 nt, synthetic construct
  source 1..23: mol_type = other RNA
taaatcacttcacataggcactt

SEQ ID NO: 9918 - RNA, 23 nt, synthetic construct
  source 1..23: mol_type = other RNA
taaaatcacttcacataggcact

SEQ ID NO: 9919 - RNA, 23 nt, synthetic construct
  source 1..23: mol_type = other RNA
taaaaatcacttcacataggcac

SEQ ID NO: 9920 - RNA, 23 nt, synthetic construct
  source 1..23: mol_type = other RNA
ttaaaaatcacttcacataggca

SEQ ID NO: 9921 - RNA, 23 nt, synthetic construct
  source 1..23: mol_type = other RNA
tttaaaaatcacttcacataggc

SEQ ID NO: 9922 - RNA, 23 nt, synthetic construct
  source 1..23: mol_type = other RNA
ttttaaaaatcacttcacatagg

SEQ ID NO: 9923 - RNA, 23 nt, synthetic construct
  source 1..23: mol_type = other RNA
tctctttttaaaaatcacttcac

SEQ ID NO: 9924 - RNA, 23 nt, synthetic construct
  source 1..23: mol_type = other RNA
tgctctttttaaaaatcacttca

SEQ ID NO: 9925 - RNA, 23 nt, synthetic construct
  source 1..23: mol_type = other RNA
ttaggctctttttaaaaatcact

SEQ ID NO: 9926 - RNA, 23 nt, synthetic construct
  source 1..23: mol_type = other RNA
tataggctctttttaaaaatcac

SEQ ID NO: 9927 - RNA, 23 nt, synthetic construct
  source 1..23: mol_type = other RNA
tcataggctctttttaaaaatca

SEQ ID NO: 9928 - RNA, 23 nt, synthetic construct
  source 1..23: mol_type = other RNA
tacataggctctttttaaaaatc

SEQ ID NO: 9929 - RNA, 23 nt, synthetic construct
  source 1..23: mol_type = other RNA
tcacataggctctttttaaaaat

SEQ ID NO: 9930 - RNA, 23 nt, synthetic construct
  source 1..23: mol_type = other RNA
ttcacataggctctttttaaaaa

SEQ ID NO: 9931 - RNA, 23 nt, synthetic construct
  source 1..23: mol_type = other RNA
tttcacataggctctttttaaaa

SEQ ID NO: 9932 - RNA, 23 nt, synthetic construct
  source 1..23: mol_type = other RNA
tcttcacataggctctttttaaa

SEQ ID NO: 9933 - RNA, 23 nt, synthetic construct
  source 1..23: mol_type = other RNA
tccttcacataggctctttttaa

SEQ ID NO: 9934 - RNA, 23 nt, synthetic construct
  source 1..23: mol_type = other RNA
tacaagaacaagcaagattaccc

SEQ ID NO: 9935 - RNA, 23 nt, synthetic construct
  source 1..23: mol_type = other RNA
taacaagaacaagcaagattacc

SEQ ID NO: 9936 - RNA, 23 nt, synthetic construct
  source 1..23: mol_type = other RNA
ttaacaagaacaagcaagattac

SEQ ID NO: 9937 - RNA, 23 nt, synthetic construct
  source 1..23: mol_type = other RNA
tgtaacaagaacaagcaagatta

SEQ ID NO: 9938 - RNA, 23 nt, synthetic construct
  source 1..23: mol_type = other RNA
tagtaacaagaacaagcaagatt

SEQ ID NO: 9939 - RNA, 23 nt, synthetic construct
  source 1..23: mol_type = other RNA
ttagtaacaagaacaagcaagat

SEQ ID NO: 9940 - RNA, 23 nt, synthetic construct
  source 1..23: mol_type = other RNA
tttagtaacaagaacaagcaaga

SEQ ID NO: 9941 - RNA, 23 nt, synthetic construct
  source 1..23: mol_type = other RNA
tattagtaacaagaacaagcaag

SEQ ID NO: 9942 - RNA, 23 nt, synthetic construct
  source 1..23: mol_type = other RNA
taattagtaacaagaacaagcaa

SEQ ID NO: 9943 - RNA, 23 nt, synthetic construct
  source 1..23: mol_type = other RNA
taaattagtaacaagaacaagca

SEQ ID NO: 9944 - RNA, 23 nt, synthetic construct
  source 1..23: mol_type = other RNA
tgaaattagtaacaagaacaagc

SEQ ID NO: 9945 - RNA, 23 nt, synthetic construct
  source 1..23: mol_type = other RNA
tttcgttcttatatatgcagaaa

SEQ ID NO: 9946 - RNA, 23 nt, synthetic construct
  source 1..23: mol_type = other RNA
taaaacaggaaatatcattcttg

SEQ ID NO: 9947 - RNA, 23 nt, synthetic construct
  source 1..23: mol_type = other RNA
ttttatttgaggcacgtacaacc

SEQ ID NO: 9948 - RNA, 23 nt, synthetic construct
  source 1..23: mol_type = other RNA
tattcttgtttatttgaggcacg

SEQ ID NO: 9949 - RNA, 23 nt, synthetic construct
  source 1..23: mol_type = other RNA
tcattcttgtttatttgaggcac

SEQ ID NO: 9950 - RNA, 23 nt, synthetic construct
  source 1..23: mol_type = other RNA
ttcattcttgtttatttgaggca

SEQ ID NO: 9951 - RNA, 23 nt, synthetic construct
  source 1..23: mol_type = other RNA
tatcattcttgtttatttgaggc

SEQ ID NO: 9952 - RNA, 23 nt, synthetic construct
  source 1..23: mol_type = other RNA
ttatcattcttgtttatttgagg

SEQ ID NO: 9953 - RNA, 23 nt, synthetic construct
  source 1..23: mol_type = other RNA
tcaggaaatatcattcttgttta

SEQ ID NO: 9954 - RNA, 23 nt, synthetic construct
  source 1..23: mol_type = other RNA
tacaggaaatatcattcttgttt

SEQ ID NO: 9955 - RNA, 23 nt, synthetic construct
  source 1..23: mol_type = other RNA
taacaggaaatatcattcttgtt

SEQ ID NO: 9956 - RNA, 23 nt, synthetic construct
  source 1..23: mol_type = other RNA
taaacaggaaatatcattcttgt

SEQ ID NO: 9957 - RNA, 23 nt, synthetic construct
  source 1..23: mol_type = other RNA
taataagcatatttacccaacat

SEQ ID NO: 9958 - RNA, 23 nt, synthetic construct
  source 1..23: mol_type = other RNA
tcatatttacccaacataagtaa

SEQ ID NO: 9959 - RNA, 23 nt, synthetic construct
  source 1..23: mol_type = other RNA
tgcatatttacccaacataagta

SEQ ID NO: 9960 - RNA, 23 nt, synthetic construct
  source 1..23: mol_type = other RNA
tagcatatttacccaacataagt

SEQ ID NO: 9961 - RNA, 23 nt, synthetic construct
  source 1..23: mol_type = other RNA
taagcatatttacccaacataag

SEQ ID NO: 9962 - RNA, 23 nt, synthetic construct
  source 1..23: mol_type = other RNA
ttaagcatatttacccaacataa

SEQ ID NO: 9963 - RNA, 23 nt, synthetic construct
  source 1..23: mol_type = other RNA
tataagcatatttacccaacata

SEQ ID NO: 9964 - RNA, 23 nt, synthetic construct
  source 1..23: mol_type = other RNA
tcagagtgaaagttgaaccaata

SEQ ID NO: 9965 - RNA, 23 nt, synthetic construct
  source 1..23: mol_type = other RNA
tatttcttcagagtgaaagttga

SEQ ID NO: 9966 - RNA, 23 nt, synthetic construct
  source 1..23: mol_type = other RNA
tacatacggatttcttcagagtg

SEQ ID NO: 9967 - RNA, 23 nt, synthetic construct
  source 1..23: mol_type = other RNA
ttaacatacggatttcttcagag

SEQ ID NO: 9968 - RNA, 23 nt, synthetic construct
  source 1..23: mol_type = other RNA
tgagtcatagttaaacaacacaa

SEQ ID NO: 9969 - RNA, 23 nt, synthetic construct
  source 1..23: mol_type = other RNA
taatataagactactcagttagg

SEQ ID NO: 9970 - RNA, 23 nt, synthetic construct
  source 1..23: mol_type = other RNA
tgactactcagttaggagtcata

SEQ ID NO: 9971 - RNA, 23 nt, synthetic construct
  source 1..23: mol_type = other RNA
tagactactcagttaggagtcat

SEQ ID NO: 9972 - RNA, 23 nt, synthetic construct
  source 1..23: mol_type = other RNA
taagactactcagttaggagtca

SEQ ID NO: 9973 - RNA, 23 nt, synthetic construct
  source 1..23: mol_type = other RNA
ttaagactactcagttaggagtc

SEQ ID NO: 9974 - RNA, 23 nt, synthetic construct
  source 1..23: mol_type = other RNA
tataagactactcagttaggagt

SEQ ID NO: 9975 - RNA, 23 nt, synthetic construct
  source 1..23: mol_type = other RNA
ttataagactactcagttaggag

SEQ ID NO: 9976 - RNA, 23 nt, synthetic construct
  source 1..23: mol_type = other RNA
tatataagactactcagttagga

SEQ ID NO: 9977 - RNA, 23 nt, synthetic construct
  source 1..23: mol_type = other RNA
taaatataagactactcagttag

SEQ ID NO: 9978 - RNA, 23 nt, synthetic construct
  source 1..23: mol_type = other RNA
tgaaatataagactactcagtta

SEQ ID NO: 9979 - RNA, 23 nt, synthetic construct
  source 1..23: mol_type = other RNA
ttgaaatataagactactcagtt

SEQ ID NO: 9980 - RNA, 23 nt, synthetic construct
  source 1..23: mol_type = other RNA
tttgaaatataagactactcagt

SEQ ID NO: 9981 - RNA, 23 nt, synthetic construct
  source 1..23: mol_type = other RNA
tattgaaatataagactactcag

SEQ ID NO: 9982 - RNA, 23 nt, synthetic construct
  source 1..23: mol_type = other RNA
ttaatcctgttaagagtaaagga

SEQ ID NO: 9983 - RNA, 23 nt, synthetic construct
  source 1..23: mol_type = other RNA
ttcctgttaagagtaaaggaaat

SEQ ID NO: 9984 - RNA, 23 nt, synthetic construct
  source 1..23: mol_type = other RNA
tatcctgttaagagtaaaggaaa

SEQ ID NO: 9985 - RNA, 23 nt, synthetic construct
  source 1..23: mol_type = other RNA
taatcctgttaagagtaaaggaa

SEQ ID NO: 9986 - RNA, 23 nt, synthetic construct
  source 1..23: mol_type = other RNA
tataatcctgttaagagtaaagg

SEQ ID NO: 9987 - RNA, 23 nt, synthetic construct
  source 1..23: mol_type = other RNA
ttataatcctgttaagagtaaag

SEQ ID NO: 9988 - RNA, 23 nt, synthetic construct
  source 1..23: mol_type = other RNA
tctatatataatcctgttaagag

SEQ ID NO: 9989 - RNA, 23 nt, synthetic construct
  source 1..23: mol_type = other RNA
tcatgttctatatataatcctgt

SEQ ID NO: 9990 - RNA, 23 nt, synthetic construct
  source 1..23: mol_type = other RNA
ttatttttgtaagtgagcatgtt

SEQ ID NO: 9991 - RNA, 23 nt, synthetic construct
  source 1..23: mol_type = other RNA
tatcatcctatttttgtaagtga

SEQ ID NO: 9992 - RNA, 23 nt, synthetic construct
  source 1..23: mol_type = other RNA
tatacaagaagcctgccttatgc

SEQ ID NO: 9993 - RNA, 23 nt, synthetic construct
  source 1..23: mol_type = other RNA
taagtatatacaagaagcctgcc

SEQ ID NO: 9994 - RNA, 23 nt, synthetic construct
  source 1..23: mol_type = other RNA
ttttgacagcataagtatataca

SEQ ID NO: 9995 - RNA, 23 nt, synthetic construct
  source 1..23: mol_type = other RNA
tatttgacagcataagtatatac

SEQ ID NO: 9996 - RNA, 23 nt, synthetic construct
  source 1..23: mol_type = other RNA
tcatttgacagcataagtatata

SEQ ID NO: 9997 - RNA, 23 nt, synthetic construct
  source 1..23: mol_type = other RNA
tacatttgacagcataagtatat

SEQ ID NO: 9998 - RNA, 23 nt, synthetic construct
  source 1..23: mol_type = other RNA
taacatttgacagcataagtata

SEQ ID NO: 9999 - RNA, 23 nt, synthetic construct
  source 1..23: mol_type = other RNA
ttaacatttgacagcataagtat

SEQ ID NO: 10000 - RNA, 23 nt, synthetic construct
  source 1..23: mol_type = other RNA
tataacatttgacagcataagta

SEQ ID NO: 10001 - RNA, 23 nt, synthetic construct
  source 1..23: mol_type = other RNA
tacaatataacatttgacagcat

SEQ ID NO: 10002 - RNA, 23 nt, synthetic construct
  source 1..23: mol_type = other RNA
ttataacatttgacagcataagt

SEQ ID NO: 10003 - RNA, 23 nt, synthetic construct
  source 1..23: mol_type = other RNA
tatataacatttgacagcataag

SEQ ID NO: 10004 - RNA, 23 nt, synthetic construct
  source 1..23: mol_type = other RNA
tcaatataacatttgacagcata

SEQ ID NO: 10005 - RNA, 23 nt, synthetic construct
  source 1..23: mol_type = other RNA
taacaatataacatttgacagca

SEQ ID NO: 10006 - RNA, 23 nt, synthetic construct
  source 1..23: mol_type = other RNA
taaacaatataacatttgacagc

SEQ ID NO: 10007 - RNA, 23 nt, synthetic construct
  source 1..23: mol_type = other RNA
tacactgatactctgaacataac

SEQ ID NO: 10008 - RNA, 23 nt, synthetic construct
  source 1..23: mol_type = other RNA
taacactgatactctgaacataa

SEQ ID NO: 10009 - RNA, 23 nt, synthetic construct
  source 1..23: mol_type = other RNA
tgaacactgatactctgaacata

SEQ ID NO: 10010 - RNA, 23 nt, synthetic construct
  source 1..23: mol_type = other RNA
tagaacactgatactctgaacat

SEQ ID NO: 10011 - RNA, 23 nt, synthetic construct
  source 1..23: mol_type = other RNA
taagaacactgatactctgaaca

SEQ ID NO: 10012 - RNA, 23 nt, synthetic construct
  source 1..23: mol_type = other RNA
taaagaacactgatactctgaac

SEQ ID NO: 10013 - RNA, 23 nt, synthetic construct
  source 1..23: mol_type = other RNA
ttaaagaacactgatactctgaa

SEQ ID NO: 10014 - RNA, 23 nt, synthetic construct
  source 1..23: mol_type = other RNA
tgtaaagaacactgatactctga

SEQ ID NO: 10015 - RNA, 23 nt, synthetic construct
  source 1..23: mol_type = other RNA
tagtaaagaacactgatactctg

SEQ ID NO: 10016 - RNA, 23 nt, synthetic construct
  source 1..23: mol_type = other RNA
tgagtaaagaacactgatactct

SEQ ID NO: 10017 - RNA, 23 nt, synthetic construct
  source 1..23: mol_type = other RNA
tggagtaaagaacactgatactc

SEQ ID NO: 10018 - RNA, 23 nt, synthetic construct
  source 1..23: mol_type = other RNA
tatatctgtaaggagtaaagaac

SEQ ID NO: 10019 - RNA, 23 nt, synthetic construct
  source 1..23: mol_type = other RNA
taaaatatctgtaaggagtaaag

SEQ ID NO: 10020 - RNA, 23 nt, synthetic construct
  source 1..23: mol_type = other RNA
tagaaagtgatgctgcatttaaa

SEQ ID NO: 10021 - RNA, 23 nt, synthetic construct
  source 1..23: mol_type = other RNA
tttattttcagaaagtgatgctg

SEQ ID NO: 10022 - RNA, 23 nt, synthetic construct
  source 1..23: mol_type = other RNA
tgacaacaaataatgtttctctt

SEQ ID NO: 10023 - RNA, 23 nt, synthetic construct
  source 1..23: mol_type = other RNA
tatgctgaaatactgacaacaaa

SEQ ID NO: 10024 - RNA, 23 nt, synthetic construct
  source 1..23: mol_type = other RNA
tacaagttcatgctgaaatactg

SEQ ID NO: 10025 - RNA, 23 nt, synthetic construct
  source 1..23: mol_type = other RNA
taacagaatctgtaccaattaca

SEQ ID NO: 10026 - RNA, 23 nt, synthetic construct
  source 1..23: mol_type = other RNA
tagaatctgtaccaattacaaac

SEQ ID NO: 10027 - RNA, 23 nt, synthetic construct
  source 1..23: mol_type = other RNA
tcagaatctgtaccaattacaaa

SEQ ID NO: 10028 - RNA, 23 nt, synthetic construct
  source 1..23: mol_type = other RNA
tacagaatctgtaccaattacaa

SEQ ID NO: 10029 - RNA, 23 nt, synthetic construct
  source 1..23: mol_type = other RNA
tcaacagaatctgtaccaattac

SEQ ID NO: 10030 - RNA, 23 nt, synthetic construct
  source 1..23: mol_type = other RNA
tacaacagaatctgtaccaatta

SEQ ID NO: 10031 - RNA, 23 nt, synthetic construct
  source 1..23: mol_type = other RNA
ttacaacagaatctgtaccaatt

SEQ ID NO: 10032 - RNA, 23 nt, synthetic construct
  source 1..23: mol_type = other RNA
tatacaacagaatctgtaccaat

SEQ ID NO: 10033 - RNA, 23 nt, synthetic construct
  source 1..23: mol_type = other RNA
tcatacaacagaatctgtaccaa

SEQ ID NO: 10034 - RNA, 23 nt, synthetic construct
  source 1..23: mol_type = other RNA
tgcatacaacagaatctgtacca

SEQ ID NO: 10035 - RNA, 23 nt, synthetic construct
  source 1..23: mol_type = other RNA
tagcatacaacagaatctgtacc

SEQ ID NO: 10036 - RNA, 23 nt, synthetic construct
  source 1..23: mol_type = other RNA
taagcatacaacagaatctgtac

SEQ ID NO: 10037 - RNA, 23 nt, synthetic construct
  source 1..23: mol_type = other RNA
taaagcatacaacagaatctgta

SEQ ID NO: 10038 - RNA, 23 nt, synthetic construct
  source 1..23: mol_type = other RNA
taattaagaattctagatgtgac

SEQ ID NO: 10039 - RNA, 23 nt, synthetic construct
  source 1..23: mol_type = other RNA
tgaaagcatacaacagaatctgt

SEQ ID NO: 10040 - RNA, 23 nt, synthetic construct
  source 1..23: mol_type = other RNA
tagaaagcatacaacagaatctg

SEQ ID NO: 10041 - RNA, 23 nt, synthetic construct
  source 1..23: mol_type = other RNA
tattctagatgtgacatgccaaa

SEQ ID NO: 10042 - RNA, 23 nt, synthetic construct
  source 1..23: mol_type = other RNA
taattctagatgtgacatgccaa

SEQ ID NO: 10043 - RNA, 23 nt, synthetic construct
  source 1..23: mol_type = other RNA
tgaattctagatgtgacatgcca

SEQ ID NO: 10044 - RNA, 23 nt, synthetic construct
  source 1..23: mol_type = other RNA
tagaattctagatgtgacatgcc

SEQ ID NO: 10045 - RNA, 23 nt, synthetic construct
  source 1..23: mol_type = other RNA
taagaattctagatgtgacatgc

SEQ ID NO: 10046 - RNA, 23 nt, synthetic construct
  source 1..23: mol_type = other RNA
ttaagaattctagatgtgacatg

SEQ ID NO: 10047 - RNA, 23 nt, synthetic construct
  source 1..23: mol_type = other RNA
tttaagaattctagatgtgacat

SEQ ID NO: 10048 - RNA, 23 nt, synthetic construct
  source 1..23: mol_type = other RNA
tattaagaattctagatgtgaca

SEQ ID NO: 10049 - RNA, 23 nt, synthetic construct
  source 1..23: mol_type = other RNA
tttcacttaactctcaagtcaga

SEQ ID NO: 10050 - RNA, 23 nt, synthetic construct
  source 1..23: mol_type = other RNA
tatgtttcacttaactctcaagt

SEQ ID NO: 10051 - RNA, 23 nt, synthetic construct
  source 1..23: mol_type = other RNA
taagatgaaaagcaagtgctatg

SEQ ID NO: 10052 - RNA, 23 nt, synthetic construct
  source 1..23: mol_type = other RNA
tcatggaaatttaaaatgcaaag

SEQ ID NO: 10053 - RNA, 23 nt, synthetic construct
  source 1..23: mol_type = other RNA
tcaatcatggaaatttaaaatgc

SEQ ID NO: 10054 - RNA, 23 nt, synthetic construct
  source 1..23: mol_type = other RNA
ttttttcagatactgcaaccagg

SEQ ID NO: 10055 - RNA, 23 nt, synthetic construct
  source 1..23: mol_type = other RNA
tttttttcagatactgcaaccag

SEQ ID NO: 10056 - RNA, 23 nt, synthetic construct
  source 1..23: mol_type = other RNA
tattttttcagatactgcaacca

SEQ ID NO: 10057 - RNA, 23 nt, synthetic construct
  source 1..23: mol_type = other RNA
taattttttcagatactgcaacc

SEQ ID NO: 10058 - RNA, 23 nt, synthetic construct
  source 1..23: mol_type = other RNA
ttaattttttcagatactgcaac

SEQ ID NO: 10059 - RNA, 23 nt, synthetic construct
  source 1..23: mol_type = other RNA
tgaacttctaacctaatgaatct

SEQ ID NO: 10060 - RNA, 23 nt, synthetic construct
  source 1..23: mol_type = other RNA
taaattattctggaacttctaac

SEQ ID NO: 10061 - RNA, 23 nt, synthetic construct
  source 1..23: mol_type = other RNA
tgtaattctacaatagtaggtgt

SEQ ID NO: 10062 - RNA, 23 nt, synthetic construct
  source 1..23: mol_type = other RNA
tataggagtagttttgttttgtt

SEQ ID NO: 10063 - RNA, 23 nt, synthetic construct
  source 1..23: mol_type = other RNA
tggagtagttttgttttgtttta

SEQ ID NO: 10064 - RNA, 23 nt, synthetic construct
  source 1..23: mol_type = other RNA
ttaggagtagttttgttttgttt

SEQ ID NO: 10065 - RNA, 23 nt, synthetic construct
  source 1..23: mol_type = other RNA
taataggagtagttttgttttgt

SEQ ID NO: 10066 - RNA, 23 nt, synthetic construct
  source 1..23: mol_type = other RNA
taaataggagtagttttgttttg

SEQ ID NO: 10067 - RNA, 23 nt, synthetic construct
  source 1..23: mol_type = other RNA
tgaaaataggagtagttttgttt

SEQ ID NO: 10068 - RNA, 23 nt, synthetic construct
  source 1..23: mol_type = other RNA
tggaaaataggagtagttttgtt

SEQ ID NO: 10069 - RNA, 23 nt, synthetic construct
  source 1..23: mol_type = other RNA
taggaaaataggagtagttttgt

SEQ ID NO: 10070 - RNA, 23 nt, synthetic construct
  source 1..23: mol_type = other RNA
ttggcaaaattccaggaaaatag

SEQ ID NO: 10071 - RNA, 23 nt, synthetic construct
  source 1..23: mol_type = other RNA
ttttgtataatggcaaacatcag

SEQ ID NO: 10072 - RNA, 23 nt, synthetic construct
  source 1..23: mol_type = other RNA
tagcaattttaagttgtttactc

SEQ ID NO: 10073 - RNA, 23 nt, synthetic construct
  source 1..23: mol_type = other RNA
tagttgtttactcaaactttgta

SEQ ID NO: 10074 - RNA, 23 nt, synthetic construct
  source 1..23: mol_type = other RNA
taagttgtttactcaaactttgt

SEQ ID NO: 10075 - RNA, 23 nt, synthetic construct
  source 1..23: mol_type = other RNA
ttaagttgtttactcaaactttg

SEQ ID NO: 10076 - RNA, 23 nt, synthetic construct
  source 1..23: mol_type = other RNA
tgcaattttaagttgtttactca

SEQ ID NO: 10077 - RNA, 23 nt, synthetic construct
  source 1..23: mol_type = other RNA
tcaagcaattttaagttgtttac

SEQ ID NO: 10078 - RNA, 23 nt, synthetic construct
  source 1..23: mol_type = other RNA
tttatttcaatcaaagactatgc

SEQ ID NO: 10079 - RNA, 23 nt, synthetic construct
  source 1..23: mol_type = other RNA
tatttagccaaatacattctcat

SEQ ID NO: 10080 - RNA, 23 nt, synthetic construct
  source 1..23: mol_type = other RNA
ttaaaggaatgattattgaagac

SEQ ID NO: 10081 - RNA, 23 nt, synthetic construct
  source 1..23: mol_type = other RNA
tttgtaatgatgtgtttgtgaat

SEQ ID NO: 10082 - RNA, 23 nt, synthetic construct
  source 1..23: mol_type = other RNA
tttgaagacatcaactgccagct

SEQ ID NO: 10083 - RNA, 23 nt, synthetic construct
  source 1..23: mol_type = other RNA
ttattgaagacatcaactgccag

SEQ ID NO: 10084 - RNA, 23 nt, synthetic construct
  source 1..23: mol_type = other RNA
tttattgaagacatcaactgcca

SEQ ID NO: 10085 - RNA, 23 nt, synthetic construct
  source 1..23: mol_type = other RNA
tattattgaagacatcaactgcc

SEQ ID NO: 10086 - RNA, 23 nt, synthetic construct
  source 1..23: mol_type = other RNA
tgattattgaagacatcaactgc

SEQ ID NO: 10087 - RNA, 23 nt, synthetic construct
  source 1..23: mol_type = other RNA
ttgattattgaagacatcaactg

SEQ ID NO: 10088 - RNA, 23 nt, synthetic construct
  source 1..23: mol_type = other RNA
tatgattattgaagacatcaact

SEQ ID NO: 10089 - RNA, 23 nt, synthetic construct
  source 1..23: mol_type = other RNA
taatgattattgaagacatcaac

SEQ ID NO: 10090 - RNA, 23 nt, synthetic construct
  source 1..23: mol_type = other RNA
tgaatgattattgaagacatcaa

SEQ ID NO: 10091 - RNA, 23 nt, synthetic construct
  source 1..23: mol_type = other RNA
tggaatgattattgaagacatca

SEQ ID NO: 10092 - RNA, 23 nt, synthetic construct
  source 1..23: mol_type = other RNA
taggaatgattattgaagacatc

SEQ ID NO: 10093 - RNA, 23 nt, synthetic construct
  source 1..23: mol_type = other RNA
taaggaatgattattgaagacat

SEQ ID NO: 10094 - RNA, 23 nt, synthetic construct
  source 1..23: mol_type = other RNA
taaaggaatgattattgaagaca

SEQ ID NO: 10095 - RNA, 23 nt, synthetic construct
  source 1..23: mol_type = other RNA
tgtaatgatgtgtttgtgaattt

SEQ ID NO: 10096 - RNA, 23 nt, synthetic construct
  source 1..23: mol_type = other RNA
ttgtaatgatgtgtttgtgaatt

SEQ ID NO: 10097 - RNA, 23 nt, synthetic construct
  source 1..23: mol_type = other RNA
tcttgtaatgatgtgtttgtgaa

SEQ ID NO: 10098 - RNA, 23 nt, synthetic construct
  source 1..23: mol_type = other RNA
tgcttgtaatgatgtgtttgtga

SEQ ID NO: 10099 - RNA, 23 nt, synthetic construct
  source 1..23: mol_type = other RNA
tagcttgtaatgatgtgtttgtg

SEQ ID NO: 10100 - RNA, 23 nt, synthetic construct
  source 1..23: mol_type = other RNA
ttagcttgtaatgatgtgtttgt

SEQ ID NO: 10101 - RNA, 23 nt, synthetic construct
  source 1..23: mol_type = other RNA
tgtagcttgtaatgatgtgtttg

SEQ ID NO: 10102 - RNA, 23 nt, synthetic construct
  source 1..23: mol_type = other RNA
tagtagcttgtaatgatgtgttt

SEQ ID NO: 10103 - RNA, 23 nt, synthetic construct
  source 1..23: mol_type = other RNA
taagtagcttgtaatgatgtgtt

SEQ ID NO: 10104 - RNA, 23 nt, synthetic construct
  source 1..23: mol_type = other RNA
ttaaacatttctaagtagcttgt

SEQ ID NO: 10105 - RNA, 23 nt, synthetic construct
  source 1..23: mol_type = other RNA
tttctaagtagcttgtaatgatg

SEQ ID NO: 10106 - RNA, 23 nt, synthetic construct
  source 1..23: mol_type = other RNA
taacatttctaagtagcttgtaa

SEQ ID NO: 10107 - RNA, 23 nt, synthetic construct
  source 1..23: mol_type = other RNA
ttactaaacatttctaagtagct

SEQ ID NO: 10108 - RNA, 23 nt, synthetic construct
  source 1..23: mol_type = other RNA
taaacagaaatagtatgtttcac

SEQ ID NO: 10109 - RNA, 23 nt, synthetic construct
  source 1..23: mol_type = other RNA
ttttttgttatttagaagcagct

SEQ ID NO: 10110 - RNA, 23 nt, synthetic construct
  source 1..23: mol_type = other RNA
tttttttgttatttagaagcagc

SEQ ID NO: 10111 - RNA, 23 nt, synthetic construct
  source 1..23: mol_type = other RNA
taatgttttgaaaaatgcccata

SEQ ID NO: 10112 - RNA, 23 nt, synthetic construct
  source 1..23: mol_type = other RNA
tcaaggctagatgaaaaaaagaa

SEQ ID NO: 10113 - RNA, 23 nt, synthetic construct
  source 1..23: mol_type = other RNA
tctagatgaaaaaaagaaagtca

SEQ ID NO: 10114 - RNA, 23 nt, synthetic construct
  source 1..23: mol_type = other RNA
tgctagatgaaaaaaagaaagtc

SEQ ID NO: 10115 - RNA, 23 nt, synthetic construct
  source 1..23: mol_type = other RNA
tggctagatgaaaaaaagaaagt

SEQ ID NO: 10116 - RNA, 23 nt, synthetic construct
  source 1..23: mol_type = other RNA
taggctagatgaaaaaaagaaag

SEQ ID NO: 10117 - RNA, 23 nt, synthetic construct
  source 1..23: mol_type = other RNA
taaggctagatgaaaaaaagaaa

SEQ ID NO: 10118 - RNA, 23 nt, synthetic construct
  source 1..23: mol_type = other RNA
tgcaaggctagatgaaaaaaaga

SEQ ID NO: 10119 - RNA, 23 nt, synthetic construct
  source 1..23: mol_type = other RNA
tagcaaggctagatgaaaaaaag

SEQ ID NO: 10120 - RNA, 23 nt, synthetic construct
  source 1..23: mol_type = other RNA
taagcaaggctagatgaaaaaaa

SEQ ID NO: 10121 - RNA, 23 nt, synthetic construct
  source 1..23: mol_type = other RNA
taaagcaaggctagatgaaaaaa

SEQ ID NO: 10122 - RNA, 23 nt, synthetic construct
  source 1..23: mol_type = other RNA
tataaagcaaggctagatgaaaa

SEQ ID NO: 10123 - RNA, 23 nt, synthetic construct
  source 1..23: mol_type = other RNA
taatctctgagagtactaaggga

SEQ ID NO: 10124 - RNA, 23 nt, synthetic construct
  source 1..23: mol_type = other RNA
tttatataatctctgagagtact

SEQ ID NO: 10125 - RNA, 23 nt, synthetic construct
  source 1..23: mol_type = other RNA
ttttatataatctctgagagtac

SEQ ID NO: 10126 - RNA, 23 nt, synthetic construct
  source 1..23: mol_type = other RNA
ttaagagttctgctagtaactag

SEQ ID NO: 10127 - RNA, 23 nt, synthetic construct
  source 1..23: mol_type = other RNA
ttatggcagggaacagtgctggg

SEQ ID NO: 10128 - RNA, 23 nt, synthetic construct
  source 1..23: mol_type = other RNA
tatatggcagggaacagtgctgg

SEQ ID NO: 10129 - RNA, 23 nt, synthetic construct
  source 1..23: mol_type = other RNA
tgatatggcagggaacagtgctg

SEQ ID NO: 10130 - RNA, 23 nt, synthetic construct
  source 1..23: mol_type = other RNA
tggatatggcagggaacagtgct

SEQ ID NO: 10131 - RNA, 23 nt, synthetic construct
  source 1..23: mol_type = other RNA
ttttttaatcagtaaaagttggg

SEQ ID NO: 10132 - RNA, 23 nt, synthetic construct
  source 1..23: mol_type = other RNA
tatcattgaatggcacattacgt

SEQ ID NO: 10133 - RNA, 23 nt, synthetic construct
  source 1..23: mol_type = other RNA
taaagtgggattttatcatcatc

SEQ ID NO: 10134 - RNA, 23 nt, synthetic construct
  source 1..23: mol_type = other RNA
taaaagtgggattttatcatcat

SEQ ID NO: 10135 - RNA, 23 nt, synthetic construct
  source 1..23: mol_type = other RNA
tagaaacccaaagaaaagtggga

SEQ ID NO: 10136 - RNA, 23 nt, synthetic construct
  source 1..23: mol_type = other RNA
ttagaaacccaaagaaaagtggg

SEQ ID NO: 10137 - RNA, 23 nt, synthetic construct
  source 1..23: mol_type = other RNA
tgtagaaacccaaagaaaagtgg

SEQ ID NO: 10138 - RNA, 23 nt, synthetic construct
  source 1..23: mol_type = other RNA
tagtagaaacccaaagaaaagtg

SEQ ID NO: 10139 - RNA, 23 nt, synthetic construct
  source 1..23: mol_type = other RNA
ttagtagaaacccaaagaaaagt

SEQ ID NO: 10140 - RNA, 23 nt, synthetic construct
  source 1..23: mol_type = other RNA
tttagtagaaacccaaagaaaag

SEQ ID NO: 10141 - RNA, 23 nt, synthetic construct
  source 1..23: mol_type = other RNA
ttttagtagaaacccaaagaaaa

SEQ ID NO: 10142 - RNA, 23 nt, synthetic construct
  source 1..23: mol_type = other RNA
tttttagtagaaacccaaagaaa

SEQ ID NO: 10143 - RNA, 23 nt, synthetic construct
  source 1..23: mol_type = other RNA
tattttagtagaaacccaaagaa

SEQ ID NO: 10144 - RNA, 23 nt, synthetic construct
  source 1..23: mol_type = other RNA
ttattttagtagaaacccaaaga

SEQ ID NO: 10145 - RNA, 23 nt, synthetic construct
  source 1..23: mol_type = other RNA
tttattttagtagaaacccaaag

SEQ ID NO: 10146 - RNA, 23 nt, synthetic construct
  source 1..23: mol_type = other RNA
tctgagtgagtaaattattttag

SEQ ID NO: 10147 - RNA, 23 nt, synthetic construct
  source 1..23: mol_type = other RNA
tctctgagtgagtaaattatttt

SEQ ID NO: 10148 - RNA, 23 nt, synthetic construct
  source 1..23: mol_type = other RNA
tactctgagtgagtaaattattt

SEQ ID NO: 10149 - RNA, 23 nt, synthetic construct
  source 1..23: mol_type = other RNA
tcactctgagtgagtaaattatt

SEQ ID NO: 10150 - RNA, 23 nt, synthetic construct
  source 1..23: mol_type = other RNA
ttcactctgagtgagtaaattat

SEQ ID NO: 10151 - RNA, 23 nt, synthetic construct
  source 1..23: mol_type = other RNA
tctcactctgagtgagtaaatta

SEQ ID NO: 10152 - RNA, 23 nt, synthetic construct
  source 1..23: mol_type = other RNA
ttttttctcattgacctcactct

SEQ ID NO: 10153 - RNA, 23 nt, synthetic construct
  source 1..23: mol_type = other RNA
ttatccattaattttatcagcac

SEQ ID NO: 10154 - RNA, 23 nt, synthetic construct
  source 1..23: mol_type = other RNA
tattctacaactctttcttagcc

SEQ ID NO: 10155 - RNA, 23 nt, synthetic construct
  source 1..23: mol_type = other RNA
taaccattctacaactctttctt

SEQ ID NO: 10156 - RNA, 23 nt, synthetic construct
  source 1..23: mol_type = other RNA
ttccattaattttatcagcaccc

SEQ ID NO: 10157 - RNA, 23 nt, synthetic construct
  source 1..23: mol_type = other RNA
tatccattaattttatcagcacc

SEQ ID NO: 10158 - RNA, 23 nt, synthetic construct
  source 1..23: mol_type = other RNA
tagaaattctatactctcacagt

SEQ ID NO: 10159 - RNA, 23 nt, synthetic construct
  source 1..23: mol_type = other RNA
tttctatactctcacagttccta

SEQ ID NO: 10160 - RNA, 23 nt, synthetic construct
  source 1..23: mol_type = other RNA
tattctatactctcacagttcct

SEQ ID NO: 10161 - RNA, 23 nt, synthetic construct
  source 1..23: mol_type = other RNA
taattctatactctcacagttcc

SEQ ID NO: 10162 - RNA, 23 nt, synthetic construct
  source 1..23: mol_type = other RNA
taaattctatactctcacagttc

SEQ ID NO: 10163 - RNA, 23 nt, synthetic construct
  source 1..23: mol_type = other RNA
tgaaattctatactctcacagtt

SEQ ID NO: 10164 - RNA, 23 nt, synthetic construct
  source 1..23: mol_type = other RNA
taagaaattctatactctcacag

SEQ ID NO: 10165 - RNA, 23 nt, synthetic construct
  source 1..23: mol_type = other RNA
ttaagaaattctatactctcaca

SEQ ID NO: 10166 - RNA, 23 nt, synthetic construct
  source 1..23: mol_type = other RNA
tctaagaaattctatactctcac

SEQ ID NO: 10167 - RNA, 23 nt, synthetic construct
  source 1..23: mol_type = other RNA
tactaagaaattctatactctca

SEQ ID NO: 10168 - RNA, 23 nt, synthetic construct
  source 1..23: mol_type = other RNA
tcactaagaaattctatactctc

SEQ ID NO: 10169 - RNA, 23 nt, synthetic construct
  source 1..23: mol_type = other RNA
tgcactaagaaattctatactct

SEQ ID NO: 10170 - RNA, 23 nt, synthetic construct
  source 1..23: mol_type = other RNA
ttgcactaagaaattctatactc

SEQ ID NO: 10171 - RNA, 23 nt, synthetic construct
  source 1..23: mol_type = other RNA
tgagaaagaacagtccttacaga

SEQ ID NO: 10172 - RNA, 23 nt, synthetic construct
  source 1..23: mol_type = other RNA
taaaagttagataatatcccact

SEQ ID NO: 10173 - RNA, 23 nt, synthetic construct
  source 1..23: mol_type = other RNA
tgaagatgaatgccaaagacaaa

SEQ ID NO: 10174 - RNA, 23 nt, synthetic construct
  source 1..23: mol_type = other RNA
taaaagaagatgaatgccaaaga

SEQ ID NO: 10175 - RNA, 23 nt, synthetic construct
  source 1..23: mol_type = other RNA
ttgccaaacattttttaatgcac

SEQ ID NO: 10176 - RNA, 23 nt, synthetic construct
  source 1..23: mol_type = other RNA
tatacaggaattatagagtgact

SEQ ID NO: 10177 - RNA, 23 nt, synthetic construct
  source 1..23: mol_type = other RNA
tgacaggttaaacgacaactaaa

SEQ ID NO: 10178 - RNA, 23 nt, synthetic construct
  source 1..23: mol_type = other RNA
tggacaggttaaacgacaactaa

SEQ ID NO: 10179 - RNA, 23 nt, synthetic construct
  source 1..23: mol_type = other RNA
ttggacaggttaaacgacaacta

SEQ ID NO: 10180 - RNA, 23 nt, synthetic construct
  source 1..23: mol_type = other RNA
tgaagtttggacaggttaaacga

SEQ ID NO: 10181 - RNA, 23 nt, synthetic construct
  source 1..23: mol_type = other RNA
tttaagaagttcattgtgtagaa

SEQ ID NO: 10182 - RNA, 23 nt, synthetic construct
  source 1..23: mol_type = other RNA
tttggacaggttaaacgacaact

SEQ ID NO: 10183 - RNA, 23 nt, synthetic construct
  source 1..23: mol_type = other RNA
ttttggacaggttaaacgacaac

SEQ ID NO: 10184 - RNA, 23 nt, synthetic construct
  source 1..23: mol_type = other RNA
tgtttggacaggttaaacgacaa

SEQ ID NO: 10185 - RNA, 23 nt, synthetic construct
  source 1..23: mol_type = other RNA
tagtttggacaggttaaacgaca

SEQ ID NO: 10186 - RNA, 23 nt, synthetic construct
  source 1..23: mol_type = other RNA
taagtttggacaggttaaacgac

SEQ ID NO: 10187 - RNA, 23 nt, synthetic construct
  source 1..23: mol_type = other RNA
tagaagtttggacaggttaaacg

SEQ ID NO: 10188 - RNA, 23 nt, synthetic construct
  source 1..23: mol_type = other RNA
ttagaagtttggacaggttaaac

SEQ ID NO: 10189 - RNA, 23 nt, synthetic construct
  source 1..23: mol_type = other RNA
tgtagaagtttggacaggttaaa

SEQ ID NO: 10190 - RNA, 23 nt, synthetic construct
  source 1..23: mol_type = other RNA
ttgtagaagtttggacaggttaa

SEQ ID NO: 10191 - RNA, 23 nt, synthetic construct
  source 1..23: mol_type = other RNA
tgtgtagaagtttggacaggtta

SEQ ID NO: 10192 - RNA, 23 nt, synthetic construct
  source 1..23: mol_type = other RNA
ttgtgtagaagtttggacaggtt

SEQ ID NO: 10193 - RNA, 23 nt, synthetic construct
  source 1..23: mol_type = other RNA
tttgtgtagaagtttggacaggt

SEQ ID NO: 10194 - RNA, 23 nt, synthetic construct
  source 1..23: mol_type = other RNA
tattgtgtagaagtttggacagg

SEQ ID NO: 10195 - RNA, 23 nt, synthetic construct
  source 1..23: mol_type = other RNA
tcattgtgtagaagtttggacag

SEQ ID NO: 10196 - RNA, 23 nt, synthetic construct
  source 1..23: mol_type = other RNA
ttcattgtgtagaagtttggaca

SEQ ID NO: 10197 - RNA, 23 nt, synthetic construct
  source 1..23: mol_type = other RNA
tttcattgtgtagaagtttggac

SEQ ID NO: 10198 - RNA, 23 nt, synthetic construct
  source 1..23: mol_type = other RNA
tgttcattgtgtagaagtttgga

SEQ ID NO: 10199 - RNA, 23 nt, synthetic construct
  source 1..23: mol_type = other RNA
tagttcattgtgtagaagtttgg

SEQ ID NO: 10200 - RNA, 23 nt, synthetic construct
  source 1..23: mol_type = other RNA
taagttcattgtgtagaagtttg

SEQ ID NO: 10201 - RNA, 23 nt, synthetic construct
  source 1..23: mol_type = other RNA
tgaagttcattgtgtagaagttt

SEQ ID NO: 10202 - RNA, 23 nt, synthetic construct
  source 1..23: mol_type = other RNA
tagaagttcattgtgtagaagtt

SEQ ID NO: 10203 - RNA, 23 nt, synthetic construct
  source 1..23: mol_type = other RNA
taagaagttcattgtgtagaagt

SEQ ID NO: 10204 - RNA, 23 nt, synthetic construct
  source 1..23: mol_type = other RNA
ttaagaagttcattgtgtagaag

SEQ ID NO: 10205 - RNA, 23 nt, synthetic construct
  source 1..23: mol_type = other RNA
tgttaagaagttcattgtgtaga

SEQ ID NO: 10206 - RNA, 23 nt, synthetic construct
  source 1..23: mol_type = other RNA
ttgttaagaagttcattgtgtag

SEQ ID NO: 10207 - RNA, 23 nt, synthetic construct
  source 1..23: mol_type = other RNA
tttgttaagaagttcattgtgta

SEQ ID NO: 10208 - RNA, 23 nt, synthetic construct
  source 1..23: mol_type = other RNA
tcttgttaagaagttcattgtgt

SEQ ID NO: 10209 - RNA, 23 nt, synthetic construct
  source 1..23: mol_type = other RNA
ttcttgttaagaagttcattgtg

SEQ ID NO: 10210 - RNA, 23 nt, synthetic construct
  source 1..23: mol_type = other RNA
tatcttgttaagaagttcattgt

SEQ ID NO: 10211 - RNA, 23 nt, synthetic construct
  source 1..23: mol_type = other RNA
taatcttgttaagaagttcattg

SEQ ID NO: 10212 - RNA, 23 nt, synthetic construct
  source 1..23: mol_type = other RNA
tgagaacttaaaatcttgttaag

SEQ ID NO: 10213 - RNA, 23 nt, synthetic construct
  source 1..23: mol_type = other RNA
tcagagaacttaaaatcttgtta

SEQ ID NO: 10214 - RNA, 23 nt, synthetic construct
  source 1..23: mol_type = other RNA
taacctcttatacagagaactta

SEQ ID NO: 10215 - RNA, 23 nt, synthetic construct
  source 1..23: mol_type = other RNA
ttgaggtgaaacctcttatacag

SEQ ID NO: 10216 - RNA, 23 nt, synthetic construct
  source 1..23: mol_type = other RNA
taatactctatagtgccaaatga

SEQ ID NO: 10217 - RNA, 23 nt, synthetic construct
  source 1..23: mol_type = other RNA
taaatactctatagtgccaaatg

SEQ ID NO: 10218 - RNA, 23 nt, synthetic construct
  source 1..23: mol_type = other RNA
ttaaaagaaaaatcatctctgcc

SEQ ID NO: 10219 - RNA, 23 nt, synthetic construct
  source 1..23: mol_type = other RNA
tcaaatactctatagtgccaaat

SEQ ID NO: 10220 - RNA, 23 nt, synthetic construct
  source 1..23: mol_type = other RNA
tacaaatactctatagtgccaaa

SEQ ID NO: 10221 - RNA, 23 nt, synthetic construct
  source 1..23: mol_type = other RNA
taacaaatactctatagtgccaa

SEQ ID NO: 10222 - RNA, 23 nt, synthetic construct
  source 1..23: mol_type = other RNA
ttaacaaatactctatagtgcca

SEQ ID NO: 10223 - RNA, 23 nt, synthetic construct
  source 1..23: mol_type = other RNA
tttaacaaatactctatagtgcc

SEQ ID NO: 10224 - RNA, 23 nt, synthetic construct
  source 1..23: mol_type = other RNA
tattaacaaatactctatagtgc

SEQ ID NO: 10225 - RNA, 23 nt, synthetic construct
  source 1..23: mol_type = other RNA
tcattaacaaatactctatagtg

SEQ ID NO: 10226 - RNA, 23 nt, synthetic construct
  source 1..23: mol_type = other RNA
tccattaacaaatactctatagt

SEQ ID NO: 10227 - RNA, 23 nt, synthetic construct
  source 1..23: mol_type = other RNA
tgccattaacaaatactctatag

SEQ ID NO: 10228 - RNA, 23 nt, synthetic construct
  source 1..23: mol_type = other RNA
ttgccattaacaaatactctata

SEQ ID NO: 10229 - RNA, 23 nt, synthetic construct
  source 1..23: mol_type = other RNA
tctgccattaacaaatactctat

SEQ ID NO: 10230 - RNA, 23 nt, synthetic construct
  source 1..23: mol_type = other RNA
ttctgccattaacaaatactcta

SEQ ID NO: 10231 - RNA, 23 nt, synthetic construct
  source 1..23: mol_type = other RNA
taaaagaaaaatcatctctgcca

SEQ ID NO: 10232 - RNA, 23 nt, synthetic construct
  source 1..23: mol_type = other RNA
tttaaaagaaaaatcatctctgc

SEQ ID NO: 10233 - RNA, 23 nt, synthetic construct
  source 1..23: mol_type = other RNA
tatacaaataacagctagtcttt

SEQ ID NO: 10234 - RNA, 23 nt, synthetic construct
  source 1..23: mol_type = other RNA
tgacattctttatatgttagcta

SEQ ID NO: 10235 - RNA, 23 nt, synthetic construct
  source 1..23: mol_type = other RNA
taagcaaaagtagacattcttta

SEQ ID NO: 10236 - RNA, 23 nt, synthetic construct
  source 1..23: mol_type = other RNA
tttaaagcaaaagtagacattct

SEQ ID NO: 10237 - RNA, 23 nt, synthetic construct
  source 1..23: mol_type = other RNA
tctaatagcataatggcttagtt

SEQ ID NO: 10238 - RNA, 23 nt, synthetic construct
  source 1..23: mol_type = other RNA
tggaattttaaaatagggattgt

SEQ ID NO: 10239 - RNA, 23 nt, synthetic construct
  source 1..23: mol_type = other RNA
ttggcagttctattattgttagg

SEQ ID NO: 10240 - RNA, 23 nt, synthetic construct
  source 1..23: mol_type = other RNA
ttacaactgaaagagaaaagtat

SEQ ID NO: 10241 - RNA, 23 nt, synthetic construct
  source 1..23: mol_type = other RNA
taaatagggattgttacctaatt

SEQ ID NO: 10242 - RNA, 23 nt, synthetic construct
  source 1..23: mol_type = other RNA
taaaatagggattgttacctaat

SEQ ID NO: 10243 - RNA, 23 nt, synthetic construct
  source 1..23: mol_type = other RNA
ttaaaatagggattgttacctaa

SEQ ID NO: 10244 - RNA, 23 nt, synthetic construct
  source 1..23: mol_type = other RNA
tttaaaatagggattgttaccta

SEQ ID NO: 10245 - RNA, 23 nt, synthetic construct
  source 1..23: mol_type = other RNA
ttttaaaatagggattgttacct

SEQ ID NO: 10246 - RNA, 23 nt, synthetic construct
  source 1..23: mol_type = other RNA
tttttaaaatagggattgttacc

SEQ ID NO: 10247 - RNA, 23 nt, synthetic construct
  source 1..23: mol_type = other RNA
tggcagttctattattgttaggg

SEQ ID NO: 10248 - RNA, 23 nt, synthetic construct
  source 1..23: mol_type = other RNA
tctggcagttctattattgttag

SEQ ID NO: 10249 - RNA, 23 nt, synthetic construct
  source 1..23: mol_type = other RNA
tgctggcagttctattattgtta

SEQ ID NO: 10250 - RNA, 23 nt, synthetic construct
  source 1..23: mol_type = other RNA
tagaaaagtatgctggcagttct

SEQ ID NO: 10251 - RNA, 23 nt, synthetic construct
  source 1..23: mol_type = other RNA
tgagaaaagtatgctggcagttc

SEQ ID NO: 10252 - RNA, 23 nt, synthetic construct
  source 1..23: mol_type = other RNA
tagagaaaagtatgctggcagtt

SEQ ID NO: 10253 - RNA, 23 nt, synthetic construct
  source 1..23: mol_type = other RNA
taagagaaaagtatgctggcagt

SEQ ID NO: 10254 - RNA, 23 nt, synthetic construct
  source 1..23: mol_type = other RNA
taaagagaaaagtatgctggcag

SEQ ID NO: 10255 - RNA, 23 nt, synthetic construct
  source 1..23: mol_type = other RNA
tgaaagagaaaagtatgctggca

SEQ ID NO: 10256 - RNA, 23 nt, synthetic construct
  source 1..23: mol_type = other RNA
ttgaaagagaaaagtatgctggc

SEQ ID NO: 10257 - RNA, 23 nt, synthetic construct
  source 1..23: mol_type = other RNA
tctgaaagagaaaagtatgctgg

SEQ ID NO: 10258 - RNA, 23 nt, synthetic construct
  source 1..23: mol_type = other RNA
tactgaaagagaaaagtatgctg

SEQ ID NO: 10259 - RNA, 23 nt, synthetic construct
  source 1..23: mol_type = other RNA
taactgaaagagaaaagtatgct

SEQ ID NO: 10260 - RNA, 23 nt, synthetic construct
  source 1..23: mol_type = other RNA
tcaactgaaagagaaaagtatgc

SEQ ID NO: 10261 - RNA, 23 nt, synthetic construct
  source 1..23: mol_type = other RNA
tacaactgaaagagaaaagtatg

SEQ ID NO: 10262 - RNA, 23 nt, synthetic construct
  source 1..23: mol_type = other RNA
tatgtattcatctacaactgaaa

SEQ ID NO: 10263 - RNA, 23 nt, synthetic construct
  source 1..23: mol_type = other RNA
taatgtattcatctacaactgaa

SEQ ID NO: 10264 - RNA, 23 nt, synthetic construct
  source 1..23: mol_type = other RNA
tatgatcaggaaatacagtcaca

SEQ ID NO: 10265 - RNA, 23 nt, synthetic construct
  source 1..23: mol_type = other RNA
taatacagtcacatctgaaaata

SEQ ID NO: 10266 - RNA, 23 nt, synthetic construct
  source 1..23: mol_type = other RNA
taaatacagtcacatctgaaaat

SEQ ID NO: 10267 - RNA, 23 nt, synthetic construct
  source 1..23: mol_type = other RNA
tgaaatacagtcacatctgaaaa

SEQ ID NO: 10268 - RNA, 23 nt, synthetic construct
  source 1..23: mol_type = other RNA
tggaaatacagtcacatctgaaa

SEQ ID NO: 10269 - RNA, 23 nt, synthetic construct
  source 1..23: mol_type = other RNA
taggaaatacagtcacatctgaa

SEQ ID NO: 10270 - RNA, 23 nt, synthetic construct
  source 1..23: mol_type = other RNA
tcaggaaatacagtcacatctga

SEQ ID NO: 10271 - RNA, 23 nt, synthetic construct
  source 1..23: mol_type = other RNA
ttcaggaaatacagtcacatctg

SEQ ID NO: 10272 - RNA, 23 nt, synthetic construct
  source 1..23: mol_type = other RNA
tatcaggaaatacagtcacatct

SEQ ID NO: 10273 - RNA, 23 nt, synthetic construct
  source 1..23: mol_type = other RNA
tgatcaggaaatacagtcacatc

SEQ ID NO: 10274 - RNA, 23 nt, synthetic construct
  source 1..23: mol_type = other RNA
ttgatcaggaaatacagtcacat

SEQ ID NO: 10275 - RNA, 23 nt, synthetic construct
  source 1..23: mol_type = other RNA
taatgatcaggaaatacagtcac

SEQ ID NO: 10276 - RNA, 23 nt, synthetic construct
  source 1..23: mol_type = other RNA
tcaatgatcaggaaatacagtca

SEQ ID NO: 10277 - RNA, 23 nt, synthetic construct
  source 1..23: mol_type = other RNA
tccaatgatcaggaaatacagtc

SEQ ID NO: 10278 - RNA, 23 nt, synthetic construct
  source 1..23: mol_type = other RNA
taccaatgatcaggaaatacagt

SEQ ID NO: 10279 - RNA, 23 nt, synthetic construct
  source 1..23: mol_type = other RNA
tgaccaatgatcaggaaatacag

SEQ ID NO: 10280 - RNA, 23 nt, synthetic construct
  source 1..23: mol_type = other RNA
ttgggtataagggtaatctccta

SEQ ID NO: 10281 - RNA, 23 nt, synthetic construct
  source 1..23: mol_type = other RNA
taattgcagttggattttagccc

SEQ ID NO: 10282 - RNA, 23 nt, synthetic construct
  source 1..23: mol_type = other RNA
tagttggattttagcccgcacct

SEQ ID NO: 10283 - RNA, 23 nt, synthetic construct
  source 1..23: mol_type = other RNA
tcagttggattttagcccgcacc

SEQ ID NO: 10284 - RNA, 23 nt, synthetic construct
  source 1..23: mol_type = other RNA
tgcagttggattttagcccgcac

SEQ ID NO: 10285 - RNA, 23 nt, synthetic construct
  source 1..23: mol_type = other RNA
ttgcagttggattttagcccgca

SEQ ID NO: 10286 - RNA, 23 nt, synthetic construct
  source 1..23: mol_type = other RNA
tttgcagttggattttagcccgc

SEQ ID NO: 10287 - RNA, 23 nt, synthetic construct
  source 1..23: mol_type = other RNA
tattgcagttggattttagcccg

SEQ ID NO: 10288 - RNA, 23 nt, synthetic construct
  source 1..23: mol_type = other RNA
tcaattgcagttggattttagcc

SEQ ID NO: 10289 - RNA, 23 nt, synthetic construct
  source 1..23: mol_type = other RNA
tccaattgcagttggattttagc

SEQ ID NO: 10290 - RNA, 23 nt, synthetic construct
  source 1..23: mol_type = other RNA
tgccaattgcagttggattttag

SEQ ID NO: 10291 - RNA, 23 nt, synthetic construct
  source 1..23: mol_type = other RNA
tagccaattgcagttggatttta

SEQ ID NO: 10292 - RNA, 23 nt, synthetic construct
  source 1..23: mol_type = other RNA
tgagccaattgcagttggatttt

SEQ ID NO: 10293 - RNA, 23 nt, synthetic construct
  source 1..23: mol_type = other RNA
tggagccaattgcagttggattt

SEQ ID NO: 10294 - RNA, 23 nt, synthetic construct
  source 1..23: mol_type = other RNA
tgggagccaattgcagttggatt

SEQ ID NO: 10295 - RNA, 23 nt, synthetic construct
  source 1..23: mol_type = other RNA
taagccaataagatgcttctctg

SEQ ID NO: 10296 - RNA, 23 nt, synthetic construct
  source 1..23: mol_type = other RNA
ttataagccaataagatgcttct

SEQ ID NO: 10297 - RNA, 23 nt, synthetic construct
  source 1..23: mol_type = other RNA
tatataagccaataagatgcttc

SEQ ID NO: 10298 - RNA, 23 nt, synthetic construct
  source 1..23: mol_type = other RNA
ttctcattttctgaagatgtata

SEQ ID NO: 10299 - RNA, 23 nt, synthetic construct
  source 1..23: mol_type = other RNA
tttctcattttctgaagatgtat

SEQ ID NO: 10300 - RNA, 23 nt, synthetic construct
  source 1..23: mol_type = other RNA
tattctcattttctgaagatgta

SEQ ID NO: 10301 - RNA, 23 nt, synthetic construct
  source 1..23: mol_type = other RNA
taattctcattttctgaagatgt

SEQ ID NO: 10302 - RNA, 23 nt, synthetic construct
  source 1..23: mol_type = other RNA
ttaattctcattttctgaagatg

SEQ ID NO: 10303 - RNA, 23 nt, synthetic construct
  source 1..23: mol_type = other RNA
taagttctttgttcaatctgtag

SEQ ID NO: 10304 - RNA, 23 nt, synthetic construct
  source 1..23: mol_type = other RNA
ttaagttctttgttcaatctgta

SEQ ID NO: 10305 - RNA, 23 nt, synthetic construct
  source 1..23: mol_type = other RNA
tctaagttctttgttcaatctgt

SEQ ID NO: 10306 - RNA, 23 nt, synthetic construct
  source 1..23: mol_type = other RNA
ttctaagttctttgttcaatctg

SEQ ID NO: 10307 - RNA, 23 nt, synthetic construct
  source 1..23: mol_type = other RNA
tttctaagttctttgttcaatct

SEQ ID NO: 10308 - RNA, 23 nt, synthetic construct
  source 1..23: mol_type = other RNA
tcttctaagttctttgttcaatc

SEQ ID NO: 10309 - RNA, 23 nt, synthetic construct
  source 1..23: mol_type = other RNA
ttaaacaatcaatttctcttctc

SEQ ID NO: 10310 - RNA, 23 nt, synthetic construct
  source 1..23: mol_type = other RNA
tgttgaaaaattaaaccaacatg

SEQ ID NO: 10311 - RNA, 23 nt, synthetic construct
  source 1..23: mol_type = other RNA
tcaatttctcttctctcaggaat

SEQ ID NO: 10312 - RNA, 23 nt, synthetic construct
  source 1..23: mol_type = other RNA
ttcaatttctcttctctcaggaa

SEQ ID NO: 10313 - RNA, 23 nt, synthetic construct
  source 1..23: mol_type = other RNA
tatcaatttctcttctctcagga

SEQ ID NO: 10314 - RNA, 23 nt, synthetic construct
  source 1..23: mol_type = other RNA
taatcaatttctcttctctcagg

SEQ ID NO: 10315 - RNA, 23 nt, synthetic construct
  source 1..23: mol_type = other RNA
tcaatcaatttctcttctctcag

SEQ ID NO: 10316 - RNA, 23 nt, synthetic construct
  source 1..23: mol_type = other RNA
tacaatcaatttctcttctctca

SEQ ID NO: 10317 - RNA, 23 nt, synthetic construct
  source 1..23: mol_type = other RNA
taacaatcaatttctcttctctc

SEQ ID NO: 10318 - RNA, 23 nt, synthetic construct
  source 1..23: mol_type = other RNA
taaacaatcaatttctcttctct

SEQ ID NO: 10319 - RNA, 23 nt, synthetic construct
  source 1..23: mol_type = other RNA
tgataaacaatcaatttctcttc

SEQ ID NO: 10320 - RNA, 23 nt, synthetic construct
  source 1..23: mol_type = other RNA
tggttgaaaaattaaaccaacat

SEQ ID NO: 10321 - RNA, 23 nt, synthetic construct
  source 1..23: mol_type = other RNA
tgggttgaaaaattaaaccaaca

SEQ ID NO: 10322 - RNA, 23 nt, synthetic construct
  source 1..23: mol_type = other RNA
ttgggttgaaaaattaaaccaac

SEQ ID NO: 10323 - RNA, 23 nt, synthetic construct
  source 1..23: mol_type = other RNA
taatgaaaactgtatggacgata

SEQ ID NO: 10324 - RNA, 23 nt, synthetic construct
  source 1..23: mol_type = other RNA
tgaatgaaaactgtatggacgat

SEQ ID NO: 10325 - RNA, 23 nt, synthetic construct
  source 1..23: mol_type = other RNA
tagaatgaaaactgtatggacga

SEQ ID NO: 10326 - RNA, 23 nt, synthetic construct
  source 1..23: mol_type = other RNA
ttagaatgaaaactgtatggacg

SEQ ID NO: 10327 - RNA, 23 nt, synthetic construct
  source 1..23: mol_type = other RNA
tatagaatgaaaactgtatggac

SEQ ID NO: 10328 - RNA, 23 nt, synthetic construct
  source 1..23: mol_type = other RNA
tcatagaatgaaaactgtatgga

SEQ ID NO: 10329 - RNA, 23 nt, synthetic construct
  source 1..23: mol_type = other RNA
tgcatagaatgaaaactgtatgg

SEQ ID NO: 10330 - RNA, 23 nt, synthetic construct
  source 1..23: mol_type = other RNA
ttgcatagaatgaaaactgtatg

SEQ ID NO: 10331 - RNA, 23 nt, synthetic construct
  source 1..23: mol_type = other RNA
tatgcatagaatgaaaactgtat

SEQ ID NO: 10332 - RNA, 23 nt, synthetic construct
  source 1..23: mol_type = other RNA
tcatgcatagaatgaaaactgta

SEQ ID NO: 10333 - RNA, 23 nt, synthetic construct
  source 1..23: mol_type = other RNA
tccatgcatagaatgaaaactgt

SEQ ID NO: 10334 - RNA, 23 nt, synthetic construct
  source 1..23: mol_type = other RNA
taaaatttaggcacacaatcctc

SEQ ID NO: 10335 - RNA, 23 nt, synthetic construct
  source 1..23: mol_type = other RNA
tatttgttagacaaaatttaggc

SEQ ID NO: 10336 - RNA, 23 nt, synthetic construct
  source 1..23: mol_type = other RNA
ttattagtaaatgtcattctacg

SEQ ID NO: 10337 - RNA, 23 nt, synthetic construct
  source 1..23: mol_type = other RNA
ttgttagacaaaatttaggcaca

SEQ ID NO: 10338 - RNA, 23 nt, synthetic construct
  source 1..23: mol_type = other RNA
tcatttgttagacaaaatttagg

SEQ ID NO: 10339 - RNA, 23 nt, synthetic construct
  source 1..23: mol_type = other RNA
tgcatttgttagacaaaatttag

SEQ ID NO: 10340 - RNA, 23 nt, synthetic construct
  source 1..23: mol_type = other RNA
tcttgcatttgttagacaaaatt

SEQ ID NO: 10341 - RNA, 23 nt, synthetic construct
  source 1..23: mol_type = other RNA
ttattatttagcctatggaagaa

SEQ ID NO: 10342 - RNA, 23 nt, synthetic construct
  source 1..23: mol_type = other RNA
tctagaatttaatattttggctc

SEQ ID NO: 10343 - RNA, 23 nt, synthetic construct
  source 1..23: mol_type = other RNA
tcggaaaagaactagaatttaat

SEQ ID NO: 10344 - RNA, 23 nt, synthetic construct
  source 1..23: mol_type = other RNA
tgcggaaaagaactagaatttaa

SEQ ID NO: 10345 - RNA, 23 nt, synthetic construct
  source 1..23: mol_type = other RNA
ttgcggaaaagaactagaattta

SEQ ID NO: 10346 - RNA, 23 nt, synthetic construct
  source 1..23: mol_type = other RNA
ttcattgcggaaaagaactagaa

SEQ ID NO: 10347 - RNA, 23 nt, synthetic construct
  source 1..23: mol_type = other RNA
tttgcggaaaagaactagaattt

SEQ ID NO: 10348 - RNA, 23 nt, synthetic construct
  source 1..23: mol_type = other RNA
tattgcggaaaagaactagaatt

SEQ ID NO: 10349 - RNA, 23 nt, synthetic construct
  source 1..23: mol_type = other RNA
tcattgcggaaaagaactagaat

SEQ ID NO: 10350 - RNA, 23 nt, synthetic construct
  source 1..23: mol_type = other RNA
tgtcattgcggaaaagaactaga

SEQ ID NO: 10351 - RNA, 23 nt, synthetic construct
  source 1..23: mol_type = other RNA
tagtcattgcggaaaagaactag

SEQ ID NO: 10352 - RNA, 23 nt, synthetic construct
  source 1..23: mol_type = other RNA
ttagtcattgcggaaaagaacta

SEQ ID NO: 10353 - RNA, 23 nt, synthetic construct
  source 1..23: mol_type = other RNA
tctagtcattgcggaaaagaact

SEQ ID NO: 10354 - RNA, 23 nt, synthetic construct
  source 1..23: mol_type = other RNA
tactagtcattgcggaaaagaac

SEQ ID NO: 10355 - RNA, 23 nt, synthetic construct
  source 1..23: mol_type = other RNA
tgtttgaataatcttctccagtc

SEQ ID NO: 10356 - RNA, 23 nt, synthetic construct
  source 1..23: mol_type = other RNA
taagtttgaataatcttctccag

SEQ ID NO: 10357 - RNA, 23 nt, synthetic construct
  source 1..23: mol_type = other RNA
taacctgaaacacagatcaagtt

SEQ ID NO: 10358 - RNA, 23 nt, synthetic construct
  source 1..23: mol_type = other RNA
tttaaaaacctgaaacacagatc

SEQ ID NO: 10359 - RNA, 23 nt, synthetic construct
  source 1..23: mol_type = other RNA
tttaggacatttaaaaacctgaa

SEQ ID NO: 10360 - RNA, 23 nt, synthetic construct
  source 1..23: mol_type = other RNA
tgtattagtactttgaaagtcaa

SEQ ID NO: 10361 - RNA, 23 nt, synthetic construct
  source 1..23: mol_type = other RNA
taagtcaatccaaaattcctttt

SEQ ID NO: 10362 - RNA, 23 nt, synthetic construct
  source 1..23: mol_type = other RNA
tattagtactttgaaagtcaatc

SEQ ID NO: 10363 - RNA, 23 nt, synthetic construct
  source 1..23: mol_type = other RNA
tgtataagaagagtcacgctacc

SEQ ID NO: 10364 - RNA, 23 nt, synthetic construct
  source 1..23: mol_type = other RNA
tttaggtataagaagagtcacgc

SEQ ID NO: 10365 - RNA, 23 nt, synthetic construct
  source 1..23: mol_type = other RNA
tacatttgtaatatgttcttagg

SEQ ID NO: 10366 - RNA, 23 nt, synthetic construct
  source 1..23: mol_type = other RNA
tagagttcaaggcatgttttgca

SEQ ID NO: 10367 - RNA, 23 nt, synthetic construct
  source 1..23: mol_type = other RNA
taagagttcaaggcatgttttgc

SEQ ID NO: 10368 - RNA, 23 nt, synthetic construct
  source 1..23: mol_type = other RNA
ttagttcaagagttcaaggcatg

SEQ ID NO: 10369 - RNA, 23 nt, synthetic construct
  source 1..23: mol_type = other RNA
tttttcacagtagttcaagagtt

SEQ ID NO: 10370 - RNA, 23 nt, synthetic construct
  source 1..23: mol_type = other RNA
tttcttttcacagtagttcaaga

SEQ ID NO: 10371 - RNA, 23 nt, synthetic construct
  source 1..23: mol_type = other RNA
tgattcttttcacagtagttcaa

SEQ ID NO: 10372 - RNA, 23 nt, synthetic construct
  source 1..23: mol_type = other RNA
ttacaaaaagtctttacaacggt

SEQ ID NO: 10373 - RNA, 23 nt, synthetic construct
  source 1..23: mol_type = other RNA
tttacaaaaagtctttacaacgg

SEQ ID NO: 10374 - RNA, 23 nt, synthetic construct
  source 1..23: mol_type = other RNA
ttacttaagagtatcagctagct

SEQ ID NO: 10375 - RNA, 23 nt, synthetic construct
  source 1..23: mol_type = other RNA
tttaagagtatcagctagcttac

SEQ ID NO: 10376 - RNA, 23 nt, synthetic construct
  source 1..23: mol_type = other RNA
ttttgatacagtttattgcccaa

SEQ ID NO: 10377 - RNA, 23 nt, synthetic construct
  source 1..23: mol_type = other RNA
tatacagtttattgcccaattcc

SEQ ID NO: 10378 - RNA, 23 nt, synthetic construct
  source 1..23: mol_type = other RNA
tgatacagtttattgcccaattc

SEQ ID NO: 10379 - RNA, 23 nt, synthetic construct
  source 1..23: mol_type = other RNA
ttgatacagtttattgcccaatt

SEQ ID NO: 10380 - RNA, 23 nt, synthetic construct
  source 1..23: mol_type = other RNA
tttgatacagtttattgcccaat

SEQ ID NO: 10381 - RNA, 23 nt, synthetic construct
  source 1..23: mol_type = other RNA
tttttgatacagtttattgccca

SEQ ID NO: 10382 - RNA, 23 nt, synthetic construct
  source 1..23: mol_type = other RNA
ttttttgatacagtttattgccc

SEQ ID NO: 10383 - RNA, 23 nt, synthetic construct
  source 1..23: mol_type = other RNA
tatttttgatacagtttattgcc

SEQ ID NO: 10384 - RNA, 23 nt, synthetic construct
  source 1..23: mol_type = other RNA
tcatctacatatttttgatacag

SEQ ID NO: 10385 - RNA, 23 nt, synthetic construct
  source 1..23: mol_type = other RNA
tccatctacatatttttgataca

SEQ ID NO: 10386 - RNA, 23 nt, synthetic construct
  source 1..23: mol_type = other RNA
ttccatctacatatttttgatac

SEQ ID NO: 10387 - RNA, 23 nt, synthetic construct
  source 1..23: mol_type = other RNA
ttttgaaattctcttcaccttcc

SEQ ID NO: 10388 - RNA, 23 nt, synthetic construct
  source 1..23: mol_type = other RNA
tagtttgaaattctcttcacctt

SEQ ID NO: 10389 - RNA, 23 nt, synthetic construct
  source 1..23: mol_type = other RNA
tgagtttgaaattctcttcacct

SEQ ID NO: 10390 - RNA, 23 nt, synthetic construct
  source 1..23: mol_type = other RNA
tctagaaattaatgaaacatctg

SEQ ID NO: 10391 - RNA, 23 nt, synthetic construct
  source 1..23: mol_type = other RNA
tcatattttcacagactagaaat

SEQ ID NO: 10392 - RNA, 23 nt, synthetic construct
  source 1..23: mol_type = other RNA
tgcatattttcacagactagaaa

SEQ ID NO: 10393 - RNA, 23 nt, synthetic construct
  source 1..23: mol_type = other RNA
ttgcatattttcacagactagaa

SEQ ID NO: 10394 - RNA, 23 nt, synthetic construct
  source 1..23: mol_type = other RNA
tatgcatattttcacagactaga

SEQ ID NO: 10395 - RNA, 23 nt, synthetic construct
  source 1..23: mol_type = other RNA
taatgcatattttcacagactag

SEQ ID NO: 10396 - RNA, 23 nt, synthetic construct
  source 1..23: mol_type = other RNA
taaatgcatattttcacagacta

SEQ ID NO: 10397 - RNA, 23 nt, synthetic construct
  source 1..23: mol_type = other RNA
taaaatgcatattttcacagact

SEQ ID NO: 10398 - RNA, 23 nt, synthetic construct
  source 1..23: mol_type = other RNA
ttaaaatgcatattttcacagac

SEQ ID NO: 10399 - RNA, 23 nt, synthetic construct
  source 1..23: mol_type = other RNA
tattttggtataaaggctatcac

SEQ ID NO: 10400 - RNA, 23 nt, synthetic construct
  source 1..23: mol_type = other RNA
tacttttatgacttgctgttggt

SEQ ID NO: 10401 - RNA, 23 nt, synthetic construct
  source 1..23: mol_type = other RNA
ttacttttatgacttgctgttgg

SEQ ID NO: 10402 - RNA, 23 nt, synthetic construct
  source 1..23: mol_type = other RNA
tatacttttatgacttgctgttg

SEQ ID NO: 10403 - RNA, 23 nt, synthetic construct
  source 1..23: mol_type = other RNA
taatacttttatgacttgctgtt

SEQ ID NO: 10404 - RNA, 23 nt, synthetic construct
  source 1..23: mol_type = other RNA
taaatacttttatgacttgctgt

SEQ ID NO: 10405 - RNA, 23 nt, synthetic construct
  source 1..23: mol_type = other RNA
ttaaatacttttatgacttgctg

SEQ ID NO: 10406 - RNA, 23 nt, synthetic construct
  source 1..23: mol_type = other RNA
taattatttacatctgaagacag

SEQ ID NO: 10407 - RNA, 23 nt, synthetic construct
  source 1..23: mol_type = other RNA
tcaatacattttcagaaaatgca

SEQ ID NO: 10408 - RNA, 23 nt, synthetic construct
  source 1..23: mol_type = other RNA
taatagagttctatatgcttcac

SEQ ID NO: 10409 - RNA, 23 nt, synthetic construct
  source 1..23: mol_type = other RNA
tgagttctatatgcttcacagaa

SEQ ID NO: 10410 - RNA, 23 nt, synthetic construct
  source 1..23: mol_type = other RNA
tagagttctatatgcttcacaga

SEQ ID NO: 10411 - RNA, 23 nt, synthetic construct
  source 1..23: mol_type = other RNA
ttagagttctatatgcttcacag

SEQ ID NO: 10412 - RNA, 23 nt, synthetic construct
  source 1..23: mol_type = other RNA
tatagagttctatatgcttcaca

SEQ ID NO: 10413 - RNA, 23 nt, synthetic construct
  source 1..23: mol_type = other RNA
taaatagagttctatatgcttca

SEQ ID NO: 10414 - RNA, 23 nt, synthetic construct
  source 1..23: mol_type = other RNA
taaaatagagttctatatgcttc

SEQ ID NO: 10415 - RNA, 23 nt, synthetic construct
  source 1..23: mol_type = other RNA
tgacacatcttcctttatttaaa

SEQ ID NO: 10416 - RNA, 21 nt, synthetic construct
  source 1..21: mol_type = other RNA
  modified_base 1: mod_base = OTHER; note = 2'-O-methylguanosine-3'-phosphorothioate
  modified_base 2: mod_base = OTHER; note = 2'-O-methylcytidine-3'-phosphorothioate
  modified_base 3: mod_base = OTHER; note = 2'-O-methylcytidine-3'-phosphate
  modified_base 4: mod_base = OTHER; note = 2'-O-methyladenosine-3'-phosphate
  modified_base 5: mod_base = OTHER; note = 2'-O-methyladenosine-3'-phosphate
  modified_base 6: mod_base = OTHER; note = 2'-O-docosanyl-cytidine-3'-phosphate
  modified_base 7: mod_base = OTHER; note = 2'-deoxy-2'-fluorocytidine-3'-phosphate
  modified_base 8: mod_base = OTHER; note = 2'-O-methylguanosine-3'-phosphate
  modified_base 9: mod_base = OTHER; note = 2'-deoxy-2'-fluorocytidine-3'-phosphate
  modified_base 10: mod_base = OTHER; note = 2'-deoxy-2'-fluoroguanosine-3'-phosphate
  modified_base 11: mod_base = OTHER; note = 2'-deoxy-2'-fluorocytidine-3'-phosphate
  modified_base 12: mod_base = OTHER; note = 2'-O-methyladenosine-3'-phosphate
  modified_base 13: mod_base = OTHER; note = 2'-O-methylcytidine-3'-phosphate
  modified_base 14: mod_base = OTHER; note = 2'-O-methyluridine-3'-phosphate
  modified_base 15: mod_base = OTHER; note = 2'-O-methyluridine-3'-phosphate
  modified_base 16: mod_base = OTHER; note = 2'-O-methylcytidine-3'-phosphate
  modified_base 17: mod_base = OTHER; note = 2'-O-methyladenosine-3'-phosphate
  modified_base 18: mod_base = OTHER; note = 2'-O-methyladenosine-3'-phosphate
  modified_base 19: mod_base = OTHER; note = 2'-O-methyladenosine-3'-phosphorothioate
  modified_base 20: mod_base = OTHER; note = 2'-O-methyladenosine-3'-phosphorothioate
  modified_base 21: mod_base = OTHER; note = 2'-O-methyladenosine
gccaaccgcgcacttcaaaaa

SEQ ID NO: 10417 - RNA, 21 nt, synthetic construct
  source 1..21: mol_type = other RNA
  modified_base 1: mod_base = OTHER; note = 2'-O-methylcytidine-3'-phosphorothioate
  modified_base 2: mod_base = OTHER; note = 2'-O-methylcytidine-3'-phosphorothioate
  modified_base 3: mod_base = OTHER; note = 2'-O-methyladenosine-3'-phosphate
  modified_base 4: mod_base = OTHER; note = 2'-O-methyladenosine-3'-phosphate
  modified_base 5: mod_base = OTHER; note = 2'-O-methylcytidine-3'-phosphate
  modified_base 6: mod_base = OTHER; note = 2'-O-docosanyl-cytidine-3'-phosphate
  modified_base 7: mod_base = OTHER; note = 2'-deoxy-2'-fluoroguanosine-3'-phosphate
  modified_base 8: mod_base = OTHER; note = 2'-O-methylcytidine-3'-phosphate
  modified_base 9: mod_base = OTHER; note = 2'-deoxy-2'-fluoroguanosine-3'-phosphate
  modified_base 10: mod_base = OTHER; note = 2'-deoxy-2'-fluorocytidine-3'-phosphate
  modified_base 11: mod_base = OTHER; note = 2'-deoxy-2'-fluoroadenosine-3'-phosphate
  modified_base 12: mod_base = OTHER; note = 2'-O-methylcytidine-3'-phosphate
  modified_base 13: mod_base = OTHER; note = 2'-O-methyluridine-3'-phosphate
  modified_base 14: mod_base = OTHER; note = 2'-O-methyluridine-3'-phosphate
  modified_base 15: mod_base = OTHER; note = 2'-O-methylcytidine-3'-phosphate
  modified_base 16: mod_base = OTHER; note = 2'-O-methyladenosine-3'-phosphate
  modified_base 17: mod_base = OTHER; note = 2'-O-methyladenosine-3'-phosphate
  modified_base 18: mod_base = OTHER; note = 2'-O-methyladenosine-3'-phosphate
  modified_base 19: mod_base = OTHER; note = 2'-O-methyladenosine-3'-phosphorothioate
  modified_base 20: mod_base = OTHER; note = 2'-O-methylguanosine-3'-phosphorothioate
  modified_base 21: mod_base = OTHER; note = 2'-O-methyladenosine
ccaaccgcgcacttcaaaaga

SEQ ID NO: 10418 - RNA, 21 nt, synthetic construct
  source 1..21: mol_type = other RNA
  modified_base 1: mod_base = OTHER; note = 2'-O-methylcytidine-3'-phosphorothioate
  modified_base 2: mod_base = OTHER; note = 2'-O-methyladenosine-3'-phosphorothioate
  modified_base 3: mod_base = OTHER; note = 2'-O-methyladenosine-3'-phosphate
  modified_base 4: mod_base = OTHER; note = 2'-O-methylcytidine-3'-phosphate
  modified_base 5: mod_base = OTHER; note = 2'-O-methylcytidine-3'-phosphate
  modified_base 6: mod_base = OTHER; note = 2'-O-docosanyl-guanosine-3'-phosphate
  modified_base 7: mod_base = OTHER; note = 2'-deoxy-2'-fluorocytidine-3'-phosphate
  modified_base 8: mod_base = OTHER; note = 2'-O-methylguanosine-3'-phosphate
  modified_base 9: mod_base = OTHER; note = 2'-deoxy-2'-fluorocytidine-3'-phosphate
  modified_base 10: mod_base = OTHER; note = 2'-deoxy-2'-fluoroadenosine-3'-phosphate
  modified_base 11: mod_base = OTHER; note = 2'-deoxy-2'-fluorocytidine-3'-phosphate
  modified_base 12: mod_base = OTHER; note = 2'-O-methyluridine-3'-phosphate
  modified_base 13: mod_base = OTHER; note = 2'-O-methyluridine-3'-phosphate
  modified_base 14: mod_base = OTHER; note = 2'-O-methylcytidine-3'-phosphate
  modified_base 15: mod_base = OTHER; note = 2'-O-methyladenosine-3'-phosphate
  modified_base 16: mod_base = OTHER; note = 2'-O-methyladenosine-3'-phosphate
  modified_base 17: mod_base = OTHER; note = 2'-O-methyladenosine-3'-phosphate
  modified_base 18: mod_base = OTHER; note = 2'-O-methyladenosine-3'-phosphate
  modified_base 19: mod_base = OTHER; note = 2'-O-methylguanosine-3'-phosphorothioate
  modified_base 20: mod_base = OTHER; note = 2'-O-methylguanosine-3'-phosphorothioate
  modified_base 21: mod_base = OTHER; note = 2'-O-methyladenosine
caaccgcgcacttcaaaagga

SEQ ID NO: 10419 - RNA, 21 nt, synthetic construct
  source 1..21: mol_type = other RNA
  modified_base 1: mod_base = OTHER; note = 2'-O-methyladenosine-3'-phosphorothioate
  modified_base 2: mod_base = OTHER; note = 2'-O-methyladenosine-3'-phosphorothioate
  modified_base 3: mod_base = OTHER; note = 2'-O-methylcytidine-3'-phosphate
  modified_base 4: mod_base = OTHER; note = 2'-O-methylcytidine-3'-phosphate
  modified_base 5: mod_base = OTHER; note = 2'-O-methylguanosine-3'-phosphate
  modified_base 6: mod_base = OTHER; note = 2'-O-docosanyl-cytidine-3'-phosphate
  modified_base 7: mod_base = OTHER; note = 2'-deoxy-2'-fluoroguanosine-3'-phosphate
  modified_base 8: mod_base = OTHER; note = 2'-O-methylcytidine-3'-phosphate
  modified_base 9: mod_base = OTHER; note = 2'-deoxy-2'-fluoroadenosine-3'-phosphate
  modified_base 10: mod_base = OTHER; note = 2'-deoxy-2'-fluorocytidine-3'-phosphate
  modified_base 11: mod_base = OTHER; note = 2'-deoxy-2'-fluorouridine-3'-phosphate
  modified_base 12: mod_base = OTHER; note = 2'-O-methyluridine-3'-phosphate
  modified_base 13: mod_base = OTHER; note = 2'-O-methylcytidine-3'-phosphate
  modified_base 14: mod_base = OTHER; note = 2'-O-methyladenosine-3'-phosphate
  modified_base 15: mod_base = OTHER; note = 2'-O-methyladenosine-3'-phosphate
  modified_base 16: mod_base = OTHER; note = 2'-O-methyladenosine-3'-phosphate
  modified_base 17: mod_base = OTHER; note = 2'-O-methyladenosine-3'-phosphate
  modified_base 18: mod_base = OTHER; note = 2'-O-methylguanosine-3'-phosphate
  modified_base 19: mod_base = OTHER; note = 2'-O-methylguanosine-3'-phosphorothioate
  modified_base 20: mod_base = OTHER; note = 2'-O-methylguanosine-3'-phosphorothioate
  modified_base 21: mod_base = OTHER; note = 2'-O-methyladenosine
aaccgcgcacttcaaaaggga

SEQ ID NO: 10420 - RNA, 21 nt, synthetic construct
  source 1..21: mol_type = other RNA
  modified_base 1: mod_base = OTHER; note = 2'-O-methyladenosine-3'-phosphorothioate
  modified_base 2: mod_base = OTHER; note = 2'-O-methylcytidine-3'-phosphorothioate
  modified_base 3: mod_base = OTHER; note = 2'-O-methylcytidine-3'-phosphate
  modified_base 4: mod_base = OTHER; note = 2'-O-methylguanosine-3'-phosphate
  modified_base 5: mod_base = OTHER; note = 2'-O-methylcytidine-3'-phosphate
  modified_base 6: mod_base = OTHER; note = 2'-O-docosanyl-guanosine-3'-phosphate
  modified_base 7: mod_base = OTHER; note = 2'-deoxy-2'-fluorocytidine-3'-phosphate
  modified_base 8: mod_base = OTHER; note = 2'-O-methyladenosine-3'-phosphate
  modified_base 9: mod_base = OTHER; note = 2'-deoxy-2'-fluorocytidine-3'-phosphate
  modified_base 10: mod_base = OTHER; note = 2'-deoxy-2'-fluorouridine-3'-phosphate
  modified_base 11: mod_base = OTHER; note = 2'-deoxy-2'-fluorouridine-3'-phosphate
  modified_base 12: mod_base = OTHER; note = 2'-O-methylcytidine-3'-phosphate
  modified_base 13: mod_base = OTHER; note = 2'-O-methyladenosine-3'-phosphate
  modified_base 14: mod_base = OTHER; note = 2'-O-methyladenosine-3'-phosphate
  modified_base 15: mod_base = OTHER; note = 2'-O-methyladenosine-3'-phosphate
  modified_base 16: mod_base = OTHER; note = 2'-O-methyladenosine-3'-phosphate
  modified_base 17: mod_base = OTHER; note = 2'-O-methylguanosine-3'-phosphate
  modified_base 18: mod_base = OTHER; note = 2'-O-methylguanosine-3'-phosphate
  modified_base 19: mod_base = OTHER; note = 2'-O-methylguanosine-3'-phosphorothioate
  modified_base 20: mod_base = OTHER; note = 2'-O-methyluridine-3'-phosphorothioate
  modified_base 21: mod_base = OTHER; note = 2'-O-methyladenosine
accgcgcacttcaaaagggta

SEQ ID NO: 10421 - RNA, 21 nt, synthetic construct
  source 1..21: mol_type = other RNA
  modified_base 1: mod_base = OTHER; note = 2'-O-methylcytidine-3'-phosphorothioate
  modified_base 2: mod_base = OTHER; note = 2'-O-methylcytidine-3'-phosphorothioate
  modified_base 3: mod_base = OTHER; note = 2'-O-methylguanosine-3'-phosphate
  modified_base 4: mod_base = OTHER; note = 2'-O-methylcytidine-3'-phosphate
  modified_base 5: mod_base = OTHER; note = 2'-O-methylguanosine-3'-phosphate
  modified_base 6: mod_base = OTHER; note = 2'-O-docosanyl-cytidine-3'-phosphate
  modified_base 7: mod_base = OTHER; note = 2'-deoxy-2'-fluoroadenosine-3'-phosphate
  modified_base 8: mod_base = OTHER; note = 2'-O-methylcytidine-3'-phosphate
  modified_base 9: mod_base = OTHER; note = 2'-deoxy-2'-fluorouridine-3'-phosphate
  modified_base 10: mod_base = OTHER; note = 2'-deoxy-2'-fluorouridine-3'-phosphate
  modified_base 11: mod_base = OTHER; note = 2'-deoxy-2'-fluorocytidine-3'-phosphate
  modified_base 12: mod_base = OTHER; note = 2'-O-methyladenosine-3'-phosphate
  modified_base 13: mod_base = OTHER; note = 2'-O-methyladenosine-3'-phosphate
  modified_base 14: mod_base = OTHER; note = 2'-O-methyladenosine-3'-phosphate
  modified_base 15: mod_base = OTHER; note = 2'-O-methyladenosine-3'-phosphate
  modified_base 16: mod_base = OTHER; note = 2'-O-methylguanosine-3'-phosphate
  modified_base 17: mod_base = OTHER; note = 2'-O-methylguanosine-3'-phosphate
  modified_base 18: mod_base = OTHER; note = 2'-O-methylguanosine-3'-phosphate
  modified_base 19: mod_base = OTHER; note = 2'-O-methyluridine-3'-phosphorothioate
  modified_base 20: mod_base = OTHER; note = 2'-O-methylguanosine-3'-phosphorothioate
  modified_base 21: mod_base = OTHER; note = 2'-O-methyladenosine
ccgcgcacttcaaaagggtga

SEQ ID NO: 10422 - RNA, 21 nt, synthetic construct
  source 1..21: mol_type = other RNA
  modified_base 1: mod_base = OTHER; note = 2'-O-methylcytidine-3'-phosphorothioate
  modified_base 2: mod_base = OTHER; note = 2'-O-methylguanosine-3'-phosphorothioate
  modified_base 3: mod_base = OTHER; note = 2'-O-methylcytidine-3'-phosphate
  modified_base 4: mod_base = OTHER; note = 2'-O-methylguanosine-3'-phosphate
  modified_base 5: mod_base = OTHER; note = 2'-O-methylcytidine-3'-phosphate
  modified_base 6: mod_base = OTHER; note = 2'-O-docosanyl-adenosine-3'-phosphate
  modified_base 7: mod_base = OTHER; note = 2'-deoxy-2'-fluorocytidine-3'-phosphate
  modified_base 8: mod_base = OTHER; note = 2'-O-methyluridine-3'-phosphate
  modified_base 9: mod_base = OTHER; note = 2'-deoxy-2'-fluorouridine-3'-phosphate
  modified_base 10: mod_base = OTHER; note = 2'-deoxy-2'-fluorocytidine-3'-phosphate
  modified_base 11: mod_base = OTHER; note = 2'-deoxy-2'-fluoroadenosine-3'-phosphate
  modified_base 12: mod_base = OTHER; note = 2'-O-methyladenosine-3'-phosphate
  modified_base 13: mod_base = OTHER; note = 2'-O-methyladenosine-3'-phosphate
  modified_base 14: mod_base = OTHER; note = 2'-O-methyladenosine-3'-phosphate
  modified_base 15: mod_base = OTHER; note = 2'-O-methylguanosine-3'-phosphate
  modified_base 16: mod_base = OTHER; note = 2'-O-methylguanosine-3'-phosphate
  modified_base 17: mod_base = OTHER; note = 2'-O-methylguanosine-3'-phosphate
  modified_base 18: mod_base = OTHER; note = 2'-O-methyluridine-3'-phosphate
  modified_base 19: mod_base = OTHER; note = 2'-O-methylguanosine-3'-phosphorothioate
  modified_base 20: mod_base = OTHER; note = 2'-O-methyluridine-3'-phosphorothioate
  modified_base 21: mod_base = OTHER; note = 2'-O-methyladenosine
cgcgcacttcaaaagggtgta

SEQ ID NO: 10423 - RNA, 21 nt, synthetic construct
  source 1..21: mol_type = other RNA
  modified_base 1: mod_base = OTHER; note = 2'-O-methylguanosine-3'-phosphorothioate
  modified_base 2: mod_base = OTHER; note = 2'-O-methylcytidine-3'-phosphorothioate
  modified_base 3: mod_base = OTHER; note = 2'-O-methylguanosine-3'-phosphate
  modified_base 4: mod_base = OTHER; note = 2'-O-methylcytidine-3'-phosphate
  modified_base 5: mod_base = OTHER; note = 2'-O-methyladenosine-3'-phosphate
  modified_base 6: mod_base = OTHER; note = 2'-O-docosanyl-cytidine-3'-phosphate
  modified_base 7: mod_base = OTHER; note = 2'-deoxy-2'-fluorouridine-3'-phosphate
  modified_base 8: mod_base = OTHER; note = 2'-O-methyluridine-3'-phosphate
  modified_base 9: mod_base = OTHER; note = 2'-deoxy-2'-fluorocytidine-3'-phosphate
  modified_base 10: mod_base = OTHER; note = 2'-deoxy-2'-fluoroadenosine-3'-phosphate
  modified_base 11: mod_base = OTHER; note = 2'-deoxy-2'-fluoroadenosine-3'-phosphate
  modified_base 12: mod_base = OTHER; note = 2'-O-methyladenosine-3'-phosphate
  modified_base 13: mod_base = OTHER; note = 2'-O-methyladenosine-3'-phosphate
  modified_base 14: mod_base = OTHER; note = 2'-O-methylguanosine-3'-phosphate
  modified_base 15: mod_base = OTHER; note = 2'-O-methylguanosine-3'-phosphate
  modified_base 16: mod_base = OTHER; note = 2'-O-methylguanosine-3'-phosphate
  modified_base 17: mod_base = OTHER; note = 2'-O-methyluridine-3'-phosphate
  modified_base 18: mod_base = OTHER; note = 2'-O-methylguanosine-3'-phosphate
  modified_base 19: mod_base = OTHER; note = 2'-O-methyluridine-3'-phosphorothioate
  modified_base 20: mod_base = OTHER; note = 2'-O-methylcytidine-3'-phosphorothioate
  modified_base 21: mod_base = OTHER; note = 2'-O-methyladenosine
gcgcacttcaaaagggtgtca

SEQ ID NO: 10424 - RNA, 21 nt, synthetic construct
  source 1..21: mol_type = other RNA
  modified_base 1: mod_base = OTHER; note = 2'-O-methylcytidine-3'-phosphorothioate
  modified_base 2: mod_base = OTHER; note = 2'-O-methylguanosine-3'-phosphorothioate
  modified_base 3: mod_base = OTHER; note = 2'-O-methylcytidine-3'-phosphate
  modified_base 4: mod_base = OTHER; note = 2'-O-methyladenosine-3'-phosphate
  modified_base 5: mod_base = OTHER; note = 2'-O-methylcytidine-3'-phosphate
  modified_base 6: mod_base = OTHER; note = 2'-O-docosanyl-uridine-3'-phosphate
  modified_base 7: mod_base = OTHER; note = 2'-deoxy-2'-fluorouridine-3'-phosphate
  modified_base 8: mod_base = OTHER; note = 2'-O-methylcytidine-3'-phosphate
  modified_base 9: mod_base = OTHER; note = 2'-deoxy-2'-fluoroadenosine-3'-phosphate
  modified_base 10: mod_base = OTHER; note = 2'-deoxy-2'-fluoroadenosine-3'-phosphate
  modified_base 11: mod_base = OTHER; note = 2'-deoxy-2'-fluoroadenosine-3'-phosphate
  modified_base 12: mod_base = OTHER; note = 2'-O-methyladenosine-3'-phosphate
  modified_base 13: mod_base = OTHER; note = 2'-O-methylguanosine-3'-phosphate
  modified_base 14: mod_base = OTHER; note = 2'-O-methylguanosine-3'-phosphate
  modified_base 15: mod_base = OTHER; note = 2'-O-methylguanosine-3'-phosphate
  modified_base 16: mod_base = OTHER; note = 2'-O-methyluridine-3'-phosphate
  modified_base 17: mod_base = OTHER; note = 2'-O-methylguanosine-3'-phosphate
  modified_base 18: mod_base = OTHER; note = 2'-O-methyluridine-3'-phosphate
  modified_base 19: mod_base = OTHER; note = 2'-O-methylcytidine-3'-phosphorothioate
  modified_base 20: mod_base = OTHER; note = 2'-O-methylguanosine-3'-phosphorothioate
  modified_base 21: mod_base = OTHER; note = 2'-O-methyladenosine
cgcacttcaaaagggtgtcga

SEQ ID NO: 10425 - RNA, 21 nt, synthetic construct
  source 1..21: mol_type = other RNA
  modified_base 1: mod_base = OTHER; note = 2'-O-methylguanosine-3'-phosphorothioate
  modified_base 2: mod_base = OTHER; note = 2'-O-methylcytidine-3'-phosphorothioate
  modified_base 3: mod_base = OTHER; note = 2'-O-methyladenosine-3'-phosphate
  modified_base 4: mod_base = OTHER; note = 2'-O-methylcytidine-3'-phosphate
  modified_base 5: mod_base = OTHER; note = 2'-O-methyluridine-3'-phosphate
  modified_base 6: mod_base = OTHER; note = 2'-O-docosanyl-uridine-3'-phosphate
  modified_base 7: mod_base = OTHER; note = 2'-deoxy-2'-fluorocytidine-3'-phosphate
  modified_base 8: mod_base = OTHER; note = 2'-O-methyladenosine-3'-phosphate
  modified_base 9: mod_base = OTHER; note = 2'-deoxy-2'-fluoroadenosine-3'-phosphate
  modified_base 10: mod_base = OTHER; note = 2'-deoxy-2'-fluoroadenosine-3'-phosphate
  modified_base 11: mod_base = OTHER; note = 2'-deoxy-2'-fluoroadenosine-3'-phosphate
  modified_base 12: mod_base = OTHER; note = 2'-O-methylguanosine-3'-phosphate
  modified_base 13: mod_base = OTHER; note = 2'-O-methylguanosine-3'-phosphate
  modified_base 14: mod_base = OTHER; note = 2'-O-methylguanosine-3'-phosphate
  modified_base 15: mod_base = OTHER; note = 2'-O-methyluridine-3'-phosphate
  modified_base 16: mod_base = OTHER; note = 2'-O-methylguanosine-3'-phosphate
  modified_base 17: mod_base = OTHER; note = 2'-O-methyluridine-3'-phosphate
  modified_base 18: mod_base = OTHER; note = 2'-O-methylcytidine-3'-phosphate
  modified_base 19: mod_base = OTHER; note = 2'-O-methylguanosine-3'-phosphorothioate
  modified_base 20: mod_base = OTHER; note = 2'-O-methylguanosine-3'-phosphorothioate
  modified_base 21: mod_base = OTHER; note = 2'-O-methyladenosine
gcacttcaaaagggtgtcgga

SEQ ID NO: 10426 - RNA, 21 nt, synthetic construct
  source 1..21: mol_type = other RNA
  modified_base 1: mod_base = OTHER; note = 2'-O-methylcytidine-3'-phosphorothioate
  modified_base 2: mod_base = OTHER; note = 2'-O-methyladenosine-3'-phosphorothioate
  modified_base 3: mod_base = OTHER; note = 2'-O-methylcytidine-3'-phosphate
  modified_base 4: mod_base = OTHER; note = 2'-O-methyluridine-3'-phosphate
  modified_base 5: mod_base = OTHER; note = 2'-O-methyluridine-3'-phosphate
  modified_base 6: mod_base = OTHER; note = 2'-O-docosanyl-cytidine-3'-phosphate
  modified_base 7: mod_base = OTHER; note = 2'-deoxy-2'-fluoroadenosine-3'-phosphate
  modified_base 8: mod_base = OTHER; note = 2'-O-methyladenosine-3'-phosphate
  modified_base 9: mod_base = OTHER; note = 2'-deoxy-2'-fluoroadenosine-3'-phosphate
  modified_base 10: mod_base = OTHER; note = 2'-deoxy-2'-fluoroadenosine-3'-phosphate
  modified_base 11: mod_base = OTHER; note = 2'-deoxy-2'-fluoroguanosine-3'-phosphate
  modified_base 12: mod_base = OTHER; note = 2'-O-methylguanosine-3'-phosphate
  modified_base 13: mod_base = OTHER; note = 2'-O-methylguanosine-3'-phosphate
  modified_base 14: mod_base = OTHER; note = 2'-O-methyluridine-3'-phosphate
  modified_base 15: mod_base = OTHER; note = 2'-O-methylguanosine-3'-phosphate
  modified_base 16: mod_base = OTHER; note = 2'-O-methyluridine-3'-phosphate
  modified_base 17: mod_base = OTHER; note = 2'-O-methylcytidine-3'-phosphate
  modified_base 18: mod_base = OTHER; note = 2'-O-methylguanosine-3'-phosphate
  modified_base 19: mod_base = OTHER; note = 2'-O-methylguanosine-3'-phosphorothioate
  modified_base 20: mod_base = OTHER; note = 2'-O-methyluridine-3'-phosphorothioate
  modified_base 21: mod_base = OTHER; note = 2'-O-methyladenosine
cacttcaaaagggtgtcggta

SEQ ID NO: 10427 - RNA, 21 nt, synthetic construct
  source 1..21: mol_type = other RNA
  modified_base 1: mod_base = OTHER; note = 2'-O-methylcytidine-3'-phosphorothioate
  modified_base 2: mod_base = OTHER; note = 2'-O-methyladenosine-3'-phosphorothioate
  modified_base 3: mod_base = OTHER; note = 2'-O-methylguanosine-3'-phosphate
  modified_base 4: mod_base = OTHER; note = 2'-O-methylguanosine-3'-phosphate
  modified_base 5: mod_base = OTHER; note = 2'-O-methyladenosine-3'-phosphate
  modified_base 6: mod_base = OTHER; note = 2'-O-docosanyl-cytidine-3'-phosphate
  modified_base 7: mod_base = OTHER; note = 2'-deoxy-2'-fluorouridine-3'-phosphate
  modified_base 8: mod_base = OTHER; note = 2'-O-methylguanosine-3'-phosphate
  modified_base 9: mod_base = OTHER; note = 2'-deoxy-2'-fluoroadenosine-3'-phosphate
  modified_base 10: mod_base = OTHER; note = 2'-deoxy-2'-fluoroadenosine-3'-phosphate
  modified_base 11: mod_base = OTHER; note = 2'-deoxy-2'-fluoroguanosine-3'-phosphate
  modified_base 12: mod_base = OTHER; note = 2'-O-methyluridine-3'-phosphate
  modified_base 13: mod_base = OTHER; note = 2'-O-methylguanosine-3'-phosphate
  modified_base 14: mod_base = OTHER; note = 2'-O-methyluridine-3'-phosphate
  modified_base 15: mod_base = OTHER; note = 2'-O-methylguanosine-3'-phosphate
  modified_base 16: mod_base = OTHER; note = 2'-O-methyluridine-3'-phosphate
  modified_base 17: mod_base = OTHER; note = 2'-O-methyladenosine-3'-phosphate
  modified_base 18: mod_base = OTHER; note = 2'-O-methyluridine-3'-phosphate
  modified_base 19: mod_base = OTHER; note = 2'-O-methylguanosine-3'-phosphorothioate
  modified_base 20: mod_base = OTHER; note = 2'-O-methyluridine-3'-phosphorothioate
  modified_base 21: mod_base = OTHER; note = 2'-O-methyladenosine
caggactgaagtgtgtatgta

SEQ ID NO: 10428 - RNA, 21 nt, synthetic construct
  source 1..21: mol_type = other RNA
  modified_base 1: mod_base = OTHER; note = 2'-O-methyluridine-3'-phosphorothioate
  modified_base 2: mod_base = OTHER; note = 2'-O-methylguanosine-3'-phosphorothioate
  modified_base 3: mod_base = OTHER; note = 2'-O-methyluridine-3'-phosphate
  modified_base 4: mod_base = OTHER; note = 2'-O-methylcytidine-3'-phosphate
  modified_base 5: mod_base = OTHER; note = 2'-O-methyluridine-3'-phosphate
  modified_base 6: mod_base = OTHER; note = 2'-O-docosanyl-uridine-3'-phosphate
  modified_base 7: mod_base = OTHER; note = 2'-deoxy-2'-fluorouridine-3'-phosphate
  modified_base 8: mod_base = OTHER; note = 2'-O-methyluridine-3'-phosphate
  modified_base 9: mod_base = OTHER; note = 2'-deoxy-2'-fluoroguanosine-3'-phosphate
  modified_base 10: mod_base = OTHER; note = 2'-deoxy-2'-fluorouridine-3'-phosphate
  modified_base 11: mod_base = OTHER; note = 2'-deoxy-2'-fluoroguanosine-3'-phosphate
  modified_base 12: mod_base = OTHER; note = 2'-O-methyluridine-3'-phosphate
  modified_base 13: mod_base = OTHER; note = 2'-O-methylguanosine-3'-phosphate
  modified_base 14: mod_base = OTHER; note = 2'-O-methyladenosine-3'-phosphate
  modified_base 15: mod_base = OTHER; note = 2'-O-methyluridine-3'-phosphate
  modified_base 16: mod_base = OTHER; note = 2'-O-methyluridine-3'-phosphate
  modified_base 17: mod_base = OTHER; note = 2'-O-methylcytidine-3'-phosphate
  modified_base 18: mod_base = OTHER; note = 2'-O-methyluridine-3'-phosphate
  modified_base 19: mod_base = OTHER; note = 2'-O-methyluridine-3'-phosphorothioate
  modified_base 20: mod_base = OTHER; note = 2'-O-methylcytidine-3'-phosphorothioate
  modified_base 21: mod_base = OTHER; note = 2'-O-methyladenosine
tgtcttttgtgtgattcttca

SEQ ID NO: 10429 - RNA, 21 nt, synthetic construct
  source 1..21: mol_type = other RNA
  modified_base 1: mod_base = OTHER; note = 2'-O-methyluridine-3'-phosphorothioate
  modified_base 2: mod_base = OTHER; note = 2'-O-methyluridine-3'-phosphorothioate
  modified_base 3: mod_base = OTHER; note = 2'-O-methylguanosine-3'-phosphate
  modified_base 4: mod_base = OTHER; note = 2'-O-methyluridine-3'-phosphate
  modified_base 5: mod_base = OTHER; note = 2'-O-methylguanosine-3'-phosphate
  modified_base 6: mod_base = OTHER; note = 2'-O-docosanyl-uridine-3'-phosphate
  modified_base 7: mod_base = OTHER; note = 2'-deoxy-2'-fluoroguanosine-3'-phosphate
  modified_base 8: mod_base = OTHER; note = 2'-O-methyladenosine-3'-phosphate
  modified_base 9: mod_base = OTHER; note = 2'-deoxy-2'-fluorouridine-3'-phosphate
  modified_base 10: mod_base = OTHER; note = 2'-deoxy-2'-fluorouridine-3'-phosphate
  modified_base 11: mod_base = OTHER; note = 2'-deoxy-2'-fluorocytidine-3'-phosphate
  modified_base 12: mod_base = OTHER; note = 2'-O-methyluridine-3'-phosphate
  modified_base 13: mod_base = OTHER; note = 2'-O-methyluridine-3'-phosphate
  modified_base 14: mod_base = OTHER; note = 2'-O-methylcytidine-3'-phosphate
  modified_base 15: mod_base = OTHER; note = 2'-O-methyladenosine-3'-phosphate
  modified_base 16: mod_base = OTHER; note = 2'-O-methyladenosine-3'-phosphate
  modified_base 17: mod_base = OTHER; note = 2'-O-methyladenosine-3'-phosphate
  modified_base 18: mod_base = OTHER; note = 2'-O-methylcytidine-3'-phosphate
  modified_base 19: mod_base = OTHER; note = 2'-O-methyluridine-3'-phosphorothioate
  modified_base 20: mod_base = OTHER; note = 2'-O-methyluridine-3'-phosphorothioate
  modified_base 21: mod_base = OTHER; note = 2'-O-methyladenosine
ttgtgtgattcttcaaactta

SEQ ID NO: 10430 - RNA, 21 nt, synthetic construct
  source 1..21: mol_type = other RNA
  modified_base 1: mod_base = OTHER; note = 2'-O-methylcytidine-3'-phosphorothioate
  modified_base 2: mod_base = OTHER; note = 2'-O-methylguanosine-3'-phosphorothioate
  modified_base 3: mod_base = OTHER; note = 2'-O-methylcytidine-3'-phosphate
  modified_base 4: mod_base = OTHER; note = 2'-O-methylcytidine-3'-phosphate
  modified_base 5: mod_base = OTHER; note = 2'-O-methyladenosine-3'-phosphate
  modified_base 6: mod_base = OTHER; note = 2'-O-docosanyl-guanosine-3'-phosphate
  modified_base 7: mod_base = OTHER; note = 2'-deoxy-2'-fluoroguanosine-3'-phosphate
  modified_base 8: mod_base = OTHER; note = 2'-O-methyladenosine-3'-phosphate
  modified_base 9: mod_base = OTHER; note = 2'-deoxy-2'-fluorocytidine-3'-phosphate
  modified_base 10: mod_base = OTHER; note = 2'-deoxy-2'-fluorouridine-3'-phosphate
  modified_base 11: mod_base = OTHER; note = 2'-deoxy-2'-fluoroguanosine-3'-phosphate
  modified_base 12: mod_base = OTHER; note = 2'-O-methyladenosine-3'-phosphate
  modified_base 13: mod_base = OTHER; note = 2'-O-methyladenosine-3'-phosphate
  modified_base 14: mod_base = OTHER; note = 2'-O-methylguanosine-3'-phosphate
  modified_base 15: mod_base = OTHER; note = 2'-O-methyluridine-3'-phosphate
  modified_base 16: mod_base = OTHER; note = 2'-O-methylguanosine-3'-phosphate
  modified_base 17: mod_base = OTHER; note = 2'-O-methyluridine-3'-phosphate
  modified_base 18: mod_base = OTHER; note = 2'-O-methylguanosine-3'-phosphate
  modified_base 19: mod_base = OTHER; note = 2'-O-methyluridine-3'-phosphorothioate
  modified_base 20: mod_base = OTHER; note = 2'-O-methyladenosine-3'-phosphorothioate
  modified_base 21: mod_base = OTHER; note = 2'-O-methyladenosine
cgccaggactgaagtgtgtaa

SEQ ID NO: 10431 - RNA, 21 nt, synthetic construct
  source 1..21: mol_type = other RNA
  modified_base 1: mod_base = OTHER; note = 2'-O-methylguanosine-3'-phosphorothioate
  modified_base 2: mod_base = OTHER; note = 2'-O-methylcytidine-3'-phosphorothioate
  modified_base 3: mod_base = OTHER; note = 2'-O-methylcytidine-3'-phosphate
  modified_base 4: mod_base = OTHER; note = 2'-O-methyladenosine-3'-phosphate
  modified_base 5: mod_base = OTHER; note = 2'-O-methylguanosine-3'-phosphate
  modified_base 6: mod_base = OTHER; note = 2'-O-docosanyl-guanosine-3'-phosphate
  modified_base 7: mod_base = OTHER; note = 2'-deoxy-2'-fluoroadenosine-3'-phosphate
  modified_base 8: mod_base = OTHER; note = 2'-O-methylcytidine-3'-phosphate
  modified_base 9: mod_base = OTHER; note = 2'-deoxy-2'-fluorouridine-3'-phosphate
  modified_base 10: mod_base = OTHER; note = 2'-deoxy-2'-fluoroguanosine-3'-phosphate
  modified_base 11: mod_base = OTHER; note = 2'-deoxy-2'-fluoroadenosine-3'-phosphate
  modified_base 12: mod_base = OTHER; note = 2'-O-methyladenosine-3'-phosphate
  modified_base 13: mod_base = OTHER; note = 2'-O-methylguanosine-3'-phosphate
  modified_base 14: mod_base = OTHER; note = 2'-O-methyluridine-3'-phosphate
  modified_base 15: mod_base = OTHER; note = 2'-O-methylguanosine-3'-phosphate
  modified_base 16: mod_base = OTHER; note = 2'-O-methyluridine-3'-phosphate
  modified_base 17: mod_base = OTHER; note = 2'-O-methylguanosine-3'-phosphate
  modified_base 18: mod_base = OTHER; note = 2'-O-methyluridine-3'-phosphate
  modified_base 19: mod_base = OTHER; note = 2'-O-methyladenosine-3'-phosphorothioate
  modified_base 20: mod_base = OTHER; note = 2'-O-methyluridine-3'-phosphorothioate
  modified_base 21: mod_base = OTHER; note = 2'-O-methyladenosine
gccaggactgaagtgtgtata

SEQ ID NO: 10432 - RNA, 21 nt, synthetic construct
  source 1..21: mol_type = other RNA
  modified_base 1: mod_base = OTHER; note = 2'-O-methylcytidine-3'-phosphorothioate
  modified_base 2: mod_base = OTHER; note = 2'-O-methylcytidine-3'-phosphorothioate
  modified_base 3: mod_base = OTHER; note = 2'-O-methyladenosine-3'-phosphate
  modified_base 4: mod_base = OTHER; note = 2'-O-methylguanosine-3'-phosphate
  modified_base 5: mod_base = OTHER; note = 2'-O-methylguanosine-3'-phosphate
  modified_base 6: mod_base = OTHER; note = 2'-O-docosanyl-adenosine-3'-phosphate
  modified_base 7: mod_base = OTHER; note = 2'-deoxy-2'-fluorocytidine-3'-phosphate
  modified_base 8: mod_base = OTHER; note = 2'-O-methyluridine-3'-phosphate
  modified_base 9: mod_base = OTHER; note = 2'-deoxy-2'-fluoroguanosine-3'-phosphate
  modified_base 10: mod_base = OTHER; note = 2'-deoxy-2'-fluoroadenosine-3'-phosphate
  modified_base 11: mod_base = OTHER; note = 2'-deoxy-2'-fluoroadenosine-3'-phosphate
  modified_base 12: mod_base = OTHER; note = 2'-O-methylguanosine-3'-phosphate
  modified_base 13: mod_base = OTHER; note = 2'-O-methyluridine-3'-phosphate
  modified_base 14: mod_base = OTHER; note = 2'-O-methylguanosine-3'-phosphate
  modified_base 15: mod_base = OTHER; note = 2'-O-methyluridine-3'-phosphate
  modified_base 16: mod_base = OTHER; note = 2'-O-methylguanosine-3'-phosphate
  modified_base 17: mod_base = OTHER; note = 2'-O-methyluridine-3'-phosphate
  modified_base 18: mod_base = OTHER; note = 2'-O-methyladenosine-3'-phosphate
  modified_base 19: mod_base = OTHER; note = 2'-O-methyluridine-3'-phosphorothioate
  modified_base 20: mod_base = OTHER; note = 2'-O-methylguanosine-3'-phosphorothioate
  modified_base 21: mod_base = OTHER; note = 2'-O-methyladenosine
ccaggactgaagtgtgtatga

SEQ ID NO: 10433 - RNA, 21 nt, synthetic construct
  source 1..21: mol_type = other RNA
  modified_base 1: mod_base = OTHER; note = 2'-O-methyladenosine-3'-phosphorothioate
  modified_base 2: mod_base = OTHER; note = 2'-O-methylguanosine-3'-phosphorothioate
  modified_base 3: mod_base = OTHER; note = 2'-O-methylguanosine-3'-phosphate
  modified_base 4: mod_base = OTHER; note = 2'-O-methyladenosine-3'-phosphate
  modified_base 5: mod_base = OTHER; note = 2'-O-methylcytidine-3'-phosphate
  modified_base 6: mod_base = OTHER; note = 2'-O-docosanyl-uridine-3'-phosphate
  modified_base 7: mod_base = OTHER; note = 2'-deoxy-2'-fluoroguanosine-3'-phosphate
  modified_base 8: mod_base = OTHER; note = 2'-O-methyladenosine-3'-phosphate
  modified_base 9: mod_base = OTHER; note = 2'-deoxy-2'-fluoroadenosine-3'-phosphate
  modified_base 10: mod_base = OTHER; note = 2'-deoxy-2'-fluoroguanosine-3'-phosphate
  modified_base 11: mod_base = OTHER; note = 2'-deoxy-2'-fluorouridine-3'-phosphate
  modified_base 12: mod_base = OTHER; note = 2'-O-methylguanosine-3'-phosphate
  modified_base 13: mod_base = OTHER; note = 2'-O-methyluridine-3'-phosphate
  modified_base 14: mod_base = OTHER; note = 2'-O-methylguanosine-3'-phosphate
  modified_base 15: mod_base = OTHER; note = 2'-O-methyluridine-3'-phosphate
  modified_base 16: mod_base = OTHER; note = 2'-O-methyladenosine-3'-phosphate
  modified_base 17: mod_base = OTHER; note = 2'-O-methyluridine-3'-phosphate
  modified_base 18: mod_base = OTHER; note = 2'-O-methylguanosine-3'-phosphate
  modified_base 19: mod_base = OTHER; note = 2'-O-methyluridine-3'-phosphorothioate
  modified_base 20: mod_base = OTHER; note = 2'-O-methylcytidine-3'-phosphorothioate
  modified_base 21: mod_base = OTHER; note = 2'-O-methyladenosine
aggactgaagtgtgtatgtca

SEQ ID NO: 10434 - RNA, 21 nt, synthetic construct
  source 1..21: mol_type = other RNA
  modified_base 1: mod_base = OTHER; note = 2'-O-methylguanosine-3'-phosphorothioate
  modified_base 2: mod_base = OTHER; note = 2'-O-methylguanosine-3'-phosphorothioate
  modified_base 3: mod_base = OTHER; note = 2'-O-methyladenosine-3'-phosphate
  modified_base 4: mod_base = OTHER; note = 2'-O-methylcytidine-3'-phosphate
  modified_base 5: mod_base = OTHER; note = 2'-O-methyluridine-3'-phosphate
  modified_base 6: mod_base = OTHER; note = 2'-O-docosanyl-guanosine-3'-phosphate
  modified_base 7: mod_base = OTHER; note = 2'-deoxy-2'-fluoroadenosine-3'-phosphate
  modified_base 8: mod_base = OTHER; note = 2'-O-methyladenosine-3'-phosphate
  modified_base 9: mod_base = OTHER; note = 2'-deoxy-2'-fluoroguanosine-3'-phosphate
  modified_base 10: mod_base = OTHER; note = 2'-deoxy-2'-fluorouridine-3'-phosphate
  modified_base 11: mod_base = OTHER; note = 2'-deoxy-2'-fluoroguanosine-3'-phosphate
  modified_base 12: mod_base = OTHER; note = 2'-O-methyluridine-3'-phosphate
  modified_base 13: mod_base = OTHER; note = 2'-O-methylguanosine-3'-phosphate
  modified_base 14: mod_base = OTHER; note = 2'-O-methyluridine-3'-phosphate
  modified_base 15: mod_base = OTHER; note = 2'-O-methyladenosine-3'-phosphate
  modified_base 16: mod_base = OTHER; note = 2'-O-methyluridine-3'-phosphate
  modified_base 17: mod_base = OTHER; note = 2'-O-methylguanosine-3'-phosphate
  modified_base 18: mod_base = OTHER; note = 2'-O-methyluridine-3'-phosphate
  modified_base 19: mod_base = OTHER; note = 2'-O-methylcytidine-3'-phosphorothioate
  modified_base 20: mod_base = OTHER; note = 2'-O-methyluridine-3'-phosphorothioate
  modified_base 21: mod_base = OTHER; note = 2'-O-methyladenosine
ggactgaagtgtgtatgtcta

SEQ ID NO: 10435 - RNA, 21 nt, synthetic construct
  source 1..21: mol_type = other RNA
  modified_base 1: mod_base = OTHER; note = 2'-O-methylguanosine-3'-phosphorothioate
  modified_base 2: mod_base = OTHER; note = 2'-O-methyladenosine-3'-phosphorothioate
  modified_base 3: mod_base = OTHER; note = 2'-O-methylcytidine-3'-phosphate
  modified_base 4: mod_base = OTHER; note = 2'-O-methyluridine-3'-phosphate
  modified_base 5: mod_base = OTHER; note = 2'-O-methylguanosine-3'-phosphate
  modified_base 6: mod_base = OTHER; note = 2'-O-docosanyl-adenosine-3'-phosphate
  modified_base 7: mod_base = OTHER; note = 2'-deoxy-2'-fluoroadenosine-3'-phosphate
  modified_base 8: mod_base = OTHER; note = 2'-O-methylguanosine-3'-phosphate
  modified_base 9: mod_base = OTHER; note = 2'-deoxy-2'-fluorouridine-3'-phosphate
  modified_base 10: mod_base = OTHER; note = 2'-deoxy-2'-fluoroguanosine-3'-phosphate
  modified_base 11: mod_base = OTHER; note = 2'-deoxy-2'-fluorouridine-3'-phosphate
  modified_base 12: mod_base = OTHER; note = 2'-O-methylguanosine-3'-phosphate
  modified_base 13: mod_base = OTHER; note = 2'-O-methyluridine-3'-phosphate
  modified_base 14: mod_base = OTHER; note = 2'-O-methyladenosine-3'-phosphate
  modified_base 15: mod_base = OTHER; note = 2'-O-methyluridine-3'-phosphate
  modified_base 16: mod_base = OTHER; note = 2'-O-methylguanosine-3'-phosphate
  modified_base 17: mod_base = OTHER; note = 2'-O-methyluridine-3'-phosphate
  modified_base 18: mod_base = OTHER; note = 2'-O-methylcytidine-3'-phosphate
  modified_base 19: mod_base = OTHER; note = 2'-O-methyluridine-3'-phosphorothioate
  modified_base 20: mod_base = OTHER; note = 2'-O-methyluridine-3'-phosphorothioate
  modified_base 21: mod_base = OTHER; note = 2'-O-methyladenosine
gactgaagtgtgtatgtctta

SEQ ID NO: 10436 - RNA, 21 nt, synthetic construct
  source 1..21: mol_type = other RNA
  modified_base 1: mod_base = OTHER; note = 2'-O-methyladenosine-3'-phosphorothioate
  modified_base 2: mod_base = OTHER; note = 2'-O-methylcytidine-3'-phosphorothioate
  modified_base 3: mod_base = OTHER; note = 2'-O-methyluridine-3'-phosphate
  modified_base 4: mod_base = OTHER; note = 2'-O-methylguanosine-3'-phosphate
  modified_base 5: mod_base = OTHER; note = 2'-O-methyladenosine-3'-phosphate
  modified_base 6: mod_base = OTHER; note = 2'-O-docosanyl-adenosine-3'-phosphate
  modified_base 7: mod_base = OTHER; note = 2'-deoxy-2'-fluoroguanosine-3'-phosphate
  modified_base 8: mod_base = OTHER; note = 2'-O-methyluridine-3'-phosphate
  modified_base 9: mod_base = OTHER; note = 2'-deoxy-2'-fluoroguanosine-3'-phosphate
  modified_base 10: mod_base = OTHER; note = 2'-deoxy-2'-fluorouridine-3'-phosphate
  modified_base 11: mod_base = OTHER; note = 2'-deoxy-2'-fluoroguanosine-3'-phosphate
  modified_base 12: mod_base = OTHER; note = 2'-O-methyluridine-3'-phosphate
  modified_base 13: mod_base = OTHER; note = 2'-O-methyladenosine-3'-phosphate
  modified_base 14: mod_base = OTHER; note = 2'-O-methyluridine-3'-phosphate
  modified_base 15: mod_base = OTHER; note = 2'-O-methylguanosine-3'-phosphate
  modified_base 16: mod_base = OTHER; note = 2'-O-methyluridine-3'-phosphate
  modified_base 17: mod_base = OTHER; note = 2'-O-methylcytidine-3'-phosphate
  modified_base 18: mod_base = OTHER; note = 2'-O-methyluridine-3'-phosphate
  modified_base 19: mod_base = OTHER; note = 2'-O-methyluridine-3'-phosphorothioate
  modified_base 20: mod_base = OTHER; note = 2'-O-methyluridine-3'-phosphorothioate
  modified_base 21: mod_base = OTHER; note = 2'-O-methyladenosine
actgaagtgtgtatgtcttta

SEQ ID NO: 10437 - RNA, 21 nt, synthetic construct
  source 1..21: mol_type = other RNA
  modified_base 1: mod_base = OTHER; note = 2'-O-methylcytidine-3'-phosphorothioate
  modified_base 2: mod_base = OTHER; note = 2'-O-methyluridine-3'-phosphorothioate
  modified_base 3: mod_base = OTHER; note = 2'-O-methylguanosine-3'-phosphate
  modified_base 4: mod_base = OTHER; note = 2'-O-methyladenosine-3'-phosphate
  modified_base 5: mod_base = OTHER; note = 2'-O-methyladenosine-3'-phosphate
  modified_base 6: mod_base = OTHER; note = 2'-O-docosanyl-guanosine-3'-phosphate
  modified_base 7: mod_base = OTHER; note = 2'-deoxy-2'-fluorouridine-3'-phosphate
  modified_base 8: mod_base = OTHER; note = 2'-O-methylguanosine-3'-phosphate
  modified_base 9: mod_base = OTHER; note = 2'-deoxy-2'-fluorouridine-3'-phosphate
  modified_base 10: mod_base = OTHER; note = 2'-deoxy-2'-fluoroguanosine-3'-phosphate
  modified_base 11: mod_base = OTHER; note = 2'-deoxy-2'-fluorouridine-3'-phosphate
  modified_base 12: mod_base = OTHER; note = 2'-O-methyladenosine-3'-phosphate
  modified_base 13: mod_base = OTHER; note = 2'-O-methyluridine-3'-phosphate
  modified_base 14: mod_base = OTHER; note = 2'-O-methylguanosine-3'-phosphate
  modified_base 15: mod_base = OTHER; note = 2'-O-methyluridine-3'-phosphate
  modified_base 16: mod_base = OTHER; note = 2'-O-methylcytidine-3'-phosphate
  modified_base 17: mod_base = OTHER; note = 2'-O-methyluridine-3'-phosphate
  modified_base 18: mod_base = OTHER; note = 2'-O-methyluridine-3'-phosphate
  modified_base 19: mod_base = OTHER; note = 2'-O-methyluridine-3'-phosphorothioate
  modified_base 20: mod_base = OTHER; note = 2'-O-methyluridine-3'-phosphorothioate
  modified_base 21: mod_base = OTHER; note = 2'-O-methyladenosine
ctgaagtgtgtatgtctttta

SEQ ID NO: 10438 - RNA, 21 nt, synthetic construct
  source 1..21: mol_type = other RNA
  modified_base 1: mod_base = OTHER; note = 2'-O-methyluridine-3'-phosphorothioate
  modified_base 2: mod_base = OTHER; note = 2'-O-methylguanosine-3'-phosphorothioate
  modified_base 3: mod_base = OTHER; note = 2'-O-methyladenosine-3'-phosphate
  modified_base 4: mod_base = OTHER; note = 2'-O-methyladenosine-3'-phosphate
  modified_base 5: mod_base = OTHER; note = 2'-O-methylguanosine-3'-phosphate
  modified_base 6: mod_base = OTHER; note = 2'-O-docosanyl-uridine-3'-phosphate
  modified_base 7: mod_base = OTHER; note = 2'-deoxy-2'-fluoroguanosine-3'-phosphate
  modified_base 8: mod_base = OTHER; note = 2'-O-methyluridine-3'-phosphate
  modified_base 9: mod_base = OTHER; note = 2'-deoxy-2'-fluoroguanosine-3'-phosphate
  modified_base 10: mod_base = OTHER; note = 2'-deoxy-2'-fluorouridine-3'-phosphate
  modified_base 11: mod_base = OTHER; note = 2'-deoxy-2'-fluoroadenosine-3'-phosphate
  modified_base 12: mod_base = OTHER; note = 2'-O-methyluridine-3'-phosphate
  modified_base 13: mod_base = OTHER; note = 2'-O-methylguanosine-3'-phosphate
  modified_base 14: mod_base = OTHER; note = 2'-O-methyluridine-3'-phosphate
  modified_base 15: mod_base = OTHER; note = 2'-O-methylcytidine-3'-phosphate
  modified_base 16: mod_base = OTHER; note = 2'-O-methyluridine-3'-phosphate
  modified_base 17: mod_base = OTHER; note = 2'-O-methyluridine-3'-phosphate
  modified_base 18: mod_base = OTHER; note = 2'-O-methyluridine-3'-phosphate
  modified_base 19: mod_base = OTHER; note = 2'-O-methyluridine-3'-phosphorothioate
  modified_base 20: mod_base = OTHER; note = 2'-O-methylguanosine-3'-phosphorothioate
  modified_base 21: mod_base = OTHER; note = 2'-O-methyladenosine
tgaagtgtgtatgtcttttga

SEQ ID NO: 10439 - RNA, 21 nt, synthetic construct
  source 1..21: mol_type = other RNA
  modified_base 1: mod_base = OTHER; note = 2'-O-methylguanosine-3'-phosphorothioate
  modified_base 2: mod_base = OTHER; note = 2'-O-methyladenosine-3'-phosphorothioate
  modified_base 3: mod_base = OTHER; note = 2'-O-methyladenosine-3'-phosphate
  modified_base 4: mod_base = OTHER; note = 2'-O-methylguanosine-3'-phosphate
  modified_base 5: mod_base = OTHER; note = 2'-O-methyluridine-3'-phosphate
  modified_base 6: mod_base = OTHER; note = 2'-O-docosanyl-guanosine-3'-phosphate
  modified_base 7: mod_base = OTHER; note = 2'-deoxy-2'-fluorouridine-3'-phosphate
  modified_base 8: mod_base = OTHER; note = 2'-O-methylguanosine-3'-phosphate
  modified_base 9: mod_base = OTHER; note = 2'-deoxy-2'-fluorouridine-3'-phosphate
  modified_base 10: mod_base = OTHER; note = 2'-deoxy-2'-fluoroadenosine-3'-phosphate
  modified_base 11: mod_base = OTHER; note = 2'-deoxy-2'-fluorouridine-3'-phosphate
  modified_base 12: mod_base = OTHER; note = 2'-O-methylguanosine-3'-phosphate
  modified_base 13: mod_base = OTHER; note = 2'-O-methyluridine-3'-phosphate
  modified_base 14: mod_base = OTHER; note = 2'-O-methylcytidine-3'-phosphate
  modified_base 15: mod_base = OTHER; note = 2'-O-methyluridine-3'-phosphate
  modified_base 16: mod_base = OTHER; note = 2'-O-methyluridine-3'-phosphate
  modified_base 17: mod_base = OTHER; note = 2'-O-methyluridine-3'-phosphate
  modified_base 18: mod_base = OTHER; note = 2'-O-methyluridine-3'-phosphate
  modified_base 19: mod_base = OTHER; note = 2'-O-methylguanosine-3'-phosphorothioate
  modified_base 20: mod_base = OTHER; note = 2'-O-methyluridine-3'-phosphorothioate
  modified_base 21: mod_base = OTHER; note = 2'-O-methyladenosine
gaagtgtgtatgtcttttgta

SEQ ID NO: 10440 - RNA, 21 nt, synthetic construct
  source 1..21: mol_type = other RNA
  modified_base 1: mod_base = OTHER; note = 2'-O-methyladenosine-3'-phosphorothioate
  modified_base 2: mod_base = OTHER; note = 2'-O-methyladenosine-3'-phosphorothioate
  modified_base 3: mod_base = OTHER; note = 2'-O-methylguanosine-3'-phosphate
  modified_base 4: mod_base = OTHER; note = 2'-O-methyluridine-3'-phosphate
  modified_base 5: mod_base = OTHER; note = 2'-O-methylguanosine-3'-phosphate
  modified_base 6: mod_base = OTHER; note = 2'-O-docosanyl-uridine-3'-phosphate
  modified_base 7: mod_base = OTHER; note = 2'-deoxy-2'-fluoroguanosine-3'-phosphate
  modified_base 8: mod_base = OTHER; note = 2'-O-methyluridine-3'-phosphate
  modified_base 9: mod_base = OTHER; note = 2'-deoxy-2'-fluoroadenosine-3'-phosphate
  modified_base 10: mod_base = OTHER; note = 2'-deoxy-2'-fluorouridine-3'-phosphate
  modified_base 11: mod_base = OTHER; note = 2'-deoxy-2'-fluoroguanosine-3'-phosphate
  modified_base 12: mod_base = OTHER; note = 2'-O-methyluridine-3'-phosphate
  modified_base 13: mod_base = OTHER; note = 2'-O-methylcytidine-3'-phosphate
  modified_base 14: mod_base = OTHER; note = 2'-O-methyluridine-3'-phosphate
  modified_base 15: mod_base = OTHER; note = 2'-O-methyluridine-3'-phosphate
  modified_base 16: mod_base = OTHER; note = 2'-O-methyluridine-3'-phosphate
  modified_base 17: mod_base = OTHER; note = 2'-O-methyluridine-3'-phosphate
  modified_base 18: mod_base = OTHER; note = 2'-O-methylguanosine-3'-phosphate
  modified_base 19: mod_base = OTHER; note = 2'-O-methyluridine-3'-phosphorothioate
  modified_base 20: mod_base = OTHER; note = 2'-O-methylguanosine-3'-phosphorothioate
  modified_base 21: mod_base = OTHER; note = 2'-O-methyladenosine
aagtgtgtatgtcttttgtga

SEQ ID NO: 10441 - RNA, 21 nt, synthetic construct
  source 1..21: mol_type = other RNA
  modified_base 1: mod_base = OTHER; note = 2'-O-methyladenosine-3'-phosphorothioate
  modified_base 2: mod_base = OTHER; note = 2'-O-methylguanosine-3'-phosphorothioate
  modified_base 3: mod_base = OTHER; note = 2'-O-methyluridine-3'-phosphate
  modified_base 4: mod_base = OTHER; note = 2'-O-methylguanosine-3'-phosphate
  modified_base 5: mod_base = OTHER; note = 2'-O-methyluridine-3'-phosphate
  modified_base 6: mod_base = OTHER; note = 2'-O-docosanyl-guanosine-3'-phosphate
  modified_base 7: mod_base = OTHER; note = 2'-deoxy-2'-fluorouridine-3'-phosphate
  modified_base 8: mod_base = OTHER; note = 2'-O-methyladenosine-3'-phosphate
  modified_base 9: mod_base = OTHER; note = 2'-deoxy-2'-fluorouridine-3'-phosphate
  modified_base 10: mod_base = OTHER; note = 2'-deoxy-2'-fluoroguanosine-3'-phosphate
  modified_base 11: mod_base = OTHER; note = 2'-deoxy-2'-fluorouridine-3'-phosphate
  modified_base 12: mod_base = OTHER; note = 2'-O-methylcytidine-3'-phosphate
  modified_base 13: mod_base = OTHER; note = 2'-O-methyluridine-3'-phosphate
  modified_base 14: mod_base = OTHER; note = 2'-O-methyluridine-3'-phosphate
  modified_base 15: mod_base = OTHER; note = 2'-O-methyluridine-3'-phosphate
  modified_base 16: mod_base = OTHER; note = 2'-O-methyluridine-3'-phosphate
  modified_base 17: mod_base = OTHER; note = 2'-O-methylguanosine-3'-phosphate
  modified_base 18: mod_base = OTHER; note = 2'-O-methyluridine-3'-phosphate
  modified_base 19: mod_base = OTHER; note = 2'-O-methylguanosine-3'-phosphorothioate
  modified_base 20: mod_base = OTHER; note = 2'-O-methyluridine-3'-phosphorothioate
  modified_base 21: mod_base = OTHER; note = 2'-O-methyladenosine
agtgtgtatgtcttttgtgta

SEQ ID NO: 10442 - RNA, 21 nt, synthetic construct
  source 1..21: mol_type = other RNA
  modified_base 1: mod_base = OTHER; note = 2'-O-methylguanosine-3'-phosphorothioate
  modified_base 2: mod_base = OTHER; note = 2'-O-methyluridine-3'-phosphorothioate
  modified_base 3: mod_base = OTHER; note = 2'-O-methylguanosine-3'-phosphate
  modified_base 4: mod_base = OTHER; note = 2'-O-methyluridine-3'-phosphate
  modified_base 5: mod_base = OTHER; note = 2'-O-methylguanosine-3'-phosphate
  modified_base 6: mod_base = OTHER; note = 2'-O-docosanyl-uridine-3'-phosphate
  modified_base 7: mod_base = OTHER; note = 2'-deoxy-2'-fluoroadenosine-3'-phosphate
  modified_base 8: mod_base = OTHER; note = 2'-O-methyluridine-3'-phosphate
  modified_base 9: mod_base = OTHER; note = 2'-deoxy-2'-fluoroguanosine-3'-phosphate
  modified_base 10: mod_base = OTHER; note = 2'-deoxy-2'-fluorouridine-3'-phosphate
  modified_base 11: mod_base = OTHER; note = 2'-deoxy-2'-fluorocytidine-3'-phosphate
  modified_base 12: mod_base = OTHER; note = 2'-O-methyluridine-3'-phosphate
  modified_base 13: mod_base = OTHER; note = 2'-O-methyluridine-3'-phosphate
  modified_base 14: mod_base = OTHER; note = 2'-O-methyluridine-3'-phosphate
  modified_base 15: mod_base = OTHER; note = 2'-O-methyluridine-3'-phosphate
  modified_base 16: mod_base = OTHER; note = 2'-O-methylguanosine-3'-phosphate
  modified_base 17: mod_base = OTHER; note = 2'-O-methyluridine-3'-phosphate
  modified_base 18: mod_base = OTHER; note = 2'-O-methylguanosine-3'-phosphate
  modified_base 19: mod_base = OTHER; note = 2'-O-methyluridine-3'-phosphorothioate
  modified_base 20: mod_base = OTHER; note = 2'-O-methylguanosine-3'-phosphorothioate
  modified_base 21: mod_base = OTHER; note = 2'-O-methyladenosine
gtgtgtatgtcttttgtgtga

SEQ ID NO: 10443 - RNA, 21 nt, synthetic construct
  source 1..21: mol_type = other RNA
  modified_base 1: mod_base = OTHER; note = 2'-O-methyluridine-3'-phosphorothioate
  modified_base 2: mod_base = OTHER; note = 2'-O-methylguanosine-3'-phosphorothioate
  modified_base 3: mod_base = OTHER; note = 2'-O-methyluridine-3'-phosphate
  modified_base 4: mod_base = OTHER; note = 2'-O-methylguanosine-3'-phosphate
  modified_base 5: mod_base = OTHER; note = 2'-O-methyluridine-3'-phosphate
  modified_base 6: mod_base = OTHER; note = 2'-O-docosanyl-adenosine-3'-phosphate
  modified_base 7: mod_base = OTHER; note = 2'-deoxy-2'-fluorouridine-3'-phosphate
  modified_base 8: mod_base = OTHER; note = 2'-O-methylguanosine-3'-phosphate
  modified_base 9: mod_base = OTHER; note = 2'-deoxy-2'-fluorouridine-3'-phosphate
  modified_base 10: mod_base = OTHER; note = 2'-deoxy-2'-fluorocytidine-3'-phosphate
  modified_base 11: mod_base = OTHER; note = 2'-deoxy-2'-fluorouridine-3'-phosphate
  modified_base 12: mod_base = OTHER; note = 2'-O-methyluridine-3'-phosphate
  modified_base 13: mod_base = OTHER; note = 2'-O-methyluridine-3'-phosphate
  modified_base 14: mod_base = OTHER; note = 2'-O-methyluridine-3'-phosphate
  modified_base 15: mod_base = OTHER; note = 2'-O-methylguanosine-3'-phosphate
  modified_base 16: mod_base = OTHER; note = 2'-O-methyluridine-3'-phosphate
  modified_base 17: mod_base = OTHER; note = 2'-O-methylguanosine-3'-phosphate
  modified_base 18: mod_base = OTHER; note = 2'-O-methyluridine-3'-phosphate
  modified_base 19: mod_base = OTHER; note = 2'-O-methylguanosine-3'-phosphorothioate
  modified_base 20: mod_base = OTHER; note = 2'-O-methyladenosine-3'-phosphorothioate
  modified_base 21: mod_base = OTHER; note = 2'-O-methyladenosine
tgtgtatgtcttttgtgtgaa

SEQ ID NO: 10444 - RNA, 21 nt, synthetic construct
  source 1..21: mol_type = other RNA
  modified_base 1: mod_base = OTHER; note = 2'-O-methylguanosine-3'-phosphorothioate
  modified_base 2: mod_base = OTHER; note = 2'-O-methyluridine-3'-phosphorothioate
  modified_base 3: mod_base = OTHER; note = 2'-O-methylguanosine-3'-phosphate
  modified_base 4: mod_base = OTHER; note = 2'-O-methyluridine-3'-phosphate
  modified_base 5: mod_base = OTHER; note = 2'-O-methyladenosine-3'-phosphate
  modified_base 6: mod_base = OTHER; note = 2'-O-docosanyl-uridine-3'-phosphate
  modified_base 7: mod_base = OTHER; note = 2'-deoxy-2'-fluoroguanosine-3'-phosphate
  modified_base 8: mod_base = OTHER; note = 2'-O-methyluridine-3'-phosphate
  modified_base 9: mod_base = OTHER; note = 2'-deoxy-2'-fluorocytidine-3'-phosphate
  modified_base 10: mod_base = OTHER; note = 2'-deoxy-2'-fluorouridine-3'-phosphate
  modified_base 11: mod_base = OTHER; note = 2'-deoxy-2'-fluorouridine-3'-phosphate
  modified_base 12: mod_base = OTHER; note = 2'-O-methyluridine-3'-phosphate
  modified_base 13: mod_base = OTHER; note = 2'-O-methyluridine-3'-phosphate
  modified_base 14: mod_base = OTHER; note = 2'-O-methylguanosine-3'-phosphate
  modified_base 15: mod_base = OTHER; note = 2'-O-methyluridine-3'-phosphate
  modified_base 16: mod_base = OTHER; note = 2'-O-methylguanosine-3'-phosphate
  modified_base 17: mod_base = OTHER; note = 2'-O-methyluridine-3'-phosphate
  modified_base 18: mod_base = OTHER; note = 2'-O-methylguanosine-3'-phosphate
  modified_base 19: mod_base = OTHER; note = 2'-O-methyladenosine-3'-phosphorothioate
  modified_base 20: mod_base = OTHER; note = 2'-O-methyluridine-3'-phosphorothioate
  modified_base 21: mod_base = OTHER; note = 2'-O-methyladenosine
gtgtatgtcttttgtgtgata

SEQ ID NO: 10445 - RNA, 21 nt, synthetic construct
  source 1..21: mol_type = other RNA
  modified_base 1: mod_base = OTHER; note = 2'-O-methyluridine-3'-phosphorothioate
  modified_base 2: mod_base = OTHER; note = 2'-O-methylguanosine-3'-phosphorothioate
  modified_base 3: mod_base = OTHER; note = 2'-O-methyluridine-3'-phosphate
  modified_base 4: mod_base = OTHER; note = 2'-O-methyladenosine-3'-phosphate
  modified_base 5: mod_base = OTHER; note = 2'-O-methyluridine-3'-phosphate
  modified_base 6: mod_base = OTHER; note = 2'-O-docosanyl-guanosine-3'-phosphate
  modified_base 7: mod_base = OTHER; note = 2'-deoxy-2'-fluorouridine-3'-phosphate
  modified_base 8: mod_base = OTHER; note = 2'-O-methylcytidine-3'-phosphate
  modified_base 9: mod_base = OTHER; note = 2'-deoxy-2'-fluorouridine-3'-phosphate
  modified_base 10: mod_base = OTHER; note = 2'-deoxy-2'-fluorouridine-3'-phosphate
  modified_base 11: mod_base = OTHER; note = 2'-deoxy-2'-fluorouridine-3'-phosphate
  modified_base 12: mod_base = OTHER; note = 2'-O-methyluridine-3'-phosphate
  modified_base 13: mod_base = OTHER; note = 2'-O-methylguanosine-3'-phosphate
  modified_base 14: mod_base = OTHER; note = 2'-O-methyluridine-3'-phosphate
  modified_base 15: mod_base = OTHER; note = 2'-O-methylguanosine-3'-phosphate
  modified_base 16: mod_base = OTHER; note = 2'-O-methyluridine-3'-phosphate
  modified_base 17: mod_base = OTHER; note = 2'-O-methylguanosine-3'-phosphate
  modified_base 18: mod_base = OTHER; note = 2'-O-methyladenosine-3'-phosphate
  modified_base 19: mod_base = OTHER; note = 2'-O-methyluridine-3'-phosphorothioate
  modified_base 20: mod_base = OTHER; note = 2'-O-methyluridine-3'-phosphorothioate
  modified_base 21: mod_base = OTHER; note = 2'-O-methyladenosine
tgtatgtcttttgtgtgatta

SEQ ID NO: 10446 - RNA, 21 nt, synthetic construct
  source 1..21: mol_type = other RNA
  modified_base 1: mod_base = OTHER; note = 2'-O-methylguanosine-3'-phosphorothioate
  modified_base 2: mod_base = OTHER; note = 2'-O-methyluridine-3'-phosphorothioate
  modified_base 3: mod_base = OTHER; note = 2'-O-methyladenosine-3'-phosphate
  modified_base 4: mod_base = OTHER; note = 2'-O-methyluridine-3'-phosphate
  modified_base 5: mod_base = OTHER; note = 2'-O-methylguanosine-3'-phosphate
  modified_base 6: mod_base = OTHER; note = 2'-O-docosanyl-uridine-3'-phosphate
  modified_base 7: mod_base = OTHER; note = 2'-deoxy-2'-fluorocytidine-3'-phosphate
  modified_base 8: mod_base = OTHER; note = 2'-O-methyluridine-3'-phosphate
  modified_base 9: mod_base = OTHER; note = 2'-deoxy-2'-fluorouridine-3'-phosphate
  modified_base 10: mod_base = OTHER; note = 2'-deoxy-2'-fluorouridine-3'-phosphate
  modified_base 11: mod_base = OTHER; note = 2'-deoxy-2'-fluorouridine-3'-phosphate
  modified_base 12: mod_base = OTHER; note = 2'-O-methylguanosine-3'-phosphate
  modified_base 13: mod_base = OTHER; note = 2'-O-methyluridine-3'-phosphate
  modified_base 14: mod_base = OTHER; note = 2'-O-methylguanosine-3'-phosphate
  modified_base 15: mod_base = OTHER; note = 2'-O-methyluridine-3'-phosphate
  modified_base 16: mod_base = OTHER; note = 2'-O-methylguanosine-3'-phosphate
  modified_base 17: mod_base = OTHER; note = 2'-O-methyladenosine-3'-phosphate
  modified_base 18: mod_base = OTHER; note = 2'-O-methyluridine-3'-phosphate
  modified_base 19: mod_base = OTHER; note = 2'-O-methyluridine-3'-phosphorothioate
  modified_base 20: mod_base = OTHER; note = 2'-O-methylcytidine-3'-phosphorothioate
  modified_base 21: mod_base = OTHER; note = 2'-O-methyladenosine
gtatgtcttttgtgtgattca

SEQ ID NO: 10447 - RNA, 21 nt, synthetic construct
  source 1..21: mol_type = other RNA
  modified_base 1: mod_base = OTHER; note = 2'-O-methyluridine-3'-phosphorothioate
  modified_base 2: mod_base = OTHER; note = 2'-O-methyladenosine-3'-phosphorothioate
  modified_base 3: mod_base = OTHER; note = 2'-O-methyluridine-3'-phosphate
  modified_base 4: mod_base = OTHER; note = 2'-O-methylguanosine-3'-phosphate
  modified_base 5: mod_base = OTHER; note = 2'-O-methyluridine-3'-phosphate
  modified_base 6: mod_base = OTHER; note = 2'-O-docosanyl-cytidine-3'-phosphate
  modified_base 7: mod_base = OTHER; note = 2'-deoxy-2'-fluorouridine-3'-phosphate
  modified_base 8: mod_base = OTHER; note = 2'-O-methyluridine-3'-phosphate
  modified_base 9: mod_base = OTHER; note = 2'-deoxy-2'-fluorouridine-3'-phosphate
  modified_base 10: mod_base = OTHER; note = 2'-deoxy-2'-fluorouridine-3'-phosphate
  modified_base 11: mod_base = OTHER; note = 2'-deoxy-2'-fluoroguanosine-3'-phosphate
  modified_base 12: mod_base = OTHER; note = 2'-O-methyluridine-3'-phosphate
  modified_base 13: mod_base = OTHER; note = 2'-O-methylguanosine-3'-phosphate
  modified_base 14: mod_base = OTHER; note = 2'-O-methyluridine-3'-phosphate
  modified_base 15: mod_base = OTHER; note = 2'-O-methylguanosine-3'-phosphate
  modified_base 16: mod_base = OTHER; note = 2'-O-methyladenosine-3'-phosphate
  modified_base 17: mod_base = OTHER; note = 2'-O-methyluridine-3'-phosphate
  modified_base 18: mod_base = OTHER; note = 2'-O-methyluridine-3'-phosphate
  modified_base 19: mod_base = OTHER; note = 2'-O-methylcytidine-3'-phosphorothioate
  modified_base 20: mod_base = OTHER; note = 2'-O-methyluridine-3'-phosphorothioate
  modified_base 21: mod_base = OTHER; note = 2'-O-methyladenosine
tatgtcttttgtgtgattcta

SEQ ID NO: 10448 - RNA, 21 nt, synthetic construct
  source 1..21: mol_type = other RNA
  modified_base 1: mod_base = OTHER; note = 2'-O-methyladenosine-3'-phosphorothioate
  modified_base 2: mod_base = OTHER; note = 2'-O-methyluridine-3'-phosphorothioate
  modified_base 3: mod_base = OTHER; note = 2'-O-methylguanosine-3'-phosphate
  modified_base 4: mod_base = OTHER; note = 2'-O-methyluridine-3'-phosphate
  modified_base 5: mod_base = OTHER; note = 2'-O-methylcytidine-3'-phosphate
  modified_base 6: mod_base = OTHER; note = 2'-O-docosanyl-uridine-3'-phosphate
  modified_base 7: mod_base = OTHER; note = 2'-deoxy-2'-fluorouridine-3'-phosphate
  modified_base 8: mod_base = OTHER; note = 2'-O-methyluridine-3'-phosphate
  modified_base 9: mod_base = OTHER; note = 2'-deoxy-2'-fluorouridine-3'-phosphate
  modified_base 10: mod_base = OTHER; note = 2'-deoxy-2'-fluoroguanosine-3'-phosphate
  modified_base 11: mod_base = OTHER; note = 2'-deoxy-2'-fluorouridine-3'-phosphate
  modified_base 12: mod_base = OTHER; note = 2'-O-methylguanosine-3'-phosphate
  modified_base 13: mod_base = OTHER; note = 2'-O-methyluridine-3'-phosphate
  modified_base 14: mod_base = OTHER; note = 2'-O-methylguanosine-3'-phosphate
  modified_base 15: mod_base = OTHER; note = 2'-O-methyladenosine-3'-phosphate
  modified_base 16: mod_base = OTHER; note = 2'-O-methyluridine-3'-phosphate
  modified_base 17: mod_base = OTHER; note = 2'-O-methyluridine-3'-phosphate
  modified_base 18: mod_base = OTHER; note = 2'-O-methylcytidine-3'-phosphate
  modified_base 19: mod_base = OTHER; note = 2'-O-methyluridine-3'-phosphorothioate
  modified_base 20: mod_base = OTHER; note = 2'-O-methyluridine-3'-phosphorothioate
  modified_base 21: mod_base = OTHER; note = 2'-O-methyladenosine
atgtcttttgtgtgattctta

SEQ ID NO: 10449 - RNA, 21 nt, synthetic construct
  source 1..21: mol_type = other RNA
  modified_base 1: mod_base = OTHER; note = 2'-O-methylguanosine-3'-phosphorothioate
  modified_base 2: mod_base = OTHER; note = 2'-O-methyluridine-3'-phosphorothioate
  modified_base 3: mod_base = OTHER; note = 2'-O-methylcytidine-3'-phosphate
  modified_base 4: mod_base = OTHER; note = 2'-O-methyluridine-3'-phosphate
  modified_base 5: mod_base = OTHER; note = 2'-O-methyluridine-3'-phosphate
  modified_base 6: mod_base = OTHER; note = 2'-O-docosanyl-uridine-3'-phosphate
  modified_base 7: mod_base = OTHER; note = 2'-deoxy-2'-fluorouridine-3'-phosphate
  modified_base 8: mod_base = OTHER; note = 2'-O-methylguanosine-3'-phosphate
  modified_base 9: mod_base = OTHER; note = 2'-deoxy-2'-fluorouridine-3'-phosphate
  modified_base 10: mod_base = OTHER; note = 2'-deoxy-2'-fluoroguanosine-3'-phosphate
  modified_base 11: mod_base = OTHER; note = 2'-deoxy-2'-fluorouridine-3'-phosphate
  modified_base 12: mod_base = OTHER; note = 2'-O-methylguanosine-3'-phosphate
  modified_base 13: mod_base = OTHER; note = 2'-O-methyladenosine-3'-phosphate
  modified_base 14: mod_base = OTHER; note = 2'-O-methyluridine-3'-phosphate
  modified_base 15: mod_base = OTHER; note = 2'-O-methyluridine-3'-phosphate
  modified_base 16: mod_base = OTHER; note = 2'-O-methylcytidine-3'-phosphate
  modified_base 17: mod_base = OTHER; note = 2'-O-methyluridine-3'-phosphate
  modified_base 18: mod_base = OTHER; note = 2'-O-methyluridine-3'-phosphate
  modified_base 19: mod_base = OTHER; note = 2'-O-methylcytidine-3'-phosphorothioate
  modified_base 20: mod_base = OTHER; note = 2'-O-methyladenosine-3'-phosphorothioate
  modified_base 21: mod_base = OTHER; note = 2'-O-methyladenosine
gtcttttgtgtgattcttcaa

SEQ ID NO: 10450 - RNA, 21 nt, synthetic construct
  source 1..21: mol_type = other RNA
  modified_base 1: mod_base = OTHER; note = 2'-O-methyluridine-3'-phosphorothioate
  modified_base 2: mod_base = OTHER; note = 2'-O-methylcytidine-3'-phosphorothioate
  modified_base 3: mod_base = OTHER; note = 2'-O-methyluridine-3'-phosphate
  modified_base 4: mod_base = OTHER; note = 2'-O-methyluridine-3'-phosphate
  modified_base 5: mod_base = OTHER; note = 2'-O-methyluridine-3'-phosphate
  modified_base 6: mod_base = OTHER; note = 2'-O-docosanyl-uridine-3'-phosphate
  modified_base 7: mod_base = OTHER; note = 2'-deoxy-2'-fluoroguanosine-3'-phosphate
  modified_base 8: mod_base = OTHER; note = 2'-O-methyluridine-3'-phosphate
  modified_base 9: mod_base = OTHER; note = 2'-deoxy-2'-fluoroguanosine-3'-phosphate
  modified_base 10: mod_base = OTHER; note = 2'-deoxy-2'-fluorouridine-3'-phosphate
  modified_base 11: mod_base = OTHER; note = 2'-deoxy-2'-fluoroguanosine-3'-phosphate
  modified_base 12: mod_base = OTHER; note = 2'-O-methyladenosine-3'-phosphate
  modified_base 13: mod_base = OTHER; note = 2'-O-methyluridine-3'-phosphate
  modified_base 14: mod_base = OTHER; note = 2'-O-methyluridine-3'-phosphate
  modified_base 15: mod_base = OTHER; note = 2'-O-methylcytidine-3'-phosphate
  modified_base 16: mod_base = OTHER; note = 2'-O-methyluridine-3'-phosphate
  modified_base 17: mod_base = OTHER; note = 2'-O-methyluridine-3'-phosphate
  modified_base 18: mod_base = OTHER; note = 2'-O-methylcytidine-3'-phosphate
  modified_base 19: mod_base = OTHER; note = 2'-O-methyladenosine-3'-phosphorothioate
  modified_base 20: mod_base = OTHER; note = 2'-O-methyladenosine-3'-phosphorothioate
  modified_base 21: mod_base = OTHER; note = 2'-O-methyladenosine
tcttttgtgtgattcttcaaa

SEQ ID NO: 10451 - RNA, 21 nt, synthetic construct
  source 1..21: mol_type = other RNA
  modified_base 1: mod_base = OTHER; note = 2'-O-methylcytidine-3'-phosphorothioate
  modified_base 2: mod_base = OTHER; note = 2'-O-methyluridine-3'-phosphorothioate
  modified_base 3: mod_base = OTHER; note = 2'-O-methyluridine-3'-phosphate
  modified_base 4: mod_base = OTHER; note = 2'-O-methyluridine-3'-phosphate
  modified_base 5: mod_base = OTHER; note = 2'-O-methyluridine-3'-phosphate
  modified_base 6: mod_base = OTHER; note = 2'-O-docosanyl-guanosine-3'-phosphate
  modified_base 7: mod_base = OTHER; note = 2'-deoxy-2'-fluorouridine-3'-phosphate
  modified_base 8: mod_base = OTHER; note = 2'-O-methylguanosine-3'-phosphate
  modified_base 9: mod_base = OTHER; note = 2'-deoxy-2'-fluorouridine-3'-phosphate
  modified_base 10: mod_base = OTHER; note = 2'-deoxy-2'-fluoroguanosine-3'-phosphate
  modified_base 11: mod_base = OTHER; note = 2'-deoxy-2'-fluoroadenosine-3'-phosphate
  modified_base 12: mod_base = OTHER; note = 2'-O-methyluridine-3'-phosphate
  modified_base 13: mod_base = OTHER; note = 2'-O-methyluridine-3'-phosphate
  modified_base 14: mod_base = OTHER; note = 2'-O-methylcytidine-3'-phosphate
  modified_base 15: mod_base = OTHER; note = 2'-O-methyluridine-3'-phosphate
  modified_base 16: mod_base = OTHER; note = 2'-O-methyluridine-3'-phosphate
  modified_base 17: mod_base = OTHER; note = 2'-O-methylcytidine-3'-phosphate
  modified_base 18: mod_base = OTHER; note = 2'-O-methyladenosine-3'-phosphate
  modified_base 19: mod_base = OTHER; note = 2'-O-methyladenosine-3'-phosphorothioate
  modified_base 20: mod_base = OTHER; note = 2'-O-methyladenosine-3'-phosphorothioate
  modified_base 21: mod_base = OTHER; note = 2'-O-methyladenosine
cttttgtgtgattcttcaaaa

SEQ ID NO: 10452 - RNA, 21 nt, synthetic construct
  source 1..21: mol_type = other RNA
  modified_base 1: mod_base = OTHER; note = 2'-O-methyluridine-3'-phosphorothioate
  modified_base 2: mod_base = OTHER; note = 2'-O-methyluridine-3'-phosphorothioate
  modified_base 3: mod_base = OTHER; note = 2'-O-methyluridine-3'-phosphate
  modified_base 4: mod_base = OTHER; note = 2'-O-methyluridine-3'-phosphate
  modified_base 5: mod_base = OTHER; note = 2'-O-methylguanosine-3'-phosphate
  modified_base 6: mod_base = OTHER; note = 2'-O-docosanyl-uridine-3'-phosphate
  modified_base 7: mod_base = OTHER; note = 2'-deoxy-2'-fluoroguanosine-3'-phosphate
  modified_base 8: mod_base = OTHER; note = 2'-O-methyluridine-3'-phosphate
  modified_base 9: mod_base = OTHER; note = 2'-deoxy-2'-fluoroguanosine-3'-phosphate
  modified_base 10: mod_base = OTHER; note = 2'-deoxy-2'-fluoroadenosine-3'-phosphate
  modified_base 11: mod_base = OTHER; note = 2'-deoxy-2'-fluorouridine-3'-phosphate
  modified_base 12: mod_base = OTHER; note = 2'-O-methyluridine-3'-phosphate
  modified_base 13: mod_base = OTHER; note = 2'-O-methylcytidine-3'-phosphate
  modified_base 14: mod_base = OTHER; note = 2'-O-methyluridine-3'-phosphate
  modified_base 15: mod_base = OTHER; note = 2'-O-methyluridine-3'-phosphate
  modified_base 16: mod_base = OTHER; note = 2'-O-methylcytidine-3'-phosphate
  modified_base 17: mod_base = OTHER; note = 2'-O-methyladenosine-3'-phosphate
  modified_base 18: mod_base = OTHER; note = 2'-O-methyladenosine-3'-phosphate
  modified_base 19: mod_base = OTHER; note = 2'-O-methyladenosine-3'-phosphorothioate
  modified_base 20: mod_base = OTHER; note = 2'-O-methylcytidine-3'-phosphorothioate
  modified_base 21: mod_base = OTHER; note = 2'-O-methyladenosine
ttttgtgtgattcttcaaaca

SEQ ID NO: 10453 - RNA, 21 nt, synthetic construct
  source 1..21: mol_type = other RNA
  modified_base 1: mod_base = OTHER; note = 2'-O-methyluridine-3'-phosphorothioate
  modified_base 2: mod_base = OTHER; note = 2'-O-methyluridine-3'-phosphorothioate
  modified_base 3: mod_base = OTHER; note = 2'-O-methyluridine-3'-phosphate
  modified_base 4: mod_base = OTHER; note = 2'-O-methylguanosine-3'-phosphate
  modified_base 5: mod_base = OTHER; note = 2'-O-methyluridine-3'-phosphate
  modified_base 6: mod_base = OTHER; note = 2'-O-docosanyl-guanosine-3'-phosphate
  modified_base 7: mod_base = OTHER; note = 2'-deoxy-2'-fluorouridine-3'-phosphate
  modified_base 8: mod_base = OTHER; note = 2'-O-methylguanosine-3'-phosphate
  modified_base 9: mod_base = OTHER; note = 2'-deoxy-2'-fluoroadenosine-3'-phosphate
  modified_base 10: mod_base = OTHER; note = 2'-deoxy-2'-fluorouridine-3'-phosphate
  modified_base 11: mod_base = OTHER; note = 2'-deoxy-2'-fluorouridine-3'-phosphate
  modified_base 12: mod_base = OTHER; note = 2'-O-methylcytidine-3'-phosphate
  modified_base 13: mod_base = OTHER; note = 2'-O-methyluridine-3'-phosphate
  modified_base 14: mod_base = OTHER; note = 2'-O-methyluridine-3'-phosphate
  modified_base 15: mod_base = OTHER; note = 2'-O-methylcytidine-3'-phosphate
  modified_base 16: mod_base = OTHER; note = 2'-O-methyladenosine-3'-phosphate
  modified_base 17: mod_base = OTHER; note = 2'-O-methyladenosine-3'-phosphate
  modified_base 18: mod_base = OTHER; note = 2'-O-methyladenosine-3'-phosphate
  modified_base 19: mod_base = OTHER; note = 2'-O-methylcytidine-3'-phosphorothioate
  modified_base 20: mod_base = OTHER; note = 2'-O-methyluridine-3'-phosphorothioate
  modified_base 21: mod_base = OTHER; note = 2'-O-methyladenosine
tttgtgtgattcttcaaacta

SEQ ID NO: 10454 - RNA, 21 nt, synthetic construct
  source 1..21: mol_type = other RNA
  modified_base 1: mod_base = OTHER; note = 2'-O-methylcytidine-3'-phosphorothioate
  modified_base 2: mod_base = OTHER; note = 2'-O-methylcytidine-3'-phosphorothioate
  modified_base 3: mod_base = OTHER; note = 2'-O-methyladenosine-3'-phosphate
  modified_base 4: mod_base = OTHER; note = 2'-O-methyladenosine-3'-phosphate
  modified_base 5: mod_base = OTHER; note = 2'-O-methyladenosine-3'-phosphate
  modified_base 6: mod_base = OTHER; note = 2'-O-docosanyl-cytidine-3'-phosphate
  modified_base 7: mod_base = OTHER; note = 2'-deoxy-2'-fluoroadenosine-3'-phosphate
  modified_base 8: mod_base = OTHER; note = 2'-O-methylguanosine-3'-phosphate
  modified_base 9: mod_base = OTHER; note = 2'-deoxy-2'-fluoroadenosine-3'-phosphate
  modified_base 10: mod_base = OTHER; note = 2'-deoxy-2'-fluoroadenosine-3'-phosphate
  modified_base 11: mod_base = OTHER; note = 2'-deoxy-2'-fluoroguanosine-3'-phosphate
  modified_base 12: mod_base = OTHER; note = 2'-O-methylguanosine-3'-phosphate
  modified_base 13: mod_base = OTHER; note = 2'-O-methyladenosine-3'-phosphate
  modified_base 14: mod_base = OTHER; note = 2'-O-methylguanosine-3'-phosphate
  modified_base 15: mod_base = OTHER; note = 2'-O-methylcytidine-3'-phosphate
  modified_base 16: mod_base = OTHER; note = 2'-O-methyladenosine-3'-phosphate
  modified_base 17: mod_base = OTHER; note = 2'-O-methyluridine-3'-phosphate
  modified_base 18: mod_base = OTHER; note = 2'-O-methylguanosine-3'-phosphate
  modified_base 19: mod_base = OTHER; note = 2'-O-methyluridine-3'-phosphorothioate
  modified_base 20: mod_base = OTHER; note = 2'-O-methyluridine-3'-phosphorothioate
  modified_base 21: mod_base = OTHER; note = 2'-O-methyladenosine
ccaaacagaaggagcatgtta

SEQ ID NO: 10455 - RNA, 21 nt, synthetic construct
  source 1..21: mol_type = other RNA
  modified_base 1: mod_base = OTHER; note = 2'-O-methylcytidine-3'-phosphorothioate
  modified_base 2: mod_base = OTHER; note = 2'-O-methyladenosine-3'-phosphorothioate
  modified_base 3: mod_base = OTHER; note = 2'-O-methyladenosine-3'-phosphate
  modified_base 4: mod_base = OTHER; note = 2'-O-methyladenosine-3'-phosphate
  modified_base 5: mod_base = OTHER; note = 2'-O-methylcytidine-3'-phosphate
  modified_base 6: mod_base = OTHER; note = 2'-O-docosanyl-adenosine-3'-phosphate
  modified_base 7: mod_base = OTHER; note = 2'-deoxy-2'-fluoroguanosine-3'-phosphate
  modified_base 8: mod_base = OTHER; note = 2'-O-methyladenosine-3'-phosphate
  modified_base 9: mod_base = OTHER; note = 2'-deoxy-2'-fluoroadenosine-3'-phosphate
  modified_base 10: mod_base = OTHER; note = 2'-deoxy-2'-fluoroguanosine-3'-phosphate
  modified_base 11: mod_base = OTHER; note = 2'-deoxy-2'-fluoroguanosine-3'-phosphate
  modified_base 12: mod_base = OTHER; note = 2'-O-methyladenosine-3'-phosphate
  modified_base 13: mod_base = OTHER; note = 2'-O-methylguanosine-3'-phosphate
  modified_base 14: mod_base = OTHER; note = 2'-O-methylcytidine-3'-phosphate
  modified_base 15: mod_base = OTHER; note = 2'-O-methyladenosine-3'-phosphate
  modified_base 16: mod_base = OTHER; note = 2'-O-methyluridine-3'-phosphate
  modified_base 17: mod_base = OTHER; note = 2'-O-methylguanosine-3'-phosphate
  modified_base 18: mod_base = OTHER; note = 2'-O-methyluridine-3'-phosphate
  modified_base 19: mod_base = OTHER; note = 2'-O-methyluridine-3'-phosphorothioate
  modified_base 20: mod_base = OTHER; note = 2'-O-methylguanosine-3'-phosphorothioate
  modified_base 21: mod_base = OTHER; note = 2'-O-methyladenosine
caaacagaaggagcatgttga

SEQ ID NO: 10456 - RNA, 21 nt, synthetic construct
  source 1..21: mol_type = other RNA
  modified_base 1: mod_base = OTHER; note = 2'-O-methyluridine-3'-phosphorothioate
  modified_base 2: mod_base = OTHER; note = 2'-O-methyluridine-3'-phosphorothioate
  modified_base 3: mod_base = OTHER; note = 2'-O-methylguanosine-3'-phosphate
  modified_base 4: mod_base = OTHER; note = 2'-O-methylguanosine-3'-phosphate
  modified_base 5: mod_base = OTHER; note = 2'-O-methylguanosine-3'-phosphate
  modified_base 6: mod_base = OTHER; note = 2'-O-docosanyl-cytidine-3'-phosphate
  modified_base 7: mod_base = OTHER; note = 2'-deoxy-2'-fluoroadenosine-3'-phosphate
  modified_base 8: mod_base = OTHER; note = 2'-O-methyluridine-3'-phosphate
  modified_base 9: mod_base = OTHER; note = 2'-deoxy-2'-fluorocytidine-3'-phosphate
  modified_base 10: mod_base = OTHER; note = 2'-deoxy-2'-fluoroadenosine-3'-phosphate
  modified_base 11: mod_base = OTHER; note = 2'-deoxy-2'-fluoroguanosine-3'-phosphate
  modified_base 12: mod_base = OTHER; note = 2'-O-methyluridine-3'-phosphate
  modified_base 13: mod_base = OTHER; note = 2'-O-methylcytidine-3'-phosphate
  modified_base 14: mod_base = OTHER; note = 2'-O-methyladenosine-3'-phosphate
  modified_base 15: mod_base = OTHER; note = 2'-O-methyluridine-3'-phosphate
  modified_base 16: mod_base = OTHER; note = 2'-O-methylguanosine-3'-phosphate
  modified_base 17: mod_base = OTHER; note = 2'-O-methylcytidine-3'-phosphate
  modified_base 18: mod_base = OTHER; note = 2'-O-methyluridine-3'-phosphate
  modified_base 19: mod_base = OTHER; note = 2'-O-methyladenosine-3'-phosphorothioate
  modified_base 20: mod_base = OTHER; note = 2'-O-methyladenosine-3'-phosphorothioate
  modified_base 21: mod_base = OTHER; note = 2'-O-methyladenosine
ttgggcatcagtcatgctaaa

SEQ ID NO: 10457 - RNA, 21 nt, synthetic construct
  source 1..21: mol_type = other RNA
  modified_base 1: mod_base = OTHER; note = 2'-O-methylguanosine-3'-phosphorothioate
  modified_base 2: mod_base = OTHER; note = 2'-O-methylguanosine-3'-phosphorothioate
  modified_base 3: mod_base = OTHER; note = 2'-O-methylcytidine-3'-phosphate
  modified_base 4: mod_base = OTHER; note = 2'-O-methyladenosine-3'-phosphate
  modified_base 5: mod_base = OTHER; note = 2'-O-methyluridine-3'-phosphate
  modified_base 6: mod_base = OTHER; note = 2'-O-docosanyl-cytidine-3'-phosphate
  modified_base 7: mod_base = OTHER; note = 2'-deoxy-2'-fluoroadenosine-3'-phosphate
  modified_base 8: mod_base = OTHER; note = 2'-O-methylguanosine-3'-phosphate
  modified_base 9: mod_base = OTHER; note = 2'-deoxy-2'-fluorouridine-3'-phosphate
  modified_base 10: mod_base = OTHER; note = 2'-deoxy-2'-fluorocytidine-3'-phosphate
  modified_base 11: mod_base = OTHER; note = 2'-deoxy-2'-fluoroadenosine-3'-phosphate
  modified_base 12: mod_base = OTHER; note = 2'-O-methyluridine-3'-phosphate
  modified_base 13: mod_base = OTHER; note = 2'-O-methylguanosine-3'-phosphate
  modified_base 14: mod_base = OTHER; note = 2'-O-methylcytidine-3'-phosphate
  modified_base 15: mod_base = OTHER; note = 2'-O-methyluridine-3'-phosphate
  modified_base 16: mod_base = OTHER; note = 2'-O-methyladenosine-3'-phosphate
  modified_base 17: mod_base = OTHER; note = 2'-O-methyladenosine-3'-phosphate
  modified_base 18: mod_base = OTHER; note = 2'-O-methylcytidine-3'-phosphate
  modified_base 19: mod_base = OTHER; note = 2'-O-methylcytidine-3'-phosphorothioate
  modified_base 20: mod_base = OTHER; note = 2'-O-methyladenosine-3'-phosphorothioate
  modified_base 21: mod_base = OTHER; note = 2'-O-methyladenosine
ggcatcagtcatgctaaccaa

SEQ ID NO: 10458 - RNA, 21 nt, synthetic construct
  source 1..21: mol_type = other RNA
  modified_base 1: mod_base = OTHER; note = 2'-O-methyladenosine-3'-phosphorothioate
  modified_base 2: mod_base = OTHER; note = 2'-O-methyluridine-3'-phosphorothioate
  modified_base 3: mod_base = OTHER; note = 2'-O-methylcytidine-3'-phosphate
  modified_base 4: mod_base = OTHER; note = 2'-O-methyladenosine-3'-phosphate
  modified_base 5: mod_base = OTHER; note = 2'-O-methylguanosine-3'-phosphate
  modified_base 6: mod_base = OTHER; note = 2'-O-docosanyl-uridine-3'-phosphate
  modified_base 7: mod_base = OTHER; note = 2'-deoxy-2'-fluorocytidine-3'-phosphate
  modified_base 8: mod_base = OTHER; note = 2'-O-methyladenosine-3'-phosphate
  modified_base 9: mod_base = OTHER; note = 2'-deoxy-2'-fluorouridine-3'-phosphate
  modified_base 10: mod_base = OTHER; note = 2'-deoxy-2'-fluoroguanosine-3'-phosphate
  modified_base 11: mod_base = OTHER; note = 2'-deoxy-2'-fluorocytidine-3'-phosphate
  modified_base 12: mod_base = OTHER; note = 2'-O-methyluridine-3'-phosphate
  modified_base 13: mod_base = OTHER; note = 2'-O-methyladenosine-3'-phosphate
  modified_base 14: mod_base = OTHER; note = 2'-O-methyladenosine-3'-phosphate
  modified_base 15: mod_base = OTHER; note = 2'-O-methylcytidine-3'-phosphate
  modified_base 16: mod_base = OTHER; note = 2'-O-methylcytidine-3'-phosphate
  modified_base 17: mod_base = OTHER; note = 2'-O-methyladenosine-3'-phosphate
  modified_base 18: mod_base = OTHER; note = 2'-O-methyladenosine-3'-phosphate
  modified_base 19: mod_base = OTHER; note = 2'-O-methyluridine-3'-phosphorothioate
  modified_base 20: mod_base = OTHER; note = 2'-O-methylguanosine-3'-phosphorothioate
  modified_base 21: mod_base = OTHER; note = 2'-O-methyladenosine
atcagtcatgctaaccaatga

SEQ ID NO: 10459 - RNA, 21 nt, synthetic construct
  source 1..21: mol_type = other RNA
  modified_base 1: mod_base = OTHER; note = 2'-O-methylguanosine-3'-phosphorothioate
  modified_base 2: mod_base = OTHER; note = 2'-O-methyluridine-3'-phosphorothioate
  modified_base 3: mod_base = OTHER; note = 2'-O-methylcytidine-3'-phosphate
  modified_base 4: mod_base = OTHER; note = 2'-O-methyladenosine-3'-phosphate
  modified_base 5: mod_base = OTHER; note = 2'-O-methyluridine-3'-phosphate
  modified_base 6: mod_base = OTHER; note = 2'-O-docosanyl-guanosine-3'-phosphate
  modified_base 7: mod_base = OTHER; note = 2'-deoxy-2'-fluorocytidine-3'-phosphate
  modified_base 8: mod_base = OTHER; note = 2'-O-methyluridine-3'-phosphate
  modified_base 9: mod_base = OTHER; note = 2'-deoxy-2'-fluoroadenosine-3'-phosphate
  modified_base 10: mod_base = OTHER; note = 2'-deoxy-2'-fluoroadenosine-3'-phosphate
  modified_base 11: mod_base = OTHER; note = 2'-deoxy-2'-fluorocytidine-3'-phosphate
  modified_base 12: mod_base = OTHER; note = 2'-O-methylcytidine-3'-phosphate
  modified_base 13: mod_base = OTHER; note = 2'-O-methyladenosine-3'-phosphate
  modified_base 14: mod_base = OTHER; note = 2'-O-methyladenosine-3'-phosphate
  modified_base 15: mod_base = OTHER; note = 2'-O-methyluridine-3'-phosphate
  modified_base 16: mod_base = OTHER; note = 2'-O-methylguanosine-3'-phosphate
  modified_base 17: mod_base = OTHER; note = 2'-O-methylguanosine-3'-phosphate
  modified_base 18: mod_base = OTHER; note = 2'-O-methyladenosine-3'-phosphate
  modified_base 19: mod_base = OTHER; note = 2'-O-methyladenosine-3'-phosphorothioate
  modified_base 20: mod_base = OTHER; note = 2'-O-methyladenosine-3'-phosphorothioate
  modified_base 21: mod_base = OTHER; note = 2'-O-methyladenosine
gtcatgctaaccaatggaaaa

SEQ ID NO: 10460 - RNA, 21 nt, synthetic construct
  source 1..21: mol_type = other RNA
  modified_base 1: mod_base = OTHER; note = 2'-O-methyladenosine-3'-phosphorothioate
  modified_base 2: mod_base = OTHER; note = 2'-O-methyluridine-3'-phosphorothioate
  modified_base 3: mod_base = OTHER; note = 2'-O-methylguanosine-3'-phosphate
  modified_base 4: mod_base = OTHER; note = 2'-O-methylcytidine-3'-phosphate
  modified_base 5: mod_base = OTHER; note = 2'-O-methyluridine-3'-phosphate
  modified_base 6: mod_base = OTHER; note = 2'-O-docosanyl-adenosine-3'-phosphate
  modified_base 7: mod_base = OTHER; note = 2'-deoxy-2'-fluoroadenosine-3'-phosphate
  modified_base 8: mod_base = OTHER; note = 2'-O-methylcytidine-3'-phosphate
  modified_base 9: mod_base = OTHER; note = 2'-deoxy-2'-fluorocytidine-3'-phosphate
  modified_base 10: mod_base = OTHER; note = 2'-deoxy-2'-fluoroadenosine-3'-phosphate
  modified_base 11: mod_base = OTHER; note = 2'-deoxy-2'-fluoroadenosine-3'-phosphate
  modified_base 12: mod_base = OTHER; note = 2'-O-methyluridine-3'-phosphate
  modified_base 13: mod_base = OTHER; note = 2'-O-methylguanosine-3'-phosphate
  modified_base 14: mod_base = OTHER; note = 2'-O-methylguanosine-3'-phosphate
  modified_base 15: mod_base = OTHER; note = 2'-O-methyladenosine-3'-phosphate
  modified_base 16: mod_base = OTHER; note = 2'-O-methyladenosine-3'-phosphate
  modified_base 17: mod_base = OTHER; note = 2'-O-methyladenosine-3'-phosphate
  modified_base 18: mod_base = OTHER; note = 2'-O-methyladenosine-3'-phosphate
  modified_base 19: mod_base = OTHER; note = 2'-O-methylguanosine-3'-phosphorothioate
  modified_base 20: mod_base = OTHER; note = 2'-O-methyladenosine-3'-phosphorothioate
  modified_base 21: mod_base = OTHER; note = 2'-O-methyladenosine
atgctaaccaatggaaaagaa

SEQ ID NO: 10461 - RNA, 21 nt, synthetic construct
  source 1..21: mol_type = other RNA
  modified_base 1: mod_base = OTHER; note = 2'-O-methylcytidine-3'-phosphorothioate
  modified_base 2: mod_base = OTHER; note = 2'-O-methyladenosine-3'-phosphorothioate
  modified_base 3: mod_base = OTHER; note = 2'-O-methylguanosine-3'-phosphate
  modified_base 4: mod_base = OTHER; note = 2'-O-methyladenosine-3'-phosphate
  modified_base 5: mod_base = OTHER; note = 2'-O-methyladenosine-3'-phosphate
  modified_base 6: mod_base = OTHER; note = 2'-O-docosanyl-cytidine-3'-phosphate
  modified_base 7: mod_base = OTHER; note = 2'-deoxy-2'-fluorouridine-3'-phosphate
  modified_base 8: mod_base = OTHER; note = 2'-O-methylguanosine-3'-phosphate
  modified_base 9: mod_base = OTHER; note = 2'-deoxy-2'-fluoroadenosine-3'-phosphate
  modified_base 10: mod_base = OTHER; note = 2'-deoxy-2'-fluoroadenosine-3'-phosphate
  modified_base 11: mod_base = OTHER; note = 2'-deoxy-2'-fluorouridine-3'-phosphate
  modified_base 12: mod_base = OTHER; note = 2'-O-methylguanosine-3'-phosphate
  modified_base 13: mod_base = OTHER; note = 2'-O-methylcytidine-3'-phosphate
  modified_base 14: mod_base = OTHER; note = 2'-O-methyluridine-3'-phosphate
  modified_base 15: mod_base = OTHER; note = 2'-O-methylcytidine-3'-phosphate
  modified_base 16: mod_base = OTHER; note = 2'-O-methyladenosine-3'-phosphate
  modified_base 17: mod_base = OTHER; note = 2'-O-methyladenosine-3'-phosphate
  modified_base 18: mod_base = OTHER; note = 2'-O-methylguanosine-3'-phosphate
  modified_base 19: mod_base = OTHER; note = 2'-O-methyluridine-3'-phosphorothioate
  modified_base 20: mod_base = OTHER; note = 2'-O-methylcytidine-3'-phosphorothioate
  modified_base 21: mod_base = OTHER; note = 2'-O-methyladenosine
cagaactgaatgctcaagtca

SEQ ID NO: 10462 - RNA, 21 nt, synthetic construct
  source 1..21: mol_type = other RNA
  modified_base 1: mod_base = OTHER; note = 2'-O-methyladenosine-3'-phosphorothioate
  modified_base 2: mod_base = OTHER; note = 2'-O-methyladenosine-3'-phosphorothioate
  modified_base 3: mod_base = OTHER; note = 2'-O-methyladenosine-3'-phosphate
  modified_base 4: mod_base = OTHER; note = 2'-O-methyladenosine-3'-phosphate
  modified_base 5: mod_base = OTHER; note = 2'-O-methylguanosine-3'-phosphate
  modified_base 6: mod_base = OTHER; note = 2'-O-docosanyl-adenosine-3'-phosphate
  modified_base 7: mod_base = OTHER; note = 2'-deoxy-2'-fluoroguanosine-3'-phosphate
  modified_base 8: mod_base = OTHER; note = 2'-O-methylcytidine-3'-phosphate
  modified_base 9: mod_base = OTHER; note = 2'-deoxy-2'-fluoroadenosine-3'-phosphate
  modified_base 10: mod_base = OTHER; note = 2'-deoxy-2'-fluoroguanosine-3'-phosphate
  modified_base 11: mod_base = OTHER; note = 2'-deoxy-2'-fluoroguanosine-3'-phosphate
  modified_base 12: mod_base = OTHER; note = 2'-O-methyluridine-3'-phosphate
  modified_base 13: mod_base = OTHER; note = 2'-O-methylguanosine-3'-phosphate
  modified_base 14: mod_base = OTHER; note = 2'-O-methyladenosine-3'-phosphate
  modified_base 15: mod_base = OTHER; note = 2'-O-methyluridine-3'-phosphate
  modified_base 16: mod_base = OTHER; note = 2'-O-methylcytidine-3'-phosphate
  modified_base 17: mod_base = OTHER; note = 2'-O-methyladenosine-3'-phosphate
  modified_base 18: mod_base = OTHER; note = 2'-O-methyladenosine-3'-phosphate
  modified_base 19: mod_base = OTHER; note = 2'-O-methyladenosine-3'-phosphorothioate
  modified_base 20: mod_base = OTHER; note = 2'-O-methyluridine-3'-phosphorothioate
  modified_base 21: mod_base = OTHER; note = 2'-O-methyladenosine
aaaagagcaggtgatcaaata

SEQ ID NO: 10463 - RNA, 21 nt, synthetic construct
  source 1..21: mol_type = other RNA
  modified_base 1: mod_base = OTHER; note = 2'-O-methylcytidine-3'-phosphorothioate
  modified_base 2: mod_base = OTHER; note = 2'-O-methyluridine-3'-phosphorothioate
  modified_base 3: mod_base = OTHER; note = 2'-O-methylcytidine-3'-phosphate
  modified_base 4: mod_base = OTHER; note = 2'-O-methylcytidine-3'-phosphate
  modified_base 5: mod_base = OTHER; note = 2'-O-methylcytidine-3'-phosphate
  modified_base 6: mod_base = OTHER; note = 2'-O-docosanyl-uridine-3'-phosphate
  modified_base 7: mod_base = OTHER; note = 2'-deoxy-2'-fluorouridine-3'-phosphate
  modified_base 8: mod_base = OTHER; note = 2'-O-methylcytidine-3'-phosphate
  modified_base 9: mod_base = OTHER; note = 2'-deoxy-2'-fluorocytidine-3'-phosphate
  modified_base 10: mod_base = OTHER; note = 2'-deoxy-2'-fluoroadenosine-3'-phosphate
  modified_base 11: mod_base = OTHER; note = 2'-deoxy-2'-fluoroguanosine-3'-phosphate
  modified_base 12: mod_base = OTHER; note = 2'-O-methyladenosine-3'-phosphate
  modified_base 13: mod_base = OTHER; note = 2'-O-methyladenosine-3'-phosphate
  modified_base 14: mod_base = OTHER; note = 2'-O-methylcytidine-3'-phosphate
  modified_base 15: mod_base = OTHER; note = 2'-O-methyluridine-3'-phosphate
  modified_base 16: mod_base = OTHER; note = 2'-O-methylguanosine-3'-phosphate
  modified_base 17: mod_base = OTHER; note = 2'-O-methyladenosine-3'-phosphate
  modified_base 18: mod_base = OTHER; note = 2'-O-methyladenosine-3'-phosphate
  modified_base 19: mod_base = OTHER; note = 2'-O-methyluridine-3'-phosphorothioate
  modified_base 20: mod_base = OTHER; note = 2'-O-methylguanosine-3'-phosphorothioate
  modified_base 21: mod_base = OTHER; note = 2'-O-methyladenosine
ctcccttccagaactgaatga

SEQ ID NO: 10464 - RNA, 21 nt, synthetic construct
  source 1..21: mol_type = other RNA
  modified_base 1: mod_base = OTHER; note = 2'-O-methyluridine-3'-phosphorothioate
  modified_base 2: mod_base = OTHER; note = 2'-O-methylcytidine-3'-phosphorothioate
  modified_base 3: mod_base = OTHER; note = 2'-O-methylcytidine-3'-phosphate
  modified_base 4: mod_base = OTHER; note = 2'-O-methylcytidine-3'-phosphate
  modified_base 5: mod_base = OTHER; note = 2'-O-methyluridine-3'-phosphate
  modified_base 6: mod_base = OTHER; note = 2'-O-docosanyl-uridine-3'-phosphate
  modified_base 7: mod_base = OTHER; note = 2'-deoxy-2'-fluorocytidine-3'-phosphate
  modified_base 8: mod_base = OTHER; note = 2'-O-methylcytidine-3'-phosphate
  modified_base 9: mod_base = OTHER; note = 2'-deoxy-2'-fluoroadenosine-3'-phosphate
  modified_base 10: mod_base = OTHER; note = 2'-deoxy-2'-fluoroguanosine-3'-phosphate
  modified_base 11: mod_base = OTHER; note = 2'-deoxy-2'-fluoroadenosine-3'-phosphate
  modified_base 12: mod_base = OTHER; note = 2'-O-methyladenosine-3'-phosphate
  modified_base 13: mod_base = OTHER; note = 2'-O-methylcytidine-3'-phosphate
  modified_base 14: mod_base = OTHER; note = 2'-O-methyluridine-3'-phosphate
  modified_base 15: mod_base = OTHER; note = 2'-O-methylguanosine-3'-phosphate
  modified_base 16: mod_base = OTHER; note = 2'-O-methyladenosine-3'-phosphate
  modified_base 17: mod_base = OTHER; note = 2'-O-methyladenosine-3'-phosphate
  modified_base 18: mod_base = OTHER; note = 2'-O-methyluridine-3'-phosphate
  modified_base 19: mod_base = OTHER; note = 2'-O-methylguanosine-3'-phosphorothioate
  modified_base 20: mod_base = OTHER; note = 2'-O-methylcytidine-3'-phosphorothioate
  modified_base 21: mod_base = OTHER; note = 2'-O-methyladenosine
tcccttccagaactgaatgca

SEQ ID NO: 10465 - RNA, 21 nt, synthetic construct
  source 1..21: mol_type = other RNA
  modified_base 1: mod_base = OTHER; note = 2'-O-methylcytidine-3'-phosphorothioate
  modified_base 2: mod_base = OTHER; note = 2'-O-methylcytidine-3'-phosphorothioate
  modified_base 3: mod_base = OTHER; note = 2'-O-methylcytidine-3'-phosphate
  modified_base 4: mod_base = OTHER; note = 2'-O-methyluridine-3'-phosphate
  modified_base 5: mod_base = OTHER; note = 2'-O-methyluridine-3'-phosphate
  modified_base 6: mod_base = OTHER; note = 2'-O-docosanyl-cytidine-3'-phosphate
  modified_base 7: mod_base = OTHER; note = 2'-deoxy-2'-fluorocytidine-3'-phosphate
  modified_base 8: mod_base = OTHER; note = 2'-O-methyladenosine-3'-phosphate
  modified_base 9: mod_base = OTHER; note = 2'-deoxy-2'-fluoroguanosine-3'-phosphate
  modified_base 10: mod_base = OTHER; note = 2'-deoxy-2'-fluoroadenosine-3'-phosphate
  modified_base 11: mod_base = OTHER; note = 2'-deoxy-2'-fluoroadenosine-3'-phosphate
  modified_base 12: mod_base = OTHER; note = 2'-O-methylcytidine-3'-phosphate
  modified_base 13: mod_base = OTHER; note = 2'-O-methyluridine-3'-phosphate
  modified_base 14: mod_base = OTHER; note = 2'-O-methylguanosine-3'-phosphate
  modified_base 15: mod_base = OTHER; note = 2'-O-methyladenosine-3'-phosphate
  modified_base 16: mod_base = OTHER; note = 2'-O-methyladenosine-3'-phosphate
  modified_base 17: mod_base = OTHER; note = 2'-O-methyluridine-3'-phosphate
  modified_base 18: mod_base = OTHER; note = 2'-O-methylguanosine-3'-phosphate
  modified_base 19: mod_base = OTHER; note = 2'-O-methylcytidine-3'-phosphorothioate
  modified_base 20: mod_base = OTHER; note = 2'-O-methyluridine-3'-phosphorothioate
  modified_base 21: mod_base = OTHER; note = 2'-O-methyladenosine
cccttccagaactgaatgcta

SEQ ID NO: 10466 - RNA, 21 nt, synthetic construct
  source 1..21: mol_type = other RNA
  modified_base 1: mod_base = OTHER; note = 2'-O-methylcytidine-3'-phosphorothioate
  modified_base 2: mod_base = OTHER; note = 2'-O-methylcytidine-3'-phosphorothioate
  modified_base 3: mod_base = OTHER; note = 2'-O-methyluridine-3'-phosphate
  modified_base 4: mod_base = OTHER; note = 2'-O-methyluridine-3'-phosphate
  modified_base 5: mod_base = OTHER; note = 2'-O-methylcytidine-3'-phosphate
  modified_base 6: mod_base = OTHER; note = 2'-O-docosanyl-cytidine-3'-phosphate
  modified_base 7: mod_base = OTHER; note = 2'-deoxy-2'-fluoroadenosine-3'-phosphate
  modified_base 8: mod_base = OTHER; note = 2'-O-methylguanosine-3'-phosphate
  modified_base 9: mod_base = OTHER; note = 2'-deoxy-2'-fluoroadenosine-3'-phosphate
  modified_base 10: mod_base = OTHER; note = 2'-deoxy-2'-fluoroadenosine-3'-phosphate
  modified_base 11: mod_base = OTHER; note = 2'-deoxy-2'-fluorocytidine-3'-phosphate
  modified_base 12: mod_base = OTHER; note = 2'-O-methyluridine-3'-phosphate
  modified_base 13: mod_base = OTHER; note = 2'-O-methylguanosine-3'-phosphate
  modified_base 14: mod_base = OTHER; note = 2'-O-methyladenosine-3'-phosphate
  modified_base 15: mod_base = OTHER; note = 2'-O-methyladenosine-3'-phosphate
  modified_base 16: mod_base = OTHER; note = 2'-O-methyluridine-3'-phosphate
  modified_base 17: mod_base = OTHER; note = 2'-O-methylguanosine-3'-phosphate
  modified_base 18: mod_base = OTHER; note = 2'-O-methylcytidine-3'-phosphate
  modified_base 19: mod_base = OTHER; note = 2'-O-methyluridine-3'-phosphorothioate
  modified_base 20: mod_base = OTHER; note = 2'-O-methylcytidine-3'-phosphorothioate
  modified_base 21: mod_base = OTHER; note = 2'-O-methyladenosine
ccttccagaactgaatgctca

SEQ ID NO: 10467 - RNA, 21 nt, synthetic construct
  source 1..21: mol_type = other RNA
  modified_base 1: mod_base = OTHER; note = 2'-O-methylcytidine-3'-phosphorothioate
  modified_base 2: mod_base = OTHER; note = 2'-O-methyluridine-3'-phosphorothioate
  modified_base 3: mod_base = OTHER; note = 2'-O-methyluridine-3'-phosphate
  modified_base 4: mod_base = OTHER; note = 2'-O-methylcytidine-3'-phosphate
  modified_base 5: mod_base = OTHER; note = 2'-O-methylcytidine-3'-phosphate
  modified_base 6: mod_base = OTHER; note = 2'-O-docosanyl-adenosine-3'-phosphate
  modified_base 7: mod_base = OTHER; note = 2'-deoxy-2'-fluoroguanosine-3'-phosphate
  modified_base 8: mod_base = OTHER; note = 2'-O-methyladenosine-3'-phosphate
  modified_base 9: mod_base = OTHER; note = 2'-deoxy-2'-fluoroadenosine-3'-phosphate
  modified_base 10: mod_base = OTHER; note = 2'-deoxy-2'-fluorocytidine-3'-phosphate
  modified_base 11: mod_base = OTHER; note = 2'-deoxy-2'-fluorouridine-3'-phosphate
  modified_base 12: mod_base = OTHER; note = 2'-O-methylguanosine-3'-phosphate
  modified_base 13: mod_base = OTHER; note = 2'-O-methyladenosine-3'-phosphate
  modified_base 14: mod_base = OTHER; note = 2'-O-methyladenosine-3'-phosphate
  modified_base 15: mod_base = OTHER; note = 2'-O-methyluridine-3'-phosphate
  modified_base 16: mod_base = OTHER; note = 2'-O-methylguanosine-3'-phosphate
  modified_base 17: mod_base = OTHER; note = 2'-O-methylcytidine-3'-phosphate
  modified_base 18: mod_base = OTHER; note = 2'-O-methyluridine-3'-phosphate
  modified_base 19: mod_base = OTHER; note = 2'-O-methylcytidine-3'-phosphorothioate
  modified_base 20: mod_base = OTHER; note = 2'-O-methyladenosine-3'-phosphorothioate
  modified_base 21: mod_base = OTHER; note = 2'-O-methyladenosine
cttccagaactgaatgctcaa

SEQ ID NO: 10468 - RNA, 21 nt, synthetic construct
  source 1..21: mol_type = other RNA
  modified_base 1: mod_base = OTHER; note = 2'-O-methyluridine-3'-phosphorothioate
  modified_base 2: mod_base = OTHER; note = 2'-O-methyluridine-3'-phosphorothioate
  modified_base 3: mod_base = OTHER; note = 2'-O-methylcytidine-3'-phosphate
  modified_base 4: mod_base = OTHER; note = 2'-O-methylcytidine-3'-phosphate
  modified_base 5: mod_base = OTHER; note = 2'-O-methyladenosine-3'-phosphate
  modified_base 6: mod_base = OTHER; note = 2'-O-docosanyl-guanosine-3'-phosphate
  modified_base 7: mod_base = OTHER; note = 2'-deoxy-2'-fluoroadenosine-3'-phosphate
  modified_base 8: mod_base = OTHER; note = 2'-O-methyladenosine-3'-phosphate
  modified_base 9: mod_base = OTHER; note = 2'-deoxy-2'-fluorocytidine-3'-phosphate
  modified_base 10: mod_base = OTHER; note = 2'-deoxy-2'-fluorouridine-3'-phosphate
  modified_base 11: mod_base = OTHER; note = 2'-deoxy-2'-fluoroguanosine-3'-phosphate
  modified_base 12: mod_base = OTHER; note = 2'-O-methyladenosine-3'-phosphate
  modified_base 13: mod_base = OTHER; note = 2'-O-methyladenosine-3'-phosphate
  modified_base 14: mod_base = OTHER; note = 2'-O-methyluridine-3'-phosphate
  modified_base 15: mod_base = OTHER; note = 2'-O-methylguanosine-3'-phosphate
  modified_base 16: mod_base = OTHER; note = 2'-O-methylcytidine-3'-phosphate
  modified_base 17: mod_base = OTHER; note = 2'-O-methyluridine-3'-phosphate
  modified_base 18: mod_base = OTHER; note = 2'-O-methylcytidine-3'-phosphate
  modified_base 19: mod_base = OTHER; note = 2'-O-methyladenosine-3'-phosphorothioate
  modified_base 20: mod_base = OTHER; note = 2'-O-methyladenosine-3'-phosphorothioate
  modified_base 21: mod_base = OTHER; note = 2'-O-methyladenosine
ttccagaactgaatgctcaaa

SEQ ID NO: 10469 - RNA, 21 nt, synthetic construct
  source 1..21: mol_type = other RNA
  modified_base 1: mod_base = OTHER; note = 2'-O-methyluridine-3'-phosphorothioate
  modified_base 2: mod_base = OTHER; note = 2'-O-methylcytidine-3'-phosphorothioate
  modified_base 3: mod_base = OTHER; note = 2'-O-methylcytidine-3'-phosphate
  modified_base 4: mod_base = OTHER; note = 2'-O-methyladenosine-3'-phosphate
  modified_base 5: mod_base = OTHER; note = 2'-O-methylguanosine-3'-phosphate
  modified_base 6: mod_base = OTHER; note = 2'-O-docosanyl-adenosine-3'-phosphate
  modified_base 7: mod_base = OTHER; note = 2'-deoxy-2'-fluoroadenosine-3'-phosphate
  modified_base 8: mod_base = OTHER; note = 2'-O-methylcytidine-3'-phosphate
  modified_base 9: mod_base = OTHER; note = 2'-deoxy-2'-fluorouridine-3'-phosphate
  modified_base 10: mod_base = OTHER; note = 2'-deoxy-2'-fluoroguanosine-3'-phosphate
  modified_base 11: mod_base = OTHER; note = 2'-deoxy-2'-fluoroadenosine-3'-phosphate
  modified_base 12: mod_base = OTHER; note = 2'-O-methyladenosine-3'-phosphate
  modified_base 13: mod_base = OTHER; note = 2'-O-methyluridine-3'-phosphate
  modified_base 14: mod_base = OTHER; note = 2'-O-methylguanosine-3'-phosphate
  modified_base 15: mod_base = OTHER; note = 2'-O-methylcytidine-3'-phosphate
  modified_base 16: mod_base = OTHER; note = 2'-O-methyluridine-3'-phosphate
  modified_base 17: mod_base = OTHER; note = 2'-O-methylcytidine-3'-phosphate
  modified_base 18: mod_base = OTHER; note = 2'-O-methyladenosine-3'-phosphate
  modified_base 19: mod_base = OTHER; note = 2'-O-methyladenosine-3'-phosphorothioate
  modified_base 20: mod_base = OTHER; note = 2'-O-methylguanosine-3'-phosphorothioate
  modified_base 21: mod_base = OTHER; note = 2'-O-methyladenosine
tccagaactgaatgctcaaga

SEQ ID NO: 10470 - RNA, 21 nt, synthetic construct
  source 1..21: mol_type = other RNA
  modified_base 1: mod_base = OTHER; note = 2'-O-methylcytidine-3'-phosphorothioate
  modified_base 2: mod_base = OTHER; note = 2'-O-methylcytidine-3'-phosphorothioate
  modified_base 3: mod_base = OTHER; note = 2'-O-methyladenosine-3'-phosphate
  modified_base 4: mod_base = OTHER; note = 2'-O-methylguanosine-3'-phosphate
  modified_base 5: mod_base = OTHER; note = 2'-O-methyladenosine-3'-phosphate
  modified_base 6: mod_base = OTHER; note = 2'-O-docosanyl-adenosine-3'-phosphate
  modified_base 7: mod_base = OTHER; note = 2'-deoxy-2'-fluorocytidine-3'-phosphate
  modified_base 8: mod_base = OTHER; note = 2'-O-methyluridine-3'-phosphate
  modified_base 9: mod_base = OTHER; note = 2'-deoxy-2'-fluoroguanosine-3'-phosphate
  modified_base 10: mod_base = OTHER; note = 2'-deoxy-2'-fluoroadenosine-3'-phosphate
  modified_base 11: mod_base = OTHER; note = 2'-deoxy-2'-fluoroadenosine-3'-phosphate
  modified_base 12: mod_base = OTHER; note = 2'-O-methyluridine-3'-phosphate
  modified_base 13: mod_base = OTHER; note = 2'-O-methylguanosine-3'-phosphate
  modified_base 14: mod_base = OTHER; note = 2'-O-methylcytidine-3'-phosphate
  modified_base 15: mod_base = OTHER; note = 2'-O-methyluridine-3'-phosphate
  modified_base 16: mod_base = OTHER; note = 2'-O-methylcytidine-3'-phosphate
  modified_base 17: mod_base = OTHER; note = 2'-O-methyladenosine-3'-phosphate
  modified_base 18: mod_base = OTHER; note = 2'-O-methyladenosine-3'-phosphate
  modified_base 19: mod_base = OTHER; note = 2'-O-methylguanosine-3'-phosphorothioate
  modified_base 20: mod_base = OTHER; note = 2'-O-methyluridine-3'-phosphorothioate
  modified_base 21: mod_base = OTHER; note = 2'-O-methyladenosine
ccagaactgaatgctcaagta

SEQ ID NO: 10471 - RNA, 21 nt, synthetic construct
  source 1..21: mol_type = other RNA
  modified_base 1: mod_base = OTHER; note = 2'-O-methyladenosine-3'-phosphorothioate
  modified_base 2: mod_base = OTHER; note = 2'-O-methylguanosine-3'-phosphorothioate
  modified_base 3: mod_base = OTHER; note = 2'-O-methyladenosine-3'-phosphate
  modified_base 4: mod_base = OTHER; note = 2'-O-methyladenosine-3'-phosphate
  modified_base 5: mod_base = OTHER; note = 2'-O-methylcytidine-3'-phosphate
  modified_base 6: mod_base = OTHER; note = 2'-O-docosanyl-uridine-3'-phosphate
  modified_base 7: mod_base = OTHER; note = 2'-deoxy-2'-fluoroguanosine-3'-phosphate
  modified_base 8: mod_base = OTHER; note = 2'-O-methyladenosine-3'-phosphate
  modified_base 9: mod_base = OTHER; note = 2'-deoxy-2'-fluoroadenosine-3'-phosphate
  modified_base 10: mod_base = OTHER; note = 2'-deoxy-2'-fluorouridine-3'-phosphate
  modified_base 11: mod_base = OTHER; note = 2'-deoxy-2'-fluoroguanosine-3'-phosphate
  modified_base 12: mod_base = OTHER; note = 2'-O-methylcytidine-3'-phosphate
  modified_base 13: mod_base = OTHER; note = 2'-O-methyluridine-3'-phosphate
  modified_base 14: mod_base = OTHER; note = 2'-O-methylcytidine-3'-phosphate
  modified_base 15: mod_base = OTHER; note = 2'-O-methyladenosine-3'-phosphate
  modified_base 16: mod_base = OTHER; note = 2'-O-methyladenosine-3'-phosphate
  modified_base 17: mod_base = OTHER; note = 2'-O-methylguanosine-3'-phosphate
  modified_base 18: mod_base = OTHER; note = 2'-O-methyluridine-3'-phosphate
  modified_base 19: mod_base = OTHER; note = 2'-O-methylcytidine-3'-phosphorothioate
  modified_base 20: mod_base = OTHER; note = 2'-O-methyluridine-3'-phosphorothioate
  modified_base 21: mod_base = OTHER; note = 2'-O-methyladenosine
agaactgaatgctcaagtcta

SEQ ID NO: 10472 - RNA, 21 nt, synthetic construct
  source 1..21: mol_type = other RNA
  modified_base 1: mod_base = OTHER; note = 2'-O-methylguanosine-3'-phosphorothioate
  modified_base 2: mod_base = OTHER; note = 2'-O-methyladenosine-3'-phosphorothioate
  modified_base 3: mod_base = OTHER; note = 2'-O-methyladenosine-3'-phosphate
  modified_base 4: mod_base = OTHER; note = 2'-O-methylcytidine-3'-phosphate
  modified_base 5: mod_base = OTHER; note = 2'-O-methyluridine-3'-phosphate
  modified_base 6: mod_base = OTHER; note = 2'-O-docosanyl-guanosine-3'-phosphate
  modified_base 7: mod_base = OTHER; note = 2'-deoxy-2'-fluoroadenosine-3'-phosphate
  modified_base 8: mod_base = OTHER; note = 2'-O-methyladenosine-3'-phosphate
  modified_base 9: mod_base = OTHER; note = 2'-deoxy-2'-fluorouridine-3'-phosphate
  modified_base 10: mod_base = OTHER; note = 2'-deoxy-2'-fluoroguanosine-3'-phosphate
  modified_base 11: mod_base = OTHER; note = 2'-deoxy-2'-fluorocytidine-3'-phosphate
  modified_base 12: mod_base = OTHER; note = 2'-O-methyluridine-3'-phosphate
  modified_base 13: mod_base = OTHER; note = 2'-O-methylcytidine-3'-phosphate
  modified_base 14: mod_base = OTHER; note = 2'-O-methyladenosine-3'-phosphate
  modified_base 15: mod_base = OTHER; note = 2'-O-methyladenosine-3'-phosphate
  modified_base 16: mod_base = OTHER; note = 2'-O-methylguanosine-3'-phosphate
  modified_base 17: mod_base = OTHER; note = 2'-O-methyluridine-3'-phosphate
  modified_base 18: mod_base = OTHER; note = 2'-O-methylcytidine-3'-phosphate
  modified_base 19: mod_base = OTHER; note = 2'-O-methyluridine-3'-phosphorothioate
  modified_base 20: mod_base = OTHER; note = 2'-O-methyluridine-3'-phosphorothioate
  modified_base 21: mod_base = OTHER; note = 2'-O-methyladenosine
gaactgaatgctcaagtctta

SEQ ID NO: 10473 - RNA, 21 nt, synthetic construct
  source 1..21: mol_type = other RNA
  modified_base 1: mod_base = OTHER; note = 2'-O-methyladenosine-3'-phosphorothioate
  modified_base 2: mod_base = OTHER; note = 2'-O-methyladenosine-3'-phosphorothioate
  modified_base 3: mod_base = OTHER; note = 2'-O-methylcytidine-3'-phosphate
  modified_base 4: mod_base = OTHER; note = 2'-O-methyluridine-3'-phosphate
  modified_base 5: mod_base = OTHER; note = 2'-O-methylguanosine-3'-phosphate
  modified_base 6: mod_base = OTHER; note = 2'-O-docosanyl-adenosine-3'-phosphate
  modified_base 7: mod_base = OTHER; note = 2'-deoxy-2'-fluoroadenosine-3'-phosphate
  modified_base 8: mod_base = OTHER; note = 2'-O-methyluridine-3'-phosphate
  modified_base 9: mod_base = OTHER; note = 2'-deoxy-2'-fluoroguanosine-3'-phosphate
  modified_base 10: mod_base = OTHER; note = 2'-deoxy-2'-fluorocytidine-3'-phosphate
  modified_base 11: mod_base = OTHER; note = 2'-deoxy-2'-fluorouridine-3'-phosphate
  modified_base 12: mod_base = OTHER; note = 2'-O-methylcytidine-3'-phosphate
  modified_base 13: mod_base = OTHER; note = 2'-O-methyladenosine-3'-phosphate
  modified_base 14: mod_base = OTHER; note = 2'-O-methyladenosine-3'-phosphate
  modified_base 15: mod_base = OTHER; note = 2'-O-methylguanosine-3'-phosphate
  modified_base 16: mod_base = OTHER; note = 2'-O-methyluridine-3'-phosphate
  modified_base 17: mod_base = OTHER; note = 2'-O-methylcytidine-3'-phosphate
  modified_base 18: mod_base = OTHER; note = 2'-O-methyluridine-3'-phosphate
  modified_base 19: mod_base = OTHER; note = 2'-O-methyluridine-3'-phosphorothioate
  modified_base 20: mod_base = OTHER; note = 2'-O-methylcytidine-3'-phosphorothioate
  modified_base 21: mod_base = OTHER; note = 2'-O-methyladenosine
aactgaatgctcaagtcttca

SEQ ID NO: 10474 - RNA, 21 nt, synthetic construct
  source 1..21: mol_type = other RNA
  modified_base 1: mod_base = OTHER; note = 2'-O-methyladenosine-3'-phosphorothioate
  modified_base 2: mod_base = OTHER; note = 2'-O-methylcytidine-3'-phosphorothioate
  modified_base 3: mod_base = OTHER; note = 2'-O-methyluridine-3'-phosphate
  modified_base 4: mod_base = OTHER; note = 2'-O-methylguanosine-3'-phosphate
  modified_base 5: mod_base = OTHER; note = 2'-O-methyladenosine-3'-phosphate
  modified_base 6: mod_base = OTHER; note = 2'-O-docosanyl-adenosine-3'-phosphate
  modified_base 7: mod_base = OTHER; note = 2'-deoxy-2'-fluorouridine-3'-phosphate
  modified_base 8: mod_base = OTHER; note = 2'-O-methylguanosine-3'-phosphate
  modified_base 9: mod_base = OTHER; note = 2'-deoxy-2'-fluorocytidine-3'-phosphate
  modified_base 10: mod_base = OTHER; note = 2'-deoxy-2'-fluorouridine-3'-phosphate
  modified_base 11: mod_base = OTHER; note = 2'-deoxy-2'-fluorocytidine-3'-phosphate
  modified_base 12: mod_base = OTHER; note = 2'-O-methyladenosine-3'-phosphate
  modified_base 13: mod_base = OTHER; note = 2'-O-methyladenosine-3'-phosphate
  modified_base 14: mod_base = OTHER; note = 2'-O-methylguanosine-3'-phosphate
  modified_base 15: mod_base = OTHER; note = 2'-O-methyluridine-3'-phosphate
  modified_base 16: mod_base = OTHER; note = 2'-O-methylcytidine-3'-phosphate
  modified_base 17: mod_base = OTHER; note = 2'-O-methyluridine-3'-phosphate
  modified_base 18: mod_base = OTHER; note = 2'-O-methyluridine-3'-phosphate
  modified_base 19: mod_base = OTHER; note = 2'-O-methylcytidine-3'-phosphorothioate
  modified_base 20: mod_base = OTHER; note = 2'-O-methyluridine-3'-phosphorothioate
  modified_base 21: mod_base = OTHER; note = 2'-O-methyladenosine
actgaatgctcaagtcttcta

SEQ ID NO: 10475 - RNA, 21 nt, synthetic construct
  source 1..21: mol_type = other RNA
  modified_base 1: mod_base = OTHER; note = 2'-O-methylcytidine-3'-phosphorothioate
  modified_base 2: mod_base = OTHER; note = 2'-O-methyluridine-3'-phosphorothioate
  modified_base 3: mod_base = OTHER; note = 2'-O-methylguanosine-3'-phosphate
  modified_base 4: mod_base = OTHER; note = 2'-O-methyladenosine-3'-phosphate
  modified_base 5: mod_base = OTHER; note = 2'-O-methyladenosine-3'-phosphate
  modified_base 6: mod_base = OTHER; note = 2'-O-docosanyl-uridine-3'-phosphate
  modified_base 7: mod_base = OTHER; note = 2'-deoxy-2'-fluoroguanosine-3'-phosphate
  modified_base 8: mod_base = OTHER; note = 2'-O-methylcytidine-3'-phosphate
  modified_base 9: mod_base = OTHER; note = 2'-deoxy-2'-fluorouridine-3'-phosphate
  modified_base 10: mod_base = OTHER; note = 2'-deoxy-2'-fluorocytidine-3'-phosphate
  modified_base 11: mod_base = OTHER; note = 2'-deoxy-2'-fluoroadenosine-3'-phosphate
  modified_base 12: mod_base = OTHER; note = 2'-O-methyladenosine-3'-phosphate
  modified_base 13: mod_base = OTHER; note = 2'-O-methylguanosine-3'-phosphate
  modified_base 14: mod_base = OTHER; note = 2'-O-methyluridine-3'-phosphate
  modified_base 15: mod_base = OTHER; note = 2'-O-methylcytidine-3'-phosphate
  modified_base 16: mod_base = OTHER; note = 2'-O-methyluridine-3'-phosphate
  modified_base 17: mod_base = OTHER; note = 2'-O-methyluridine-3'-phosphate
  modified_base 18: mod_base = OTHER; note = 2'-O-methylcytidine-3'-phosphate
  modified_base 19: mod_base = OTHER; note = 2'-O-methyluridine-3'-phosphorothioate
  modified_base 20: mod_base = OTHER; note = 2'-O-methylguanosine-3'-phosphorothioate
  modified_base 21: mod_base = OTHER; note = 2'-O-methyladenosine
ctgaatgctcaagtcttctga

SEQ ID NO: 10476 - RNA, 21 nt, synthetic construct
  source 1..21: mol_type = other RNA
  modified_base 1: mod_base = OTHER; note = 2'-O-methyluridine-3'-phosphorothioate
  modified_base 2: mod_base = OTHER; note = 2'-O-methylguanosine-3'-phosphorothioate
  modified_base 3: mod_base = OTHER; note = 2'-O-methyladenosine-3'-phosphate
  modified_base 4: mod_base = OTHER; note = 2'-O-methyladenosine-3'-phosphate
  modified_base 5: mod_base = OTHER; note = 2'-O-methyluridine-3'-phosphate
  modified_base 6: mod_base = OTHER; note = 2'-O-docosanyl-guanosine-3'-phosphate
  modified_base 7: mod_base = OTHER; note = 2'-deoxy-2'-fluorocytidine-3'-phosphate
  modified_base 8: mod_base = OTHER; note = 2'-O-methyluridine-3'-phosphate
  modified_base 9: mod_base = OTHER; note = 2'-deoxy-2'-fluorocytidine-3'-phosphate
  modified_base 10: mod_base = OTHER; note = 2'-deoxy-2'-fluoroadenosine-3'-phosphate
  modified_base 11: mod_base = OTHER; note = 2'-deoxy-2'-fluoroadenosine-3'-phosphate
  modified_base 12: mod_base = OTHER; note = 2'-O-methylguanosine-3'-phosphate
  modified_base 13: mod_base = OTHER; note = 2'-O-methyluridine-3'-phosphate
  modified_base 14: mod_base = OTHER; note = 2'-O-methylcytidine-3'-phosphate
  modified_base 15: mod_base = OTHER; note = 2'-O-methyluridine-3'-phosphate
  modified_base 16: mod_base = OTHER; note = 2'-O-methyluridine-3'-phosphate
  modified_base 17: mod_base = OTHER; note = 2'-O-methylcytidine-3'-phosphate
  modified_base 18: mod_base = OTHER; note = 2'-O-methyluridine-3'-phosphate
  modified_base 19: mod_base = OTHER; note = 2'-O-methylguanosine-3'-phosphorothioate
  modified_base 20: mod_base = OTHER; note = 2'-O-methyluridine-3'-phosphorothioate
  modified_base 21: mod_base = OTHER; note = 2'-O-methyladenosine
tgaatgctcaagtcttctgta

SEQ ID NO: 10477 - RNA, 21 nt, synthetic construct
  source 1..21: mol_type = other RNA
  modified_base 1: mod_base = OTHER; note = 2'-O-methylguanosine-3'-phosphorothioate
  modified_base 2: mod_base = OTHER; note = 2'-O-methyladenosine-3'-phosphorothioate
  modified_base 3: mod_base = OTHER; note = 2'-O-methyladenosine-3'-phosphate
  modified_base 4: mod_base = OTHER; note = 2'-O-methyluridine-3'-phosphate
  modified_base 5: mod_base = OTHER; note = 2'-O-methylguanosine-3'-phosphate
  modified_base 6: mod_base = OTHER; note = 2'-O-docosanyl-cytidine-3'-phosphate
  modified_base 7: mod_base = OTHER; note = 2'-deoxy-2'-fluorouridine-3'-phosphate
  modified_base 8: mod_base = OTHER; note = 2'-O-methylcytidine-3'-phosphate
  modified_base 9: mod_base = OTHER; note = 2'-deoxy-2'-fluoroadenosine-3'-phosphate
  modified_base 10: mod_base = OTHER; note = 2'-deoxy-2'-fluoroadenosine-3'-phosphate
  modified_base 11: mod_base = OTHER; note = 2'-deoxy-2'-fluoroguanosine-3'-phosphate
  modified_base 12: mod_base = OTHER; note = 2'-O-methyluridine-3'-phosphate
  modified_base 13: mod_base = OTHER; note = 2'-O-methylcytidine-3'-phosphate
  modified_base 14: mod_base = OTHER; note = 2'-O-methyluridine-3'-phosphate
  modified_base 15: mod_base = OTHER; note = 2'-O-methyluridine-3'-phosphate
  modified_base 16: mod_base = OTHER; note = 2'-O-methylcytidine-3'-phosphate
  modified_base 17: mod_base = OTHER; note = 2'-O-methyluridine-3'-phosphate
  modified_base 18: mod_base = OTHER; note = 2'-O-methylguanosine-3'-phosphate
  modified_base 19: mod_base = OTHER; note = 2'-O-methyluridine-3'-phosphorothioate
  modified_base 20: mod_base = OTHER; note = 2'-O-methylcytidine-3'-phosphorothioate
  modified_base 21: mod_base = OTHER; note = 2'-O-methyladenosine
gaatgctcaagtcttctgtca

SEQ ID NO: 10478 - RNA, 21 nt, synthetic construct
  source 1..21: mol_type = other RNA
  modified_base 1: mod_base = OTHER; note = 2'-O-methyladenosine-3'-phosphorothioate
  modified_base 2: mod_base = OTHER; note = 2'-O-methyladenosine-3'-phosphorothioate
  modified_base 3: mod_base = OTHER; note = 2'-O-methyluridine-3'-phosphate
  modified_base 4: mod_base = OTHER; note = 2'-O-methylguanosine-3'-phosphate
  modified_base 5: mod_base = OTHER; note = 2'-O-methylcytidine-3'-phosphate
  modified_base 6: mod_base = OTHER; note = 2'-O-docosanyl-uridine-3'-phosphate
  modified_base 7: mod_base = OTHER; note = 2'-deoxy-2'-fluorocytidine-3'-phosphate
  modified_base 8: mod_base = OTHER; note = 2'-O-methyladenosine-3'-phosphate
  modified_base 9: mod_base = OTHER; note = 2'-deoxy-2'-fluoroadenosine-3'-phosphate
  modified_base 10: mod_base = OTHER; note = 2'-deoxy-2'-fluoroguanosine-3'-phosphate
  modified_base 11: mod_base = OTHER; note = 2'-deoxy-2'-fluorouridine-3'-phosphate
  modified_base 12: mod_base = OTHER; note = 2'-O-methylcytidine-3'-phosphate
  modified_base 13: mod_base = OTHER; note = 2'-O-methyluridine-3'-phosphate
  modified_base 14: mod_base = OTHER; note = 2'-O-methyluridine-3'-phosphate
  modified_base 15: mod_base = OTHER; note = 2'-O-methylcytidine-3'-phosphate
  modified_base 16: mod_base = OTHER; note = 2'-O-methyluridine-3'-phosphate
  modified_base 17: mod_base = OTHER; note = 2'-O-methylguanosine-3'-phosphate
  modified_base 18: mod_base = OTHER; note = 2'-O-methyluridine-3'-phosphate
  modified_base 19: mod_base = OTHER; note = 2'-O-methylcytidine-3'-phosphorothioate
  modified_base 20: mod_base = OTHER; note = 2'-O-methyladenosine-3'-phosphorothioate
  modified_base 21: mod_base = OTHER; note = 2'-O-methyladenosine
aatgctcaagtcttctgtcaa

SEQ ID NO: 10479 - RNA, 21 nt, synthetic construct
  source 1..21: mol_type = other RNA
  modified_base 1: mod_base = OTHER; note = 2'-O-methyladenosine-3'-phosphorothioate
  modified_base 2: mod_base = OTHER; note = 2'-O-methyluridine-3'-phosphorothioate
  modified_base 3: mod_base = OTHER; note = 2'-O-methylguanosine-3'-phosphate
  modified_base 4: mod_base = OTHER; note = 2'-O-methylcytidine-3'-phosphate
  modified_base 5: mod_base = OTHER; note = 2'-O-methyluridine-3'-phosphate
  modified_base 6: mod_base = OTHER; note = 2'-O-docosanyl-cytidine-3'-phosphate
  modified_base 7: mod_base = OTHER; note = 2'-deoxy-2'-fluoroadenosine-3'-phosphate
  modified_base 8: mod_base = OTHER; note = 2'-O-methyladenosine-3'-phosphate
  modified_base 9: mod_base = OTHER; note = 2'-deoxy-2'-fluoroguanosine-3'-phosphate
  modified_base 10: mod_base = OTHER; note = 2'-deoxy-2'-fluorouridine-3'-phosphate
  modified_base 11: mod_base = OTHER; note = 2'-deoxy-2'-fluorocytidine-3'-phosphate
  modified_base 12: mod_base = OTHER; note = 2'-O-methyluridine-3'-phosphate
  modified_base 13: mod_base = OTHER; note = 2'-O-methyluridine-3'-phosphate
  modified_base 14: mod_base = OTHER; note = 2'-O-methylcytidine-3'-phosphate
  modified_base 15: mod_base = OTHER; note = 2'-O-methyluridine-3'-phosphate
  modified_base 16: mod_base = OTHER; note = 2'-O-methylguanosine-3'-phosphate
  modified_base 17: mod_base = OTHER; note = 2'-O-methyluridine-3'-phosphate
  modified_base 18: mod_base = OTHER; note = 2'-O-methylcytidine-3'-phosphate
  modified_base 19: mod_base = OTHER; note = 2'-O-methyladenosine-3'-phosphorothioate
  modified_base 20: mod_base = OTHER; note = 2'-O-methyluridine-3'-phosphorothioate
  modified_base 21: mod_base = OTHER; note = 2'-O-methyladenosine
atgctcaagtcttctgtcata

SEQ ID NO: 10480 - RNA, 21 nt, synthetic construct
  source 1..21: mol_type = other RNA
  modified_base 1: mod_base = OTHER; note = 2'-O-methyluridine-3'-phosphorothioate
  modified_base 2: mod_base = OTHER; note = 2'-O-methylguanosine-3'-phosphorothioate
  modified_base 3: mod_base = OTHER; note = 2'-O-methylcytidine-3'-phosphate
  modified_base 4: mod_base = OTHER; note = 2'-O-methyluridine-3'-phosphate
  modified_base 5: mod_base = OTHER; note = 2'-O-methylcytidine-3'-phosphate
  modified_base 6: mod_base = OTHER; note = 2'-O-docosanyl-adenosine-3'-phosphate
  modified_base 7: mod_base = OTHER; note = 2'-deoxy-2'-fluoroadenosine-3'-phosphate
  modified_base 8: mod_base = OTHER; note = 2'-O-methylguanosine-3'-phosphate
  modified_base 9: mod_base = OTHER; note = 2'-deoxy-2'-fluorouridine-3'-phosphate
  modified_base 10: mod_base = OTHER; note = 2'-deoxy-2'-fluorocytidine-3'-phosphate
  modified_base 11: mod_base = OTHER; note = 2'-deoxy-2'-fluorouridine-3'-phosphate
  modified_base 12: mod_base = OTHER; note = 2'-O-methyluridine-3'-phosphate
  modified_base 13: mod_base = OTHER; note = 2'-O-methylcytidine-3'-phosphate
  modified_base 14: mod_base = OTHER; note = 2'-O-methyluridine-3'-phosphate
  modified_base 15: mod_base = OTHER; note = 2'-O-methylguanosine-3'-phosphate
  modified_base 16: mod_base = OTHER; note = 2'-O-methyluridine-3'-phosphate
  modified_base 17: mod_base = OTHER; note = 2'-O-methylcytidine-3'-phosphate
  modified_base 18: mod_base = OTHER; note = 2'-O-methyladenosine-3'-phosphate
  modified_base 19: mod_base = OTHER; note = 2'-O-methyluridine-3'-phosphorothioate
  modified_base 20: mod_base = OTHER; note = 2'-O-methyladenosine-3'-phosphorothioate
  modified_base 21: mod_base = OTHER; note = 2'-O-methyladenosine
tgctcaagtcttctgtcataa

SEQ ID NO: 10481 - RNA, 21 nt, synthetic construct
  source 1..21: mol_type = other RNA
  modified_base 1: mod_base = OTHER; note = 2'-O-methylguanosine-3'-phosphorothioate
  modified_base 2: mod_base = OTHER; note = 2'-O-methylcytidine-3'-phosphorothioate
  modified_base 3: mod_base = OTHER; note = 2'-O-methyluridine-3'-phosphate
  modified_base 4: mod_base = OTHER; note = 2'-O-methylcytidine-3'-phosphate
  modified_base 5: mod_base = OTHER; note = 2'-O-methyladenosine-3'-phosphate
  modified_base 6: mod_base = OTHER; note = 2'-O-docosanyl-adenosine-3'-phosphate
  modified_base 7: mod_base = OTHER; note = 2'-deoxy-2'-fluoroguanosine-3'-phosphate
  modified_base 8: mod_base = OTHER; note = 2'-O-methyluridine-3'-phosphate
  modified_base 9: mod_base = OTHER; note = 2'-deoxy-2'-fluorocytidine-3'-phosphate
  modified_base 10: mod_base = OTHER; note = 2'-deoxy-2'-fluorouridine-3'-phosphate
  modified_base 11: mod_base = OTHER; note = 2'-deoxy-2'-fluorouridine-3'-phosphate
  modified_base 12: mod_base = OTHER; note = 2'-O-methylcytidine-3'-phosphate
  modified_base 13: mod_base = OTHER; note = 2'-O-methyluridine-3'-phosphate
  modified_base 14: mod_base = OTHER; note = 2'-O-methylguanosine-3'-phosphate
  modified_base 15: mod_base = OTHER; note = 2'-O-methyluridine-3'-phosphate
  modified_base 16: mod_base = OTHER; note = 2'-O-methylcytidine-3'-phosphate
  modified_base 17: mod_base = OTHER; note = 2'-O-methyladenosine-3'-phosphate
  modified_base 18: mod_base = OTHER; note = 2'-O-methyluridine-3'-phosphate
  modified_base 19: mod_base = OTHER; note = 2'-O-methyladenosine-3'-phosphorothioate
  modified_base 20: mod_base = OTHER; note = 2'-O-methylguanosine-3'-phosphorothioate
  modified_base 21: mod_base = OTHER; note = 2'-O-methyladenosine
gctcaagtcttctgtcataga

SEQ ID NO: 10482 - RNA, 21 nt, synthetic construct
  source 1..21: mol_type = other RNA
  modified_base 1: mod_base = OTHER; note = 2'-O-methylcytidine-3'-phosphorothioate
  modified_base 2: mod_base = OTHER; note = 2'-O-methyluridine-3'-phosphorothioate
  modified_base 3: mod_base = OTHER; note = 2'-O-methylcytidine-3'-phosphate
  modified_base 4: mod_base = OTHER; note = 2'-O-methyladenosine-3'-phosphate
  modified_base 5: mod_base = OTHER; note = 2'-O-methyladenosine-3'-phosphate
  modified_base 6: mod_base = OTHER; note = 2'-O-docosanyl-guanosine-3'-phosphate
  modified_base 7: mod_base = OTHER; note = 2'-deoxy-2'-fluorouridine-3'-phosphate
  modified_base 8: mod_base = OTHER; note = 2'-O-methylcytidine-3'-phosphate
  modified_base 9: mod_base = OTHER; note = 2'-deoxy-2'-fluorouridine-3'-phosphate
  modified_base 10: mod_base = OTHER; note = 2'-deoxy-2'-fluorouridine-3'-phosphate
  modified_base 11: mod_base = OTHER; note = 2'-deoxy-2'-fluorocytidine-3'-phosphate
  modified_base 12: mod_base = OTHER; note = 2'-O-methyluridine-3'-phosphate
  modified_base 13: mod_base = OTHER; note = 2'-O-methylguanosine-3'-phosphate
  modified_base 14: mod_base = OTHER; note = 2'-O-methyluridine-3'-phosphate
  modified_base 15: mod_base = OTHER; note = 2'-O-methylcytidine-3'-phosphate
  modified_base 16: mod_base = OTHER; note = 2'-O-methyladenosine-3'-phosphate
  modified_base 17: mod_base = OTHER; note = 2'-O-methyluridine-3'-phosphate
  modified_base 18: mod_base = OTHER; note = 2'-O-methyladenosine-3'-phosphate
  modified_base 19: mod_base = OTHER; note = 2'-O-methylguanosine-3'-phosphorothioate
  modified_base 20: mod_base = OTHER; note = 2'-O-methyluridine-3'-phosphorothioate
  modified_base 21: mod_base = OTHER; note = 2'-O-methyladenosine
ctcaagtcttctgtcatagta

SEQ ID NO: 10483 - RNA, 21 nt, synthetic construct
  source 1..21: mol_type = other RNA
  modified_base 1: mod_base = OTHER; note = 2'-O-methyluridine-3'-phosphorothioate
  modified_base 2: mod_base = OTHER; note = 2'-O-methylcytidine-3'-phosphorothioate
  modified_base 3: mod_base = OTHER; note = 2'-O-methyladenosine-3'-phosphate
  modified_base 4: mod_base = OTHER; note = 2'-O-methyladenosine-3'-phosphate
  modified_base 5: mod_base = OTHER; note = 2'-O-methylguanosine-3'-phosphate
  modified_base 6: mod_base = OTHER; note = 2'-O-docosanyl-uridine-3'-phosphate
  modified_base 7: mod_base = OTHER; note = 2'-deoxy-2'-fluorocytidine-3'-phosphate
  modified_base 8: mod_base = OTHER; note = 2'-O-methyluridine-3'-phosphate
  modified_base 9: mod_base = OTHER; note = 2'-deoxy-2'-fluorouridine-3'-phosphate
  modified_base 10: mod_base = OTHER; note = 2'-deoxy-2'-fluorocytidine-3'-phosphate
  modified_base 11: mod_base = OTHER; note = 2'-deoxy-2'-fluorouridine-3'-phosphate
  modified_base 12: mod_base = OTHER; note = 2'-O-methylguanosine-3'-phosphate
  modified_base 13: mod_base = OTHER; note = 2'-O-methyluridine-3'-phosphate
  modified_base 14: mod_base = OTHER; note = 2'-O-methylcytidine-3'-phosphate
  modified_base 15: mod_base = OTHER; note = 2'-O-methyladenosine-3'-phosphate
  modified_base 16: mod_base = OTHER; note = 2'-O-methyluridine-3'-phosphate
  modified_base 17: mod_base = OTHER; note = 2'-O-methyladenosine-3'-phosphate
  modified_base 18: mod_base = OTHER; note = 2'-O-methylguanosine-3'-phosphate
  modified_base 19: mod_base = OTHER; note = 2'-O-methyluridine-3'-phosphorothioate
  modified_base 20: mod_base = OTHER; note = 2'-O-methyluridine-3'-phosphorothioate
  modified_base 21: mod_base = OTHER; note = 2'-O-methyladenosine
tcaagtcttctgtcatagtta

SEQ ID NO: 10484 - RNA, 21 nt, synthetic construct
  source 1..21: mol_type = other RNA
  modified_base 1: mod_base = OTHER; note = 2'-O-methyluridine-3'-phosphorothioate
  modified_base 2: mod_base = OTHER; note = 2'-O-methylcytidine-3'-phosphorothioate
  modified_base 3: mod_base = OTHER; note = 2'-O-methyluridine-3'-phosphate
  modified_base 4: mod_base = OTHER; note = 2'-O-methyluridine-3'-phosphate
  modified_base 5: mod_base = OTHER; note = 2'-O-methylcytidine-3'-phosphate
  modified_base 6: mod_base = OTHER; note = 2'-O-docosanyl-uridine-3'-phosphate
  modified_base 7: mod_base = OTHER; note = 2'-deoxy-2'-fluoroguanosine-3'-phosphate
  modified_base 8: mod_base = OTHER; note = 2'-O-methyluridine-3'-phosphate
  modified_base 9: mod_base = OTHER; note = 2'-deoxy-2'-fluorocytidine-3'-phosphate
  modified_base 10: mod_base = OTHER; note = 2'-deoxy-2'-fluoroadenosine-3'-phosphate
  modified_base 11: mod_base = OTHER; note = 2'-deoxy-2'-fluorouridine-3'-phosphate
  modified_base 12: mod_base = OTHER; note = 2'-O-methyladenosine-3'-phosphate
  modified_base 13: mod_base = OTHER; note = 2'-O-methylguanosine-3'-phosphate
  modified_base 14: mod_base = OTHER; note = 2'-O-methyluridine-3'-phosphate
  modified_base 15: mod_base = OTHER; note = 2'-O-methyluridine-3'-phosphate
  modified_base 16: mod_base = OTHER; note = 2'-O-methylcytidine-3'-phosphate
  modified_base 17: mod_base = OTHER; note = 2'-O-methylcytidine-3'-phosphate
  modified_base 18: mod_base = OTHER; note = 2'-O-methyladenosine-3'-phosphate
  modified_base 19: mod_base = OTHER; note = 2'-O-methyladenosine-3'-phosphorothioate
  modified_base 20: mod_base = OTHER; note = 2'-O-methylcytidine-3'-phosphorothioate
  modified_base 21: mod_base = OTHER; note = 2'-O-methyladenosine
tcttctgtcatagttccaaca

SEQ ID NO: 10485 - RNA, 21 nt, synthetic construct
  source 1..21: mol_type = other RNA
  modified_base 1: mod_base = OTHER; note = 2'-O-methylcytidine-3'-phosphorothioate
  modified_base 2: mod_base = OTHER; note = 2'-O-methyladenosine-3'-phosphorothioate
  modified_base 3: mod_base = OTHER; note = 2'-O-methyladenosine-3'-phosphate
  modified_base 4: mod_base = OTHER; note = 2'-O-methylguanosine-3'-phosphate
  modified_base 5: mod_base = OTHER; note = 2'-O-methyluridine-3'-phosphate
  modified_base 6: mod_base = OTHER; note = 2'-O-docosanyl-cytidine-3'-phosphate
  modified_base 7: mod_base = OTHER; note = 2'-deoxy-2'-fluorouridine-3'-phosphate
  modified_base 8: mod_base = OTHER; note = 2'-O-methyluridine-3'-phosphate
  modified_base 9: mod_base = OTHER; note = 2'-deoxy-2'-fluorocytidine-3'-phosphate
  modified_base 10: mod_base = OTHER; note = 2'-deoxy-2'-fluorouridine-3'-phosphate
  modified_base 11: mod_base = OTHER; note = 2'-deoxy-2'-fluoroguanosine-3'-phosphate
  modified_base 12: mod_base = OTHER; note = 2'-O-methyluridine-3'-phosphate
  modified_base 13: mod_base = OTHER; note = 2'-O-methylcytidine-3'-phosphate
  modified_base 14: mod_base = OTHER; note = 2'-O-methyladenosine-3'-phosphate
  modified_base 15: mod_base = OTHER; note = 2'-O-methyluridine-3'-phosphate
  modified_base 16: mod_base = OTHER; note = 2'-O-methyladenosine-3'-phosphate
  modified_base 17: mod_base = OTHER; note = 2'-O-methylguanosine-3'-phosphate
  modified_base 18: mod_base = OTHER; note = 2'-O-methyluridine-3'-phosphate
  modified_base 19: mod_base = OTHER; note = 2'-O-methyluridine-3'-phosphorothioate
  modified_base 20: mod_base = OTHER; note = 2'-O-methylcytidine-3'-phosphorothioate
  modified_base 21: mod_base = OTHER; note = 2'-O-methyladenosine
caagtcttctgtcatagttca

SEQ ID NO: 10486 - RNA, 21 nt, synthetic construct
  source 1..21: mol_type = other RNA
  modified_base 1: mod_base = OTHER; note = 2'-O-methyladenosine-3'-phosphorothioate
  modified_base 2: mod_base = OTHER; note = 2'-O-methyladenosine-3'-phosphorothioate
  modified_base 3: mod_base = OTHER; note = 2'-O-methylguanosine-3'-phosphate
  modified_base 4: mod_base = OTHER; note = 2'-O-methyluridine-3'-phosphate
  modified_base 5: mod_base = OTHER; note = 2'-O-methylcytidine-3'-phosphate
  modified_base 6: mod_base = OTHER; note = 2'-O-docosanyl-uridine-3'-phosphate
  modified_base 7: mod_base = OTHER; note = 2'-deoxy-2'-fluorouridine-3'-phosphate
  modified_base 8: mod_base = OTHER; note = 2'-O-methylcytidine-3'-phosphate
  modified_base 9: mod_base = OTHER; note = 2'-deoxy-2'-fluorouridine-3'-phosphate
  modified_base 10: mod_base = OTHER; note = 2'-deoxy-2'-fluoroguanosine-3'-phosphate
  modified_base 11: mod_base = OTHER; note = 2'-deoxy-2'-fluorouridine-3'-phosphate
  modified_base 12: mod_base = OTHER; note = 2'-O-methylcytidine-3'-phosphate
  modified_base 13: mod_base = OTHER; note = 2'-O-methyladenosine-3'-phosphate
  modified_base 14: mod_base = OTHER; note = 2'-O-methyluridine-3'-phosphate
  modified_base 15: mod_base = OTHER; note = 2'-O-methyladenosine-3'-phosphate
  modified_base 16: mod_base = OTHER; note = 2'-O-methylguanosine-3'-phosphate
  modified_base 17: mod_base = OTHER; note = 2'-O-methyluridine-3'-phosphate
  modified_base 18: mod_base = OTHER; note = 2'-O-methyluridine-3'-phosphate
  modified_base 19: mod_base = OTHER; note = 2'-O-methylcytidine-3'-phosphorothioate
  modified_base 20: mod_base = OTHER; note = 2'-O-methylcytidine-3'-phosphorothioate
  modified_base 21: mod_base = OTHER; note = 2'-O-methyladenosine
aagtcttctgtcatagttcca

SEQ ID NO: 10487 - RNA, 21 nt, synthetic construct
  source 1..21: mol_type = other RNA
  modified_base 1: mod_base = OTHER; note = 2'-O-methyladenosine-3'-phosphorothioate
  modified_base 2: mod_base = OTHER; note = 2'-O-methylguanosine-3'-phosphorothioate
  modified_base 3: mod_base = OTHER; note = 2'-O-methyluridine-3'-phosphate
  modified_base 4: mod_base = OTHER; note = 2'-O-methylcytidine-3'-phosphate
  modified_base 5: mod_base = OTHER; note = 2'-O-methyluridine-3'-phosphate
  modified_base 6: mod_base = OTHER; note = 2'-O-docosanyl-uridine-3'-phosphate
  modified_base 7: mod_base = OTHER; note = 2'-deoxy-2'-fluorocytidine-3'-phosphate
  modified_base 8: mod_base = OTHER; note = 2'-O-methyluridine-3'-phosphate
  modified_base 9: mod_base = OTHER; note = 2'-deoxy-2'-fluoroguanosine-3'-phosphate
  modified_base 10: mod_base = OTHER; note = 2'-deoxy-2'-fluorouridine-3'-phosphate
  modified_base 11: mod_base = OTHER; note = 2'-deoxy-2'-fluorocytidine-3'-phosphate
  modified_base 12: mod_base = OTHER; note = 2'-O-methyladenosine-3'-phosphate
  modified_base 13: mod_base = OTHER; note = 2'-O-methyluridine-3'-phosphate
  modified_base 14: mod_base = OTHER; note = 2'-O-methyladenosine-3'-phosphate
  modified_base 15: mod_base = OTHER; note = 2'-O-methylguanosine-3'-phosphate
  modified_base 16: mod_base = OTHER; note = 2'-O-methyluridine-3'-phosphate
  modified_base 17: mod_base = OTHER; note = 2'-O-methyluridine-3'-phosphate
  modified_base 18: mod_base = OTHER; note = 2'-O-methylcytidine-3'-phosphate
  modified_base 19: mod_base = OTHER; note = 2'-O-methylcytidine-3'-phosphorothioate
  modified_base 20: mod_base = OTHER; note = 2'-O-methyladenosine-3'-phosphorothioate
  modified_base 21: mod_base = OTHER; note = 2'-O-methyladenosine
agtcttctgtcatagttccaa

SEQ ID NO: 10488 - RNA, 21 nt, synthetic construct
  source 1..21: mol_type = other RNA
  modified_base 1: mod_base = OTHER; note = 2'-O-methylguanosine-3'-phosphorothioate
  modified_base 2: mod_base = OTHER; note = 2'-O-methyluridine-3'-phosphorothioate
  modified_base 3: mod_base = OTHER; note = 2'-O-methylcytidine-3'-phosphate
  modified_base 4: mod_base = OTHER; note = 2'-O-methyluridine-3'-phosphate
  modified_base 5: mod_base = OTHER; note = 2'-O-methyluridine-3'-phosphate
  modified_base 6: mod_base = OTHER; note = 2'-O-docosanyl-cytidine-3'-phosphate
  modified_base 7: mod_base = OTHER; note = 2'-deoxy-2'-fluorouridine-3'-phosphate
  modified_base 8: mod_base = OTHER; note = 2'-O-methylguanosine-3'-phosphate
  modified_base 9: mod_base = OTHER; note = 2'-deoxy-2'-fluorouridine-3'-phosphate
  modified_base 10: mod_base = OTHER; note = 2'-deoxy-2'-fluorocytidine-3'-phosphate
  modified_base 11: mod_base = OTHER; note = 2'-deoxy-2'-fluoroadenosine-3'-phosphate
  modified_base 12: mod_base = OTHER; note = 2'-O-methyluridine-3'-phosphate
  modified_base 13: mod_base = OTHER; note = 2'-O-methyladenosine-3'-phosphate
  modified_base 14: mod_base = OTHER; note = 2'-O-methylguanosine-3'-phosphate
  modified_base 15: mod_base = OTHER; note = 2'-O-methyluridine-3'-phosphate
  modified_base 16: mod_base = OTHER; note = 2'-O-methyluridine-3'-phosphate
  modified_base 17: mod_base = OTHER; note = 2'-O-methylcytidine-3'-phosphate
  modified_base 18: mod_base = OTHER; note = 2'-O-methylcytidine-3'-phosphate
  modified_base 19: mod_base = OTHER; note = 2'-O-methyladenosine-3'-phosphorothioate
  modified_base 20: mod_base = OTHER; note = 2'-O-methyladenosine-3'-phosphorothioate
  modified_base 21: mod_base = OTHER; note = 2'-O-methyladenosine
gtcttctgtcatagttccaaa

SEQ ID NO: 10489 - RNA, 21 nt, synthetic construct
  source 1..21: mol_type = other RNA
  modified_base 1: mod_base = OTHER; note = 2'-O-methylcytidine-3'-phosphorothioate
  modified_base 2: mod_base = OTHER; note = 2'-O-methyluridine-3'-phosphorothioate
  modified_base 3: mod_base = OTHER; note = 2'-O-methyluridine-3'-phosphate
  modified_base 4: mod_base = OTHER; note = 2'-O-methylcytidine-3'-phosphate
  modified_base 5: mod_base = OTHER; note = 2'-O-methyluridine-3'-phosphate
  modified_base 6: mod_base = OTHER; note = 2'-O-docosanyl-guanosine-3'-phosphate
  modified_base 7: mod_base = OTHER; note = 2'-deoxy-2'-fluorouridine-3'-phosphate
  modified_base 8: mod_base = OTHER; note = 2'-O-methylcytidine-3'-phosphate
  modified_base 9: mod_base = OTHER; note = 2'-deoxy-2'-fluoroadenosine-3'-phosphate
  modified_base 10: mod_base = OTHER; note = 2'-deoxy-2'-fluorouridine-3'-phosphate
  modified_base 11: mod_base = OTHER; note = 2'-deoxy-2'-fluoroadenosine-3'-phosphate
  modified_base 12: mod_base = OTHER; note = 2'-O-methylguanosine-3'-phosphate
  modified_base 13: mod_base = OTHER; note = 2'-O-methyluridine-3'-phosphate
  modified_base 14: mod_base = OTHER; note = 2'-O-methyluridine-3'-phosphate
  modified_base 15: mod_base = OTHER; note = 2'-O-methylcytidine-3'-phosphate
  modified_base 16: mod_base = OTHER; note = 2'-O-methylcytidine-3'-phosphate
  modified_base 17: mod_base = OTHER; note = 2'-O-methyladenosine-3'-phosphate
  modified_base 18: mod_base = OTHER; note = 2'-O-methyladenosine-3'-phosphate
  modified_base 19: mod_base = OTHER; note = 2'-O-methylcytidine-3'-phosphorothioate
  modified_base 20: mod_base = OTHER; note = 2'-O-methyladenosine-3'-phosphorothioate
  modified_base 21: mod_base = OTHER; note = 2'-O-methyladenosine
cttctgtcatagttccaacaa

SEQ ID NO: 10490 - RNA, 21 nt, synthetic construct
  source 1..21: mol_type = other RNA
  modified_base 1: mod_base = OTHER; note = 2'-O-methyluridine-3'-phosphorothioate
  modified_base 2: mod_base = OTHER; note = 2'-O-methyluridine-3'-phosphorothioate
  modified_base 3: mod_base = OTHER; note = 2'-O-methylcytidine-3'-phosphate
  modified_base 4: mod_base = OTHER; note = 2'-O-methyluridine-3'-phosphate
  modified_base 5: mod_base = OTHER; note = 2'-O-methylguanosine-3'-phosphate
  modified_base 6: mod_base = OTHER; note = 2'-O-docosanyl-uridine-3'-phosphate
  modified_base 7: mod_base = OTHER; note = 2'-deoxy-2'-fluorocytidine-3'-phosphate
  modified_base 8: mod_base = OTHER; note = 2'-O-methyladenosine-3'-phosphate
  modified_base 9: mod_base = OTHER; note = 2'-deoxy-2'-fluorouridine-3'-phosphate
  modified_base 10: mod_base = OTHER; note = 2'-deoxy-2'-fluoroadenosine-3'-phosphate
  modified_base 11: mod_base = OTHER; note = 2'-deoxy-2'-fluoroguanosine-3'-phosphate
  modified_base 12: mod_base = OTHER; note = 2'-O-methyluridine-3'-phosphate
  modified_base 13: mod_base = OTHER; note = 2'-O-methyluridine-3'-phosphate
  modified_base 14: mod_base = OTHER; note = 2'-O-methylcytidine-3'-phosphate
  modified_base 15: mod_base = OTHER; note = 2'-O-methylcytidine-3'-phosphate
  modified_base 16: mod_base = OTHER; note = 2'-O-methyladenosine-3'-phosphate
  modified_base 17: mod_base = OTHER; note = 2'-O-methyladenosine-3'-phosphate
  modified_base 18: mod_base = OTHER; note = 2'-O-methylcytidine-3'-phosphate
  modified_base 19: mod_base = OTHER; note = 2'-O-methyladenosine-3'-phosphorothioate
  modified_base 20: mod_base = OTHER; note = 2'-O-methyladenosine-3'-phosphorothioate
  modified_base 21: mod_base = OTHER; note = 2'-O-methyladenosine
ttctgtcatagttccaacaaa

SEQ ID NO: 10491 - RNA, 21 nt, synthetic construct
  source 1..21: mol_type = other RNA
  modified_base 1: mod_base = OTHER; note = 2'-O-methyluridine-3'-phosphorothioate
  modified_base 2: mod_base = OTHER; note = 2'-O-methylcytidine-3'-phosphorothioate
  modified_base 3: mod_base = OTHER; note = 2'-O-methyluridine-3'-phosphate
  modified_base 4: mod_base = OTHER; note = 2'-O-methylguanosine-3'-phosphate
  modified_base 5: mod_base = OTHER; note = 2'-O-methyluridine-3'-phosphate
  modified_base 6: mod_base = OTHER; note = 2'-O-docosanyl-cytidine-3'-phosphate
  modified_base 7: mod_base = OTHER; note = 2'-deoxy-2'-fluoroadenosine-3'-phosphate
  modified_base 8: mod_base = OTHER; note = 2'-O-methyluridine-3'-phosphate
  modified_base 9: mod_base = OTHER; note = 2'-deoxy-2'-fluoroadenosine-3'-phosphate
  modified_base 10: mod_base = OTHER; note = 2'-deoxy-2'-fluoroguanosine-3'-phosphate
  modified_base 11: mod_base = OTHER; note = 2'-deoxy-2'-fluorouridine-3'-phosphate
  modified_base 12: mod_base = OTHER; note = 2'-O-methyluridine-3'-phosphate
  modified_base 13: mod_base = OTHER; note = 2'-O-methylcytidine-3'-phosphate
  modified_base 14: mod_base = OTHER; note = 2'-O-methylcytidine-3'-phosphate
  modified_base 15: mod_base = OTHER; note = 2'-O-methyladenosine-3'-phosphate
  modified_base 16: mod_base = OTHER; note = 2'-O-methyladenosine-3'-phosphate
  modified_base 17: mod_base = OTHER; note = 2'-O-methylcytidine-3'-phosphate
  modified_base 18: mod_base = OTHER; note = 2'-O-methyladenosine-3'-phosphate
  modified_base 19: mod_base = OTHER; note = 2'-O-methyladenosine-3'-phosphorothioate
  modified_base 20: mod_base = OTHER; note = 2'-O-methyluridine-3'-phosphorothioate
  modified_base 21: mod_base = OTHER; note = 2'-O-methyladenosine
tctgtcatagttccaacaata

SEQ ID NO: 10492 - RNA, 21 nt, synthetic construct
  source 1..21: mol_type = other RNA
  modified_base 1: mod_base = OTHER; note = 2'-O-methylcytidine-3'-phosphorothioate
  modified_base 2: mod_base = OTHER; note = 2'-O-methyluridine-3'-phosphorothioate
  modified_base 3: mod_base = OTHER; note = 2'-O-methylguanosine-3'-phosphate
  modified_base 4: mod_base = OTHER; note = 2'-O-methyluridine-3'-phosphate
  modified_base 5: mod_base = OTHER; note = 2'-O-methylcytidine-3'-phosphate
  modified_base 6: mod_base = OTHER; note = 2'-O-docosanyl-adenosine-3'-phosphate
  modified_base 7: mod_base = OTHER; note = 2'-deoxy-2'-fluorouridine-3'-phosphate
  modified_base 8: mod_base = OTHER; note = 2'-O-methyladenosine-3'-phosphate
  modified_base 9: mod_base = OTHER; note = 2'-deoxy-2'-fluoroguanosine-3'-phosphate
  modified_base 10: mod_base = OTHER; note = 2'-deoxy-2'-fluorouridine-3'-phosphate
  modified_base 11: mod_base = OTHER; note = 2'-deoxy-2'-fluorouridine-3'-phosphate
  modified_base 12: mod_base = OTHER; note = 2'-O-methylcytidine-3'-phosphate
  modified_base 13: mod_base = OTHER; note = 2'-O-methylcytidine-3'-phosphate
  modified_base 14: mod_base = OTHER; note = 2'-O-methyladenosine-3'-phosphate
  modified_base 15: mod_base = OTHER; note = 2'-O-methyladenosine-3'-phosphate
  modified_base 16: mod_base = OTHER; note = 2'-O-methylcytidine-3'-phosphate
  modified_base 17: mod_base = OTHER; note = 2'-O-methyladenosine-3'-phosphate
  modified_base 18: mod_base = OTHER; note = 2'-O-methyladenosine-3'-phosphate
  modified_base 19: mod_base = OTHER; note = 2'-O-methyluridine-3'-phosphorothioate
  modified_base 20: mod_base = OTHER; note = 2'-O-methylguanosine-3'-phosphorothioate
  modified_base 21: mod_base = OTHER; note = 2'-O-methyladenosine
ctgtcatagttccaacaatga

SEQ ID NO: 10493 - RNA, 21 nt, synthetic construct
  source 1..21: mol_type = other RNA
  modified_base 1: mod_base = OTHER; note = 2'-O-methyluridine-3'-phosphorothioate
  modified_base 2: mod_base = OTHER; note = 2'-O-methylguanosine-3'-phosphorothioate
  modified_base 3: mod_base = OTHER; note = 2'-O-methyluridine-3'-phosphate
  modified_base 4: mod_base = OTHER; note = 2'-O-methylcytidine-3'-phosphate
  modified_base 5: mod_base = OTHER; note = 2'-O-methyladenosine-3'-phosphate
  modified_base 6: mod_base = OTHER; note = 2'-O-docosanyl-uridine-3'-phosphate
  modified_base 7: mod_base = OTHER; note = 2'-deoxy-2'-fluoroadenosine-3'-phosphate
  modified_base 8: mod_base = OTHER; note = 2'-O-methylguanosine-3'-phosphate
  modified_base 9: mod_base = OTHER; note = 2'-deoxy-2'-fluorouridine-3'-phosphate
  modified_base 10: mod_base = OTHER; note = 2'-deoxy-2'-fluorouridine-3'-phosphate
  modified_base 11: mod_base = OTHER; note = 2'-deoxy-2'-fluorocytidine-3'-phosphate
  modified_base 12: mod_base = OTHER; note = 2'-O-methylcytidine-3'-phosphate
  modified_base 13: mod_base = OTHER; note = 2'-O-methyladenosine-3'-phosphate
  modified_base 14: mod_base = OTHER; note = 2'-O-methyladenosine-3'-phosphate
  modified_base 15: mod_base = OTHER; note = 2'-O-methylcytidine-3'-phosphate
  modified_base 16: mod_base = OTHER; note = 2'-O-methyladenosine-3'-phosphate
  modified_base 17: mod_base = OTHER; note = 2'-O-methyladenosine-3'-phosphate
  modified_base 18: mod_base = OTHER; note = 2'-O-methyluridine-3'-phosphate
  modified_base 19: mod_base = OTHER; note = 2'-O-methylguanosine-3'-phosphorothioate
  modified_base 20: mod_base = OTHER; note = 2'-O-methyluridine-3'-phosphorothioate
  modified_base 21: mod_base = OTHER; note = 2'-O-methyladenosine
tgtcatagttccaacaatgta

SEQ ID NO: 10494 - RNA, 21 nt, synthetic construct
  source 1..21: mol_type = other RNA
  modified_base 1: mod_base = OTHER; note = 2'-O-methylguanosine-3'-phosphorothioate
  modified_base 2: mod_base = OTHER; note = 2'-O-methyluridine-3'-phosphorothioate
  modified_base 3: mod_base = OTHER; note = 2'-O-methylcytidine-3'-phosphate
  modified_base 4: mod_base = OTHER; note = 2'-O-methyladenosine-3'-phosphate
  modified_base 5: mod_base = OTHER; note = 2'-O-methyluridine-3'-phosphate
  modified_base 6: mod_base = OTHER; note = 2'-O-docosanyl-adenosine-3'-phosphate
  modified_base 7: mod_base = OTHER; note = 2'-deoxy-2'-fluoroguanosine-3'-phosphate
  modified_base 8: mod_base = OTHER; note = 2'-O-methyluridine-3'-phosphate
  modified_base 9: mod_base = OTHER; note = 2'-deoxy-2'-fluorouridine-3'-phosphate
  modified_base 10: mod_base = OTHER; note = 2'-deoxy-2'-fluorocytidine-3'-phosphate
  modified_base 11: mod_base = OTHER; note = 2'-deoxy-2'-fluorocytidine-3'-phosphate
  modified_base 12: mod_base = OTHER; note = 2'-O-methyladenosine-3'-phosphate
  modified_base 13: mod_base = OTHER; note = 2'-O-methyladenosine-3'-phosphate
  modified_base 14: mod_base = OTHER; note = 2'-O-methylcytidine-3'-phosphate
  modified_base 15: mod_base = OTHER; note = 2'-O-methyladenosine-3'-phosphate
  modified_base 16: mod_base = OTHER; note = 2'-O-methyladenosine-3'-phosphate
  modified_base 17: mod_base = OTHER; note = 2'-O-methyluridine-3'-phosphate
  modified_base 18: mod_base = OTHER; note = 2'-O-methylguanosine-3'-phosphate
  modified_base 19: mod_base = OTHER; note = 2'-O-methyluridine-3'-phosphorothioate
  modified_base 20: mod_base = OTHER; note = 2'-O-methyluridine-3'-phosphorothioate
  modified_base 21: mod_base = OTHER; note = 2'-O-methyladenosine
gtcatagttccaacaatgtta

SEQ ID NO: 10495 - RNA, 21 nt, synthetic construct
  source 1..21: mol_type = other RNA
  modified_base 1: mod_base = OTHER; note = 2'-O-methyluridine-3'-phosphorothioate
  modified_base 2: mod_base = OTHER; note = 2'-O-methylcytidine-3'-phosphorothioate
  modified_base 3: mod_base = OTHER; note = 2'-O-methyladenosine-3'-phosphate
  modified_base 4: mod_base = OTHER; note = 2'-O-methyluridine-3'-phosphate
  modified_base 5: mod_base = OTHER; note = 2'-O-methyladenosine-3'-phosphate
  modified_base 6: mod_base = OTHER; note = 2'-O-docosanyl-guanosine-3'-phosphate
  modified_base 7: mod_base = OTHER; note = 2'-deoxy-2'-fluorouridine-3'-phosphate
  modified_base 8: mod_base = OTHER; note = 2'-O-methyluridine-3'-phosphate
  modified_base 9: mod_base = OTHER; note = 2'-deoxy-2'-fluorocytidine-3'-phosphate
  modified_base 10: mod_base = OTHER; note = 2'-deoxy-2'-fluorocytidine-3'-phosphate
  modified_base 11: mod_base = OTHER; note = 2'-deoxy-2'-fluoroadenosine-3'-phosphate
  modified_base 12: mod_base = OTHER; note = 2'-O-methyladenosine-3'-phosphate
  modified_base 13: mod_base = OTHER; note = 2'-O-methylcytidine-3'-phosphate
  modified_base 14: mod_base = OTHER; note = 2'-O-methyladenosine-3'-phosphate
  modified_base 15: mod_base = OTHER; note = 2'-O-methyladenosine-3'-phosphate
  modified_base 16: mod_base = OTHER; note = 2'-O-methyluridine-3'-phosphate
  modified_base 17: mod_base = OTHER; note = 2'-O-methylguanosine-3'-phosphate
  modified_base 18: mod_base = OTHER; note = 2'-O-methyluridine-3'-phosphate
  modified_base 19: mod_base = OTHER; note = 2'-O-methyluridine-3'-phosphorothioate
  modified_base 20: mod_base = OTHER; note = 2'-O-methyladenosine-3'-phosphorothioate
  modified_base 21: mod_base = OTHER; note = 2'-O-methyladenosine
tcatagttccaacaatgttaa

SEQ ID NO: 10496 - RNA, 21 nt, synthetic construct
  source 1..21: mol_type = other RNA
  modified_base 1: mod_base = OTHER; note = 2'-O-methylcytidine-3'-phosphorothioate
  modified_base 2: mod_base = OTHER; note = 2'-O-methyladenosine-3'-phosphorothioate
  modified_base 3: mod_base = OTHER; note = 2'-O-methyluridine-3'-phosphate
  modified_base 4: mod_base = OTHER; note = 2'-O-methyladenosine-3'-phosphate
  modified_base 5: mod_base = OTHER; note = 2'-O-methylguanosine-3'-phosphate
  modified_base 6: mod_base = OTHER; note = 2'-O-docosanyl-uridine-3'-phosphate
  modified_base 7: mod_base = OTHER; note = 2'-deoxy-2'-fluorouridine-3'-phosphate
  modified_base 8: mod_base = OTHER; note = 2'-O-methylcytidine-3'-phosphate
  modified_base 9: mod_base = OTHER; note = 2'-deoxy-2'-fluorocytidine-3'-phosphate
  modified_base 10: mod_base = OTHER; note = 2'-deoxy-2'-fluoroadenosine-3'-phosphate
  modified_base 11: mod_base = OTHER; note = 2'-deoxy-2'-fluoroadenosine-3'-phosphate
  modified_base 12: mod_base = OTHER; note = 2'-O-methylcytidine-3'-phosphate
  modified_base 13: mod_base = OTHER; note = 2'-O-methyladenosine-3'-phosphate
  modified_base 14: mod_base = OTHER; note = 2'-O-methyladenosine-3'-phosphate
  modified_base 15: mod_base = OTHER; note = 2'-O-methyluridine-3'-phosphate
  modified_base 16: mod_base = OTHER; note = 2'-O-methylguanosine-3'-phosphate
  modified_base 17: mod_base = OTHER; note = 2'-O-methyluridine-3'-phosphate
  modified_base 18: mod_base = OTHER; note = 2'-O-methyluridine-3'-phosphate
  modified_base 19: mod_base = OTHER; note = 2'-O-methyladenosine-3'-phosphorothioate
  modified_base 20: mod_base = OTHER; note = 2'-O-methylcytidine-3'-phosphorothioate
  modified_base 21: mod_base = OTHER; note = 2'-O-methyladenosine
catagttccaacaatgttaca

SEQ ID NO: 10497 - RNA, 21 nt, synthetic construct
  source 1..21: mol_type = other RNA
  modified_base 1: mod_base = OTHER; note = 2'-O-methyladenosine-3'-phosphorothioate
  modified_base 2: mod_base = OTHER; note = 2'-O-methyluridine-3'-phosphorothioate
  modified_base 3: mod_base = OTHER; note = 2'-O-methyladenosine-3'-phosphate
  modified_base 4: mod_base = OTHER; note = 2'-O-methylguanosine-3'-phosphate
  modified_base 5: mod_base = OTHER; note = 2'-O-methyluridine-3'-phosphate
  modified_base 6: mod_base = OTHER; note = 2'-O-docosanyl-uridine-3'-phosphate
  modified_base 7: mod_base = OTHER; note = 2'-deoxy-2'-fluorocytidine-3'-phosphate
  modified_base 8: mod_base = OTHER; note = 2'-O-methylcytidine-3'-phosphate
  modified_base 9: mod_base = OTHER; note = 2'-deoxy-2'-fluoroadenosine-3'-phosphate
  modified_base 10: mod_base = OTHER; note = 2'-deoxy-2'-fluoroadenosine-3'-phosphate
  modified_base 11: mod_base = OTHER; note = 2'-deoxy-2'-fluorocytidine-3'-phosphate
  modified_base 12: mod_base = OTHER; note = 2'-O-methyladenosine-3'-phosphate
  modified_base 13: mod_base = OTHER; note = 2'-O-methyladenosine-3'-phosphate
  modified_base 14: mod_base = OTHER; note = 2'-O-methyluridine-3'-phosphate
  modified_base 15: mod_base = OTHER; note = 2'-O-methylguanosine-3'-phosphate
  modified_base 16: mod_base = OTHER; note = 2'-O-methyluridine-3'-phosphate
  modified_base 17: mod_base = OTHER; note = 2'-O-methyluridine-3'-phosphate
  modified_base 18: mod_base = OTHER; note = 2'-O-methyladenosine-3'-phosphate
  modified_base 19: mod_base = OTHER; note = 2'-O-methylcytidine-3'-phosphorothioate
  modified_base 20: mod_base = OTHER; note = 2'-O-methylcytidine-3'-phosphorothioate
  modified_base 21: mod_base = OTHER; note = 2'-O-methyladenosine
atagttccaacaatgttacca

SEQ ID NO: 10498 - RNA, 21 nt, synthetic construct
  source 1..21: mol_type = other RNA
  modified_base 1: mod_base = OTHER; note = 2'-O-methyluridine-3'-phosphorothioate
  modified_base 2: mod_base = OTHER; note = 2'-O-methyladenosine-3'-phosphorothioate
  modified_base 3: mod_base = OTHER; note = 2'-O-methylguanosine-3'-phosphate
  modified_base 4: mod_base = OTHER; note = 2'-O-methyluridine-3'-phosphate
  modified_base 5: mod_base = OTHER; note = 2'-O-methyluridine-3'-phosphate
  modified_base 6: mod_base = OTHER; note = 2'-O-docosanyl-cytidine-3'-phosphate
  modified_base 7: mod_base = OTHER; note = 2'-deoxy-2'-fluorocytidine-3'-phosphate
  modified_base 8: mod_base = OTHER; note = 2'-O-methyladenosine-3'-phosphate
  modified_base 9: mod_base = OTHER; note = 2'-deoxy-2'-fluoroadenosine-3'-phosphate
  modified_base 10: mod_base = OTHER; note = 2'-deoxy-2'-fluorocytidine-3'-phosphate
  modified_base 11: mod_base = OTHER; note = 2'-deoxy-2'-fluoroadenosine-3'-phosphate
  modified_base 12: mod_base = OTHER; note = 2'-O-methyladenosine-3'-phosphate
  modified_base 13: mod_base = OTHER; note = 2'-O-methyluridine-3'-phosphate
  modified_base 14: mod_base = OTHER; note = 2'-O-methylguanosine-3'-phosphate
  modified_base 15: mod_base = OTHER; note = 2'-O-methyluridine-3'-phosphate
  modified_base 16: mod_base = OTHER; note = 2'-O-methyluridine-3'-phosphate
  modified_base 17: mod_base = OTHER; note = 2'-O-methyladenosine-3'-phosphate
  modified_base 18: mod_base = OTHER; note = 2'-O-methylcytidine-3'-phosphate
  modified_base 19: mod_base = OTHER; note = 2'-O-methylcytidine-3'-phosphorothioate
  modified_base 20: mod_base = OTHER; note = 2'-O-methyladenosine-3'-phosphorothioate
  modified_base 21: mod_base = OTHER; note = 2'-O-methyladenosine
tagttccaacaatgttaccaa

SEQ ID NO: 10499 - RNA, 21 nt, synthetic construct
  source 1..21: mol_type = other RNA
  modified_base 1: mod_base = OTHER; note = 2'-O-methyladenosine-3'-phosphorothioate
  modified_base 2: mod_base = OTHER; note = 2'-O-methylguanosine-3'-phosphorothioate
  modified_base 3: mod_base = OTHER; note = 2'-O-methyluridine-3'-phosphate
  modified_base 4: mod_base = OTHER; note = 2'-O-methyluridine-3'-phosphate
  modified_base 5: mod_base = OTHER; note = 2'-O-methylcytidine-3'-phosphate
  modified_base 6: mod_base = OTHER; note = 2'-O-docosanyl-cytidine-3'-phosphate
  modified_base 7: mod_base = OTHER; note = 2'-deoxy-2'-fluoroadenosine-3'-phosphate
  modified_base 8: mod_base = OTHER; note = 2'-O-methyladenosine-3'-phosphate
  modified_base 9: mod_base = OTHER; note = 2'-deoxy-2'-fluorocytidine-3'-phosphate
  modified_base 10: mod_base = OTHER; note = 2'-deoxy-2'-fluoroadenosine-3'-phosphate
  modified_base 11: mod_base = OTHER; note = 2'-deoxy-2'-fluoroadenosine-3'-phosphate
  modified_base 12: mod_base = OTHER; note = 2'-O-methyluridine-3'-phosphate
  modified_base 13: mod_base = OTHER; note = 2'-O-methylguanosine-3'-phosphate
  modified_base 14: mod_base = OTHER; note = 2'-O-methyluridine-3'-phosphate
  modified_base 15: mod_base = OTHER; note = 2'-O-methyluridine-3'-phosphate
  modified_base 16: mod_base = OTHER; note = 2'-O-methyladenosine-3'-phosphate
  modified_base 17: mod_base = OTHER; note = 2'-O-methylcytidine-3'-phosphate
  modified_base 18: mod_base = OTHER; note = 2'-O-methylcytidine-3'-phosphate
  modified_base 19: mod_base = OTHER; note = 2'-O-methyladenosine-3'-phosphorothioate
  modified_base 20: mod_base = OTHER; note = 2'-O-methyladenosine-3'-phosphorothioate
  modified_base 21: mod_base = OTHER; note = 2'-O-methyladenosine
agttccaacaatgttaccaaa

SEQ ID NO: 10500 - RNA, 21 nt, synthetic construct
  source 1..21: mol_type = other RNA
  modified_base 1: mod_base = OTHER; note = 2'-O-methylguanosine-3'-phosphorothioate
  modified_base 2: mod_base = OTHER; note = 2'-O-methyluridine-3'-phosphorothioate
  modified_base 3: mod_base = OTHER; note = 2'-O-methyluridine-3'-phosphate
  modified_base 4: mod_base = OTHER; note = 2'-O-methylcytidine-3'-phosphate
  modified_base 5: mod_base = OTHER; note = 2'-O-methylcytidine-3'-phosphate
  modified_base 6: mod_base = OTHER; note = 2'-O-docosanyl-adenosine-3'-phosphate
  modified_base 7: mod_base = OTHER; note = 2'-deoxy-2'-fluoroadenosine-3'-phosphate
  modified_base 8: mod_base = OTHER; note = 2'-O-methylcytidine-3'-phosphate
  modified_base 9: mod_base = OTHER; note = 2'-deoxy-2'-fluoroadenosine-3'-phosphate
  modified_base 10: mod_base = OTHER; note = 2'-deoxy-2'-fluoroadenosine-3'-phosphate
  modified_base 11: mod_base = OTHER; note = 2'-deoxy-2'-fluorouridine-3'-phosphate
  modified_base 12: mod_base = OTHER; note = 2'-O-methylguanosine-3'-phosphate
  modified_base 13: mod_base = OTHER; note = 2'-O-methyluridine-3'-phosphate
  modified_base 14: mod_base = OTHER; note = 2'-O-methyluridine-3'-phosphate
  modified_base 15: mod_base = OTHER; note = 2'-O-methyladenosine-3'-phosphate
  modified_base 16: mod_base = OTHER; note = 2'-O-methylcytidine-3'-phosphate
  modified_base 17: mod_base = OTHER; note = 2'-O-methylcytidine-3'-phosphate
  modified_base 18: mod_base = OTHER; note = 2'-O-methyladenosine-3'-phosphate
  modified_base 19: mod_base = OTHER; note = 2'-O-methyladenosine-3'-phosphorothioate
  modified_base 20: mod_base = OTHER; note = 2'-O-methyladenosine-3'-phosphorothioate
  modified_base 21: mod_base = OTHER; note = 2'-O-methyladenosine
gttccaacaatgttaccaaaa

SEQ ID NO: 10501 - RNA, 21 nt, synthetic construct
  source 1..21: mol_type = other RNA
  modified_base 1: mod_base = OTHER; note = 2'-O-methyluridine-3'-phosphorothioate
  modified_base 2: mod_base = OTHER; note = 2'-O-methyluridine-3'-phosphorothioate
  modified_base 3: mod_base = OTHER; note = 2'-O-methylcytidine-3'-phosphate
  modified_base 4: mod_base = OTHER; note = 2'-O-methylcytidine-3'-phosphate
  modified_base 5: mod_base = OTHER; note = 2'-O-methyladenosine-3'-phosphate
  modified_base 6: mod_base = OTHER; note = 2'-O-docosanyl-adenosine-3'-phosphate
  modified_base 7: mod_base = OTHER; note = 2'-deoxy-2'-fluorocytidine-3'-phosphate
  modified_base 8: mod_base = OTHER; note = 2'-O-methyladenosine-3'-phosphate
  modified_base 9: mod_base = OTHER; note = 2'-deoxy-2'-fluoroadenosine-3'-phosphate
  modified_base 10: mod_base = OTHER; note = 2'-deoxy-2'-fluorouridine-3'-phosphate
  modified_base 11: mod_base = OTHER; note = 2'-deoxy-2'-fluoroguanosine-3'-phosphate
  modified_base 12: mod_base = OTHER; note = 2'-O-methyluridine-3'-phosphate
  modified_base 13: mod_base = OTHER; note = 2'-O-methyluridine-3'-phosphate
  modified_base 14: mod_base = OTHER; note = 2'-O-methyladenosine-3'-phosphate
  modified_base 15: mod_base = OTHER; note = 2'-O-methylcytidine-3'-phosphate
  modified_base 16: mod_base = OTHER; note = 2'-O-methylcytidine-3'-phosphate
  modified_base 17: mod_base = OTHER; note = 2'-O-methyladenosine-3'-phosphate
  modified_base 18: mod_base = OTHER; note = 2'-O-methyladenosine-3'-phosphate
  modified_base 19: mod_base = OTHER; note = 2'-O-methyladenosine-3'-phosphorothioate
  modified_base 20: mod_base = OTHER; note = 2'-O-methyladenosine-3'-phosphorothioate
  modified_base 21: mod_base = OTHER; note = 2'-O-methyladenosine
ttccaacaatgttaccaaaaa

SEQ ID NO: 10502 - RNA, 21 nt, synthetic construct
  source 1..21: mol_type = other RNA
  modified_base 1: mod_base = OTHER; note = 2'-O-methyluridine-3'-phosphorothioate
  modified_base 2: mod_base = OTHER; note = 2'-O-methylcytidine-3'-phosphorothioate
  modified_base 3: mod_base = OTHER; note = 2'-O-methylcytidine-3'-phosphate
  modified_base 4: mod_base = OTHER; note = 2'-O-methyladenosine-3'-phosphate
  modified_base 5: mod_base = OTHER; note = 2'-O-methyladenosine-3'-phosphate
  modified_base 6: mod_base = OTHER; note = 2'-O-docosanyl-cytidine-3'-phosphate
  modified_base 7: mod_base = OTHER; note = 2'-deoxy-2'-fluoroadenosine-3'-phosphate
  modified_base 8: mod_base = OTHER; note = 2'-O-methyladenosine-3'-phosphate
  modified_base 9: mod_base = OTHER; note = 2'-deoxy-2'-fluorouridine-3'-phosphate
  modified_base 10: mod_base = OTHER; note = 2'-deoxy-2'-fluoroguanosine-3'-phosphate
  modified_base 11: mod_base = OTHER; note = 2'-deoxy-2'-fluorouridine-3'-phosphate
  modified_base 12: mod_base = OTHER; note = 2'-O-methyluridine-3'-phosphate
  modified_base 13: mod_base = OTHER; note = 2'-O-methyladenosine-3'-phosphate
  modified_base 14: mod_base = OTHER; note = 2'-O-methylcytidine-3'-phosphate
  modified_base 15: mod_base = OTHER; note = 2'-O-methylcytidine-3'-phosphate
  modified_base 16: mod_base = OTHER; note = 2'-O-methyladenosine-3'-phosphate
  modified_base 17: mod_base = OTHER; note = 2'-O-methyladenosine-3'-phosphate
  modified_base 18: mod_base = OTHER; note = 2'-O-methyladenosine-3'-phosphate
  modified_base 19: mod_base = OTHER; note = 2'-O-methyladenosine-3'-phosphorothioate
  modified_base 20: mod_base = OTHER; note = 2'-O-methylcytidine-3'-phosphorothioate
  modified_base 21: mod_base = OTHER; note = 2'-O-methyladenosine
tccaacaatgttaccaaaaca

SEQ ID NO: 10503 - RNA, 21 nt, synthetic construct
  source 1..21: mol_type = other RNA
  modified_base 1: mod_base = OTHER; note = 2'-O-methylcytidine-3'-phosphorothioate
  modified_base 2: mod_base = OTHER; note = 2'-O-methylcytidine-3'-phosphorothioate
  modified_base 3: mod_base = OTHER; note = 2'-O-methyladenosine-3'-phosphate
  modified_base 4: mod_base = OTHER; note = 2'-O-methyladenosine-3'-phosphate
  modified_base 5: mod_base = OTHER; note = 2'-O-methylcytidine-3'-phosphate
  modified_base 6: mod_base = OTHER; note = 2'-O-docosanyl-adenosine-3'-phosphate
  modified_base 7: mod_base = OTHER; note = 2'-deoxy-2'-fluoroadenosine-3'-phosphate
  modified_base 8: mod_base = OTHER; note = 2'-O-methyluridine-3'-phosphate
  modified_base 9: mod_base = OTHER; note = 2'-deoxy-2'-fluoroguanosine-3'-phosphate
  modified_base 10: mod_base = OTHER; note = 2'-deoxy-2'-fluorouridine-3'-phosphate
  modified_base 11: mod_base = OTHER; note = 2'-deoxy-2'-fluorouridine-3'-phosphate
  modified_base 12: mod_base = OTHER; note = 2'-O-methyladenosine-3'-phosphate
  modified_base 13: mod_base = OTHER; note = 2'-O-methylcytidine-3'-phosphate
  modified_base 14: mod_base = OTHER; note = 2'-O-methylcytidine-3'-phosphate
  modified_base 15: mod_base = OTHER; note = 2'-O-methyladenosine-3'-phosphate
  modified_base 16: mod_base = OTHER; note = 2'-O-methyladenosine-3'-phosphate
  modified_base 17: mod_base = OTHER; note = 2'-O-methyladenosine-3'-phosphate
  modified_base 18: mod_base = OTHER; note = 2'-O-methyladenosine-3'-phosphate
  modified_base 19: mod_base = OTHER; note = 2'-O-methylcytidine-3'-phosphorothioate
  modified_base 20: mod_base = OTHER; note = 2'-O-methylcytidine-3'-phosphorothioate
  modified_base 21: mod_base = OTHER; note = 2'-O-methyladenosine
ccaacaatgttaccaaaacca

SEQ ID NO: 10504 - RNA, 21 nt, synthetic construct
  source 1..21: mol_type = other RNA
  modified_base 1: mod_base = OTHER; note = 2'-O-methylcytidine-3'-phosphorothioate
  modified_base 2: mod_base = OTHER; note = 2'-O-methyladenosine-3'-phosphorothioate
  modified_base 3: mod_base = OTHER; note = 2'-O-methyladenosine-3'-phosphate
  modified_base 4: mod_base = OTHER; note = 2'-O-methylcytidine-3'-phosphate
  modified_base 5: mod_base = OTHER; note = 2'-O-methyladenosine-3'-phosphate
  modified_base 6: mod_base = OTHER; note = 2'-O-docosanyl-adenosine-3'-phosphate
  modified_base 7: mod_base = OTHER; note = 2'-deoxy-2'-fluorouridine-3'-phosphate
  modified_base 8: mod_base = OTHER; note = 2'-O-methylguanosine-3'-phosphate
  modified_base 9: mod_base = OTHER; note = 2'-deoxy-2'-fluorouridine-3'-phosphate
  modified_base 10: mod_base = OTHER; note = 2'-deoxy-2'-fluorouridine-3'-phosphate
  modified_base 11: mod_base = OTHER; note = 2'-deoxy-2'-fluoroadenosine-3'-phosphate
  modified_base 12: mod_base = OTHER; note = 2'-O-methylcytidine-3'-phosphate
  modified_base 13: mod_base = OTHER; note = 2'-O-methylcytidine-3'-phosphate
  modified_base 14: mod_base = OTHER; note = 2'-O-methyladenosine-3'-phosphate
  modified_base 15: mod_base = OTHER; note = 2'-O-methyladenosine-3'-phosphate
  modified_base 16: mod_base = OTHER; note = 2'-O-methyladenosine-3'-phosphate
  modified_base 17: mod_base = OTHER; note = 2'-O-methyladenosine-3'-phosphate
  modified_base 18: mod_base = OTHER; note = 2'-O-methylcytidine-3'-phosphate
  modified_base 19: mod_base = OTHER; note = 2'-O-methylcytidine-3'-phosphorothioate
  modified_base 20: mod_base = OTHER; note = 2'-O-methylguanosine-3'-phosphorothioate
  modified_base 21: mod_base = OTHER; note = 2'-O-methyladenosine
caacaatgttaccaaaaccga

SEQ ID NO: 10505 - RNA, 21 nt, synthetic construct
  source 1..21: mol_type = other RNA
  modified_base 1: mod_base = OTHER; note = 2'-O-methyladenosine-3'-phosphorothioate
  modified_base 2: mod_base = OTHER; note = 2'-O-methyladenosine-3'-phosphorothioate
  modified_base 3: mod_base = OTHER; note = 2'-O-methylcytidine-3'-phosphate
  modified_base 4: mod_base = OTHER; note = 2'-O-methyladenosine-3'-phosphate
  modified_base 5: mod_base = OTHER; note = 2'-O-methyladenosine-3'-phosphate
  modified_base 6: mod_base = OTHER; note = 2'-O-docosanyl-uridine-3'-phosphate
  modified_base 7: mod_base = OTHER; note = 2'-deoxy-2'-fluoroguanosine-3'-phosphate
  modified_base 8: mod_base = OTHER; note = 2'-O-methyluridine-3'-phosphate
  modified_base 9: mod_base = OTHER; note = 2'-deoxy-2'-fluorouridine-3'-phosphate
  modified_base 10: mod_base = OTHER; note = 2'-deoxy-2'-fluoroadenosine-3'-phosphate
  modified_base 11: mod_base = OTHER; note = 2'-deoxy-2'-fluorocytidine-3'-phosphate
  modified_base 12: mod_base = OTHER; note = 2'-O-methylcytidine-3'-phosphate
  modified_base 13: mod_base = OTHER; note = 2'-O-methyladenosine-3'-phosphate
  modified_base 14: mod_base = OTHER; note = 2'-O-methyladenosine-3'-phosphate
  modified_base 15: mod_base = OTHER; note = 2'-O-methyladenosine-3'-phosphate
  modified_base 16: mod_base = OTHER; note = 2'-O-methyladenosine-3'-phosphate
  modified_base 17: mod_base = OTHER; note = 2'-O-methylcytidine-3'-phosphate
  modified_base 18: mod_base = OTHER; note = 2'-O-methylcytidine-3'-phosphate
  modified_base 19: mod_base = OTHER; note = 2'-O-methylguanosine-3'-phosphorothioate
  modified_base 20: mod_base = OTHER; note = 2'-O-methyladenosine-3'-phosphorothioate
  modified_base 21: mod_base = OTHER; note = 2'-O-methyladenosine
aacaatgttaccaaaaccgaa

SEQ ID NO: 10506 - RNA, 21 nt, synthetic construct
  source 1..21: mol_type = other RNA
  modified_base 1: mod_base = OTHER; note = 2'-O-methyladenosine-3'-phosphorothioate
  modified_base 2: mod_base = OTHER; note = 2'-O-methylcytidine-3'-phosphorothioate
  modified_base 3: mod_base = OTHER; note = 2'-O-methyladenosine-3'-phosphate
  modified_base 4: mod_base = OTHER; note = 2'-O-methyladenosine-3'-phosphate
  modified_base 5: mod_base = OTHER; note = 2'-O-methyluridine-3'-phosphate
  modified_base 6: mod_base = OTHER; note = 2'-O-docosanyl-guanosine-3'-phosphate
  modified_base 7: mod_base = OTHER; note = 2'-deoxy-2'-fluorouridine-3'-phosphate
  modified_base 8: mod_base = OTHER; note = 2'-O-methyluridine-3'-phosphate
  modified_base 9: mod_base = OTHER; note = 2'-deoxy-2'-fluoroadenosine-3'-phosphate
  modified_base 10: mod_base = OTHER; note = 2'-deoxy-2'-fluorocytidine-3'-phosphate
  modified_base 11: mod_base = OTHER; note = 2'-deoxy-2'-fluorocytidine-3'-phosphate
  modified_base 12: mod_base = OTHER; note = 2'-O-methyladenosine-3'-phosphate
  modified_base 13: mod_base = OTHER; note = 2'-O-methyladenosine-3'-phosphate
  modified_base 14: mod_base = OTHER; note = 2'-O-methyladenosine-3'-phosphate
  modified_base 15: mod_base = OTHER; note = 2'-O-methyladenosine-3'-phosphate
  modified_base 16: mod_base = OTHER; note = 2'-O-methylcytidine-3'-phosphate
  modified_base 17: mod_base = OTHER; note = 2'-O-methylcytidine-3'-phosphate
  modified_base 18: mod_base = OTHER; note = 2'-O-methylguanosine-3'-phosphate
  modified_base 19: mod_base = OTHER; note = 2'-O-methyladenosine-3'-phosphorothioate
  modified_base 20: mod_base = OTHER; note = 2'-O-methyladenosine-3'-phosphorothioate
  modified_base 21: mod_base = OTHER; note = 2'-O-methyladenosine
acaatgttaccaaaaccgaaa

SEQ ID NO: 10507 - RNA, 21 nt, synthetic construct
  source 1..21: mol_type = other RNA
  modified_base 1: mod_base = OTHER; note = 2'-O-methylcytidine-3'-phosphorothioate
  modified_base 2: mod_base = OTHER; note = 2'-O-methyladenosine-3'-phosphorothioate
  modified_base 3: mod_base = OTHER; note = 2'-O-methyladenosine-3'-phosphate
  modified_base 4: mod_base = OTHER; note = 2'-O-methyluridine-3'-phosphate
  modified_base 5: mod_base = OTHER; note = 2'-O-methylguanosine-3'-phosphate
  modified_base 6: mod_base = OTHER; note = 2'-O-docosanyl-uridine-3'-phosphate
  modified_base 7: mod_base = OTHER; note = 2'-deoxy-2'-fluorouridine-3'-phosphate
  modified_base 8: mod_base = OTHER; note = 2'-O-methyladenosine-3'-phosphate
  modified_base 9: mod_base = OTHER; note = 2'-deoxy-2'-fluorocytidine-3'-phosphate
  modified_base 10: mod_base = OTHER; note = 2'-deoxy-2'-fluorocytidine-3'-phosphate
  modified_base 11: mod_base = OTHER; note = 2'-deoxy-2'-fluoroadenosine-3'-phosphate
  modified_base 12: mod_base = OTHER; note = 2'-O-methyladenosine-3'-phosphate
  modified_base 13: mod_base = OTHER; note = 2'-O-methyladenosine-3'-phosphate
  modified_base 14: mod_base = OTHER; note = 2'-O-methyladenosine-3'-phosphate
  modified_base 15: mod_base = OTHER; note = 2'-O-methylcytidine-3'-phosphate
  modified_base 16: mod_base = OTHER; note = 2'-O-methylcytidine-3'-phosphate
  modified_base 17: mod_base = OTHER; note = 2'-O-methylguanosine-3'-phosphate
  modified_base 18: mod_base = OTHER; note = 2'-O-methyladenosine-3'-phosphate
  modified_base 19: mod_base = OTHER; note = 2'-O-methyladenosine-3'-phosphorothioate
  modified_base 20: mod_base = OTHER; note = 2'-O-methyluridine-3'-phosphorothioate
  modified_base 21: mod_base = OTHER; note = 2'-O-methyladenosine
caatgttaccaaaaccgaata

SEQ ID NO: 10508 - RNA, 21 nt, synthetic construct
  source 1..21: mol_type = other RNA
  modified_base 1: mod_base = OTHER; note = 2'-O-methyladenosine-3'-phosphorothioate
  modified_base 2: mod_base = OTHER; note = 2'-O-methyladenosine-3'-phosphorothioate
  modified_base 3: mod_base = OTHER; note = 2'-O-methyluridine-3'-phosphate
  modified_base 4: mod_base = OTHER; note = 2'-O-methylguanosine-3'-phosphate
  modified_base 5: mod_base = OTHER; note = 2'-O-methyluridine-3'-phosphate
  modified_base 6: mod_base = OTHER; note = 2'-O-docosanyl-uridine-3'-phosphate
  modified_base 7: mod_base = OTHER; note = 2'-deoxy-2'-fluoroadenosine-3'-phosphate
  modified_base 8: mod_base = OTHER; note = 2'-O-methylcytidine-3'-phosphate
  modified_base 9: mod_base = OTHER; note = 2'-deoxy-2'-fluorocytidine-3'-phosphate
  modified_base 10: mod_base = OTHER; note = 2'-deoxy-2'-fluoroadenosine-3'-phosphate
  modified_base 11: mod_base = OTHER; note = 2'-deoxy-2'-fluoroadenosine-3'-phosphate
  modified_base 12: mod_base = OTHER; note = 2'-O-methyladenosine-3'-phosphate
  modified_base 13: mod_base = OTHER; note = 2'-O-methyladenosine-3'-phosphate
  modified_base 14: mod_base = OTHER; note = 2'-O-methylcytidine-3'-phosphate
  modified_base 15: mod_base = OTHER; note = 2'-O-methylcytidine-3'-phosphate
  modified_base 16: mod_base = OTHER; note = 2'-O-methylguanosine-3'-phosphate
  modified_base 17: mod_base = OTHER; note = 2'-O-methyladenosine-3'-phosphate
  modified_base 18: mod_base = OTHER; note = 2'-O-methyladenosine-3'-phosphate
  modified_base 19: mod_base = OTHER; note = 2'-O-methyluridine-3'-phosphorothioate
  modified_base 20: mod_base = OTHER; note = 2'-O-methylguanosine-3'-phosphorothioate
  modified_base 21: mod_base = OTHER; note = 2'-O-methyladenosine
aatgttaccaaaaccgaatga

SEQ ID NO: 10509 - RNA, 21 nt, synthetic construct
  source 1..21: mol_type = other RNA
  modified_base 1: mod_base = OTHER; note = 2'-O-methyladenosine-3'-phosphorothioate
  modified_base 2: mod_base = OTHER; note = 2'-O-methyluridine-3'-phosphorothioate
  modified_base 3: mod_base = OTHER; note = 2'-O-methylguanosine-3'-phosphate
  modified_base 4: mod_base = OTHER; note = 2'-O-methyluridine-3'-phosphate
  modified_base 5: mod_base = OTHER; note = 2'-O-methyluridine-3'-phosphate
  modified_base 6: mod_base = OTHER; note = 2'-O-docosanyl-adenosine-3'-phosphate
  modified_base 7: mod_base = OTHER; note = 2'-deoxy-2'-fluorocytidine-3'-phosphate
  modified_base 8: mod_base = OTHER; note = 2'-O-methylcytidine-3'-phosphate
  modified_base 9: mod_base = OTHER; note = 2'-deoxy-2'-fluoroadenosine-3'-phosphate
  modified_base 10: mod_base = OTHER; note = 2'-deoxy-2'-fluoroadenosine-3'-phosphate
  modified_base 11: mod_base = OTHER; note = 2'-deoxy-2'-fluoroadenosine-3'-phosphate
  modified_base 12: mod_base = OTHER; note = 2'-O-methyladenosine-3'-phosphate
  modified_base 13: mod_base = OTHER; note = 2'-O-methylcytidine-3'-phosphate
  modified_base 14: mod_base = OTHER; note = 2'-O-methylcytidine-3'-phosphate
  modified_base 15: mod_base = OTHER; note = 2'-O-methylguanosine-3'-phosphate
  modified_base 16: mod_base = OTHER; note = 2'-O-methyladenosine-3'-phosphate
  modified_base 17: mod_base = OTHER; note = 2'-O-methyladenosine-3'-phosphate
  modified_base 18: mod_base = OTHER; note = 2'-O-methyluridine-3'-phosphate
  modified_base 19: mod_base = OTHER; note = 2'-O-methylguanosine-3'-phosphorothioate
  modified_base 20: mod_base = OTHER; note = 2'-O-methylcytidine-3'-phosphorothioate
  modified_base 21: mod_base = OTHER; note = 2'-O-methyladenosine
atgttaccaaaaccgaatgca

SEQ ID NO: 10510 - RNA, 21 nt, synthetic construct
  source 1..21: mol_type = other RNA
  modified_base 1: mod_base = OTHER; note = 2'-O-methyluridine-3'-phosphorothioate
  modified_base 2: mod_base = OTHER; note = 2'-O-methylguanosine-3'-phosphorothioate
  modified_base 3: mod_base = OTHER; note = 2'-O-methyluridine-3'-phosphate
  modified_base 4: mod_base = OTHER; note = 2'-O-methyluridine-3'-phosphate
  modified_base 5: mod_base = OTHER; note = 2'-O-methyladenosine-3'-phosphate
  modified_base 6: mod_base = OTHER; note = 2'-O-docosanyl-cytidine-3'-phosphate
  modified_base 7: mod_base = OTHER; note = 2'-deoxy-2'-fluorocytidine-3'-phosphate
  modified_base 8: mod_base = OTHER; note = 2'-O-methyladenosine-3'-phosphate
  modified_base 9: mod_base = OTHER; note = 2'-deoxy-2'-fluoroadenosine-3'-phosphate
  modified_base 10: mod_base = OTHER; note = 2'-deoxy-2'-fluoroadenosine-3'-phosphate
  modified_base 11: mod_base = OTHER; note = 2'-deoxy-2'-fluoroadenosine-3'-phosphate
  modified_base 12: mod_base = OTHER; note = 2'-O-methylcytidine-3'-phosphate
  modified_base 13: mod_base = OTHER; note = 2'-O-methylcytidine-3'-phosphate
  modified_base 14: mod_base = OTHER; note = 2'-O-methylguanosine-3'-phosphate
  modified_base 15: mod_base = OTHER; note = 2'-O-methyladenosine-3'-phosphate
  modified_base 16: mod_base = OTHER; note = 2'-O-methyladenosine-3'-phosphate
  modified_base 17: mod_base = OTHER; note = 2'-O-methyluridine-3'-phosphate
  modified_base 18: mod_base = OTHER; note = 2'-O-methylguanosine-3'-phosphate
  modified_base 19: mod_base = OTHER; note = 2'-O-methylcytidine-3'-phosphorothioate
  modified_base 20: mod_base = OTHER; note = 2'-O-methyluridine-3'-phosphorothioate
  modified_base 21: mod_base = OTHER; note = 2'-O-methyladenosine
tgttaccaaaaccgaatgcta

SEQ ID NO: 10511 - RNA, 21 nt, synthetic construct
  source 1..21: mol_type = other RNA
  modified_base 1: mod_base = OTHER; note = 2'-O-methylguanosine-3'-phosphorothioate
  modified_base 2: mod_base = OTHER; note = 2'-O-methyluridine-3'-phosphorothioate
  modified_base 3: mod_base = OTHER; note = 2'-O-methyluridine-3'-phosphate
  modified_base 4: mod_base = OTHER; note = 2'-O-methyladenosine-3'-phosphate
  modified_base 5: mod_base = OTHER; note = 2'-O-methylcytidine-3'-phosphate
  modified_base 6: mod_base = OTHER; note = 2'-O-docosanyl-cytidine-3'-phosphate
  modified_base 7: mod_base = OTHER; note = 2'-deoxy-2'-fluoroadenosine-3'-phosphate
  modified_base 8: mod_base = OTHER; note = 2'-O-methyladenosine-3'-phosphate
  modified_base 9: mod_base = OTHER; note = 2'-deoxy-2'-fluoroadenosine-3'-phosphate
  modified_base 10: mod_base = OTHER; note = 2'-deoxy-2'-fluoroadenosine-3'-phosphate
  modified_base 11: mod_base = OTHER; note = 2'-deoxy-2'-fluorocytidine-3'-phosphate
  modified_base 12: mod_base = OTHER; note = 2'-O-methylcytidine-3'-phosphate
  modified_base 13: mod_base = OTHER; note = 2'-O-methylguanosine-3'-phosphate
  modified_base 14: mod_base = OTHER; note = 2'-O-methyladenosine-3'-phosphate
  modified_base 15: mod_base = OTHER; note = 2'-O-methyladenosine-3'-phosphate
  modified_base 16: mod_base = OTHER; note = 2'-O-methyluridine-3'-phosphate
  modified_base 17: mod_base = OTHER; note = 2'-O-methylguanosine-3'-phosphate
  modified_base 18: mod_base = OTHER; note = 2'-O-methylcytidine-3'-phosphate
  modified_base 19: mod_base = OTHER; note = 2'-O-methyluridine-3'-phosphorothioate
  modified_base 20: mod_base = OTHER; note = 2'-O-methylguanosine-3'-phosphorothioate
  modified_base 21: mod_base = OTHER; note = 2'-O-methyladenosine
gttaccaaaaccgaatgctga

SEQ ID NO: 10512 - RNA, 21 nt, synthetic construct
  source 1..21: mol_type = other RNA
  modified_base 1: mod_base = OTHER; note = 2'-O-methyluridine-3'-phosphorothioate
  modified_base 2: mod_base = OTHER; note = 2'-O-methyluridine-3'-phosphorothioate
  modified_base 3: mod_base = OTHER; note = 2'-O-methyladenosine-3'-phosphate
  modified_base 4: mod_base = OTHER; note = 2'-O-methylcytidine-3'-phosphate
  modified_base 5: mod_base = OTHER; note = 2'-O-methylcytidine-3'-phosphate
  modified_base 6: mod_base = OTHER; note = 2'-O-docosanyl-adenosine-3'-phosphate
  modified_base 7: mod_base = OTHER; note = 2'-deoxy-2'-fluoroadenosine-3'-phosphate
  modified_base 8: mod_base = OTHER; note = 2'-O-methyladenosine-3'-phosphate
  modified_base 9: mod_base = OTHER; note = 2'-deoxy-2'-fluoroadenosine-3'-phosphate
  modified_base 10: mod_base = OTHER; note = 2'-deoxy-2'-fluorocytidine-3'-phosphate
  modified_base 11: mod_base = OTHER; note = 2'-deoxy-2'-fluorocytidine-3'-phosphate
  modified_base 12: mod_base = OTHER; note = 2'-O-methylguanosine-3'-phosphate
  modified_base 13: mod_base = OTHER; note = 2'-O-methyladenosine-3'-phosphate
  modified_base 14: mod_base = OTHER; note = 2'-O-methyladenosine-3'-phosphate
  modified_base 15: mod_base = OTHER; note = 2'-O-methyluridine-3'-phosphate
  modified_base 16: mod_base = OTHER; note = 2'-O-methylguanosine-3'-phosphate
  modified_base 17: mod_base = OTHER; note = 2'-O-methylcytidine-3'-phosphate
  modified_base 18: mod_base = OTHER; note = 2'-O-methyluridine-3'-phosphate
  modified_base 19: mod_base = OTHER; note = 2'-O-methylguanosine-3'-phosphorothioate
  modified_base 20: mod_base = OTHER; note = 2'-O-methylcytidine-3'-phosphorothioate
  modified_base 21: mod_base = OTHER; note = 2'-O-methyladenosine
ttaccaaaaccgaatgctgca

SEQ ID NO: 10513 - RNA, 21 nt, synthetic construct
  source 1..21: mol_type = other RNA
  modified_base 1: mod_base = OTHER; note = 2'-O-methyluridine-3'-phosphorothioate
  modified_base 2: mod_base = OTHER; note = 2'-O-methyladenosine-3'-phosphorothioate
  modified_base 3: mod_base = OTHER; note = 2'-O-methylcytidine-3'-phosphate
  modified_base 4: mod_base = OTHER; note = 2'-O-methylcytidine-3'-phosphate
  modified_base 5: mod_base = OTHER; note = 2'-O-methyladenosine-3'-phosphate
  modified_base 6: mod_base = OTHER; note = 2'-O-docosanyl-adenosine-3'-phosphate
  modified_base 7: mod_base = OTHER; note = 2'-deoxy-2'-fluoroadenosine-3'-phosphate
  modified_base 8: mod_base = OTHER; note = 2'-O-methyladenosine-3'-phosphate
  modified_base 9: mod_base = OTHER; note = 2'-deoxy-2'-fluorocytidine-3'-phosphate
  modified_base 10: mod_base = OTHER; note = 2'-deoxy-2'-fluorocytidine-3'-phosphate
  modified_base 11: mod_base = OTHER; note = 2'-deoxy-2'-fluoroguanosine-3'-phosphate
  modified_base 12: mod_base = OTHER; note = 2'-O-methyladenosine-3'-phosphate
  modified_base 13: mod_base = OTHER; note = 2'-O-methyladenosine-3'-phosphate
  modified_base 14: mod_base = OTHER; note = 2'-O-methyluridine-3'-phosphate
  modified_base 15: mod_base = OTHER; note = 2'-O-methylguanosine-3'-phosphate
  modified_base 16: mod_base = OTHER; note = 2'-O-methylcytidine-3'-phosphate
  modified_base 17: mod_base = OTHER; note = 2'-O-methyluridine-3'-phosphate
  modified_base 18: mod_base = OTHER; note = 2'-O-methylguanosine-3'-phosphate
  modified_base 19: mod_base = OTHER; note = 2'-O-methylcytidine-3'-phosphorothioate
  modified_base 20: mod_base = OTHER; note = 2'-O-methyluridine-3'-phosphorothioate
  modified_base 21: mod_base = OTHER; note = 2'-O-methyladenosine
taccaaaaccgaatgctgcta

SEQ ID NO: 10514 - RNA, 21 nt, synthetic construct
  source 1..21: mol_type = other RNA
  modified_base 1: mod_base = OTHER; note = 2'-O-methyladenosine-3'-phosphorothioate
  modified_base 2: mod_base = OTHER; note = 2'-O-methylcytidine-3'-phosphorothioate
  modified_base 3: mod_base = OTHER; note = 2'-O-methylcytidine-3'-phosphate
  modified_base 4: mod_base = OTHER; note = 2'-O-methyladenosine-3'-phosphate
  modified_base 5: mod_base = OTHER; note = 2'-O-methyladenosine-3'-phosphate
  modified_base 6: mod_base = OTHER; note = 2'-O-docosanyl-adenosine-3'-phosphate
  modified_base 7: mod_base = OTHER; note = 2'-deoxy-2'-fluoroadenosine-3'-phosphate
  modified_base 8: mod_base = OTHER; note = 2'-O-methylcytidine-3'-phosphate
  modified_base 9: mod_base = OTHER; note = 2'-deoxy-2'-fluorocytidine-3'-phosphate
  modified_base 10: mod_base = OTHER; note = 2'-deoxy-2'-fluoroguanosine-3'-phosphate
  modified_base 11: mod_base = OTHER; note = 2'-deoxy-2'-fluoroadenosine-3'-phosphate
  modified_base 12: mod_base = OTHER; note = 2'-O-methyladenosine-3'-phosphate
  modified_base 13: mod_base = OTHER; note = 2'-O-methyluridine-3'-phosphate
  modified_base 14: mod_base = OTHER; note = 2'-O-methylguanosine-3'-phosphate
  modified_base 15: mod_base = OTHER; note = 2'-O-methylcytidine-3'-phosphate
  modified_base 16: mod_base = OTHER; note = 2'-O-methyluridine-3'-phosphate
  modified_base 17: mod_base = OTHER; note = 2'-O-methylguanosine-3'-phosphate
  modified_base 18: mod_base = OTHER; note = 2'-O-methylcytidine-3'-phosphate
  modified_base 19: mod_base = OTHER; note = 2'-O-methyluridine-3'-phosphorothioate
  modified_base 20: mod_base = OTHER; note = 2'-O-methyluridine-3'-phosphorothioate
  modified_base 21: mod_base = OTHER; note = 2'-O-methyladenosine
accaaaaccgaatgctgctta

SEQ ID NO: 10515 - RNA, 21 nt, synthetic construct
  source 1..21: mol_type = other RNA
  modified_base 1: mod_base = OTHER; note = 2'-O-methylcytidine-3'-phosphorothioate
  modified_base 2: mod_base = OTHER; note = 2'-O-methylcytidine-3'-phosphorothioate
  modified_base 3: mod_base = OTHER; note = 2'-O-methyladenosine-3'-phosphate
  modified_base 4: mod_base = OTHER; note = 2'-O-methyladenosine-3'-phosphate
  modified_base 5: mod_base = OTHER; note = 2'-O-methyladenosine-3'-phosphate
  modified_base 6: mod_base = OTHER; note = 2'-O-docosanyl-adenosine-3'-phosphate
  modified_base 7: mod_base = OTHER; note = 2'-deoxy-2'-fluorocytidine-3'-phosphate
  modified_base 8: mod_base = OTHER; note = 2'-O-methylcytidine-3'-phosphate
  modified_base 9: mod_base = OTHER; note = 2'-deoxy-2'-fluoroguanosine-3'-phosphate
  modified_base 10: mod_base = OTHER; note = 2'-deoxy-2'-fluoroadenosine-3'-phosphate
  modified_base 11: mod_base = OTHER; note = 2'-deoxy-2'-fluoroadenosine-3'-phosphate
  modified_base 12: mod_base = OTHER; note = 2'-O-methyluridine-3'-phosphate
  modified_base 13: mod_base = OTHER; note = 2'-O-methylguanosine-3'-phosphate
  modified_base 14: mod_base = OTHER; note = 2'-O-methylcytidine-3'-phosphate
  modified_base 15: mod_base = OTHER; note = 2'-O-methyluridine-3'-phosphate
  modified_base 16: mod_base = OTHER; note = 2'-O-methylguanosine-3'-phosphate
  modified_base 17: mod_base = OTHER; note = 2'-O-methylcytidine-3'-phosphate
  modified_base 18: mod_base = OTHER; note = 2'-O-methyluridine-3'-phosphate
  modified_base 19: mod_base = OTHER; note = 2'-O-methyluridine-3'-phosphorothioate
  modified_base 20: mod_base = OTHER; note = 2'-O-methylcytidine-3'-phosphorothioate
  modified_base 21: mod_base = OTHER; note = 2'-O-methyladenosine
ccaaaaccgaatgctgcttca

SEQ ID NO: 10516 - RNA, 21 nt, synthetic construct
  source 1..21: mol_type = other RNA
  modified_base 1: mod_base = OTHER; note = 2'-O-methylcytidine-3'-phosphorothioate
  modified_base 2: mod_base = OTHER; note = 2'-O-methyladenosine-3'-phosphorothioate
  modified_base 3: mod_base = OTHER; note = 2'-O-methyladenosine-3'-phosphate
  modified_base 4: mod_base = OTHER; note = 2'-O-methyladenosine-3'-phosphate
  modified_base 5: mod_base = OTHER; note = 2'-O-methyladenosine-3'-phosphate
  modified_base 6: mod_base = OTHER; note = 2'-O-docosanyl-cytidine-3'-phosphate
  modified_base 7: mod_base = OTHER; note = 2'-deoxy-2'-fluorocytidine-3'-phosphate
  modified_base 8: mod_base = OTHER; note = 2'-O-methylguanosine-3'-phosphate
  modified_base 9: mod_base = OTHER; note = 2'-deoxy-2'-fluoroadenosine-3'-phosphate
  modified_base 10: mod_base = OTHER; note = 2'-deoxy-2'-fluoroadenosine-3'-phosphate
  modified_base 11: mod_base = OTHER; note = 2'-deoxy-2'-fluorouridine-3'-phosphate
  modified_base 12: mod_base = OTHER; note = 2'-O-methylguanosine-3'-phosphate
  modified_base 13: mod_base = OTHER; note = 2'-O-methylcytidine-3'-phosphate
  modified_base 14: mod_base = OTHER; note = 2'-O-methyluridine-3'-phosphate
  modified_base 15: mod_base = OTHER; note = 2'-O-methylguanosine-3'-phosphate
  modified_base 16: mod_base = OTHER; note = 2'-O-methylcytidine-3'-phosphate
  modified_base 17: mod_base = OTHER; note = 2'-O-methyluridine-3'-phosphate
  modified_base 18: mod_base = OTHER; note = 2'-O-methyluridine-3'-phosphate
  modified_base 19: mod_base = OTHER; note = 2'-O-methylcytidine-3'-phosphorothioate
  modified_base 20: mod_base = OTHER; note = 2'-O-methyladenosine-3'-phosphorothioate
  modified_base 21: mod_base = OTHER; note = 2'-O-methyladenosine
caaaaccgaatgctgcttcaa

SEQ ID NO: 10517 - RNA, 21 nt, synthetic construct
  source 1..21: mol_type = other RNA
  modified_base 1: mod_base = OTHER; note = 2'-O-methyladenosine-3'-phosphorothioate
  modified_base 2: mod_base = OTHER; note = 2'-O-methyladenosine-3'-phosphorothioate
  modified_base 3: mod_base = OTHER; note = 2'-O-methyladenosine-3'-phosphate
  modified_base 4: mod_base = OTHER; note = 2'-O-methyladenosine-3'-phosphate
  modified_base 5: mod_base = OTHER; note = 2'-O-methylcytidine-3'-phosphate
  modified_base 6: mod_base = OTHER; note = 2'-O-docosanyl-cytidine-3'-phosphate
  modified_base 7: mod_base = OTHER; note = 2'-deoxy-2'-fluoroguanosine-3'-phosphate
  modified_base 8: mod_base = OTHER; note = 2'-O-methyladenosine-3'-phosphate
  modified_base 9: mod_base = OTHER; note = 2'-deoxy-2'-fluoroadenosine-3'-phosphate
  modified_base 10: mod_base = OTHER; note = 2'-deoxy-2'-fluorouridine-3'-phosphate
  modified_base 11: mod_base = OTHER; note = 2'-deoxy-2'-fluoroguanosine-3'-phosphate
  modified_base 12: mod_base = OTHER; note = 2'-O-methylcytidine-3'-phosphate
  modified_base 13: mod_base = OTHER; note = 2'-O-methyluridine-3'-phosphate
  modified_base 14: mod_base = OTHER; note = 2'-O-methylguanosine-3'-phosphate
  modified_base 15: mod_base = OTHER; note = 2'-O-methylcytidine-3'-phosphate
  modified_base 16: mod_base = OTHER; note = 2'-O-methyluridine-3'-phosphate
  modified_base 17: mod_base = OTHER; note = 2'-O-methyluridine-3'-phosphate
  modified_base 18: mod_base = OTHER; note = 2'-O-methylcytidine-3'-phosphate
  modified_base 19: mod_base = OTHER; note = 2'-O-methyladenosine-3'-phosphorothioate
  modified_base 20: mod_base = OTHER; note = 2'-O-methylcytidine-3'-phosphorothioate
  modified_base 21: mod_base = OTHER; note = 2'-O-methyladenosine
aaaaccgaatgctgcttcaca

SEQ ID NO: 10518 - RNA, 21 nt, synthetic construct
  source 1..21: mol_type = other RNA
  modified_base 1: mod_base = OTHER; note = 2'-O-methyladenosine-3'-phosphorothioate
  modified_base 2: mod_base = OTHER; note = 2'-O-methyladenosine-3'-phosphorothioate
  modified_base 3: mod_base = OTHER; note = 2'-O-methyladenosine-3'-phosphate
  modified_base 4: mod_base = OTHER; note = 2'-O-methylcytidine-3'-phosphate
  modified_base 5: mod_base = OTHER; note = 2'-O-methylcytidine-3'-phosphate
  modified_base 6: mod_base = OTHER; note = 2'-O-docosanyl-guanosine-3'-phosphate
  modified_base 7: mod_base = OTHER; note = 2'-deoxy-2'-fluoroadenosine-3'-phosphate
  modified_base 8: mod_base = OTHER; note = 2'-O-methyladenosine-3'-phosphate
  modified_base 9: mod_base = OTHER; note = 2'-deoxy-2'-fluorouridine-3'-phosphate
  modified_base 10: mod_base = OTHER; note = 2'-deoxy-2'-fluoroguanosine-3'-phosphate
  modified_base 11: mod_base = OTHER; note = 2'-deoxy-2'-fluorocytidine-3'-phosphate
  modified_base 12: mod_base = OTHER; note = 2'-O-methyluridine-3'-phosphate
  modified_base 13: mod_base = OTHER; note = 2'-O-methylguanosine-3'-phosphate
  modified_base 14: mod_base = OTHER; note = 2'-O-methylcytidine-3'-phosphate
  modified_base 15: mod_base = OTHER; note = 2'-O-methyluridine-3'-phosphate
  modified_base 16: mod_base = OTHER; note = 2'-O-methyluridine-3'-phosphate
  modified_base 17: mod_base = OTHER; note = 2'-O-methylcytidine-3'-phosphate
  modified_base 18: mod_base = OTHER; note = 2'-O-methyladenosine-3'-phosphate
  modified_base 19: mod_base = OTHER; note = 2'-O-methylcytidine-3'-phosphorothioate
  modified_base 20: mod_base = OTHER; note = 2'-O-methyladenosine-3'-phosphorothioate
  modified_base 21: mod_base = OTHER; note = 2'-O-methyladenosine
aaaccgaatgctgcttcacaa

SEQ ID NO: 10519 - RNA, 21 nt, synthetic construct
  source 1..21: mol_type = other RNA
  modified_base 1: mod_base = OTHER; note = 2'-O-methyladenosine-3'-phosphorothioate
  modified_base 2: mod_base = OTHER; note = 2'-O-methyladenosine-3'-phosphorothioate
  modified_base 3: mod_base = OTHER; note = 2'-O-methylcytidine-3'-phosphate
  modified_base 4: mod_base = OTHER; note = 2'-O-methylcytidine-3'-phosphate
  modified_base 5: mod_base = OTHER; note = 2'-O-methylguanosine-3'-phosphate
  modified_base 6: mod_base = OTHER; note = 2'-O-docosanyl-adenosine-3'-phosphate
  modified_base 7: mod_base = OTHER; note = 2'-deoxy-2'-fluoroadenosine-3'-phosphate
  modified_base 8: mod_base = OTHER; note = 2'-O-methyluridine-3'-phosphate
  modified_base 9: mod_base = OTHER; note = 2'-deoxy-2'-fluoroguanosine-3'-phosphate
  modified_base 10: mod_base = OTHER; note = 2'-deoxy-2'-fluorocytidine-3'-phosphate
  modified_base 11: mod_base = OTHER; note = 2'-deoxy-2'-fluorouridine-3'-phosphate
  modified_base 12: mod_base = OTHER; note = 2'-O-methylguanosine-3'-phosphate
  modified_base 13: mod_base = OTHER; note = 2'-O-methylcytidine-3'-phosphate
  modified_base 14: mod_base = OTHER; note = 2'-O-methyluridine-3'-phosphate
  modified_base 15: mod_base = OTHER; note = 2'-O-methyluridine-3'-phosphate
  modified_base 16: mod_base = OTHER; note = 2'-O-methylcytidine-3'-phosphate
  modified_base 17: mod_base = OTHER; note = 2'-O-methyladenosine-3'-phosphate
  modified_base 18: mod_base = OTHER; note = 2'-O-methylcytidine-3'-phosphate
  modified_base 19: mod_base = OTHER; note = 2'-O-methyladenosine-3'-phosphorothioate
  modified_base 20: mod_base = OTHER; note = 2'-O-methylguanosine-3'-phosphorothioate
  modified_base 21: mod_base = OTHER; note = 2'-O-methyladenosine
aaccgaatgctgcttcacaga

SEQ ID NO: 10520 - RNA, 21 nt, synthetic construct
  source 1..21: mol_type = other RNA
  modified_base 1: mod_base = OTHER; note = 2'-O-methyladenosine-3'-phosphorothioate
  modified_base 2: mod_base = OTHER; note = 2'-O-methylcytidine-3'-phosphorothioate
  modified_base 3: mod_base = OTHER; note = 2'-O-methylcytidine-3'-phosphate
  modified_base 4: mod_base = OTHER; note = 2'-O-methylguanosine-3'-phosphate
  modified_base 5: mod_base = OTHER; note = 2'-O-methyladenosine-3'-phosphate
  modified_base 6: mod_base = OTHER; note = 2'-O-docosanyl-adenosine-3'-phosphate
  modified_base 7: mod_base = OTHER; note = 2'-deoxy-2'-fluorouridine-3'-phosphate
  modified_base 8: mod_base = OTHER; note = 2'-O-methylguanosine-3'-phosphate
  modified_base 9: mod_base = OTHER; note = 2'-deoxy-2'-fluorocytidine-3'-phosphate
  modified_base 10: mod_base = OTHER; note = 2'-deoxy-2'-fluorouridine-3'-phosphate
  modified_base 11: mod_base = OTHER; note = 2'-deoxy-2'-fluoroguanosine-3'-phosphate
  modified_base 12: mod_base = OTHER; note = 2'-O-methylcytidine-3'-phosphate
  modified_base 13: mod_base = OTHER; note = 2'-O-methyluridine-3'-phosphate
  modified_base 14: mod_base = OTHER; note = 2'-O-methyluridine-3'-phosphate
  modified_base 15: mod_base = OTHER; note = 2'-O-methylcytidine-3'-phosphate
  modified_base 16: mod_base = OTHER; note = 2'-O-methyladenosine-3'-phosphate
  modified_base 17: mod_base = OTHER; note = 2'-O-methylcytidine-3'-phosphate
  modified_base 18: mod_base = OTHER; note = 2'-O-methyladenosine-3'-phosphate
  modified_base 19: mod_base = OTHER; note = 2'-O-methylguanosine-3'-phosphorothioate
  modified_base 20: mod_base = OTHER; note = 2'-O-methyladenosine-3'-phosphorothioate
  modified_base 21: mod_base = OTHER; note = 2'-O-methyladenosine
accgaatgctgcttcacagaa

SEQ ID NO: 10521 - RNA, 21 nt, synthetic construct
  source 1..21: mol_type = other RNA
  modified_base 1: mod_base = OTHER; note = 2'-O-methylcytidine-3'-phosphorothioate
  modified_base 2: mod_base = OTHER; note = 2'-O-methylguanosine-3'-phosphorothioate
  modified_base 3: mod_base = OTHER; note = 2'-O-methyladenosine-3'-phosphate
  modified_base 4: mod_base = OTHER; note = 2'-O-methyladenosine-3'-phosphate
  modified_base 5: mod_base = OTHER; note = 2'-O-methyluridine-3'-phosphate
  modified_base 6: mod_base = OTHER; note = 2'-O-docosanyl-guanosine-3'-phosphate
  modified_base 7: mod_base = OTHER; note = 2'-deoxy-2'-fluorocytidine-3'-phosphate
  modified_base 8: mod_base = OTHER; note = 2'-O-methyluridine-3'-phosphate
  modified_base 9: mod_base = OTHER; note = 2'-deoxy-2'-fluoroguanosine-3'-phosphate
  modified_base 10: mod_base = OTHER; note = 2'-deoxy-2'-fluorocytidine-3'-phosphate
  modified_base 11: mod_base = OTHER; note = 2'-deoxy-2'-fluorouridine-3'-phosphate
  modified_base 12: mod_base = OTHER; note = 2'-O-methyluridine-3'-phosphate
  modified_base 13: mod_base = OTHER; note = 2'-O-methylcytidine-3'-phosphate
  modified_base 14: mod_base = OTHER; note = 2'-O-methyladenosine-3'-phosphate
  modified_base 15: mod_base = OTHER; note = 2'-O-methylcytidine-3'-phosphate
  modified_base 16: mod_base = OTHER; note = 2'-O-methyladenosine-3'-phosphate
  modified_base 17: mod_base = OTHER; note = 2'-O-methylguanosine-3'-phosphate
  modified_base 18: mod_base = OTHER; note = 2'-O-methyladenosine-3'-phosphate
  modified_base 19: mod_base = OTHER; note = 2'-O-methyluridine-3'-phosphorothioate
  modified_base 20: mod_base = OTHER; note = 2'-O-methyluridine-3'-phosphorothioate
  modified_base 21: mod_base = OTHER; note = 2'-O-methyladenosine
cgaatgctgcttcacagatta

SEQ ID NO: 10522 - RNA, 21 nt, synthetic construct
  source 1..21: mol_type = other RNA
  modified_base 1: mod_base = OTHER; note = 2'-O-methyladenosine-3'-phosphorothioate
  modified_base 2: mod_base = OTHER; note = 2'-O-methyluridine-3'-phosphorothioate
  modified_base 3: mod_base = OTHER; note = 2'-O-methylguanosine-3'-phosphate
  modified_base 4: mod_base = OTHER; note = 2'-O-methylcytidine-3'-phosphate
  modified_base 5: mod_base = OTHER; note = 2'-O-methyluridine-3'-phosphate
  modified_base 6: mod_base = OTHER; note = 2'-O-docosanyl-guanosine-3'-phosphate
  modified_base 7: mod_base = OTHER; note = 2'-deoxy-2'-fluorocytidine-3'-phosphate
  modified_base 8: mod_base = OTHER; note = 2'-O-methyluridine-3'-phosphate
  modified_base 9: mod_base = OTHER; note = 2'-deoxy-2'-fluorouridine-3'-phosphate
  modified_base 10: mod_base = OTHER; note = 2'-deoxy-2'-fluorocytidine-3'-phosphate
  modified_base 11: mod_base = OTHER; note = 2'-deoxy-2'-fluoroadenosine-3'-phosphate
  modified_base 12: mod_base = OTHER; note = 2'-O-methylcytidine-3'-phosphate
  modified_base 13: mod_base = OTHER; note = 2'-O-methyladenosine-3'-phosphate
  modified_base 14: mod_base = OTHER; note = 2'-O-methylguanosine-3'-phosphate
  modified_base 15: mod_base = OTHER; note = 2'-O-methyladenosine-3'-phosphate
  modified_base 16: mod_base = OTHER; note = 2'-O-methyluridine-3'-phosphate
  modified_base 17: mod_base = OTHER; note = 2'-O-methyluridine-3'-phosphate
  modified_base 18: mod_base = OTHER; note = 2'-O-methyluridine-3'-phosphate
  modified_base 19: mod_base = OTHER; note = 2'-O-methyluridine-3'-phosphorothioate
  modified_base 20: mod_base = OTHER; note = 2'-O-methyluridine-3'-phosphorothioate
  modified_base 21: mod_base = OTHER; note = 2'-O-methyladenosine
atgctgcttcacagattttta

SEQ ID NO: 10523 - RNA, 21 nt, synthetic construct
  source 1..21: mol_type = other RNA
  modified_base 1: mod_base = OTHER; note = 2'-O-methyluridine-3'-phosphorothioate
  modified_base 2: mod_base = OTHER; note = 2'-O-methylguanosine-3'-phosphorothioate
  modified_base 3: mod_base = OTHER; note = 2'-O-methylcytidine-3'-phosphate
  modified_base 4: mod_base = OTHER; note = 2'-O-methyluridine-3'-phosphate
  modified_base 5: mod_base = OTHER; note = 2'-O-methylguanosine-3'-phosphate
  modified_base 6: mod_base = OTHER; note = 2'-O-docosanyl-cytidine-3'-phosphate
  modified_base 7: mod_base = OTHER; note = 2'-deoxy-2'-fluorouridine-3'-phosphate
  modified_base 8: mod_base = OTHER; note = 2'-O-methyluridine-3'-phosphate
  modified_base 9: mod_base = OTHER; note = 2'-deoxy-2'-fluorocytidine-3'-phosphate
  modified_base 10: mod_base = OTHER; note = 2'-deoxy-2'-fluoroadenosine-3'-phosphate
  modified_base 11: mod_base = OTHER; note = 2'-deoxy-2'-fluorocytidine-3'-phosphate
  modified_base 12: mod_base = OTHER; note = 2'-O-methyladenosine-3'-phosphate
  modified_base 13: mod_base = OTHER; note = 2'-O-methylguanosine-3'-phosphate
  modified_base 14: mod_base = OTHER; note = 2'-O-methyladenosine-3'-phosphate
  modified_base 15: mod_base = OTHER; note = 2'-O-methyluridine-3'-phosphate
  modified_base 16: mod_base = OTHER; note = 2'-O-methyluridine-3'-phosphate
  modified_base 17: mod_base = OTHER; note = 2'-O-methyluridine-3'-phosphate
  modified_base 18: mod_base = OTHER; note = 2'-O-methyluridine-3'-phosphate
  modified_base 19: mod_base = OTHER; note = 2'-O-methyluridine-3'-phosphorothioate
  modified_base 20: mod_base = OTHER; note = 2'-O-methylguanosine-3'-phosphorothioate
  modified_base 21: mod_base = OTHER; note = 2'-O-methyladenosine
tgctgcttcacagatttttga

SEQ ID NO: 10524 - RNA, 21 nt, synthetic construct
  source 1..21: mol_type = other RNA
  modified_base 1: mod_base = OTHER; note = 2'-O-methylguanosine-3'-phosphorothioate
  modified_base 2: mod_base = OTHER; note = 2'-O-methylcytidine-3'-phosphorothioate
  modified_base 3: mod_base = OTHER; note = 2'-O-methyluridine-3'-phosphate
  modified_base 4: mod_base = OTHER; note = 2'-O-methylguanosine-3'-phosphate
  modified_base 5: mod_base = OTHER; note = 2'-O-methylcytidine-3'-phosphate
  modified_base 6: mod_base = OTHER; note = 2'-O-docosanyl-uridine-3'-phosphate
  modified_base 7: mod_base = OTHER; note = 2'-deoxy-2'-fluorouridine-3'-phosphate
  modified_base 8: mod_base = OTHER; note = 2'-O-methylcytidine-3'-phosphate
  modified_base 9: mod_base = OTHER; note = 2'-deoxy-2'-fluoroadenosine-3'-phosphate
  modified_base 10: mod_base = OTHER; note = 2'-deoxy-2'-fluorocytidine-3'-phosphate
  modified_base 11: mod_base = OTHER; note = 2'-deoxy-2'-fluoroadenosine-3'-phosphate
  modified_base 12: mod_base = OTHER; note = 2'-O-methylguanosine-3'-phosphate
  modified_base 13: mod_base = OTHER; note = 2'-O-methyladenosine-3'-phosphate
  modified_base 14: mod_base = OTHER; note = 2'-O-methyluridine-3'-phosphate
  modified_base 15: mod_base = OTHER; note = 2'-O-methyluridine-3'-phosphate
  modified_base 16: mod_base = OTHER; note = 2'-O-methyluridine-3'-phosphate
  modified_base 17: mod_base = OTHER; note = 2'-O-methyluridine-3'-phosphate
  modified_base 18: mod_base = OTHER; note = 2'-O-methyluridine-3'-phosphate
  modified_base 19: mod_base = OTHER; note = 2'-O-methylguanosine-3'-phosphorothioate
  modified_base 20: mod_base = OTHER; note = 2'-O-methylcytidine-3'-phosphorothioate
  modified_base 21: mod_base = OTHER; note = 2'-O-methyladenosine
gctgcttcacagatttttgca

SEQ ID NO: 10525 - RNA, 21 nt, synthetic construct
  source 1..21: mol_type = other RNA
  modified_base 1: mod_base = OTHER; note = 2'-O-methylcytidine-3'-phosphorothioate
  modified_base 2: mod_base = OTHER; note = 2'-O-methyluridine-3'-phosphorothioate
  modified_base 3: mod_base = OTHER; note = 2'-O-methylguanosine-3'-phosphate
  modified_base 4: mod_base = OTHER; note = 2'-O-methylcytidine-3'-phosphate
  modified_base 5: mod_base = OTHER; note = 2'-O-methyluridine-3'-phosphate
  modified_base 6: mod_base = OTHER; note = 2'-O-docosanyl-uridine-3'-phosphate
  modified_base 7: mod_base = OTHER; note = 2'-deoxy-2'-fluorocytidine-3'-phosphate
  modified_base 8: mod_base = OTHER; note = 2'-O-methyladenosine-3'-phosphate
  modified_base 9: mod_base = OTHER; note = 2'-deoxy-2'-fluorocytidine-3'-phosphate
  modified_base 10: mod_base = OTHER; note = 2'-deoxy-2'-fluoroadenosine-3'-phosphate
  modified_base 11: mod_base = OTHER; note = 2'-deoxy-2'-fluoroguanosine-3'-phosphate
  modified_base 12: mod_base = OTHER; note = 2'-O-methyladenosine-3'-phosphate
  modified_base 13: mod_base = OTHER; note = 2'-O-methyluridine-3'-phosphate
  modified_base 14: mod_base = OTHER; note = 2'-O-methyluridine-3'-phosphate
  modified_base 15: mod_base = OTHER; note = 2'-O-methyluridine-3'-phosphate
  modified_base 16: mod_base = OTHER; note = 2'-O-methyluridine-3'-phosphate
  modified_base 17: mod_base = OTHER; note = 2'-O-methyluridine-3'-phosphate
  modified_base 18: mod_base = OTHER; note = 2'-O-methylguanosine-3'-phosphate
  modified_base 19: mod_base = OTHER; note = 2'-O-methylcytidine-3'-phosphorothioate
  modified_base 20: mod_base = OTHER; note = 2'-O-methyladenosine-3'-phosphorothioate
  modified_base 21: mod_base = OTHER; note = 2'-O-methyladenosine
ctgcttcacagatttttgcaa

SEQ ID NO: 10526 - RNA, 21 nt, synthetic construct
  source 1..21: mol_type = other RNA
  modified_base 1: mod_base = OTHER; note = 2'-O-methyluridine-3'-phosphorothioate
  modified_base 2: mod_base = OTHER; note = 2'-O-methylguanosine-3'-phosphorothioate
  modified_base 3: mod_base = OTHER; note = 2'-O-methylcytidine-3'-phosphate
  modified_base 4: mod_base = OTHER; note = 2'-O-methyluridine-3'-phosphate
  modified_base 5: mod_base = OTHER; note = 2'-O-methyluridine-3'-phosphate
  modified_base 6: mod_base = OTHER; note = 2'-O-docosanyl-cytidine-3'-phosphate
  modified_base 7: mod_base = OTHER; note = 2'-deoxy-2'-fluoroadenosine-3'-phosphate
  modified_base 8: mod_base = OTHER; note = 2'-O-methylcytidine-3'-phosphate
  modified_base 9: mod_base = OTHER; note = 2'-deoxy-2'-fluoroadenosine-3'-phosphate
  modified_base 10: mod_base = OTHER; note = 2'-deoxy-2'-fluoroguanosine-3'-phosphate
  modified_base 11: mod_base = OTHER; note = 2'-deoxy-2'-fluoroadenosine-3'-phosphate
  modified_base 12: mod_base = OTHER; note = 2'-O-methyluridine-3'-phosphate
  modified_base 13: mod_base = OTHER; note = 2'-O-methyluridine-3'-phosphate
  modified_base 14: mod_base = OTHER; note = 2'-O-methyluridine-3'-phosphate
  modified_base 15: mod_base = OTHER; note = 2'-O-methyluridine-3'-phosphate
  modified_base 16: mod_base = OTHER; note = 2'-O-methyluridine-3'-phosphate
  modified_base 17: mod_base = OTHER; note = 2'-O-methylguanosine-3'-phosphate
  modified_base 18: mod_base = OTHER; note = 2'-O-methylcytidine-3'-phosphate
  modified_base 19: mod_base = OTHER; note = 2'-O-methyladenosine-3'-phosphorothioate
  modified_base 20: mod_base = OTHER; note = 2'-O-methyladenosine-3'-phosphorothioate
  modified_base 21: mod_base = OTHER; note = 2'-O-methyladenosine
tgcttcacagatttttgcaaa

SEQ ID NO: 10527 - RNA, 21 nt, synthetic construct
  source 1..21: mol_type = other RNA
  modified_base 1: mod_base = OTHER; note = 2'-O-methylguanosine-3'-phosphorothioate
  modified_base 2: mod_base = OTHER; note = 2'-O-methylcytidine-3'-phosphorothioate
  modified_base 3: mod_base = OTHER; note = 2'-O-methyluridine-3'-phosphate
  modified_base 4: mod_base = OTHER; note = 2'-O-methyluridine-3'-phosphate
  modified_base 5: mod_base = OTHER; note = 2'-O-methylcytidine-3'-phosphate
  modified_base 6: mod_base = OTHER; note = 2'-O-docosanyl-adenosine-3'-phosphate
  modified_base 7: mod_base = OTHER; note = 2'-deoxy-2'-fluorocytidine-3'-phosphate
  modified_base 8: mod_base = OTHER; note = 2'-O-methyladenosine-3'-phosphate
  modified_base 9: mod_base = OTHER; note = 2'-deoxy-2'-fluoroguanosine-3'-phosphate
  modified_base 10: mod_base = OTHER; note = 2'-deoxy-2'-fluoroadenosine-3'-phosphate
  modified_base 11: mod_base = OTHER; note = 2'-deoxy-2'-fluorouridine-3'-phosphate
  modified_base 12: mod_base = OTHER; note = 2'-O-methyluridine-3'-phosphate
  modified_base 13: mod_base = OTHER; note = 2'-O-methyluridine-3'-phosphate
  modified_base 14: mod_base = OTHER; note = 2'-O-methyluridine-3'-phosphate
  modified_base 15: mod_base = OTHER; note = 2'-O-methyluridine-3'-phosphate
  modified_base 16: mod_base = OTHER; note = 2'-O-methylguanosine-3'-phosphate
  modified_base 17: mod_base = OTHER; note = 2'-O-methylcytidine-3'-phosphate
  modified_base 18: mod_base = OTHER; note = 2'-O-methyladenosine-3'-phosphate
  modified_base 19: mod_base = OTHER; note = 2'-O-methyladenosine-3'-phosphorothioate
  modified_base 20: mod_base = OTHER; note = 2'-O-methylcytidine-3'-phosphorothioate
  modified_base 21: mod_base = OTHER; note = 2'-O-methyladenosine
gcttcacagatttttgcaaca

SEQ ID NO: 10528 - RNA, 21 nt, synthetic construct
  source 1..21: mol_type = other RNA
  modified_base 1: mod_base = OTHER; note = 2'-O-methylcytidine-3'-phosphorothioate
  modified_base 2: mod_base = OTHER; note = 2'-O-methyluridine-3'-phosphorothioate
  modified_base 3: mod_base = OTHER; note = 2'-O-methyluridine-3'-phosphate
  modified_base 4: mod_base = OTHER; note = 2'-O-methylcytidine-3'-phosphate
  modified_base 5: mod_base = OTHER; note = 2'-O-methyladenosine-3'-phosphate
  modified_base 6: mod_base = OTHER; note = 2'-O-docosanyl-cytidine-3'-phosphate
  modified_base 7: mod_base = OTHER; note = 2'-deoxy-2'-fluoroadenosine-3'-phosphate
  modified_base 8: mod_base = OTHER; note = 2'-O-methylguanosine-3'-phosphate
  modified_base 9: mod_base = OTHER; note = 2'-deoxy-2'-fluoroadenosine-3'-phosphate
  modified_base 10: mod_base = OTHER; note = 2'-deoxy-2'-fluorouridine-3'-phosphate
  modified_base 11: mod_base = OTHER; note = 2'-deoxy-2'-fluorouridine-3'-phosphate
  modified_base 12: mod_base = OTHER; note = 2'-O-methyluridine-3'-phosphate
  modified_base 13: mod_base = OTHER; note = 2'-O-methyluridine-3'-phosphate
  modified_base 14: mod_base = OTHER; note = 2'-O-methyluridine-3'-phosphate
  modified_base 15: mod_base = OTHER; note = 2'-O-methylguanosine-3'-phosphate
  modified_base 16: mod_base = OTHER; note = 2'-O-methylcytidine-3'-phosphate
  modified_base 17: mod_base = OTHER; note = 2'-O-methyladenosine-3'-phosphate
  modified_base 18: mod_base = OTHER; note = 2'-O-methyladenosine-3'-phosphate
  modified_base 19: mod_base = OTHER; note = 2'-O-methylcytidine-3'-phosphorothioate
  modified_base 20: mod_base = OTHER; note = 2'-O-methyladenosine-3'-phosphorothioate
  modified_base 21: mod_base = OTHER; note = 2'-O-methyladenosine
cttcacagatttttgcaacaa

SEQ ID NO: 10529 - RNA, 21 nt, synthetic construct
  source 1..21: mol_type = other RNA
  modified_base 1: mod_base = OTHER; note = 2'-O-methyluridine-3'-phosphorothioate
  modified_base 2: mod_base = OTHER; note = 2'-O-methyluridine-3'-phosphorothioate
  modified_base 3: mod_base = OTHER; note = 2'-O-methylcytidine-3'-phosphate
  modified_base 4: mod_base = OTHER; note = 2'-O-methyladenosine-3'-phosphate
  modified_base 5: mod_base = OTHER; note = 2'-O-methylcytidine-3'-phosphate
  modified_base 6: mod_base = OTHER; note = 2'-O-docosanyl-adenosine-3'-phosphate
  modified_base 7: mod_base = OTHER; note = 2'-deoxy-2'-fluoroguanosine-3'-phosphate
  modified_base 8: mod_base = OTHER; note = 2'-O-methyladenosine-3'-phosphate
  modified_base 9: mod_base = OTHER; note = 2'-deoxy-2'-fluorouridine-3'-phosphate
  modified_base 10: mod_base = OTHER; note = 2'-deoxy-2'-fluorouridine-3'-phosphate
  modified_base 11: mod_base = OTHER; note = 2'-deoxy-2'-fluorouridine-3'-phosphate
  modified_base 12: mod_base = OTHER; note = 2'-O-methyluridine-3'-phosphate
  modified_base 13: mod_base = OTHER; note = 2'-O-methyluridine-3'-phosphate
  modified_base 14: mod_base = OTHER; note = 2'-O-methylguanosine-3'-phosphate
  modified_base 15: mod_base = OTHER; note = 2'-O-methylcytidine-3'-phosphate
  modified_base 16: mod_base = OTHER; note = 2'-O-methyladenosine-3'-phosphate
  modified_base 17: mod_base = OTHER; note = 2'-O-methyladenosine-3'-phosphate
  modified_base 18: mod_base = OTHER; note = 2'-O-methylcytidine-3'-phosphate
  modified_base 19: mod_base = OTHER; note = 2'-O-methyladenosine-3'-phosphorothioate
  modified_base 20: mod_base = OTHER; note = 2'-O-methyladenosine-3'-phosphorothioate
  modified_base 21: mod_base = OTHER; note = 2'-O-methyladenosine
ttcacagatttttgcaacaaa

SEQ ID NO: 10530 - RNA, 21 nt, synthetic construct
  source 1..21: mol_type = other RNA
  modified_base 1: mod_base = OTHER; note = 2'-O-methyluridine-3'-phosphorothioate
  modified_base 2: mod_base = OTHER; note = 2'-O-methylcytidine-3'-phosphorothioate
  modified_base 3: mod_base = OTHER; note = 2'-O-methyladenosine-3'-phosphate
  modified_base 4: mod_base = OTHER; note = 2'-O-methylcytidine-3'-phosphate
  modified_base 5: mod_base = OTHER; note = 2'-O-methyladenosine-3'-phosphate
  modified_base 6: mod_base = OTHER; note = 2'-O-docosanyl-guanosine-3'-phosphate
  modified_base 7: mod_base = OTHER; note = 2'-deoxy-2'-fluoroadenosine-3'-phosphate
  modified_base 8: mod_base = OTHER; note = 2'-O-methyluridine-3'-phosphate
  modified_base 9: mod_base = OTHER; note = 2'-deoxy-2'-fluorouridine-3'-phosphate
  modified_base 10: mod_base = OTHER; note = 2'-deoxy-2'-fluorouridine-3'-phosphate
  modified_base 11: mod_base = OTHER; note = 2'-deoxy-2'-fluorouridine-3'-phosphate
  modified_base 12: mod_base = OTHER; note = 2'-O-methyluridine-3'-phosphate
  modified_base 13: mod_base = OTHER; note = 2'-O-methylguanosine-3'-phosphate
  modified_base 14: mod_base = OTHER; note = 2'-O-methylcytidine-3'-phosphate
  modified_base 15: mod_base = OTHER; note = 2'-O-methyladenosine-3'-phosphate
  modified_base 16: mod_base = OTHER; note = 2'-O-methyladenosine-3'-phosphate
  modified_base 17: mod_base = OTHER; note = 2'-O-methylcytidine-3'-phosphate
  modified_base 18: mod_base = OTHER; note = 2'-O-methyladenosine-3'-phosphate
  modified_base 19: mod_base = OTHER; note = 2'-O-methyladenosine-3'-phosphorothioate
  modified_base 20: mod_base = OTHER; note = 2'-O-methylcytidine-3'-phosphorothioate
  modified_base 21: mod_base = OTHER; note = 2'-O-methyladenosine
tcacagatttttgcaacaaca

SEQ ID NO: 10531 - RNA, 21 nt, synthetic construct
  source 1..21: mol_type = other RNA
  modified_base 1: mod_base = OTHER; note = 2'-O-methylcytidine-3'-phosphorothioate
  modified_base 2: mod_base = OTHER; note = 2'-O-methyladenosine-3'-phosphorothioate
  modified_base 3: mod_base = OTHER; note = 2'-O-methylcytidine-3'-phosphate
  modified_base 4: mod_base = OTHER; note = 2'-O-methyladenosine-3'-phosphate
  modified_base 5: mod_base = OTHER; note = 2'-O-methylguanosine-3'-phosphate
  modified_base 6: mod_base = OTHER; note = 2'-O-docosanyl-adenosine-3'-phosphate
  modified_base 7: mod_base = OTHER; note = 2'-deoxy-2'-fluorouridine-3'-phosphate
  modified_base 8: mod_base = OTHER; note = 2'-O-methyluridine-3'-phosphate
  modified_base 9: mod_base = OTHER; note = 2'-deoxy-2'-fluorouridine-3'-phosphate
  modified_base 10: mod_base = OTHER; note = 2'-deoxy-2'-fluorouridine-3'-phosphate
  modified_base 11: mod_base = OTHER; note = 2'-deoxy-2'-fluorouridine-3'-phosphate
  modified_base 12: mod_base = OTHER; note = 2'-O-methylguanosine-3'-phosphate
  modified_base 13: mod_base = OTHER; note = 2'-O-methylcytidine-3'-phosphate
  modified_base 14: mod_base = OTHER; note = 2'-O-methyladenosine-3'-phosphate
  modified_base 15: mod_base = OTHER; note = 2'-O-methyladenosine-3'-phosphate
  modified_base 16: mod_base = OTHER; note = 2'-O-methylcytidine-3'-phosphate
  modified_base 17: mod_base = OTHER; note = 2'-O-methyladenosine-3'-phosphate
  modified_base 18: mod_base = OTHER; note = 2'-O-methyladenosine-3'-phosphate
  modified_base 19: mod_base = OTHER; note = 2'-O-methylcytidine-3'-phosphorothioate
  modified_base 20: mod_base = OTHER; note = 2'-O-methyladenosine-3'-phosphorothioate
  modified_base 21: mod_base = OTHER; note = 2'-O-methyladenosine
cacagatttttgcaacaacaa

SEQ ID NO: 10532 - RNA, 21 nt, synthetic construct
  source 1..21: mol_type = other RNA
  modified_base 1: mod_base = OTHER; note = 2'-O-methyladenosine-3'-phosphorothioate
  modified_base 2: mod_base = OTHER; note = 2'-O-methylcytidine-3'-phosphorothioate
  modified_base 3: mod_base = OTHER; note = 2'-O-methyladenosine-3'-phosphate
  modified_base 4: mod_base = OTHER; note = 2'-O-methylguanosine-3'-phosphate
  modified_base 5: mod_base = OTHER; note = 2'-O-methyladenosine-3'-phosphate
  modified_base 6: mod_base = OTHER; note = 2'-O-docosanyl-uridine-3'-phosphate
  modified_base 7: mod_base = OTHER; note = 2'-deoxy-2'-fluorouridine-3'-phosphate
  modified_base 8: mod_base = OTHER; note = 2'-O-methyluridine-3'-phosphate
  modified_base 9: mod_base = OTHER; note = 2'-deoxy-2'-fluorouridine-3'-phosphate
  modified_base 10: mod_base = OTHER; note = 2'-deoxy-2'-fluorouridine-3'-phosphate
  modified_base 11: mod_base = OTHER; note = 2'-deoxy-2'-fluoroguanosine-3'-phosphate
  modified_base 12: mod_base = OTHER; note = 2'-O-methylcytidine-3'-phosphate
  modified_base 13: mod_base = OTHER; note = 2'-O-methyladenosine-3'-phosphate
  modified_base 14: mod_base = OTHER; note = 2'-O-methyladenosine-3'-phosphate
  modified_base 15: mod_base = OTHER; note = 2'-O-methylcytidine-3'-phosphate
  modified_base 16: mod_base = OTHER; note = 2'-O-methyladenosine-3'-phosphate
  modified_base 17: mod_base = OTHER; note = 2'-O-methyladenosine-3'-phosphate
  modified_base 18: mod_base = OTHER; note = 2'-O-methylcytidine-3'-phosphate
  modified_base 19: mod_base = OTHER; note = 2'-O-methyladenosine-3'-phosphorothioate
  modified_base 20: mod_base = OTHER; note = 2'-O-methyluridine-3'-phosphorothioate
  modified_base 21: mod_base = OTHER; note = 2'-O-methyladenosine
acagatttttgcaacaacata

SEQ ID NO: 10533 - RNA, 21 nt, synthetic construct
  source 1..21: mol_type = other RNA
  modified_base 1: mod_base = OTHER; note = 2'-O-methyluridine-3'-phosphorothioate
  modified_base 2: mod_base = OTHER; note = 2'-O-methyluridine-3'-phosphorothioate
  modified_base 3: mod_base = OTHER; note = 2'-O-methyluridine-3'-phosphate
  modified_base 4: mod_base = OTHER; note = 2'-O-methylguanosine-3'-phosphate
  modified_base 5: mod_base = OTHER; note = 2'-O-methylcytidine-3'-phosphate
  modified_base 6: mod_base = OTHER; note = 2'-O-docosanyl-adenosine-3'-phosphate
  modified_base 7: mod_base = OTHER; note = 2'-deoxy-2'-fluoroadenosine-3'-phosphate
  modified_base 8: mod_base = OTHER; note = 2'-O-methylcytidine-3'-phosphate
  modified_base 9: mod_base = OTHER; note = 2'-deoxy-2'-fluoroadenosine-3'-phosphate
  modified_base 10: mod_base = OTHER; note = 2'-deoxy-2'-fluoroadenosine-3'-phosphate
  modified_base 11: mod_base = OTHER; note = 2'-deoxy-2'-fluorocytidine-3'-phosphate
  modified_base 12: mod_base = OTHER; note = 2'-O-methyladenosine-3'-phosphate
  modified_base 13: mod_base = OTHER; note = 2'-O-methyluridine-3'-phosphate
  modified_base 14: mod_base = OTHER; note = 2'-O-methyladenosine-3'-phosphate
  modified_base 15: mod_base = OTHER; note = 2'-O-methyladenosine-3'-phosphate
  modified_base 16: mod_base = OTHER; note = 2'-O-methylcytidine-3'-phosphate
  modified_base 17: mod_base = OTHER; note = 2'-O-methyladenosine-3'-phosphate
  modified_base 18: mod_base = OTHER; note = 2'-O-methylcytidine-3'-phosphate
  modified_base 19: mod_base = OTHER; note = 2'-O-methyluridine-3'-phosphorothioate
  modified_base 20: mod_base = OTHER; note = 2'-O-methylguanosine-3'-phosphorothioate
  modified_base 21: mod_base = OTHER; note = 2'-O-methyladenosine
tttgcaacaacataacactga

SEQ ID NO: 10534 - RNA, 21 nt, synthetic construct
  source 1..21: mol_type = other RNA
  modified_base 1: mod_base = OTHER; note = 2'-O-methyluridine-3'-phosphorothioate
  modified_base 2: mod_base = OTHER; note = 2'-O-methyluridine-3'-phosphorothioate
  modified_base 3: mod_base = OTHER; note = 2'-O-methylcytidine-3'-phosphate
  modified_base 4: mod_base = OTHER; note = 2'-O-methylcytidine-3'-phosphate
  modified_base 5: mod_base = OTHER; note = 2'-O-methyladenosine-3'-phosphate
  modified_base 6: mod_base = OTHER; note = 2'-O-docosanyl-adenosine-3'-phosphate
  modified_base 7: mod_base = OTHER; note = 2'-deoxy-2'-fluorocytidine-3'-phosphate
  modified_base 8: mod_base = OTHER; note = 2'-O-methyladenosine-3'-phosphate
  modified_base 9: mod_base = OTHER; note = 2'-deoxy-2'-fluoroguanosine-3'-phosphate
  modified_base 10: mod_base = OTHER; note = 2'-deoxy-2'-fluorocytidine-3'-phosphate
  modified_base 11: mod_base = OTHER; note = 2'-deoxy-2'-fluoroadenosine-3'-phosphate
  modified_base 12: mod_base = OTHER; note = 2'-O-methyluridine-3'-phosphate
  modified_base 13: mod_base = OTHER; note = 2'-O-methylcytidine-3'-phosphate
  modified_base 14: mod_base = OTHER; note = 2'-O-methyladenosine-3'-phosphate
  modified_base 15: mod_base = OTHER; note = 2'-O-methylcytidine-3'-phosphate
  modified_base 16: mod_base = OTHER; note = 2'-O-methylcytidine-3'-phosphate
  modified_base 17: mod_base = OTHER; note = 2'-O-methyladenosine-3'-phosphate
  modified_base 18: mod_base = OTHER; note = 2'-O-methyladenosine-3'-phosphate
  modified_base 19: mod_base = OTHER; note = 2'-O-methyladenosine-3'-phosphorothioate
  modified_base 20: mod_base = OTHER; note = 2'-O-methyluridine-3'-phosphorothioate
  modified_base 21: mod_base = OTHER; note = 2'-O-methyladenosine
ttccaacagcatcaccaaata

SEQ ID NO: 10535 - RNA, 21 nt, synthetic construct
  source 1..21: mol_type = other RNA
  modified_base 1: mod_base = OTHER; note = 2'-O-methylcytidine-3'-phosphorothioate
  modified_base 2: mod_base = OTHER; note = 2'-O-methyladenosine-3'-phosphorothioate
  modified_base 3: mod_base = OTHER; note = 2'-O-methylguanosine-3'-phosphate
  modified_base 4: mod_base = OTHER; note = 2'-O-methyladenosine-3'-phosphate
  modified_base 5: mod_base = OTHER; note = 2'-O-methyluridine-3'-phosphate
  modified_base 6: mod_base = OTHER; note = 2'-O-docosanyl-uridine-3'-phosphate
  modified_base 7: mod_base = OTHER; note = 2'-deoxy-2'-fluorouridine-3'-phosphate
  modified_base 8: mod_base = OTHER; note = 2'-O-methyluridine-3'-phosphate
  modified_base 9: mod_base = OTHER; note = 2'-deoxy-2'-fluorouridine-3'-phosphate
  modified_base 10: mod_base = OTHER; note = 2'-deoxy-2'-fluoroguanosine-3'-phosphate
  modified_base 11: mod_base = OTHER; note = 2'-deoxy-2'-fluorocytidine-3'-phosphate
  modified_base 12: mod_base = OTHER; note = 2'-O-methyladenosine-3'-phosphate
  modified_base 13: mod_base = OTHER; note = 2'-O-methyladenosine-3'-phosphate
  modified_base 14: mod_base = OTHER; note = 2'-O-methylcytidine-3'-phosphate
  modified_base 15: mod_base = OTHER; note = 2'-O-methyladenosine-3'-phosphate
  modified_base 16: mod_base = OTHER; note = 2'-O-methyladenosine-3'-phosphate
  modified_base 17: mod_base = OTHER; note = 2'-O-methylcytidine-3'-phosphate
  modified_base 18: mod_base = OTHER; note = 2'-O-methyladenosine-3'-phosphate
  modified_base 19: mod_base = OTHER; note = 2'-O-methyluridine-3'-phosphorothioate
  modified_base 20: mod_base = OTHER; note = 2'-O-methyladenosine-3'-phosphorothioate
  modified_base 21: mod_base = OTHER; note = 2'-O-methyladenosine
cagatttttgcaacaacataa

SEQ ID NO: 10536 - RNA, 21 nt, synthetic construct
  source 1..21: mol_type = other RNA
  modified_base 1: mod_base = OTHER; note = 2'-O-methyladenosine-3'-phosphorothioate
  modified_base 2: mod_base = OTHER; note = 2'-O-methylguanosine-3'-phosphorothioate
  modified_base 3: mod_base = OTHER; note = 2'-O-methyladenosine-3'-phosphate
  modified_base 4: mod_base = OTHER; note = 2'-O-methyluridine-3'-phosphate
  modified_base 5: mod_base = OTHER; note = 2'-O-methyluridine-3'-phosphate
  modified_base 6: mod_base = OTHER; note = 2'-O-docosanyl-uridine-3'-phosphate
  modified_base 7: mod_base = OTHER; note = 2'-deoxy-2'-fluorouridine-3'-phosphate
  modified_base 8: mod_base = OTHER; note = 2'-O-methyluridine-3'-phosphate
  modified_base 9: mod_base = OTHER; note = 2'-deoxy-2'-fluoroguanosine-3'-phosphate
  modified_base 10: mod_base = OTHER; note = 2'-deoxy-2'-fluorocytidine-3'-phosphate
  modified_base 11: mod_base = OTHER; note = 2'-deoxy-2'-fluoroadenosine-3'-phosphate
  modified_base 12: mod_base = OTHER; note = 2'-O-methyladenosine-3'-phosphate
  modified_base 13: mod_base = OTHER; note = 2'-O-methylcytidine-3'-phosphate
  modified_base 14: mod_base = OTHER; note = 2'-O-methyladenosine-3'-phosphate
  modified_base 15: mod_base = OTHER; note = 2'-O-methyladenosine-3'-phosphate
  modified_base 16: mod_base = OTHER; note = 2'-O-methylcytidine-3'-phosphate
  modified_base 17: mod_base = OTHER; note = 2'-O-methyladenosine-3'-phosphate
  modified_base 18: mod_base = OTHER; note = 2'-O-methyluridine-3'-phosphate
  modified_base 19: mod_base = OTHER; note = 2'-O-methyladenosine-3'-phosphorothioate
  modified_base 20: mod_base = OTHER; note = 2'-O-methyladenosine-3'-phosphorothioate
  modified_base 21: mod_base = OTHER; note = 2'-O-methyladenosine
agatttttgcaacaacataaa

SEQ ID NO: 10537 - RNA, 21 nt, synthetic construct
  source 1..21: mol_type = other RNA
  modified_base 1: mod_base = OTHER; note = 2'-O-methylguanosine-3'-phosphorothioate
  modified_base 2: mod_base = OTHER; note = 2'-O-methyladenosine-3'-phosphorothioate
  modified_base 3: mod_base = OTHER; note = 2'-O-methyluridine-3'-phosphate
  modified_base 4: mod_base = OTHER; note = 2'-O-methyluridine-3'-phosphate
  modified_base 5: mod_base = OTHER; note = 2'-O-methyluridine-3'-phosphate
  modified_base 6: mod_base = OTHER; note = 2'-O-docosanyl-uridine-3'-phosphate
  modified_base 7: mod_base = OTHER; note = 2'-deoxy-2'-fluorouridine-3'-phosphate
  modified_base 8: mod_base = OTHER; note = 2'-O-methylguanosine-3'-phosphate
  modified_base 9: mod_base = OTHER; note = 2'-deoxy-2'-fluorocytidine-3'-phosphate
  modified_base 10: mod_base = OTHER; note = 2'-deoxy-2'-fluoroadenosine-3'-phosphate
  modified_base 11: mod_base = OTHER; note = 2'-deoxy-2'-fluoroadenosine-3'-phosphate
  modified_base 12: mod_base = OTHER; note = 2'-O-methylcytidine-3'-phosphate
  modified_base 13: mod_base = OTHER; note = 2'-O-methyladenosine-3'-phosphate
  modified_base 14: mod_base = OTHER; note = 2'-O-methyladenosine-3'-phosphate
  modified_base 15: mod_base = OTHER; note = 2'-O-methylcytidine-3'-phosphate
  modified_base 16: mod_base = OTHER; note = 2'-O-methyladenosine-3'-phosphate
  modified_base 17: mod_base = OTHER; note = 2'-O-methyluridine-3'-phosphate
  modified_base 18: mod_base = OTHER; note = 2'-O-methyladenosine-3'-phosphate
  modified_base 19: mod_base = OTHER; note = 2'-O-methyladenosine-3'-phosphorothioate
  modified_base 20: mod_base = OTHER; note = 2'-O-methylcytidine-3'-phosphorothioate
  modified_base 21: mod_base = OTHER; note = 2'-O-methyladenosine
gatttttgcaacaacataaca

SEQ ID NO: 10538 - RNA, 21 nt, synthetic construct
  source 1..21: mol_type = other RNA
  modified_base 1: mod_base = OTHER; note = 2'-O-methyladenosine-3'-phosphorothioate
  modified_base 2: mod_base = OTHER; note = 2'-O-methyluridine-3'-phosphorothioate
  modified_base 3: mod_base = OTHER; note = 2'-O-methyluridine-3'-phosphate
  modified_base 4: mod_base = OTHER; note = 2'-O-methyluridine-3'-phosphate
  modified_base 5: mod_base = OTHER; note = 2'-O-methyluridine-3'-phosphate
  modified_base 6: mod_base = OTHER; note = 2'-O-docosanyl-uridine-3'-phosphate
  modified_base 7: mod_base = OTHER; note = 2'-deoxy-2'-fluoroguanosine-3'-phosphate
  modified_base 8: mod_base = OTHER; note = 2'-O-methylcytidine-3'-phosphate
  modified_base 9: mod_base = OTHER; note = 2'-deoxy-2'-fluoroadenosine-3'-phosphate
  modified_base 10: mod_base = OTHER; note = 2'-deoxy-2'-fluoroadenosine-3'-phosphate
  modified_base 11: mod_base = OTHER; note = 2'-deoxy-2'-fluorocytidine-3'-phosphate
  modified_base 12: mod_base = OTHER; note = 2'-O-methyladenosine-3'-phosphate
  modified_base 13: mod_base = OTHER; note = 2'-O-methyladenosine-3'-phosphate
  modified_base 14: mod_base = OTHER; note = 2'-O-methylcytidine-3'-phosphate
  modified_base 15: mod_base = OTHER; note = 2'-O-methyladenosine-3'-phosphate
  modified_base 16: mod_base = OTHER; note = 2'-O-methyluridine-3'-phosphate
  modified_base 17: mod_base = OTHER; note = 2'-O-methyladenosine-3'-phosphate
  modified_base 18: mod_base = OTHER; note = 2'-O-methyladenosine-3'-phosphate
  modified_base 19: mod_base = OTHER; note = 2'-O-methylcytidine-3'-phosphorothioate
  modified_base 20: mod_base = OTHER; note = 2'-O-methyladenosine-3'-phosphorothioate
  modified_base 21: mod_base = OTHER; note = 2'-O-methyladenosine
atttttgcaacaacataacaa

SEQ ID NO: 10539 - RNA, 21 nt, synthetic construct
  source 1..21: mol_type = other RNA
  modified_base 1: mod_base = OTHER; note = 2'-O-methyluridine-3'-phosphorothioate
  modified_base 2: mod_base = OTHER; note = 2'-O-methyluridine-3'-phosphorothioate
  modified_base 3: mod_base = OTHER; note = 2'-O-methyluridine-3'-phosphate
  modified_base 4: mod_base = OTHER; note = 2'-O-methyluridine-3'-phosphate
  modified_base 5: mod_base = OTHER; note = 2'-O-methyluridine-3'-phosphate
  modified_base 6: mod_base = OTHER; note = 2'-O-docosanyl-guanosine-3'-phosphate
  modified_base 7: mod_base = OTHER; note = 2'-deoxy-2'-fluorocytidine-3'-phosphate
  modified_base 8: mod_base = OTHER; note = 2'-O-methyladenosine-3'-phosphate
  modified_base 9: mod_base = OTHER; note = 2'-deoxy-2'-fluoroadenosine-3'-phosphate
  modified_base 10: mod_base = OTHER; note = 2'-deoxy-2'-fluorocytidine-3'-phosphate
  modified_base 11: mod_base = OTHER; note = 2'-deoxy-2'-fluoroadenosine-3'-phosphate
  modified_base 12: mod_base = OTHER; note = 2'-O-methyladenosine-3'-phosphate
  modified_base 13: mod_base = OTHER; note = 2'-O-methylcytidine-3'-phosphate
  modified_base 14: mod_base = OTHER; note = 2'-O-methyladenosine-3'-phosphate
  modified_base 15: mod_base = OTHER; note = 2'-O-methyluridine-3'-phosphate
  modified_base 16: mod_base = OTHER; note = 2'-O-methyladenosine-3'-phosphate
  modified_base 17: mod_base = OTHER; note = 2'-O-methyladenosine-3'-phosphate
  modified_base 18: mod_base = OTHER; note = 2'-O-methylcytidine-3'-phosphate
  modified_base 19: mod_base = OTHER; note = 2'-O-methyladenosine-3'-phosphorothioate
  modified_base 20: mod_base = OTHER; note = 2'-O-methylcytidine-3'-phosphorothioate
  modified_base 21: mod_base = OTHER; note = 2'-O-methyladenosine
tttttgcaacaacataacaca

SEQ ID NO: 10540 - RNA, 21 nt, synthetic construct
  source 1..21: mol_type = other RNA
  modified_base 1: mod_base = OTHER; note = 2'-O-methyluridine-3'-phosphorothioate
  modified_base 2: mod_base = OTHER; note = 2'-O-methyluridine-3'-phosphorothioate
  modified_base 3: mod_base = OTHER; note = 2'-O-methyluridine-3'-phosphate
  modified_base 4: mod_base = OTHER; note = 2'-O-methyluridine-3'-phosphate
  modified_base 5: mod_base = OTHER; note = 2'-O-methylguanosine-3'-phosphate
  modified_base 6: mod_base = OTHER; note = 2'-O-docosanyl-cytidine-3'-phosphate
  modified_base 7: mod_base = OTHER; note = 2'-deoxy-2'-fluoroadenosine-3'-phosphate
  modified_base 8: mod_base = OTHER; note = 2'-O-methyladenosine-3'-phosphate
  modified_base 9: mod_base = OTHER; note = 2'-deoxy-2'-fluorocytidine-3'-phosphate
  modified_base 10: mod_base = OTHER; note = 2'-deoxy-2'-fluoroadenosine-3'-phosphate
  modified_base 11: mod_base = OTHER; note = 2'-deoxy-2'-fluoroadenosine-3'-phosphate
  modified_base 12: mod_base = OTHER; note = 2'-O-methylcytidine-3'-phosphate
  modified_base 13: mod_base = OTHER; note = 2'-O-methyladenosine-3'-phosphate
  modified_base 14: mod_base = OTHER; note = 2'-O-methyluridine-3'-phosphate
  modified_base 15: mod_base = OTHER; note = 2'-O-methyladenosine-3'-phosphate
  modified_base 16: mod_base = OTHER; note = 2'-O-methyladenosine-3'-phosphate
  modified_base 17: mod_base = OTHER; note = 2'-O-methylcytidine-3'-phosphate
  modified_base 18: mod_base = OTHER; note = 2'-O-methyladenosine-3'-phosphate
  modified_base 19: mod_base = OTHER; note = 2'-O-methylcytidine-3'-phosphorothioate
  modified_base 20: mod_base = OTHER; note = 2'-O-methyluridine-3'-phosphorothioate
  modified_base 21: mod_base = OTHER; note = 2'-O-methyladenosine
ttttgcaacaacataacacta

SEQ ID NO: 10541 - RNA, 21 nt, synthetic construct
  source 1..21: mol_type = other RNA
  modified_base 1: mod_base = OTHER; note = 2'-O-methyluridine-3'-phosphorothioate
  modified_base 2: mod_base = OTHER; note = 2'-O-methyluridine-3'-phosphorothioate
  modified_base 3: mod_base = OTHER; note = 2'-O-methylguanosine-3'-phosphate
  modified_base 4: mod_base = OTHER; note = 2'-O-methylcytidine-3'-phosphate
  modified_base 5: mod_base = OTHER; note = 2'-O-methyladenosine-3'-phosphate
  modified_base 6: mod_base = OTHER; note = 2'-O-docosanyl-adenosine-3'-phosphate
  modified_base 7: mod_base = OTHER; note = 2'-deoxy-2'-fluorocytidine-3'-phosphate
  modified_base 8: mod_base = OTHER; note = 2'-O-methyladenosine-3'-phosphate
  modified_base 9: mod_base = OTHER; note = 2'-deoxy-2'-fluoroadenosine-3'-phosphate
  modified_base 10: mod_base = OTHER; note = 2'-deoxy-2'-fluorocytidine-3'-phosphate
  modified_base 11: mod_base = OTHER; note = 2'-deoxy-2'-fluoroadenosine-3'-phosphate
  modified_base 12: mod_base = OTHER; note = 2'-O-methyluridine-3'-phosphate
  modified_base 13: mod_base = OTHER; note = 2'-O-methyladenosine-3'-phosphate
  modified_base 14: mod_base = OTHER; note = 2'-O-methyladenosine-3'-phosphate
  modified_base 15: mod_base = OTHER; note = 2'-O-methylcytidine-3'-phosphate
  modified_base 16: mod_base = OTHER; note = 2'-O-methyladenosine-3'-phosphate
  modified_base 17: mod_base = OTHER; note = 2'-O-methylcytidine-3'-phosphate
  modified_base 18: mod_base = OTHER; note = 2'-O-methyluridine-3'-phosphate
  modified_base 19: mod_base = OTHER; note = 2'-O-methylguanosine-3'-phosphorothioate
  modified_base 20: mod_base = OTHER; note = 2'-O-methylcytidine-3'-phosphorothioate
  modified_base 21: mod_base = OTHER; note = 2'-O-methyladenosine
ttgcaacaacataacactgca

SEQ ID NO: 10542 - RNA, 21 nt, synthetic construct
  source 1..21: mol_type = other RNA
  modified_base 1: mod_base = OTHER; note = 2'-O-methyluridine-3'-phosphorothioate
  modified_base 2: mod_base = OTHER; note = 2'-O-methylguanosine-3'-phosphorothioate
  modified_base 3: mod_base = OTHER; note = 2'-O-methylcytidine-3'-phosphate
  modified_base 4: mod_base = OTHER; note = 2'-O-methyladenosine-3'-phosphate
  modified_base 5: mod_base = OTHER; note = 2'-O-methyladenosine-3'-phosphate
  modified_base 6: mod_base = OTHER; note = 2'-O-docosanyl-cytidine-3'-phosphate
  modified_base 7: mod_base = OTHER; note = 2'-deoxy-2'-fluoroadenosine-3'-phosphate
  modified_base 8: mod_base = OTHER; note = 2'-O-methyladenosine-3'-phosphate
  modified_base 9: mod_base = OTHER; note = 2'-deoxy-2'-fluorocytidine-3'-phosphate
  modified_base 10: mod_base = OTHER; note = 2'-deoxy-2'-fluoroadenosine-3'-phosphate
  modified_base 11: mod_base = OTHER; note = 2'-deoxy-2'-fluorouridine-3'-phosphate
  modified_base 12: mod_base = OTHER; note = 2'-O-methyladenosine-3'-phosphate
  modified_base 13: mod_base = OTHER; note = 2'-O-methyladenosine-3'-phosphate
  modified_base 14: mod_base = OTHER; note = 2'-O-methylcytidine-3'-phosphate
  modified_base 15: mod_base = OTHER; note = 2'-O-methyladenosine-3'-phosphate
  modified_base 16: mod_base = OTHER; note = 2'-O-methylcytidine-3'-phosphate
  modified_base 17: mod_base = OTHER; note = 2'-O-methyluridine-3'-phosphate
  modified_base 18: mod_base = OTHER; note = 2'-O-methylguanosine-3'-phosphate
  modified_base 19: mod_base = OTHER; note = 2'-O-methylcytidine-3'-phosphorothioate
  modified_base 20: mod_base = OTHER; note = 2'-O-methyladenosine-3'-phosphorothioate
  modified_base 21: mod_base = OTHER; note = 2'-O-methyladenosine
tgcaacaacataacactgcaa

SEQ ID NO: 10543 - RNA, 21 nt, synthetic construct
  source 1..21: mol_type = other RNA
  modified_base 1: mod_base = OTHER; note = 2'-O-methylguanosine-3'-phosphorothioate
  modified_base 2: mod_base = OTHER; note = 2'-O-methylcytidine-3'-phosphorothioate
  modified_base 3: mod_base = OTHER; note = 2'-O-methyladenosine-3'-phosphate
  modified_base 4: mod_base = OTHER; note = 2'-O-methyladenosine-3'-phosphate
  modified_base 5: mod_base = OTHER; note = 2'-O-methylcytidine-3'-phosphate
  modified_base 6: mod_base = OTHER; note = 2'-O-docosanyl-adenosine-3'-phosphate
  modified_base 7: mod_base = OTHER; note = 2'-deoxy-2'-fluoroadenosine-3'-phosphate
  modified_base 8: mod_base = OTHER; note = 2'-O-methylcytidine-3'-phosphate
  modified_base 9: mod_base = OTHER; note = 2'-deoxy-2'-fluoroadenosine-3'-phosphate
  modified_base 10: mod_base = OTHER; note = 2'-deoxy-2'-fluorouridine-3'-phosphate
  modified_base 11: mod_base = OTHER; note = 2'-deoxy-2'-fluoroadenosine-3'-phosphate
  modified_base 12: mod_base = OTHER; note = 2'-O-methyladenosine-3'-phosphate
  modified_base 13: mod_base = OTHER; note = 2'-O-methylcytidine-3'-phosphate
  modified_base 14: mod_base = OTHER; note = 2'-O-methyladenosine-3'-phosphate
  modified_base 15: mod_base = OTHER; note = 2'-O-methylcytidine-3'-phosphate
  modified_base 16: mod_base = OTHER; note = 2'-O-methyluridine-3'-phosphate
  modified_base 17: mod_base = OTHER; note = 2'-O-methylguanosine-3'-phosphate
  modified_base 18: mod_base = OTHER; note = 2'-O-methylcytidine-3'-phosphate
  modified_base 19: mod_base = OTHER; note = 2'-O-methyladenosine-3'-phosphorothioate
  modified_base 20: mod_base = OTHER; note = 2'-O-methylcytidine-3'-phosphorothioate
  modified_base 21: mod_base = OTHER; note = 2'-O-methyladenosine
gcaacaacataacactgcaca

SEQ ID NO: 10544 - RNA, 21 nt, synthetic construct
  source 1..21: mol_type = other RNA
  modified_base 1: mod_base = OTHER; note = 2'-O-methylcytidine-3'-phosphorothioate
  modified_base 2: mod_base = OTHER; note = 2'-O-methyladenosine-3'-phosphorothioate
  modified_base 3: mod_base = OTHER; note = 2'-O-methyladenosine-3'-phosphate
  modified_base 4: mod_base = OTHER; note = 2'-O-methylcytidine-3'-phosphate
  modified_base 5: mod_base = OTHER; note = 2'-O-methyladenosine-3'-phosphate
  modified_base 6: mod_base = OTHER; note = 2'-O-docosanyl-adenosine-3'-phosphate
  modified_base 7: mod_base = OTHER; note = 2'-deoxy-2'-fluorocytidine-3'-phosphate
  modified_base 8: mod_base = OTHER; note = 2'-O-methyladenosine-3'-phosphate
  modified_base 9: mod_base = OTHER; note = 2'-deoxy-2'-fluorouridine-3'-phosphate
  modified_base 10: mod_base = OTHER; note = 2'-deoxy-2'-fluoroadenosine-3'-phosphate
  modified_base 11: mod_base = OTHER; note = 2'-deoxy-2'-fluoroadenosine-3'-phosphate
  modified_base 12: mod_base = OTHER; note = 2'-O-methylcytidine-3'-phosphate
  modified_base 13: mod_base = OTHER; note = 2'-O-methyladenosine-3'-phosphate
  modified_base 14: mod_base = OTHER; note = 2'-O-methylcytidine-3'-phosphate
  modified_base 15: mod_base = OTHER; note = 2'-O-methyluridine-3'-phosphate
  modified_base 16: mod_base = OTHER; note = 2'-O-methylguanosine-3'-phosphate
  modified_base 17: mod_base = OTHER; note = 2'-O-methylcytidine-3'-phosphate
  modified_base 18: mod_base = OTHER; note = 2'-O-methyladenosine-3'-phosphate
  modified_base 19: mod_base = OTHER; note = 2'-O-methylcytidine-3'-phosphorothioate
  modified_base 20: mod_base = OTHER; note = 2'-O-methylcytidine-3'-phosphorothioate
  modified_base 21: mod_base = OTHER; note = 2'-O-methyladenosine
caacaacataacactgcacca

SEQ ID NO: 10545 - RNA, 21 nt, synthetic construct
  source 1..21: mol_type = other RNA
  modified_base 1: mod_base = OTHER; note = 2'-O-methyladenosine-3'-phosphorothioate
  modified_base 2: mod_base = OTHER; note = 2'-O-methyladenosine-3'-phosphorothioate
  modified_base 3: mod_base = OTHER; note = 2'-O-methylcytidine-3'-phosphate
  modified_base 4: mod_base = OTHER; note = 2'-O-methyladenosine-3'-phosphate
  modified_base 5: mod_base = OTHER; note = 2'-O-methyladenosine-3'-phosphate
  modified_base 6: mod_base = OTHER; note = 2'-O-docosanyl-cytidine-3'-phosphate
  modified_base 7: mod_base = OTHER; note = 2'-deoxy-2'-fluoroadenosine-3'-phosphate
  modified_base 8: mod_base = OTHER; note = 2'-O-methyluridine-3'-phosphate
  modified_base 9: mod_base = OTHER; note = 2'-deoxy-2'-fluoroadenosine-3'-phosphate
  modified_base 10: mod_base = OTHER; note = 2'-deoxy-2'-fluoroadenosine-3'-phosphate
  modified_base 11: mod_base = OTHER; note = 2'-deoxy-2'-fluorocytidine-3'-phosphate
  modified_base 12: mod_base = OTHER; note = 2'-O-methyladenosine-3'-phosphate
  modified_base 13: mod_base = OTHER; note = 2'-O-methylcytidine-3'-phosphate
  modified_base 14: mod_base = OTHER; note = 2'-O-methyluridine-3'-phosphate
  modified_base 15: mod_base = OTHER; note = 2'-O-methylguanosine-3'-phosphate
  modified_base 16: mod_base = OTHER; note = 2'-O-methylcytidine-3'-phosphate
  modified_base 17: mod_base = OTHER; note = 2'-O-methyladenosine-3'-phosphate
  modified_base 18: mod_base = OTHER; note = 2'-O-methylcytidine-3'-phosphate
  modified_base 19: mod_base = OTHER; note = 2'-O-methylcytidine-3'-phosphorothioate
  modified_base 20: mod_base = OTHER; note = 2'-O-methyluridine-3'-phosphorothioate
  modified_base 21: mod_base = OTHER; note = 2'-O-methyladenosine
aacaacataacactgcaccta

SEQ ID NO: 10546 - RNA, 21 nt, synthetic construct
  source 1..21: mol_type = other RNA
  modified_base 1: mod_base = OTHER; note = 2'-O-methyladenosine-3'-phosphorothioate
  modified_base 2: mod_base = OTHER; note = 2'-O-methylcytidine-3'-phosphorothioate
  modified_base 3: mod_base = OTHER; note = 2'-O-methyladenosine-3'-phosphate
  modified_base 4: mod_base = OTHER; note = 2'-O-methyladenosine-3'-phosphate
  modified_base 5: mod_base = OTHER; note = 2'-O-methylcytidine-3'-phosphate
  modified_base 6: mod_base = OTHER; note = 2'-O-docosanyl-adenosine-3'-phosphate
  modified_base 7: mod_base = OTHER; note = 2'-deoxy-2'-fluorouridine-3'-phosphate
  modified_base 8: mod_base = OTHER; note = 2'-O-methyladenosine-3'-phosphate
  modified_base 9: mod_base = OTHER; note = 2'-deoxy-2'-fluoroadenosine-3'-phosphate
  modified_base 10: mod_base = OTHER; note = 2'-deoxy-2'-fluorocytidine-3'-phosphate
  modified_base 11: mod_base = OTHER; note = 2'-deoxy-2'-fluoroadenosine-3'-phosphate
  modified_base 12: mod_base = OTHER; note = 2'-O-methylcytidine-3'-phosphate
  modified_base 13: mod_base = OTHER; note = 2'-O-methyluridine-3'-phosphate
  modified_base 14: mod_base = OTHER; note = 2'-O-methylguanosine-3'-phosphate
  modified_base 15: mod_base = OTHER; note = 2'-O-methylcytidine-3'-phosphate
  modified_base 16: mod_base = OTHER; note = 2'-O-methyladenosine-3'-phosphate
  modified_base 17: mod_base = OTHER; note = 2'-O-methylcytidine-3'-phosphate
  modified_base 18: mod_base = OTHER; note = 2'-O-methylcytidine-3'-phosphate
  modified_base 19: mod_base = OTHER; note = 2'-O-methyluridine-3'-phosphorothioate
  modified_base 20: mod_base = OTHER; note = 2'-O-methyluridine-3'-phosphorothioate
  modified_base 21: mod_base = OTHER; note = 2'-O-methyladenosine
acaacataacactgcacctta

SEQ ID NO: 10547 - RNA, 21 nt, synthetic construct
  source 1..21: mol_type = other RNA
  modified_base 1: mod_base = OTHER; note = 2'-O-methylcytidine-3'-phosphorothioate
  modified_base 2: mod_base = OTHER; note = 2'-O-methyladenosine-3'-phosphorothioate
  modified_base 3: mod_base = OTHER; note = 2'-O-methyladenosine-3'-phosphate
  modified_base 4: mod_base = OTHER; note = 2'-O-methylcytidine-3'-phosphate
  modified_base 5: mod_base = OTHER; note = 2'-O-methyladenosine-3'-phosphate
  modified_base 6: mod_base = OTHER; note = 2'-O-docosanyl-uridine-3'-phosphate
  modified_base 7: mod_base = OTHER; note = 2'-deoxy-2'-fluoroadenosine-3'-phosphate
  modified_base 8: mod_base = OTHER; note = 2'-O-methyladenosine-3'-phosphate
  modified_base 9: mod_base = OTHER; note = 2'-deoxy-2'-fluorocytidine-3'-phosphate
  modified_base 10: mod_base = OTHER; note = 2'-deoxy-2'-fluoroadenosine-3'-phosphate
  modified_base 11: mod_base = OTHER; note = 2'-deoxy-2'-fluorocytidine-3'-phosphate
  modified_base 12: mod_base = OTHER; note = 2'-O-methyluridine-3'-phosphate
  modified_base 13: mod_base = OTHER; note = 2'-O-methylguanosine-3'-phosphate
  modified_base 14: mod_base = OTHER; note = 2'-O-methylcytidine-3'-phosphate
  modified_base 15: mod_base = OTHER; note = 2'-O-methyladenosine-3'-phosphate
  modified_base 16: mod_base = OTHER; note = 2'-O-methylcytidine-3'-phosphate
  modified_base 17: mod_base = OTHER; note = 2'-O-methylcytidine-3'-phosphate
  modified_base 18: mod_base = OTHER; note = 2'-O-methyluridine-3'-phosphate
  modified_base 19: mod_base = OTHER; note = 2'-O-methyluridine-3'-phosphorothioate
  modified_base 20: mod_base = OTHER; note = 2'-O-methylcytidine-3'-phosphorothioate
  modified_base 21: mod_base = OTHER; note = 2'-O-methyladenosine
caacataacactgcaccttca

SEQ ID NO: 10548 - RNA, 21 nt, synthetic construct
  source 1..21: mol_type = other RNA
  modified_base 1: mod_base = OTHER; note = 2'-O-methyladenosine-3'-phosphorothioate
  modified_base 2: mod_base = OTHER; note = 2'-O-methyladenosine-3'-phosphorothioate
  modified_base 3: mod_base = OTHER; note = 2'-O-methylcytidine-3'-phosphate
  modified_base 4: mod_base = OTHER; note = 2'-O-methyladenosine-3'-phosphate
  modified_base 5: mod_base = OTHER; note = 2'-O-methyluridine-3'-phosphate
  modified_base 6: mod_base = OTHER; note = 2'-O-docosanyl-adenosine-3'-phosphate
  modified_base 7: mod_base = OTHER; note = 2'-deoxy-2'-fluoroadenosine-3'-phosphate
  modified_base 8: mod_base = OTHER; note = 2'-O-methylcytidine-3'-phosphate
  modified_base 9: mod_base = OTHER; note = 2'-deoxy-2'-fluoroadenosine-3'-phosphate
  modified_base 10: mod_base = OTHER; note = 2'-deoxy-2'-fluorocytidine-3'-phosphate
  modified_base 11: mod_base = OTHER; note = 2'-deoxy-2'-fluorouridine-3'-phosphate
  modified_base 12: mod_base = OTHER; note = 2'-O-methylguanosine-3'-phosphate
  modified_base 13: mod_base = OTHER; note = 2'-O-methylcytidine-3'-phosphate
  modified_base 14: mod_base = OTHER; note = 2'-O-methyladenosine-3'-phosphate
  modified_base 15: mod_base = OTHER; note = 2'-O-methylcytidine-3'-phosphate
  modified_base 16: mod_base = OTHER; note = 2'-O-methylcytidine-3'-phosphate
  modified_base 17: mod_base = OTHER; note = 2'-O-methyluridine-3'-phosphate
  modified_base 18: mod_base = OTHER; note = 2'-O-methyluridine-3'-phosphate
  modified_base 19: mod_base = OTHER; note = 2'-O-methylcytidine-3'-phosphorothioate
  modified_base 20: mod_base = OTHER; note = 2'-O-methylcytidine-3'-phosphorothioate
  modified_base 21: mod_base = OTHER; note = 2'-O-methyladenosine
aacataacactgcaccttcca

SEQ ID NO: 10549 - RNA, 21 nt, synthetic construct
  source 1..21: mol_type = other RNA
  modified_base 1: mod_base = OTHER; note = 2'-O-methyladenosine-3'-phosphorothioate
  modified_base 2: mod_base = OTHER; note = 2'-O-methylcytidine-3'-phosphorothioate
  modified_base 3: mod_base = OTHER; note = 2'-O-methyladenosine-3'-phosphate
  modified_base 4: mod_base = OTHER; note = 2'-O-methyluridine-3'-phosphate
  modified_base 5: mod_base = OTHER; note = 2'-O-methyladenosine-3'-phosphate
  modified_base 6: mod_base = OTHER; note = 2'-O-docosanyl-adenosine-3'-phosphate
  modified_base 7: mod_base = OTHER; note = 2'-deoxy-2'-fluorocytidine-3'-phosphate
  modified_base 8: mod_base = OTHER; note = 2'-O-methyladenosine-3'-phosphate
  modified_base 9: mod_base = OTHER; note = 2'-deoxy-2'-fluorocytidine-3'-phosphate
  modified_base 10: mod_base = OTHER; note = 2'-deoxy-2'-fluorouridine-3'-phosphate
  modified_base 11: mod_base = OTHER; note = 2'-deoxy-2'-fluoroguanosine-3'-phosphate
  modified_base 12: mod_base = OTHER; note = 2'-O-methylcytidine-3'-phosphate
  modified_base 13: mod_base = OTHER; note = 2'-O-methyladenosine-3'-phosphate
  modified_base 14: mod_base = OTHER; note = 2'-O-methylcytidine-3'-phosphate
  modified_base 15: mod_base = OTHER; note = 2'-O-methylcytidine-3'-phosphate
  modified_base 16: mod_base = OTHER; note = 2'-O-methyluridine-3'-phosphate
  modified_base 17: mod_base = OTHER; note = 2'-O-methyluridine-3'-phosphate
  modified_base 18: mod_base = OTHER; note = 2'-O-methylcytidine-3'-phosphate
  modified_base 19: mod_base = OTHER; note = 2'-O-methylcytidine-3'-phosphorothioate
  modified_base 20: mod_base = OTHER; note = 2'-O-methyladenosine-3'-phosphorothioate
  modified_base 21: mod_base = OTHER; note = 2'-O-methyladenosine
acataacactgcaccttccaa

SEQ ID NO: 10550 - RNA, 21 nt, synthetic construct
  source 1..21: mol_type = other RNA
  modified_base 1: mod_base = OTHER; note = 2'-O-methylcytidine-3'-phosphorothioate
  modified_base 2: mod_base = OTHER; note = 2'-O-methyladenosine-3'-phosphorothioate
  modified_base 3: mod_base = OTHER; note = 2'-O-methyluridine-3'-phosphate
  modified_base 4: mod_base = OTHER; note = 2'-O-methyladenosine-3'-phosphate
  modified_base 5: mod_base = OTHER; note = 2'-O-methyladenosine-3'-phosphate
  modified_base 6: mod_base = OTHER; note = 2'-O-docosanyl-cytidine-3'-phosphate
  modified_base 7: mod_base = OTHER; note = 2'-deoxy-2'-fluoroadenosine-3'-phosphate
  modified_base 8: mod_base = OTHER; note = 2'-O-methylcytidine-3'-phosphate
  modified_base 9: mod_base = OTHER; note = 2'-deoxy-2'-fluorouridine-3'-phosphate
  modified_base 10: mod_base = OTHER; note = 2'-deoxy-2'-fluoroguanosine-3'-phosphate
  modified_base 11: mod_base = OTHER; note = 2'-deoxy-2'-fluorocytidine-3'-phosphate
  modified_base 12: mod_base = OTHER; note = 2'-O-methyladenosine-3'-phosphate
  modified_base 13: mod_base = OTHER; note = 2'-O-methylcytidine-3'-phosphate
  modified_base 14: mod_base = OTHER; note = 2'-O-methylcytidine-3'-phosphate
  modified_base 15: mod_base = OTHER; note = 2'-O-methyluridine-3'-phosphate
  modified_base 16: mod_base = OTHER; note = 2'-O-methyluridine-3'-phosphate
  modified_base 17: mod_base = OTHER; note = 2'-O-methylcytidine-3'-phosphate
  modified_base 18: mod_base = OTHER; note = 2'-O-methylcytidine-3'-phosphate
  modified_base 19: mod_base = OTHER; note = 2'-O-methyladenosine-3'-phosphorothioate
  modified_base 20: mod_base = OTHER; note = 2'-O-methyladenosine-3'-phosphorothioate
  modified_base 21: mod_base = OTHER; note = 2'-O-methyladenosine
cataacactgcaccttccaaa

SEQ ID NO: 10551 - RNA, 21 nt, synthetic construct
  source 1..21: mol_type = other RNA
  modified_base 1: mod_base = OTHER; note = 2'-O-methyladenosine-3'-phosphorothioate
  modified_base 2: mod_base = OTHER; note = 2'-O-methyluridine-3'-phosphorothioate
  modified_base 3: mod_base = OTHER; note = 2'-O-methyladenosine-3'-phosphate
  modified_base 4: mod_base = OTHER; note = 2'-O-methyladenosine-3'-phosphate
  modified_base 5: mod_base = OTHER; note = 2'-O-methylcytidine-3'-phosphate
  modified_base 6: mod_base = OTHER; note = 2'-O-docosanyl-adenosine-3'-phosphate
  modified_base 7: mod_base = OTHER; note = 2'-deoxy-2'-fluorocytidine-3'-phosphate
  modified_base 8: mod_base = OTHER; note = 2'-O-methyluridine-3'-phosphate
  modified_base 9: mod_base = OTHER; note = 2'-deoxy-2'-fluoroguanosine-3'-phosphate
  modified_base 10: mod_base = OTHER; note = 2'-deoxy-2'-fluorocytidine-3'-phosphate
  modified_base 11: mod_base = OTHER; note = 2'-deoxy-2'-fluoroadenosine-3'-phosphate
  modified_base 12: mod_base = OTHER; note = 2'-O-methylcytidine-3'-phosphate
  modified_base 13: mod_base = OTHER; note = 2'-O-methylcytidine-3'-phosphate
  modified_base 14: mod_base = OTHER; note = 2'-O-methyluridine-3'-phosphate
  modified_base 15: mod_base = OTHER; note = 2'-O-methyluridine-3'-phosphate
  modified_base 16: mod_base = OTHER; note = 2'-O-methylcytidine-3'-phosphate
  modified_base 17: mod_base = OTHER; note = 2'-O-methylcytidine-3'-phosphate
  modified_base 18: mod_base = OTHER; note = 2'-O-methyladenosine-3'-phosphate
  modified_base 19: mod_base = OTHER; note = 2'-O-methyladenosine-3'-phosphorothioate
  modified_base 20: mod_base = OTHER; note = 2'-O-methylcytidine-3'-phosphorothioate
  modified_base 21: mod_base = OTHER; note = 2'-O-methyladenosine
ataacactgcaccttccaaca

SEQ ID NO: 10552 - RNA, 21 nt, synthetic construct
  source 1..21: mol_type = other RNA
  modified_base 1: mod_base = OTHER; note = 2'-O-methyluridine-3'-phosphorothioate
  modified_base 2: mod_base = OTHER; note = 2'-O-methyladenosine-3'-phosphorothioate
  modified_base 3: mod_base = OTHER; note = 2'-O-methyladenosine-3'-phosphate
  modified_base 4: mod_base = OTHER; note = 2'-O-methylcytidine-3'-phosphate
  modified_base 5: mod_base = OTHER; note = 2'-O-methyladenosine-3'-phosphate
  modified_base 6: mod_base = OTHER; note = 2'-O-docosanyl-cytidine-3'-phosphate
  modified_base 7: mod_base = OTHER; note = 2'-deoxy-2'-fluorouridine-3'-phosphate
  modified_base 8: mod_base = OTHER; note = 2'-O-methylguanosine-3'-phosphate
  modified_base 9: mod_base = OTHER; note = 2'-deoxy-2'-fluorocytidine-3'-phosphate
  modified_base 10: mod_base = OTHER; note = 2'-deoxy-2'-fluoroadenosine-3'-phosphate
  modified_base 11: mod_base = OTHER; note = 2'-deoxy-2'-fluorocytidine-3'-phosphate
  modified_base 12: mod_base = OTHER; note = 2'-O-methylcytidine-3'-phosphate
  modified_base 13: mod_base = OTHER; note = 2'-O-methyluridine-3'-phosphate
  modified_base 14: mod_base = OTHER; note = 2'-O-methyluridine-3'-phosphate
  modified_base 15: mod_base = OTHER; note = 2'-O-methylcytidine-3'-phosphate
  modified_base 16: mod_base = OTHER; note = 2'-O-methylcytidine-3'-phosphate
  modified_base 17: mod_base = OTHER; note = 2'-O-methyladenosine-3'-phosphate
  modified_base 18: mod_base = OTHER; note = 2'-O-methyladenosine-3'-phosphate
  modified_base 19: mod_base = OTHER; note = 2'-O-methylcytidine-3'-phosphorothioate
  modified_base 20: mod_base = OTHER; note = 2'-O-methyladenosine-3'-phosphorothioate
  modified_base 21: mod_base = OTHER; note = 2'-O-methyladenosine
taacactgcaccttccaacaa

SEQ ID NO: 10553 - RNA, 21 nt, synthetic construct
  source 1..21: mol_type = other RNA
  modified_base 1: mod_base = OTHER; note = 2'-O-methyladenosine-3'-phosphorothioate
  modified_base 2: mod_base = OTHER; note = 2'-O-methyladenosine-3'-phosphorothioate
  modified_base 3: mod_base = OTHER; note = 2'-O-methylcytidine-3'-phosphate
  modified_base 4: mod_base = OTHER; note = 2'-O-methyladenosine-3'-phosphate
  modified_base 5: mod_base = OTHER; note = 2'-O-methylcytidine-3'-phosphate
  modified_base 6: mod_base = OTHER; note = 2'-O-docosanyl-uridine-3'-phosphate
  modified_base 7: mod_base = OTHER; note = 2'-deoxy-2'-fluoroguanosine-3'-phosphate
  modified_base 8: mod_base = OTHER; note = 2'-O-methylcytidine-3'-phosphate
  modified_base 9: mod_base = OTHER; note = 2'-deoxy-2'-fluoroadenosine-3'-phosphate
  modified_base 10: mod_base = OTHER; note = 2'-deoxy-2'-fluorocytidine-3'-phosphate
  modified_base 11: mod_base = OTHER; note = 2'-deoxy-2'-fluorocytidine-3'-phosphate
  modified_base 12: mod_base = OTHER; note = 2'-O-methyluridine-3'-phosphate
  modified_base 13: mod_base = OTHER; note = 2'-O-methyluridine-3'-phosphate
  modified_base 14: mod_base = OTHER; note = 2'-O-methylcytidine-3'-phosphate
  modified_base 15: mod_base = OTHER; note = 2'-O-methylcytidine-3'-phosphate
  modified_base 16: mod_base = OTHER; note = 2'-O-methyladenosine-3'-phosphate
  modified_base 17: mod_base = OTHER; note = 2'-O-methyladenosine-3'-phosphate
  modified_base 18: mod_base = OTHER; note = 2'-O-methylcytidine-3'-phosphate
  modified_base 19: mod_base = OTHER; note = 2'-O-methyladenosine-3'-phosphorothioate
  modified_base 20: mod_base = OTHER; note = 2'-O-methylguanosine-3'-phosphorothioate
  modified_base 21: mod_base = OTHER; note = 2'-O-methyladenosine
aacactgcaccttccaacaga

SEQ ID NO: 10554 - RNA, 21 nt, synthetic construct
  source 1..21: mol_type = other RNA
  modified_base 1: mod_base = OTHER; note = 2'-O-methyladenosine-3'-phosphorothioate
  modified_base 2: mod_base = OTHER; note = 2'-O-methylcytidine-3'-phosphorothioate
  modified_base 3: mod_base = OTHER; note = 2'-O-methyladenosine-3'-phosphate
  modified_base 4: mod_base = OTHER; note = 2'-O-methylcytidine-3'-phosphate
  modified_base 5: mod_base = OTHER; note = 2'-O-methyluridine-3'-phosphate
  modified_base 6: mod_base = OTHER; note = 2'-O-docosanyl-guanosine-3'-phosphate
  modified_base 7: mod_base = OTHER; note = 2'-deoxy-2'-fluorocytidine-3'-phosphate
  modified_base 8: mod_base = OTHER; note = 2'-O-methyladenosine-3'-phosphate
  modified_base 9: mod_base = OTHER; note = 2'-deoxy-2'-fluorocytidine-3'-phosphate
  modified_base 10: mod_base = OTHER; note = 2'-deoxy-2'-fluorocytidine-3'-phosphate
  modified_base 11: mod_base = OTHER; note = 2'-deoxy-2'-fluorouridine-3'-phosphate
  modified_base 12: mod_base = OTHER; note = 2'-O-methyluridine-3'-phosphate
  modified_base 13: mod_base = OTHER; note = 2'-O-methylcytidine-3'-phosphate
  modified_base 14: mod_base = OTHER; note = 2'-O-methylcytidine-3'-phosphate
  modified_base 15: mod_base = OTHER; note = 2'-O-methyladenosine-3'-phosphate
  modified_base 16: mod_base = OTHER; note = 2'-O-methyladenosine-3'-phosphate
  modified_base 17: mod_base = OTHER; note = 2'-O-methylcytidine-3'-phosphate
  modified_base 18: mod_base = OTHER; note = 2'-O-methyladenosine-3'-phosphate
  modified_base 19: mod_base = OTHER; note = 2'-O-methylguanosine-3'-phosphorothioate
  modified_base 20: mod_base = OTHER; note = 2'-O-methylcytidine-3'-phosphorothioate
  modified_base 21: mod_base = OTHER; note = 2'-O-methyladenosine
acactgcaccttccaacagca

SEQ ID NO: 10555 - RNA, 21 nt, synthetic construct
  source 1..21: mol_type = other RNA
  modified_base 1: mod_base = OTHER; note = 2'-O-methylcytidine-3'-phosphorothioate
  modified_base 2: mod_base = OTHER; note = 2'-O-methyladenosine-3'-phosphorothioate
  modified_base 3: mod_base = OTHER; note = 2'-O-methylcytidine-3'-phosphate
  modified_base 4: mod_base = OTHER; note = 2'-O-methyluridine-3'-phosphate
  modified_base 5: mod_base = OTHER; note = 2'-O-methylguanosine-3'-phosphate
  modified_base 6: mod_base = OTHER; note = 2'-O-docosanyl-cytidine-3'-phosphate
  modified_base 7: mod_base = OTHER; note = 2'-deoxy-2'-fluoroadenosine-3'-phosphate
  modified_base 8: mod_base = OTHER; note = 2'-O-methylcytidine-3'-phosphate
  modified_base 9: mod_base = OTHER; note = 2'-deoxy-2'-fluorocytidine-3'-phosphate
  modified_base 10: mod_base = OTHER; note = 2'-deoxy-2'-fluorouridine-3'-phosphate
  modified_base 11: mod_base = OTHER; note = 2'-deoxy-2'-fluorouridine-3'-phosphate
  modified_base 12: mod_base = OTHER; note = 2'-O-methylcytidine-3'-phosphate
  modified_base 13: mod_base = OTHER; note = 2'-O-methylcytidine-3'-phosphate
  modified_base 14: mod_base = OTHER; note = 2'-O-methyladenosine-3'-phosphate
  modified_base 15: mod_base = OTHER; note = 2'-O-methyladenosine-3'-phosphate
  modified_base 16: mod_base = OTHER; note = 2'-O-methylcytidine-3'-phosphate
  modified_base 17: mod_base = OTHER; note = 2'-O-methyladenosine-3'-phosphate
  modified_base 18: mod_base = OTHER; note = 2'-O-methylguanosine-3'-phosphate
  modified_base 19: mod_base = OTHER; note = 2'-O-methylcytidine-3'-phosphorothioate
  modified_base 20: mod_base = OTHER; note = 2'-O-methyladenosine-3'-phosphorothioate
  modified_base 21: mod_base = OTHER; note = 2'-O-methyladenosine
cactgcaccttccaacagcaa

SEQ ID NO: 10556 - RNA, 21 nt, synthetic construct
  source 1..21: mol_type = other RNA
  modified_base 1: mod_base = OTHER; note = 2'-O-methyladenosine-3'-phosphorothioate
  modified_base 2: mod_base = OTHER; note = 2'-O-methylcytidine-3'-phosphorothioate
  modified_base 3: mod_base = OTHER; note = 2'-O-methyluridine-3'-phosphate
  modified_base 4: mod_base = OTHER; note = 2'-O-methylguanosine-3'-phosphate
  modified_base 5: mod_base = OTHER; note = 2'-O-methylcytidine-3'-phosphate
  modified_base 6: mod_base = OTHER; note = 2'-O-docosanyl-adenosine-3'-phosphate
  modified_base 7: mod_base = OTHER; note = 2'-deoxy-2'-fluorocytidine-3'-phosphate
  modified_base 8: mod_base = OTHER; note = 2'-O-methylcytidine-3'-phosphate
  modified_base 9: mod_base = OTHER; note = 2'-deoxy-2'-fluorouridine-3'-phosphate
  modified_base 10: mod_base = OTHER; note = 2'-deoxy-2'-fluorouridine-3'-phosphate
  modified_base 11: mod_base = OTHER; note = 2'-deoxy-2'-fluorocytidine-3'-phosphate
  modified_base 12: mod_base = OTHER; note = 2'-O-methylcytidine-3'-phosphate
  modified_base 13: mod_base = OTHER; note = 2'-O-methyladenosine-3'-phosphate
  modified_base 14: mod_base = OTHER; note = 2'-O-methyladenosine-3'-phosphate
  modified_base 15: mod_base = OTHER; note = 2'-O-methylcytidine-3'-phosphate
  modified_base 16: mod_base = OTHER; note = 2'-O-methyladenosine-3'-phosphate
  modified_base 17: mod_base = OTHER; note = 2'-O-methylguanosine-3'-phosphate
  modified_base 18: mod_base = OTHER; note = 2'-O-methylcytidine-3'-phosphate
  modified_base 19: mod_base = OTHER; note = 2'-O-methyladenosine-3'-phosphorothioate
  modified_base 20: mod_base = OTHER; note = 2'-O-methyluridine-3'-phosphorothioate
  modified_base 21: mod_base = OTHER; note = 2'-O-methyladenosine
actgcaccttccaacagcata

SEQ ID NO: 10557 - RNA, 21 nt, synthetic construct
  source 1..21: mol_type = other RNA
  modified_base 1: mod_base = OTHER; note = 2'-O-methylcytidine-3'-phosphorothioate
  modified_base 2: mod_base = OTHER; note = 2'-O-methyluridine-3'-phosphorothioate
  modified_base 3: mod_base = OTHER; note = 2'-O-methylguanosine-3'-phosphate
  modified_base 4: mod_base = OTHER; note = 2'-O-methylcytidine-3'-phosphate
  modified_base 5: mod_base = OTHER; note = 2'-O-methyladenosine-3'-phosphate
  modified_base 6: mod_base = OTHER; note = 2'-O-docosanyl-cytidine-3'-phosphate
  modified_base 7: mod_base = OTHER; note = 2'-deoxy-2'-fluorocytidine-3'-phosphate
  modified_base 8: mod_base = OTHER; note = 2'-O-methyluridine-3'-phosphate
  modified_base 9: mod_base = OTHER; note = 2'-deoxy-2'-fluorouridine-3'-phosphate
  modified_base 10: mod_base = OTHER; note = 2'-deoxy-2'-fluorocytidine-3'-phosphate
  modified_base 11: mod_base = OTHER; note = 2'-deoxy-2'-fluorocytidine-3'-phosphate
  modified_base 12: mod_base = OTHER; note = 2'-O-methyladenosine-3'-phosphate
  modified_base 13: mod_base = OTHER; note = 2'-O-methyladenosine-3'-phosphate
  modified_base 14: mod_base = OTHER; note = 2'-O-methylcytidine-3'-phosphate
  modified_base 15: mod_base = OTHER; note = 2'-O-methyladenosine-3'-phosphate
  modified_base 16: mod_base = OTHER; note = 2'-O-methylguanosine-3'-phosphate
  modified_base 17: mod_base = OTHER; note = 2'-O-methylcytidine-3'-phosphate
  modified_base 18: mod_base = OTHER; note = 2'-O-methyladenosine-3'-phosphate
  modified_base 19: mod_base = OTHER; note = 2'-O-methyluridine-3'-phosphorothioate
  modified_base 20: mod_base = OTHER; note = 2'-O-methylcytidine-3'-phosphorothioate
  modified_base 21: mod_base = OTHER; note = 2'-O-methyladenosine
ctgcaccttccaacagcatca

SEQ ID NO: 10558 - RNA, 21 nt, synthetic construct
  source 1..21: mol_type = other RNA
  modified_base 1: mod_base = OTHER; note = 2'-O-methyluridine-3'-phosphorothioate
  modified_base 2: mod_base = OTHER; note = 2'-O-methylguanosine-3'-phosphorothioate
  modified_base 3: mod_base = OTHER; note = 2'-O-methylcytidine-3'-phosphate
  modified_base 4: mod_base = OTHER; note = 2'-O-methyladenosine-3'-phosphate
  modified_base 5: mod_base = OTHER; note = 2'-O-methylcytidine-3'-phosphate
  modified_base 6: mod_base = OTHER; note = 2'-O-docosanyl-cytidine-3'-phosphate
  modified_base 7: mod_base = OTHER; note = 2'-deoxy-2'-fluorouridine-3'-phosphate
  modified_base 8: mod_base = OTHER; note = 2'-O-methyluridine-3'-phosphate
  modified_base 9: mod_base = OTHER; note = 2'-deoxy-2'-fluorocytidine-3'-phosphate
  modified_base 10: mod_base = OTHER; note = 2'-deoxy-2'-fluorocytidine-3'-phosphate
  modified_base 11: mod_base = OTHER; note = 2'-deoxy-2'-fluoroadenosine-3'-phosphate
  modified_base 12: mod_base = OTHER; note = 2'-O-methyladenosine-3'-phosphate
  modified_base 13: mod_base = OTHER; note = 2'-O-methylcytidine-3'-phosphate
  modified_base 14: mod_base = OTHER; note = 2'-O-methyladenosine-3'-phosphate
  modified_base 15: mod_base = OTHER; note = 2'-O-methylguanosine-3'-phosphate
  modified_base 16: mod_base = OTHER; note = 2'-O-methylcytidine-3'-phosphate
  modified_base 17: mod_base = OTHER; note = 2'-O-methyladenosine-3'-phosphate
  modified_base 18: mod_base = OTHER; note = 2'-O-methyluridine-3'-phosphate
  modified_base 19: mod_base = OTHER; note = 2'-O-methylcytidine-3'-phosphorothioate
  modified_base 20: mod_base = OTHER; note = 2'-O-methyladenosine-3'-phosphorothioate
  modified_base 21: mod_base = OTHER; note = 2'-O-methyladenosine
tgcaccttccaacagcatcaa

SEQ ID NO: 10559 - RNA, 21 nt, synthetic construct
  source 1..21: mol_type = other RNA
  modified_base 1: mod_base = OTHER; note = 2'-O-methylguanosine-3'-phosphorothioate
  modified_base 2: mod_base = OTHER; note = 2'-O-methylcytidine-3'-phosphorothioate
  modified_base 3: mod_base = OTHER; note = 2'-O-methyladenosine-3'-phosphate
  modified_base 4: mod_base = OTHER; note = 2'-O-methylcytidine-3'-phosphate
  modified_base 5: mod_base = OTHER; note = 2'-O-methylcytidine-3'-phosphate
  modified_base 6: mod_base = OTHER; note = 2'-O-docosanyl-uridine-3'-phosphate
  modified_base 7: mod_base = OTHER; note = 2'-deoxy-2'-fluorouridine-3'-phosphate
  modified_base 8: mod_base = OTHER; note = 2'-O-methylcytidine-3'-phosphate
  modified_base 9: mod_base = OTHER; note = 2'-deoxy-2'-fluorocytidine-3'-phosphate
  modified_base 10: mod_base = OTHER; note = 2'-deoxy-2'-fluoroadenosine-3'-phosphate
  modified_base 11: mod_base = OTHER; note = 2'-deoxy-2'-fluoroadenosine-3'-phosphate
  modified_base 12: mod_base = OTHER; note = 2'-O-methylcytidine-3'-phosphate
  modified_base 13: mod_base = OTHER; note = 2'-O-methyladenosine-3'-phosphate
  modified_base 14: mod_base = OTHER; note = 2'-O-methylguanosine-3'-phosphate
  modified_base 15: mod_base = OTHER; note = 2'-O-methylcytidine-3'-phosphate
  modified_base 16: mod_base = OTHER; note = 2'-O-methyladenosine-3'-phosphate
  modified_base 17: mod_base = OTHER; note = 2'-O-methyluridine-3'-phosphate
  modified_base 18: mod_base = OTHER; note = 2'-O-methylcytidine-3'-phosphate
  modified_base 19: mod_base = OTHER; note = 2'-O-methyladenosine-3'-phosphorothioate
  modified_base 20: mod_base = OTHER; note = 2'-O-methylcytidine-3'-phosphorothioate
  modified_base 21: mod_base = OTHER; note = 2'-O-methyladenosine
gcaccttccaacagcatcaca

SEQ ID NO: 10560 - RNA, 21 nt, synthetic construct
  source 1..21: mol_type = other RNA
  modified_base 1: mod_base = OTHER; note = 2'-O-methylcytidine-3'-phosphorothioate
  modified_base 2: mod_base = OTHER; note = 2'-O-methyladenosine-3'-phosphorothioate
  modified_base 3: mod_base = OTHER; note = 2'-O-methylcytidine-3'-phosphate
  modified_base 4: mod_base = OTHER; note = 2'-O-methylcytidine-3'-phosphate
  modified_base 5: mod_base = OTHER; note = 2'-O-methyluridine-3'-phosphate
  modified_base 6: mod_base = OTHER; note = 2'-O-docosanyl-uridine-3'-phosphate
  modified_base 7: mod_base = OTHER; note = 2'-deoxy-2'-fluorocytidine-3'-phosphate
  modified_base 8: mod_base = OTHER; note = 2'-O-methylcytidine-3'-phosphate
  modified_base 9: mod_base = OTHER; note = 2'-deoxy-2'-fluoroadenosine-3'-phosphate
  modified_base 10: mod_base = OTHER; note = 2'-deoxy-2'-fluoroadenosine-3'-phosphate
  modified_base 11: mod_base = OTHER; note = 2'-deoxy-2'-fluorocytidine-3'-phosphate
  modified_base 12: mod_base = OTHER; note = 2'-O-methyladenosine-3'-phosphate
  modified_base 13: mod_base = OTHER; note = 2'-O-methylguanosine-3'-phosphate
  modified_base 14: mod_base = OTHER; note = 2'-O-methylcytidine-3'-phosphate
  modified_base 15: mod_base = OTHER; note = 2'-O-methyladenosine-3'-phosphate
  modified_base 16: mod_base = OTHER; note = 2'-O-methyluridine-3'-phosphate
  modified_base 17: mod_base = OTHER; note = 2'-O-methylcytidine-3'-phosphate
  modified_base 18: mod_base = OTHER; note = 2'-O-methyladenosine-3'-phosphate
  modified_base 19: mod_base = OTHER; note = 2'-O-methylcytidine-3'-phosphorothioate
  modified_base 20: mod_base = OTHER; note = 2'-O-methylcytidine-3'-phosphorothioate
  modified_base 21: mod_base = OTHER; note = 2'-O-methyladenosine
caccttccaacagcatcacca

SEQ ID NO: 10561 - RNA, 21 nt, synthetic construct
  source 1..21: mol_type = other RNA
  modified_base 1: mod_base = OTHER; note = 2'-O-methyladenosine-3'-phosphorothioate
  modified_base 2: mod_base = OTHER; note = 2'-O-methylcytidine-3'-phosphorothioate
  modified_base 3: mod_base = OTHER; note = 2'-O-methylcytidine-3'-phosphate
  modified_base 4: mod_base = OTHER; note = 2'-O-methyluridine-3'-phosphate
  modified_base 5: mod_base = OTHER; note = 2'-O-methyluridine-3'-phosphate
  modified_base 6: mod_base = OTHER; note = 2'-O-docosanyl-cytidine-3'-phosphate
  modified_base 7: mod_base = OTHER; note = 2'-deoxy-2'-fluorocytidine-3'-phosphate
  modified_base 8: mod_base = OTHER; note = 2'-O-methyladenosine-3'-phosphate
  modified_base 9: mod_base = OTHER; note = 2'-deoxy-2'-fluoroadenosine-3'-phosphate
  modified_base 10: mod_base = OTHER; note = 2'-deoxy-2'-fluorocytidine-3'-phosphate
  modified_base 11: mod_base = OTHER; note = 2'-deoxy-2'-fluoroadenosine-3'-phosphate
  modified_base 12: mod_base = OTHER; note = 2'-O-methylguanosine-3'-phosphate
  modified_base 13: mod_base = OTHER; note = 2'-O-methylcytidine-3'-phosphate
  modified_base 14: mod_base = OTHER; note = 2'-O-methyladenosine-3'-phosphate
  modified_base 15: mod_base = OTHER; note = 2'-O-methyluridine-3'-phosphate
  modified_base 16: mod_base = OTHER; note = 2'-O-methylcytidine-3'-phosphate
  modified_base 17: mod_base = OTHER; note = 2'-O-methyladenosine-3'-phosphate
  modified_base 18: mod_base = OTHER; note = 2'-O-methylcytidine-3'-phosphate
  modified_base 19: mod_base = OTHER; note = 2'-O-methylcytidine-3'-phosphorothioate
  modified_base 20: mod_base = OTHER; note = 2'-O-methyladenosine-3'-phosphorothioate
  modified_base 21: mod_base = OTHER; note = 2'-O-methyladenosine
accttccaacagcatcaccaa

SEQ ID NO: 10562 - RNA, 21 nt, synthetic construct
  source 1..21: mol_type = other RNA
  modified_base 1: mod_base = OTHER; note = 2'-O-methylcytidine-3'-phosphorothioate
  modified_base 2: mod_base = OTHER; note = 2'-O-methylcytidine-3'-phosphorothioate
  modified_base 3: mod_base = OTHER; note = 2'-O-methyluridine-3'-phosphate
  modified_base 4: mod_base = OTHER; note = 2'-O-methyluridine-3'-phosphate
  modified_base 5: mod_base = OTHER; note = 2'-O-methylcytidine-3'-phosphate
  modified_base 6: mod_base = OTHER; note = 2'-O-docosanyl-cytidine-3'-phosphate
  modified_base 7: mod_base = OTHER; note = 2'-deoxy-2'-fluoroadenosine-3'-phosphate
  modified_base 8: mod_base = OTHER; note = 2'-O-methyladenosine-3'-phosphate
  modified_base 9: mod_base = OTHER; note = 2'-deoxy-2'-fluorocytidine-3'-phosphate
  modified_base 10: mod_base = OTHER; note = 2'-deoxy-2'-fluoroadenosine-3'-phosphate
  modified_base 11: mod_base = OTHER; note = 2'-deoxy-2'-fluoroguanosine-3'-phosphate
  modified_base 12: mod_base = OTHER; note = 2'-O-methylcytidine-3'-phosphate
  modified_base 13: mod_base = OTHER; note = 2'-O-methyladenosine-3'-phosphate
  modified_base 14: mod_base = OTHER; note = 2'-O-methyluridine-3'-phosphate
  modified_base 15: mod_base = OTHER; note = 2'-O-methylcytidine-3'-phosphate
  modified_base 16: mod_base = OTHER; note = 2'-O-methyladenosine-3'-phosphate
  modified_base 17: mod_base = OTHER; note = 2'-O-methylcytidine-3'-phosphate
  modified_base 18: mod_base = OTHER; note = 2'-O-methylcytidine-3'-phosphate
  modified_base 19: mod_base = OTHER; note = 2'-O-methyladenosine-3'-phosphorothioate
  modified_base 20: mod_base = OTHER; note = 2'-O-methyladenosine-3'-phosphorothioate
  modified_base 21: mod_base = OTHER; note = 2'-O-methyladenosine
ccttccaacagcatcaccaaa

SEQ ID NO: 10563 - RNA, 21 nt, synthetic construct
  source 1..21: mol_type = other RNA
  modified_base 1: mod_base = OTHER; note = 2'-O-methylcytidine-3'-phosphorothioate
  modified_base 2: mod_base = OTHER; note = 2'-O-methyluridine-3'-phosphorothioate
  modified_base 3: mod_base = OTHER; note = 2'-O-methyluridine-3'-phosphate
  modified_base 4: mod_base = OTHER; note = 2'-O-methylcytidine-3'-phosphate
  modified_base 5: mod_base = OTHER; note = 2'-O-methylcytidine-3'-phosphate
  modified_base 6: mod_base = OTHER; note = 2'-O-docosanyl-adenosine-3'-phosphate
  modified_base 7: mod_base = OTHER; note = 2'-deoxy-2'-fluoroadenosine-3'-phosphate
  modified_base 8: mod_base = OTHER; note = 2'-O-methylcytidine-3'-phosphate
  modified_base 9: mod_base = OTHER; note = 2'-deoxy-2'-fluoroadenosine-3'-phosphate
  modified_base 10: mod_base = OTHER; note = 2'-deoxy-2'-fluoroguanosine-3'-phosphate
  modified_base 11: mod_base = OTHER; note = 2'-deoxy-2'-fluorocytidine-3'-phosphate
  modified_base 12: mod_base = OTHER; note = 2'-O-methyladenosine-3'-phosphate
  modified_base 13: mod_base = OTHER; note = 2'-O-methyluridine-3'-phosphate
  modified_base 14: mod_base = OTHER; note = 2'-O-methylcytidine-3'-phosphate
  modified_base 15: mod_base = OTHER; note = 2'-O-methyladenosine-3'-phosphate
  modified_base 16: mod_base = OTHER; note = 2'-O-methylcytidine-3'-phosphate
  modified_base 17: mod_base = OTHER; note = 2'-O-methylcytidine-3'-phosphate
  modified_base 18: mod_base = OTHER; note = 2'-O-methyladenosine-3'-phosphate
  modified_base 19: mod_base = OTHER; note = 2'-O-methyladenosine-3'-phosphorothioate
  modified_base 20: mod_base = OTHER; note = 2'-O-methyladenosine-3'-phosphorothioate
  modified_base 21: mod_base = OTHER; note = 2'-O-methyladenosine
cttccaacagcatcaccaaaa

SEQ ID NO: 10564 - RNA, 21 nt, synthetic construct
  source 1..21: mol_type = other RNA
  modified_base 1: mod_base = OTHER; note = 2'-O-methyluridine-3'-phosphorothioate
  modified_base 2: mod_base = OTHER; note = 2'-O-methylcytidine-3'-phosphorothioate
  modified_base 3: mod_base = OTHER; note = 2'-O-methylcytidine-3'-phosphate
  modified_base 4: mod_base = OTHER; note = 2'-O-methyladenosine-3'-phosphate
  modified_base 5: mod_base = OTHER; note = 2'-O-methyladenosine-3'-phosphate
  modified_base 6: mod_base = OTHER; note = 2'-O-docosanyl-cytidine-3'-phosphate
  modified_base 7: mod_base = OTHER; note = 2'-deoxy-2'-fluoroadenosine-3'-phosphate
  modified_base 8: mod_base = OTHER; note = 2'-O-methylguanosine-3'-phosphate
  modified_base 9: mod_base = OTHER; note = 2'-deoxy-2'-fluorocytidine-3'-phosphate
  modified_base 10: mod_base = OTHER; note = 2'-deoxy-2'-fluoroadenosine-3'-phosphate
  modified_base 11: mod_base = OTHER; note = 2'-deoxy-2'-fluorouridine-3'-phosphate
  modified_base 12: mod_base = OTHER; note = 2'-O-methylcytidine-3'-phosphate
  modified_base 13: mod_base = OTHER; note = 2'-O-methyladenosine-3'-phosphate
  modified_base 14: mod_base = OTHER; note = 2'-O-methylcytidine-3'-phosphate
  modified_base 15: mod_base = OTHER; note = 2'-O-methylcytidine-3'-phosphate
  modified_base 16: mod_base = OTHER; note = 2'-O-methyladenosine-3'-phosphate
  modified_base 17: mod_base = OTHER; note = 2'-O-methyladenosine-3'-phosphate
  modified_base 18: mod_base = OTHER; note = 2'-O-methyladenosine-3'-phosphate
  modified_base 19: mod_base = OTHER; note = 2'-O-methyluridine-3'-phosphorothioate
  modified_base 20: mod_base = OTHER; note = 2'-O-methylguanosine-3'-phosphorothioate
  modified_base 21: mod_base = OTHER; note = 2'-O-methyladenosine
tccaacagcatcaccaaatga

SEQ ID NO: 10565 - RNA, 21 nt, synthetic construct
  source 1..21: mol_type = other RNA
  modified_base 1: mod_base = OTHER; note = 2'-O-methylcytidine-3'-phosphorothioate
  modified_base 2: mod_base = OTHER; note = 2'-O-methylcytidine-3'-phosphorothioate
  modified_base 3: mod_base = OTHER; note = 2'-O-methyladenosine-3'-phosphate
  modified_base 4: mod_base = OTHER; note = 2'-O-methyladenosine-3'-phosphate
  modified_base 5: mod_base = OTHER; note = 2'-O-methylcytidine-3'-phosphate
  modified_base 6: mod_base = OTHER; note = 2'-O-docosanyl-adenosine-3'-phosphate
  modified_base 7: mod_base = OTHER; note = 2'-deoxy-2'-fluoroguanosine-3'-phosphate
  modified_base 8: mod_base = OTHER; note = 2'-O-methylcytidine-3'-phosphate
  modified_base 9: mod_base = OTHER; note = 2'-deoxy-2'-fluoroadenosine-3'-phosphate
  modified_base 10: mod_base = OTHER; note = 2'-deoxy-2'-fluorouridine-3'-phosphate
  modified_base 11: mod_base = OTHER; note = 2'-deoxy-2'-fluorocytidine-3'-phosphate
  modified_base 12: mod_base = OTHER; note = 2'-O-methyladenosine-3'-phosphate
  modified_base 13: mod_base = OTHER; note = 2'-O-methylcytidine-3'-phosphate
  modified_base 14: mod_base = OTHER; note = 2'-O-methylcytidine-3'-phosphate
  modified_base 15: mod_base = OTHER; note = 2'-O-methyladenosine-3'-phosphate
  modified_base 16: mod_base = OTHER; note = 2'-O-methyladenosine-3'-phosphate
  modified_base 17: mod_base = OTHER; note = 2'-O-methyladenosine-3'-phosphate
  modified_base 18: mod_base = OTHER; note = 2'-O-methyluridine-3'-phosphate
  modified_base 19: mod_base = OTHER; note = 2'-O-methylguanosine-3'-phosphorothioate
  modified_base 20: mod_base = OTHER; note = 2'-O-methylcytidine-3'-phosphorothioate
  modified_base 21: mod_base = OTHER; note = 2'-O-methyladenosine
ccaacagcatcaccaaatgca

SEQ ID NO: 10566 - RNA, 21 nt, synthetic construct
  source 1..21: mol_type = other RNA
  modified_base 1: mod_base = OTHER; note = 2'-O-methylcytidine-3'-phosphorothioate
  modified_base 2: mod_base = OTHER; note = 2'-O-methyladenosine-3'-phosphorothioate
  modified_base 3: mod_base = OTHER; note = 2'-O-methyladenosine-3'-phosphate
  modified_base 4: mod_base = OTHER; note = 2'-O-methylcytidine-3'-phosphate
  modified_base 5: mod_base = OTHER; note = 2'-O-methyladenosine-3'-phosphate
  modified_base 6: mod_base = OTHER; note = 2'-O-docosanyl-guanosine-3'-phosphate
  modified_base 7: mod_base = OTHER; note = 2'-deoxy-2'-fluorocytidine-3'-phosphate
  modified_base 8: mod_base = OTHER; note = 2'-O-methyladenosine-3'-phosphate
  modified_base 9: mod_base = OTHER; note = 2'-deoxy-2'-fluorouridine-3'-phosphate
  modified_base 10: mod_base = OTHER; note = 2'-deoxy-2'-fluorocytidine-3'-phosphate
  modified_base 11: mod_base = OTHER; note = 2'-deoxy-2'-fluoroadenosine-3'-phosphate
  modified_base 12: mod_base = OTHER; note = 2'-O-methylcytidine-3'-phosphate
  modified_base 13: mod_base = OTHER; note = 2'-O-methylcytidine-3'-phosphate
  modified_base 14: mod_base = OTHER; note = 2'-O-methyladenosine-3'-phosphate
  modified_base 15: mod_base = OTHER; note = 2'-O-methyladenosine-3'-phosphate
  modified_base 16: mod_base = OTHER; note = 2'-O-methyladenosine-3'-phosphate
  modified_base 17: mod_base = OTHER; note = 2'-O-methyluridine-3'-phosphate
  modified_base 18: mod_base = OTHER; note = 2'-O-methylguanosine-3'-phosphate
  modified_base 19: mod_base = OTHER; note = 2'-O-methylcytidine-3'-phosphorothioate
  modified_base 20: mod_base = OTHER; note = 2'-O-methylcytidine-3'-phosphorothioate
  modified_base 21: mod_base = OTHER; note = 2'-O-methyladenosine
caacagcatcaccaaatgcca

SEQ ID NO: 10567 - RNA, 21 nt, synthetic construct
  source 1..21: mol_type = other RNA
  modified_base 1: mod_base = OTHER; note = 2'-O-methylguanosine-3'-phosphorothioate
  modified_base 2: mod_base = OTHER; note = 2'-O-methylguanosine-3'-phosphorothioate
  modified_base 3: mod_base = OTHER; note = 2'-O-methyladenosine-3'-phosphate
  modified_base 4: mod_base = OTHER; note = 2'-O-methylguanosine-3'-phosphate
  modified_base 5: mod_base = OTHER; note = 2'-O-methylcytidine-3'-phosphate
  modified_base 6: mod_base = OTHER; note = 2'-O-docosanyl-uridine-3'-phosphate
  modified_base 7: mod_base = OTHER; note = 2'-deoxy-2'-fluoroguanosine-3'-phosphate
  modified_base 8: mod_base = OTHER; note = 2'-O-methylguanosine-3'-phosphate
  modified_base 9: mod_base = OTHER; note = 2'-deoxy-2'-fluorocytidine-3'-phosphate
  modified_base 10: mod_base = OTHER; note = 2'-deoxy-2'-fluorocytidine-3'-phosphate
  modified_base 11: mod_base = OTHER; note = 2'-deoxy-2'-fluoroadenosine-3'-phosphate
  modified_base 12: mod_base = OTHER; note = 2'-O-methyluridine-3'-phosphate
  modified_base 13: mod_base = OTHER; note = 2'-O-methylcytidine-3'-phosphate
  modified_base 14: mod_base = OTHER; note = 2'-O-methyladenosine-3'-phosphate
  modified_base 15: mod_base = OTHER; note = 2'-O-methyluridine-3'-phosphate
  modified_base 16: mod_base = OTHER; note = 2'-O-methyluridine-3'-phosphate
  modified_base 17: mod_base = OTHER; note = 2'-O-methyladenosine-3'-phosphate
  modified_base 18: mod_base = OTHER; note = 2'-O-methyluridine-3'-phosphate
  modified_base 19: mod_base = OTHER; note = 2'-O-methyluridine-3'-phosphorothioate
  modified_base 20: mod_base = OTHER; note = 2'-O-methyladenosine-3'-phosphorothioate
  modified_base 21: mod_base = OTHER; note = 2'-O-methyladenosine
ggagctggccatcattattaa

SEQ ID NO: 10568 - RNA, 21 nt, synthetic construct
  source 1..21: mol_type = other RNA
  modified_base 1: mod_base = OTHER; note = 2'-O-methylcytidine-3'-phosphorothioate
  modified_base 2: mod_base = OTHER; note = 2'-O-methyluridine-3'-phosphorothioate
  modified_base 3: mod_base = OTHER; note = 2'-O-methylguanosine-3'-phosphate
  modified_base 4: mod_base = OTHER; note = 2'-O-methylguanosine-3'-phosphate
  modified_base 5: mod_base = OTHER; note = 2'-O-methylcytidine-3'-phosphate
  modified_base 6: mod_base = OTHER; note = 2'-O-docosanyl-cytidine-3'-phosphate
  modified_base 7: mod_base = OTHER; note = 2'-deoxy-2'-fluoroadenosine-3'-phosphate
  modified_base 8: mod_base = OTHER; note = 2'-O-methyluridine-3'-phosphate
  modified_base 9: mod_base = OTHER; note = 2'-deoxy-2'-fluorocytidine-3'-phosphate
  modified_base 10: mod_base = OTHER; note = 2'-deoxy-2'-fluoroadenosine-3'-phosphate
  modified_base 11: mod_base = OTHER; note = 2'-deoxy-2'-fluorouridine-3'-phosphate
  modified_base 12: mod_base = OTHER; note = 2'-O-methyluridine-3'-phosphate
  modified_base 13: mod_base = OTHER; note = 2'-O-methyladenosine-3'-phosphate
  modified_base 14: mod_base = OTHER; note = 2'-O-methyluridine-3'-phosphate
  modified_base 15: mod_base = OTHER; note = 2'-O-methyluridine-3'-phosphate
  modified_base 16: mod_base = OTHER; note = 2'-O-methyladenosine-3'-phosphate
  modified_base 17: mod_base = OTHER; note = 2'-O-methylcytidine-3'-phosphate
  modified_base 18: mod_base = OTHER; note = 2'-O-methyluridine-3'-phosphate
  modified_base 19: mod_base = OTHER; note = 2'-O-methylguanosine-3'-phosphorothioate
  modified_base 20: mod_base = OTHER; note = 2'-O-methyluridine-3'-phosphorothioate
  modified_base 21: mod_base = OTHER; note = 2'-O-methyladenosine
ctggccatcattattactgta

SEQ ID NO: 10569 - RNA, 21 nt, synthetic construct
  source 1..21: mol_type = other RNA
  modified_base 1: mod_base = OTHER; note = 2'-O-methylguanosine-3'-phosphorothioate
  modified_base 2: mod_base = OTHER; note = 2'-O-methylcytidine-3'-phosphorothioate
  modified_base 3: mod_base = OTHER; note = 2'-O-methyluridine-3'-phosphate
  modified_base 4: mod_base = OTHER; note = 2'-O-methylguanosine-3'-phosphate
  modified_base 5: mod_base = OTHER; note = 2'-O-methylguanosine-3'-phosphate
  modified_base 6: mod_base = OTHER; note = 2'-O-docosanyl-cytidine-3'-phosphate
  modified_base 7: mod_base = OTHER; note = 2'-deoxy-2'-fluorocytidine-3'-phosphate
  modified_base 8: mod_base = OTHER; note = 2'-O-methyladenosine-3'-phosphate
  modified_base 9: mod_base = OTHER; note = 2'-deoxy-2'-fluorouridine-3'-phosphate
  modified_base 10: mod_base = OTHER; note = 2'-deoxy-2'-fluorocytidine-3'-phosphate
  modified_base 11: mod_base = OTHER; note = 2'-deoxy-2'-fluoroadenosine-3'-phosphate
  modified_base 12: mod_base = OTHER; note = 2'-O-methyluridine-3'-phosphate
  modified_base 13: mod_base = OTHER; note = 2'-O-methyluridine-3'-phosphate
  modified_base 14: mod_base = OTHER; note = 2'-O-methyladenosine-3'-phosphate
  modified_base 15: mod_base = OTHER; note = 2'-O-methyluridine-3'-phosphate
  modified_base 16: mod_base = OTHER; note = 2'-O-methyluridine-3'-phosphate
  modified_base 17: mod_base = OTHER; note = 2'-O-methyladenosine-3'-phosphate
  modified_base 18: mod_base = OTHER; note = 2'-O-methylcytidine-3'-phosphate
  modified_base 19: mod_base = OTHER; note = 2'-O-methyluridine-3'-phosphorothioate
  modified_base 20: mod_base = OTHER; note = 2'-O-methylguanosine-3'-phosphorothioate
  modified_base 21: mod_base = OTHER; note = 2'-O-methyladenosine
gctggccatcattattactga

SEQ ID NO: 10570 - RNA, 21 nt, synthetic construct
  source 1..21: mol_type = other RNA
  modified_base 1: mod_base = OTHER; note = 2'-O-methylguanosine-3'-phosphorothioate
  modified_base 2: mod_base = OTHER; note = 2'-O-methylguanosine-3'-phosphorothioate
  modified_base 3: mod_base = OTHER; note = 2'-O-methylcytidine-3'-phosphate
  modified_base 4: mod_base = OTHER; note = 2'-O-methylcytidine-3'-phosphate
  modified_base 5: mod_base = OTHER; note = 2'-O-methyladenosine-3'-phosphate
  modified_base 6: mod_base = OTHER; note = 2'-O-docosanyl-uridine-3'-phosphate
  modified_base 7: mod_base = OTHER; note = 2'-deoxy-2'-fluorocytidine-3'-phosphate
  modified_base 8: mod_base = OTHER; note = 2'-O-methyladenosine-3'-phosphate
  modified_base 9: mod_base = OTHER; note = 2'-deoxy-2'-fluorouridine-3'-phosphate
  modified_base 10: mod_base = OTHER; note = 2'-deoxy-2'-fluorouridine-3'-phosphate
  modified_base 11: mod_base = OTHER; note = 2'-deoxy-2'-fluoroadenosine-3'-phosphate
  modified_base 12: mod_base = OTHER; note = 2'-O-methyluridine-3'-phosphate
  modified_base 13: mod_base = OTHER; note = 2'-O-methyluridine-3'-phosphate
  modified_base 14: mod_base = OTHER; note = 2'-O-methyladenosine-3'-phosphate
  modified_base 15: mod_base = OTHER; note = 2'-O-methylcytidine-3'-phosphate
  modified_base 16: mod_base = OTHER; note = 2'-O-methyluridine-3'-phosphate
  modified_base 17: mod_base = OTHER; note = 2'-O-methylguanosine-3'-phosphate
  modified_base 18: mod_base = OTHER; note = 2'-O-methyluridine-3'-phosphate
  modified_base 19: mod_base = OTHER; note = 2'-O-methylguanosine-3'-phosphorothioate
  modified_base 20: mod_base = OTHER; note = 2'-O-methylcytidine-3'-phosphorothioate
  modified_base 21: mod_base = OTHER; note = 2'-O-methyladenosine
ggccatcattattactgtgca

SEQ ID NO: 10571 - RNA, 21 nt, synthetic construct
  source 1..21: mol_type = other RNA
  modified_base 1: mod_base = OTHER; note = 2'-O-methylcytidine-3'-phosphorothioate
  modified_base 2: mod_base = OTHER; note = 2'-O-methyladenosine-3'-phosphorothioate
  modified_base 3: mod_base = OTHER; note = 2'-O-methyluridine-3'-phosphate
  modified_base 4: mod_base = OTHER; note = 2'-O-methyluridine-3'-phosphate
  modified_base 5: mod_base = OTHER; note = 2'-O-methyladenosine-3'-phosphate
  modified_base 6: mod_base = OTHER; note = 2'-O-docosanyl-uridine-3'-phosphate
  modified_base 7: mod_base = OTHER; note = 2'-deoxy-2'-fluorouridine-3'-phosphate
  modified_base 8: mod_base = OTHER; note = 2'-O-methyladenosine-3'-phosphate
  modified_base 9: mod_base = OTHER; note = 2'-deoxy-2'-fluorocytidine-3'-phosphate
  modified_base 10: mod_base = OTHER; note = 2'-deoxy-2'-fluorouridine-3'-phosphate
  modified_base 11: mod_base = OTHER; note = 2'-deoxy-2'-fluoroguanosine-3'-phosphate
  modified_base 12: mod_base = OTHER; note = 2'-O-methyluridine-3'-phosphate
  modified_base 13: mod_base = OTHER; note = 2'-O-methylguanosine-3'-phosphate
  modified_base 14: mod_base = OTHER; note = 2'-O-methylcytidine-3'-phosphate
  modified_base 15: mod_base = OTHER; note = 2'-O-methylcytidine-3'-phosphate
  modified_base 16: mod_base = OTHER; note = 2'-O-methyluridine-3'-phosphate
  modified_base 17: mod_base = OTHER; note = 2'-O-methylguanosine-3'-phosphate
  modified_base 18: mod_base = OTHER; note = 2'-O-methyluridine-3'-phosphate
  modified_base 19: mod_base = OTHER; note = 2'-O-methyluridine-3'-phosphorothioate
  modified_base 20: mod_base = OTHER; note = 2'-O-methyluridine-3'-phosphorothioate
  modified_base 21: mod_base = OTHER; note = 2'-O-methyladenosine
cattattactgtgcctgttta

SEQ ID NO: 10572 - RNA, 21 nt, synthetic construct
  source 1..21: mol_type = other RNA
  modified_base 1: mod_base = OTHER; note = 2'-O-methyladenosine-3'-phosphorothioate
  modified_base 2: mod_base = OTHER; note = 2'-O-methyluridine-3'-phosphorothioate
  modified_base 3: mod_base = OTHER; note = 2'-O-methyluridine-3'-phosphate
  modified_base 4: mod_base = OTHER; note = 2'-O-methyladenosine-3'-phosphate
  modified_base 5: mod_base = OTHER; note = 2'-O-methylcytidine-3'-phosphate
  modified_base 6: mod_base = OTHER; note = 2'-O-docosanyl-uridine-3'-phosphate
  modified_base 7: mod_base = OTHER; note = 2'-deoxy-2'-fluoroguanosine-3'-phosphate
  modified_base 8: mod_base = OTHER; note = 2'-O-methyluridine-3'-phosphate
  modified_base 9: mod_base = OTHER; note = 2'-deoxy-2'-fluoroguanosine-3'-phosphate
  modified_base 10: mod_base = OTHER; note = 2'-deoxy-2'-fluorocytidine-3'-phosphate
  modified_base 11: mod_base = OTHER; note = 2'-deoxy-2'-fluorocytidine-3'-phosphate
  modified_base 12: mod_base = OTHER; note = 2'-O-methyluridine-3'-phosphate
  modified_base 13: mod_base = OTHER; note = 2'-O-methylguanosine-3'-phosphate
  modified_base 14: mod_base = OTHER; note = 2'-O-methyluridine-3'-phosphate
  modified_base 15: mod_base = OTHER; note = 2'-O-methyluridine-3'-phosphate
  modified_base 16: mod_base = OTHER; note = 2'-O-methyluridine-3'-phosphate
  modified_base 17: mod_base = OTHER; note = 2'-O-methylguanosine-3'-phosphate
  modified_base 18: mod_base = OTHER; note = 2'-O-methylcytidine-3'-phosphate
  modified_base 19: mod_base = OTHER; note = 2'-O-methylcytidine-3'-phosphorothioate
  modified_base 20: mod_base = OTHER; note = 2'-O-methyluridine-3'-phosphorothioate
  modified_base 21: mod_base = OTHER; note = 2'-O-methyladenosine
attactgtgcctgtttgccta

SEQ ID NO: 10573 - RNA, 21 nt, synthetic construct
  source 1..21: mol_type = other RNA
  modified_base 1: mod_base = OTHER; note = 2'-O-methylguanosine-3'-phosphorothioate
  modified_base 2: mod_base = OTHER; note = 2'-O-methylcytidine-3'-phosphorothioate
  modified_base 3: mod_base = OTHER; note = 2'-O-methylcytidine-3'-phosphate
  modified_base 4: mod_base = OTHER; note = 2'-O-methyluridine-3'-phosphate
  modified_base 5: mod_base = OTHER; note = 2'-O-methylguanosine-3'-phosphate
  modified_base 6: mod_base = OTHER; note = 2'-O-docosanyl-uridine-3'-phosphate
  modified_base 7: mod_base = OTHER; note = 2'-deoxy-2'-fluorouridine-3'-phosphate
  modified_base 8: mod_base = OTHER; note = 2'-O-methyluridine-3'-phosphate
  modified_base 9: mod_base = OTHER; note = 2'-deoxy-2'-fluoroguanosine-3'-phosphate
  modified_base 10: mod_base = OTHER; note = 2'-deoxy-2'-fluorocytidine-3'-phosphate
  modified_base 11: mod_base = OTHER; note = 2'-deoxy-2'-fluorocytidine-3'-phosphate
  modified_base 12: mod_base = OTHER; note = 2'-O-methyluridine-3'-phosphate
  modified_base 13: mod_base = OTHER; note = 2'-O-methylcytidine-3'-phosphate
  modified_base 14: mod_base = OTHER; note = 2'-O-methylcytidine-3'-phosphate
  modified_base 15: mod_base = OTHER; note = 2'-O-methyluridine-3'-phosphate
  modified_base 16: mod_base = OTHER; note = 2'-O-methylguanosine-3'-phosphate
  modified_base 17: mod_base = OTHER; note = 2'-O-methyluridine-3'-phosphate
  modified_base 18: mod_base = OTHER; note = 2'-O-methylcytidine-3'-phosphate
  modified_base 19: mod_base = OTHER; note = 2'-O-methylcytidine-3'-phosphorothioate
  modified_base 20: mod_base = OTHER; note = 2'-O-methyladenosine-3'-phosphorothioate
  modified_base 21: mod_base = OTHER; note = 2'-O-methyladenosine
gcctgtttgcctcctgtccaa

SEQ ID NO: 10574 - RNA, 21 nt, synthetic construct
  source 1..21: mol_type = other RNA
  modified_base 1: mod_base = OTHER; note = 2'-O-methyladenosine-3'-phosphorothioate
  modified_base 2: mod_base = OTHER; note = 2'-O-methylguanosine-3'-phosphorothioate
  modified_base 3: mod_base = OTHER; note = 2'-O-methylcytidine-3'-phosphate
  modified_base 4: mod_base = OTHER; note = 2'-O-methyluridine-3'-phosphate
  modified_base 5: mod_base = OTHER; note = 2'-O-methylguanosine-3'-phosphate
  modified_base 6: mod_base = OTHER; note = 2'-O-docosanyl-cytidine-3'-phosphate
  modified_base 7: mod_base = OTHER; note = 2'-deoxy-2'-fluoroguanosine-3'-phosphate
  modified_base 8: mod_base = OTHER; note = 2'-O-methyladenosine-3'-phosphate
  modified_base 9: mod_base = OTHER; note = 2'-deoxy-2'-fluorouridine-3'-phosphate
  modified_base 10: mod_base = OTHER; note = 2'-deoxy-2'-fluoroguanosine-3'-phosphate
  modified_base 11: mod_base = OTHER; note = 2'-deoxy-2'-fluorocytidine-3'-phosphate
  modified_base 12: mod_base = OTHER; note = 2'-O-methyluridine-3'-phosphate
  modified_base 13: mod_base = OTHER; note = 2'-O-methylguanosine-3'-phosphate
  modified_base 14: mod_base = OTHER; note = 2'-O-methyladenosine-3'-phosphate
  modified_base 15: mod_base = OTHER; note = 2'-O-methylcytidine-3'-phosphate
  modified_base 16: mod_base = OTHER; note = 2'-O-methyladenosine-3'-phosphate
  modified_base 17: mod_base = OTHER; note = 2'-O-methylguanosine-3'-phosphate
  modified_base 18: mod_base = OTHER; note = 2'-O-methyluridine-3'-phosphate
  modified_base 19: mod_base = OTHER; note = 2'-O-methyladenosine-3'-phosphorothioate
  modified_base 20: mod_base = OTHER; note = 2'-O-methyluridine-3'-phosphorothioate
  modified_base 21: mod_base = OTHER; note = 2'-O-methyladenosine
agctgcgatgctgacagtata

SEQ ID NO: 10575 - RNA, 21 nt, synthetic construct
  source 1..21: mol_type = other RNA
  modified_base 1: mod_base = OTHER; note = 2'-O-methylguanosine-3'-phosphorothioate
  modified_base 2: mod_base = OTHER; note = 2'-O-methyluridine-3'-phosphorothioate
  modified_base 3: mod_base = OTHER; note = 2'-O-methylguanosine-3'-phosphate
  modified_base 4: mod_base = OTHER; note = 2'-O-methylcytidine-3'-phosphate
  modified_base 5: mod_base = OTHER; note = 2'-O-methyluridine-3'-phosphate
  modified_base 6: mod_base = OTHER; note = 2'-O-docosanyl-cytidine-3'-phosphate
  modified_base 7: mod_base = OTHER; note = 2'-deoxy-2'-fluorocytidine-3'-phosphate
  modified_base 8: mod_base = OTHER; note = 2'-O-methyluridine-3'-phosphate
  modified_base 9: mod_base = OTHER; note = 2'-deoxy-2'-fluoroadenosine-3'-phosphate
  modified_base 10: mod_base = OTHER; note = 2'-deoxy-2'-fluorocytidine-3'-phosphate
  modified_base 11: mod_base = OTHER; note = 2'-deoxy-2'-fluoroadenosine-3'-phosphate
  modified_base 12: mod_base = OTHER; note = 2'-O-methylguanosine-3'-phosphate
  modified_base 13: mod_base = OTHER; note = 2'-O-methylguanosine-3'-phosphate
  modified_base 14: mod_base = OTHER; note = 2'-O-methyladenosine-3'-phosphate
  modified_base 15: mod_base = OTHER; note = 2'-O-methyladenosine-3'-phosphate
  modified_base 16: mod_base = OTHER; note = 2'-O-methylguanosine-3'-phosphate
  modified_base 17: mod_base = OTHER; note = 2'-O-methyladenosine-3'-phosphate
  modified_base 18: mod_base = OTHER; note = 2'-O-methyladenosine-3'-phosphate
  modified_base 19: mod_base = OTHER; note = 2'-O-methyladenosine-3'-phosphorothioate
  modified_base 20: mod_base = OTHER; note = 2'-O-methyladenosine-3'-phosphorothioate
  modified_base 21: mod_base = OTHER; note = 2'-O-methyladenosine
gtgctcctacaggaagaaaaa

SEQ ID NO: 10576 - RNA, 21 nt, synthetic construct
  source 1..21: mol_type = other RNA
  modified_base 1: mod_base = OTHER; note = 2'-O-methyluridine-3'-phosphorothioate
  modified_base 2: mod_base = OTHER; note = 2'-O-methylguanosine-3'-phosphorothioate
  modified_base 3: mod_base = OTHER; note = 2'-O-methylcytidine-3'-phosphate
  modified_base 4: mod_base = OTHER; note = 2'-O-methyluridine-3'-phosphate
  modified_base 5: mod_base = OTHER; note = 2'-O-methylcytidine-3'-phosphate
  modified_base 6: mod_base = OTHER; note = 2'-O-docosanyl-cytidine-3'-phosphate
  modified_base 7: mod_base = OTHER; note = 2'-deoxy-2'-fluorouridine-3'-phosphate
  modified_base 8: mod_base = OTHER; note = 2'-O-methyladenosine-3'-phosphate
  modified_base 9: mod_base = OTHER; note = 2'-deoxy-2'-fluorocytidine-3'-phosphate
  modified_base 10: mod_base = OTHER; note = 2'-deoxy-2'-fluoroadenosine-3'-phosphate
  modified_base 11: mod_base = OTHER; note = 2'-deoxy-2'-fluoroguanosine-3'-phosphate
  modified_base 12: mod_base = OTHER; note = 2'-O-methylguanosine-3'-phosphate
  modified_base 13: mod_base = OTHER; note = 2'-O-methyladenosine-3'-phosphate
  modified_base 14: mod_base = OTHER; note = 2'-O-methyladenosine-3'-phosphate
  modified_base 15: mod_base = OTHER; note = 2'-O-methylguanosine-3'-phosphate
  modified_base 16: mod_base = OTHER; note = 2'-O-methyladenosine-3'-phosphate
  modified_base 17: mod_base = OTHER; note = 2'-O-methyladenosine-3'-phosphate
  modified_base 18: mod_base = OTHER; note = 2'-O-methyladenosine-3'-phosphate
  modified_base 19: mod_base = OTHER; note = 2'-O-methyladenosine-3'-phosphorothioate
  modified_base 20: mod_base = OTHER; note = 2'-O-methyladenosine-3'-phosphorothioate
  modified_base 21: mod_base = OTHER; note = 2'-O-methyladenosine
tgctcctacaggaagaaaaaa

SEQ ID NO: 10577 - RNA, 21 nt, synthetic construct
  source 1..21: mol_type = other RNA
  modified_base 1: mod_base = OTHER; note = 2'-O-methylcytidine-3'-phosphorothioate
  modified_base 2: mod_base = OTHER; note = 2'-O-methyluridine-3'-phosphorothioate
  modified_base 3: mod_base = OTHER; note = 2'-O-methylcytidine-3'-phosphate
  modified_base 4: mod_base = OTHER; note = 2'-O-methylcytidine-3'-phosphate
  modified_base 5: mod_base = OTHER; note = 2'-O-methyluridine-3'-phosphate
  modified_base 6: mod_base = OTHER; note = 2'-O-docosanyl-adenosine-3'-phosphate
  modified_base 7: mod_base = OTHER; note = 2'-deoxy-2'-fluorocytidine-3'-phosphate
  modified_base 8: mod_base = OTHER; note = 2'-O-methyladenosine-3'-phosphate
  modified_base 9: mod_base = OTHER; note = 2'-deoxy-2'-fluoroguanosine-3'-phosphate
  modified_base 10: mod_base = OTHER; note = 2'-deoxy-2'-fluoroguanosine-3'-phosphate
  modified_base 11: mod_base = OTHER; note = 2'-deoxy-2'-fluoroadenosine-3'-phosphate
  modified_base 12: mod_base = OTHER; note = 2'-O-methyladenosine-3'-phosphate
  modified_base 13: mod_base = OTHER; note = 2'-O-methylguanosine-3'-phosphate
  modified_base 14: mod_base = OTHER; note = 2'-O-methyladenosine-3'-phosphate
  modified_base 15: mod_base = OTHER; note = 2'-O-methyladenosine-3'-phosphate
  modified_base 16: mod_base = OTHER; note = 2'-O-methyladenosine-3'-phosphate
  modified_base 17: mod_base = OTHER; note = 2'-O-methyladenosine-3'-phosphate
  modified_base 18: mod_base = OTHER; note = 2'-O-methyladenosine-3'-phosphate
  modified_base 19: mod_base = OTHER; note = 2'-O-methylguanosine-3'-phosphorothioate
  modified_base 20: mod_base = OTHER; note = 2'-O-methyladenosine-3'-phosphorothioate
  modified_base 21: mod_base = OTHER; note = 2'-O-methyladenosine
ctcctacaggaagaaaaagaa

SEQ ID NO: 10578 - RNA, 21 nt, synthetic construct
  source 1..21: mol_type = other RNA
  modified_base 1: mod_base = OTHER; note = 2'-O-methylcytidine-3'-phosphorothioate
  modified_base 2: mod_base = OTHER; note = 2'-O-methyluridine-3'-phosphorothioate
  modified_base 3: mod_base = OTHER; note = 2'-O-methyladenosine-3'-phosphate
  modified_base 4: mod_base = OTHER; note = 2'-O-methylcytidine-3'-phosphate
  modified_base 5: mod_base = OTHER; note = 2'-O-methyladenosine-3'-phosphate
  modified_base 6: mod_base = OTHER; note = 2'-O-docosanyl-guanosine-3'-phosphate
  modified_base 7: mod_base = OTHER; note = 2'-deoxy-2'-fluoroguanosine-3'-phosphate
  modified_base 8: mod_base = OTHER; note = 2'-O-methyladenosine-3'-phosphate
  modified_base 9: mod_base = OTHER; note = 2'-deoxy-2'-fluoroadenosine-3'-phosphate
  modified_base 10: mod_base = OTHER; note = 2'-deoxy-2'-fluoroguanosine-3'-phosphate
  modified_base 11: mod_base = OTHER; note = 2'-deoxy-2'-fluoroadenosine-3'-phosphate
  modified_base 12: mod_base = OTHER; note = 2'-O-methyladenosine-3'-phosphate
  modified_base 13: mod_base = OTHER; note = 2'-O-methyladenosine-3'-phosphate
  modified_base 14: mod_base = OTHER; note = 2'-O-methyladenosine-3'-phosphate
  modified_base 15: mod_base = OTHER; note = 2'-O-methyladenosine-3'-phosphate
  modified_base 16: mod_base = OTHER; note = 2'-O-methylguanosine-3'-phosphate
  modified_base 17: mod_base = OTHER; note = 2'-O-methyladenosine-3'-phosphate
  modified_base 18: mod_base = OTHER; note = 2'-O-methylguanosine-3'-phosphate
  modified_base 19: mod_base = OTHER; note = 2'-O-methyladenosine-3'-phosphorothioate
  modified_base 20: mod_base = OTHER; note = 2'-O-methylcytidine-3'-phosphorothioate
  modified_base 21: mod_base = OTHER; note = 2'-O-methyladenosine
ctacaggaagaaaaagagaca

SEQ ID NO: 10579 - RNA, 21 nt, synthetic construct
  source 1..21: mol_type = other RNA
  modified_base 1: mod_base = OTHER; note = 2'-O-methyladenosine-3'-phosphorothioate
  modified_base 2: mod_base = OTHER; note = 2'-O-methyladenosine-3'-phosphorothioate
  modified_base 3: mod_base = OTHER; note = 2'-O-methyluridine-3'-phosphate
  modified_base 4: mod_base = OTHER; note = 2'-O-methylcytidine-3'-phosphate
  modified_base 5: mod_base = OTHER; note = 2'-O-methyluridine-3'-phosphate
  modified_base 6: mod_base = OTHER; note = 2'-O-docosanyl-guanosine-3'-phosphate
  modified_base 7: mod_base = OTHER; note = 2'-deoxy-2'-fluoroguanosine-3'-phosphate
  modified_base 8: mod_base = OTHER; note = 2'-O-methyluridine-3'-phosphate
  modified_base 9: mod_base = OTHER; note = 2'-deoxy-2'-fluoroadenosine-3'-phosphate
  modified_base 10: mod_base = OTHER; note = 2'-deoxy-2'-fluoroadenosine-3'-phosphate
  modified_base 11: mod_base = OTHER; note = 2'-deoxy-2'-fluoroadenosine-3'-phosphate
  modified_base 12: mod_base = OTHER; note = 2'-O-methyluridine-3'-phosphate
  modified_base 13: mod_base = OTHER; note = 2'-O-methylguanosine-3'-phosphate
  modified_base 14: mod_base = OTHER; note = 2'-O-methylcytidine-3'-phosphate
  modified_base 15: mod_base = OTHER; note = 2'-O-methyluridine-3'-phosphate
  modified_base 16: mod_base = OTHER; note = 2'-O-methylguanosine-3'-phosphate
  modified_base 17: mod_base = OTHER; note = 2'-O-methylguanosine-3'-phosphate
  modified_base 18: mod_base = OTHER; note = 2'-O-methyladenosine-3'-phosphate
  modified_base 19: mod_base = OTHER; note = 2'-O-methyladenosine-3'-phosphorothioate
  modified_base 20: mod_base = OTHER; note = 2'-O-methyladenosine-3'-phosphorothioate
  modified_base 21: mod_base = OTHER; note = 2'-O-methyladenosine
aatctggtaaatgctggaaaa

SEQ ID NO: 10580 - RNA, 21 nt, synthetic construct
  source 1..21: mol_type = other RNA
  modified_base 1: mod_base = OTHER; note = 2'-O-methylcytidine-3'-phosphorothioate
  modified_base 2: mod_base = OTHER; note = 2'-O-methyladenosine-3'-phosphorothioate
  modified_base 3: mod_base = OTHER; note = 2'-O-methylcytidine-3'-phosphate
  modified_base 4: mod_base = OTHER; note = 2'-O-methyluridine-3'-phosphate
  modified_base 5: mod_base = OTHER; note = 2'-O-methylcytidine-3'-phosphate
  modified_base 6: mod_base = OTHER; note = 2'-O-docosanyl-uridine-3'-phosphate
  modified_base 7: mod_base = OTHER; note = 2'-deoxy-2'-fluorocytidine-3'-phosphate
  modified_base 8: mod_base = OTHER; note = 2'-O-methyluridine-3'-phosphate
  modified_base 9: mod_base = OTHER; note = 2'-deoxy-2'-fluoroguanosine-3'-phosphate
  modified_base 10: mod_base = OTHER; note = 2'-deoxy-2'-fluoroadenosine-3'-phosphate
  modified_base 11: mod_base = OTHER; note = 2'-deoxy-2'-fluoroguanosine-3'-phosphate
  modified_base 12: mod_base = OTHER; note = 2'-O-methyluridine-3'-phosphate
  modified_base 13: mod_base = OTHER; note = 2'-O-methylguanosine-3'-phosphate
  modified_base 14: mod_base = OTHER; note = 2'-O-methylcytidine-3'-phosphate
  modified_base 15: mod_base = OTHER; note = 2'-O-methyladenosine-3'-phosphate
  modified_base 16: mod_base = OTHER; note = 2'-O-methyladenosine-3'-phosphate
  modified_base 17: mod_base = OTHER; note = 2'-O-methyluridine-3'-phosphate
  modified_base 18: mod_base = OTHER; note = 2'-O-methylcytidine-3'-phosphate
  modified_base 19: mod_base = OTHER; note = 2'-O-methyluridine-3'-phosphorothioate
  modified_base 20: mod_base = OTHER; note = 2'-O-methylguanosine-3'-phosphorothioate
  modified_base 21: mod_base = OTHER; note = 2'-O-methyladenosine
cactctctgagtgcaatctga

SEQ ID NO: 10581 - RNA, 21 nt, synthetic construct
  source 1..21: mol_type = other RNA
  modified_base 1: mod_base = OTHER; note = 2'-O-methylcytidine-3'-phosphorothioate
  modified_base 2: mod_base = OTHER; note = 2'-O-methyluridine-3'-phosphorothioate
  modified_base 3: mod_base = OTHER; note = 2'-O-methylcytidine-3'-phosphate
  modified_base 4: mod_base = OTHER; note = 2'-O-methyluridine-3'-phosphate
  modified_base 5: mod_base = OTHER; note = 2'-O-methylguanosine-3'-phosphate
  modified_base 6: mod_base = OTHER; note = 2'-O-docosanyl-adenosine-3'-phosphate
  modified_base 7: mod_base = OTHER; note = 2'-deoxy-2'-fluoroguanosine-3'-phosphate
  modified_base 8: mod_base = OTHER; note = 2'-O-methyluridine-3'-phosphate
  modified_base 9: mod_base = OTHER; note = 2'-deoxy-2'-fluoroguanosine-3'-phosphate
  modified_base 10: mod_base = OTHER; note = 2'-deoxy-2'-fluorocytidine-3'-phosphate
  modified_base 11: mod_base = OTHER; note = 2'-deoxy-2'-fluoroadenosine-3'-phosphate
  modified_base 12: mod_base = OTHER; note = 2'-O-methyladenosine-3'-phosphate
  modified_base 13: mod_base = OTHER; note = 2'-O-methyluridine-3'-phosphate
  modified_base 14: mod_base = OTHER; note = 2'-O-methylcytidine-3'-phosphate
  modified_base 15: mod_base = OTHER; note = 2'-O-methyluridine-3'-phosphate
  modified_base 16: mod_base = OTHER; note = 2'-O-methylguanosine-3'-phosphate
  modified_base 17: mod_base = OTHER; note = 2'-O-methylguanosine-3'-phosphate
  modified_base 18: mod_base = OTHER; note = 2'-O-methyluridine-3'-phosphate
  modified_base 19: mod_base = OTHER; note = 2'-O-methyladenosine-3'-phosphorothioate
  modified_base 20: mod_base = OTHER; note = 2'-O-methyladenosine-3'-phosphorothioate
  modified_base 21: mod_base = OTHER; note = 2'-O-methyladenosine
ctctgagtgcaatctggtaaa

SEQ ID NO: 10582 - RNA, 21 nt, synthetic construct
  source 1..21: mol_type = other RNA
  modified_base 1: mod_base = OTHER; note = 2'-O-methyluridine-3'-phosphorothioate
  modified_base 2: mod_base = OTHER; note = 2'-O-methylguanosine-3'-phosphorothioate
  modified_base 3: mod_base = OTHER; note = 2'-O-methyladenosine-3'-phosphate
  modified_base 4: mod_base = OTHER; note = 2'-O-methylguanosine-3'-phosphate
  modified_base 5: mod_base = OTHER; note = 2'-O-methyluridine-3'-phosphate
  modified_base 6: mod_base = OTHER; note = 2'-O-docosanyl-guanosine-3'-phosphate
  modified_base 7: mod_base = OTHER; note = 2'-deoxy-2'-fluorocytidine-3'-phosphate
  modified_base 8: mod_base = OTHER; note = 2'-O-methyladenosine-3'-phosphate
  modified_base 9: mod_base = OTHER; note = 2'-deoxy-2'-fluoroadenosine-3'-phosphate
  modified_base 10: mod_base = OTHER; note = 2'-deoxy-2'-fluorouridine-3'-phosphate
  modified_base 11: mod_base = OTHER; note = 2'-deoxy-2'-fluorocytidine-3'-phosphate
  modified_base 12: mod_base = OTHER; note = 2'-O-methyluridine-3'-phosphate
  modified_base 13: mod_base = OTHER; note = 2'-O-methylguanosine-3'-phosphate
  modified_base 14: mod_base = OTHER; note = 2'-O-methylguanosine-3'-phosphate
  modified_base 15: mod_base = OTHER; note = 2'-O-methyluridine-3'-phosphate
  modified_base 16: mod_base = OTHER; note = 2'-O-methyladenosine-3'-phosphate
  modified_base 17: mod_base = OTHER; note = 2'-O-methyladenosine-3'-phosphate
  modified_base 18: mod_base = OTHER; note = 2'-O-methyladenosine-3'-phosphate
  modified_base 19: mod_base = OTHER; note = 2'-O-methyluridine-3'-phosphorothioate
  modified_base 20: mod_base = OTHER; note = 2'-O-methylguanosine-3'-phosphorothioate
  modified_base 21: mod_base = OTHER; note = 2'-O-methyladenosine
tgagtgcaatctggtaaatga

SEQ ID NO: 10583 - RNA, 21 nt, synthetic construct
  source 1..21: mol_type = other RNA
  modified_base 1: mod_base = OTHER; note = 2'-O-methylcytidine-3'-phosphorothioate
  modified_base 2: mod_base = OTHER; note = 2'-O-methyluridine-3'-phosphorothioate
  modified_base 3: mod_base = OTHER; note = 2'-O-methylguanosine-3'-phosphate
  modified_base 4: mod_base = OTHER; note = 2'-O-methylguanosine-3'-phosphate
  modified_base 5: mod_base = OTHER; note = 2'-O-methyluridine-3'-phosphate
  modified_base 6: mod_base = OTHER; note = 2'-O-docosanyl-adenosine-3'-phosphate
  modified_base 7: mod_base = OTHER; note = 2'-deoxy-2'-fluoroadenosine-3'-phosphate
  modified_base 8: mod_base = OTHER; note = 2'-O-methyladenosine-3'-phosphate
  modified_base 9: mod_base = OTHER; note = 2'-deoxy-2'-fluorouridine-3'-phosphate
  modified_base 10: mod_base = OTHER; note = 2'-deoxy-2'-fluoroguanosine-3'-phosphate
  modified_base 11: mod_base = OTHER; note = 2'-deoxy-2'-fluorocytidine-3'-phosphate
  modified_base 12: mod_base = OTHER; note = 2'-O-methyluridine-3'-phosphate
  modified_base 13: mod_base = OTHER; note = 2'-O-methylguanosine-3'-phosphate
  modified_base 14: mod_base = OTHER; note = 2'-O-methylguanosine-3'-phosphate
  modified_base 15: mod_base = OTHER; note = 2'-O-methyladenosine-3'-phosphate
  modified_base 16: mod_base = OTHER; note = 2'-O-methyladenosine-3'-phosphate
  modified_base 17: mod_base = OTHER; note = 2'-O-methyladenosine-3'-phosphate
  modified_base 18: mod_base = OTHER; note = 2'-O-methyladenosine-3'-phosphate
  modified_base 19: mod_base = OTHER; note = 2'-O-methyladenosine-3'-phosphorothioate
  modified_base 20: mod_base = OTHER; note = 2'-O-methylcytidine-3'-phosphorothioate
  modified_base 21: mod_base = OTHER; note = 2'-O-methyladenosine
ctggtaaatgctggaaaaaca

SEQ ID NO: 10584 - RNA, 21 nt, synthetic construct
  source 1..21: mol_type = other RNA
  modified_base 1: mod_base = OTHER; note = 2'-O-methylguanosine-3'-phosphorothioate
  modified_base 2: mod_base = OTHER; note = 2'-O-methylcytidine-3'-phosphorothioate
  modified_base 3: mod_base = OTHER; note = 2'-O-methyluridine-3'-phosphate
  modified_base 4: mod_base = OTHER; note = 2'-O-methylguanosine-3'-phosphate
  modified_base 5: mod_base = OTHER; note = 2'-O-methylguanosine-3'-phosphate
  modified_base 6: mod_base = OTHER; note = 2'-O-docosanyl-adenosine-3'-phosphate
  modified_base 7: mod_base = OTHER; note = 2'-deoxy-2'-fluoroadenosine-3'-phosphate
  modified_base 8: mod_base = OTHER; note = 2'-O-methyladenosine-3'-phosphate
  modified_base 9: mod_base = OTHER; note = 2'-deoxy-2'-fluoroadenosine-3'-phosphate
  modified_base 10: mod_base = OTHER; note = 2'-deoxy-2'-fluoroadenosine-3'-phosphate
  modified_base 11: mod_base = OTHER; note = 2'-deoxy-2'-fluorocytidine-3'-phosphate
  modified_base 12: mod_base = OTHER; note = 2'-O-methyluridine-3'-phosphate
  modified_base 13: mod_base = OTHER; note = 2'-O-methylcytidine-3'-phosphate
  modified_base 14: mod_base = OTHER; note = 2'-O-methyluridine-3'-phosphate
  modified_base 15: mod_base = OTHER; note = 2'-O-methylguanosine-3'-phosphate
  modified_base 16: mod_base = OTHER; note = 2'-O-methyladenosine-3'-phosphate
  modified_base 17: mod_base = OTHER; note = 2'-O-methyladenosine-3'-phosphate
  modified_base 18: mod_base = OTHER; note = 2'-O-methyladenosine-3'-phosphate
  modified_base 19: mod_base = OTHER; note = 2'-O-methylguanosine-3'-phosphorothioate
  modified_base 20: mod_base = OTHER; note = 2'-O-methyladenosine-3'-phosphorothioate
  modified_base 21: mod_base = OTHER; note = 2'-O-methyladenosine
gctggaaaaactctgaaagaa

SEQ ID NO: 10585 - RNA, 21 nt, synthetic construct
  source 1..21: mol_type = other RNA
  modified_base 1: mod_base = OTHER; note = 2'-O-methyluridine-3'-phosphorothioate
  modified_base 2: mod_base = OTHER; note = 2'-O-methylguanosine-3'-phosphorothioate
  modified_base 3: mod_base = OTHER; note = 2'-O-methylguanosine-3'-phosphate
  modified_base 4: mod_base = OTHER; note = 2'-O-methyladenosine-3'-phosphate
  modified_base 5: mod_base = OTHER; note = 2'-O-methyladenosine-3'-phosphate
  modified_base 6: mod_base = OTHER; note = 2'-O-docosanyl-adenosine-3'-phosphate
  modified_base 7: mod_base = OTHER; note = 2'-deoxy-2'-fluoroadenosine-3'-phosphate
  modified_base 8: mod_base = OTHER; note = 2'-O-methyladenosine-3'-phosphate
  modified_base 9: mod_base = OTHER; note = 2'-deoxy-2'-fluorocytidine-3'-phosphate
  modified_base 10: mod_base = OTHER; note = 2'-deoxy-2'-fluorouridine-3'-phosphate
  modified_base 11: mod_base = OTHER; note = 2'-deoxy-2'-fluorocytidine-3'-phosphate
  modified_base 12: mod_base = OTHER; note = 2'-O-methyluridine-3'-phosphate
  modified_base 13: mod_base = OTHER; note = 2'-O-methylguanosine-3'-phosphate
  modified_base 14: mod_base = OTHER; note = 2'-O-methyladenosine-3'-phosphate
  modified_base 15: mod_base = OTHER; note = 2'-O-methyladenosine-3'-phosphate
  modified_base 16: mod_base = OTHER; note = 2'-O-methyladenosine-3'-phosphate
  modified_base 17: mod_base = OTHER; note = 2'-O-methylguanosine-3'-phosphate
  modified_base 18: mod_base = OTHER; note = 2'-O-methyladenosine-3'-phosphate
  modified_base 19: mod_base = OTHER; note = 2'-O-methyluridine-3'-phosphorothioate
  modified_base 20: mod_base = OTHER; note = 2'-O-methylcytidine-3'-phosphorothioate
  modified_base 21: mod_base = OTHER; note = 2'-O-methyladenosine
tggaaaaactctgaaagatca

SEQ ID NO: 10586 - RNA, 21 nt, synthetic construct
  source 1..21: mol_type = other RNA
  modified_base 1: mod_base = OTHER; note = 2'-O-methylguanosine-3'-phosphorothioate
  modified_base 2: mod_base = OTHER; note = 2'-O-methylguanosine-3'-phosphorothioate
  modified_base 3: mod_base = OTHER; note = 2'-O-methyladenosine-3'-phosphate
  modified_base 4: mod_base = OTHER; note = 2'-O-methyladenosine-3'-phosphate
  modified_base 5: mod_base = OTHER; note = 2'-O-methyladenosine-3'-phosphate
  modified_base 6: mod_base = OTHER; note = 2'-O-docosanyl-adenosine-3'-phosphate
  modified_base 7: mod_base = OTHER; note = 2'-deoxy-2'-fluoroadenosine-3'-phosphate
  modified_base 8: mod_base = OTHER; note = 2'-O-methylcytidine-3'-phosphate
  modified_base 9: mod_base = OTHER; note = 2'-deoxy-2'-fluorouridine-3'-phosphate
  modified_base 10: mod_base = OTHER; note = 2'-deoxy-2'-fluorocytidine-3'-phosphate
  modified_base 11: mod_base = OTHER; note = 2'-deoxy-2'-fluorouridine-3'-phosphate
  modified_base 12: mod_base = OTHER; note = 2'-O-methylguanosine-3'-phosphate
  modified_base 13: mod_base = OTHER; note = 2'-O-methyladenosine-3'-phosphate
  modified_base 14: mod_base = OTHER; note = 2'-O-methyladenosine-3'-phosphate
  modified_base 15: mod_base = OTHER; note = 2'-O-methyladenosine-3'-phosphate
  modified_base 16: mod_base = OTHER; note = 2'-O-methylguanosine-3'-phosphate
  modified_base 17: mod_base = OTHER; note = 2'-O-methyladenosine-3'-phosphate
  modified_base 18: mod_base = OTHER; note = 2'-O-methyluridine-3'-phosphate
  modified_base 19: mod_base = OTHER; note = 2'-O-methylcytidine-3'-phosphorothioate
  modified_base 20: mod_base = OTHER; note = 2'-O-methyluridine-3'-phosphorothioate
  modified_base 21: mod_base = OTHER; note = 2'-O-methyladenosine
ggaaaaactctgaaagatcta

SEQ ID NO: 10587 - RNA, 21 nt, synthetic construct
  source 1..21: mol_type = other RNA
  modified_base 1: mod_base = OTHER; note = 2'-O-methylguanosine-3'-phosphorothioate
  modified_base 2: mod_base = OTHER; note = 2'-O-methyladenosine-3'-phosphorothioate
  modified_base 3: mod_base = OTHER; note = 2'-O-methyladenosine-3'-phosphate
  modified_base 4: mod_base = OTHER; note = 2'-O-methyladenosine-3'-phosphate
  modified_base 5: mod_base = OTHER; note = 2'-O-methyladenosine-3'-phosphate
  modified_base 6: mod_base = OTHER; note = 2'-O-docosanyl-adenosine-3'-phosphate
  modified_base 7: mod_base = OTHER; note = 2'-deoxy-2'-fluorocytidine-3'-phosphate
  modified_base 8: mod_base = OTHER; note = 2'-O-methyluridine-3'-phosphate
  modified_base 9: mod_base = OTHER; note = 2'-deoxy-2'-fluorocytidine-3'-phosphate
  modified_base 10: mod_base = OTHER; note = 2'-deoxy-2'-fluorouridine-3'-phosphate
  modified_base 11: mod_base = OTHER; note = 2'-deoxy-2'-fluoroguanosine-3'-phosphate
  modified_base 12: mod_base = OTHER; note = 2'-O-methyladenosine-3'-phosphate
  modified_base 13: mod_base = OTHER; note = 2'-O-methyladenosine-3'-phosphate
  modified_base 14: mod_base = OTHER; note = 2'-O-methyladenosine-3'-phosphate
  modified_base 15: mod_base = OTHER; note = 2'-O-methylguanosine-3'-phosphate
  modified_base 16: mod_base = OTHER; note = 2'-O-methyladenosine-3'-phosphate
  modified_base 17: mod_base = OTHER; note = 2'-O-methyluridine-3'-phosphate
  modified_base 18: mod_base = OTHER; note = 2'-O-methylcytidine-3'-phosphate
  modified_base 19: mod_base = OTHER; note = 2'-O-methyluridine-3'-phosphorothioate
  modified_base 20: mod_base = OTHER; note = 2'-O-methylguanosine-3'-phosphorothioate
  modified_base 21: mod_base = OTHER; note = 2'-O-methyladenosine
gaaaaactctgaaagatctga

SEQ ID NO: 10588 - RNA, 21 nt, synthetic construct
  source 1..21: mol_type = other RNA
  modified_base 1: mod_base = OTHER; note = 2'-O-methyladenosine-3'-phosphorothioate
  modified_base 2: mod_base = OTHER; note = 2'-O-methylcytidine-3'-phosphorothioate
  modified_base 3: mod_base = OTHER; note = 2'-O-methyluridine-3'-phosphate
  modified_base 4: mod_base = OTHER; note = 2'-O-methylcytidine-3'-phosphate
  modified_base 5: mod_base = OTHER; note = 2'-O-methyluridine-3'-phosphate
  modified_base 6: mod_base = OTHER; note = 2'-O-docosanyl-guanosine-3'-phosphate
  modified_base 7: mod_base = OTHER; note = 2'-deoxy-2'-fluoroadenosine-3'-phosphate
  modified_base 8: mod_base = OTHER; note = 2'-O-methyladenosine-3'-phosphate
  modified_base 9: mod_base = OTHER; note = 2'-deoxy-2'-fluoroadenosine-3'-phosphate
  modified_base 10: mod_base = OTHER; note = 2'-deoxy-2'-fluoroguanosine-3'-phosphate
  modified_base 11: mod_base = OTHER; note = 2'-deoxy-2'-fluoroadenosine-3'-phosphate
  modified_base 12: mod_base = OTHER; note = 2'-O-methyluridine-3'-phosphate
  modified_base 13: mod_base = OTHER; note = 2'-O-methylcytidine-3'-phosphate
  modified_base 14: mod_base = OTHER; note = 2'-O-methyluridine-3'-phosphate
  modified_base 15: mod_base = OTHER; note = 2'-O-methylguanosine-3'-phosphate
  modified_base 16: mod_base = OTHER; note = 2'-O-methyladenosine-3'-phosphate
  modified_base 17: mod_base = OTHER; note = 2'-O-methyluridine-3'-phosphate
  modified_base 18: mod_base = OTHER; note = 2'-O-methyluridine-3'-phosphate
  modified_base 19: mod_base = OTHER; note = 2'-O-methyluridine-3'-phosphorothioate
  modified_base 20: mod_base = OTHER; note = 2'-O-methyladenosine-3'-phosphorothioate
  modified_base 21: mod_base = OTHER; note = 2'-O-methyladenosine
actctgaaagatctgatttaa

SEQ ID NO: 10589 - RNA, 21 nt, synthetic construct
  source 1..21: mol_type = other RNA
  modified_base 1: mod_base = OTHER; note = 2'-O-methyladenosine-3'-phosphorothioate
  modified_base 2: mod_base = OTHER; note = 2'-O-methyladenosine-3'-phosphorothioate
  modified_base 3: mod_base = OTHER; note = 2'-O-methyladenosine-3'-phosphate
  modified_base 4: mod_base = OTHER; note = 2'-O-methyladenosine-3'-phosphate
  modified_base 5: mod_base = OTHER; note = 2'-O-methyladenosine-3'-phosphate
  modified_base 6: mod_base = OTHER; note = 2'-O-docosanyl-cytidine-3'-phosphate
  modified_base 7: mod_base = OTHER; note = 2'-deoxy-2'-fluorouridine-3'-phosphate
  modified_base 8: mod_base = OTHER; note = 2'-O-methylcytidine-3'-phosphate
  modified_base 9: mod_base = OTHER; note = 2'-deoxy-2'-fluorouridine-3'-phosphate
  modified_base 10: mod_base = OTHER; note = 2'-deoxy-2'-fluoroguanosine-3'-phosphate
  modified_base 11: mod_base = OTHER; note = 2'-deoxy-2'-fluoroadenosine-3'-phosphate
  modified_base 12: mod_base = OTHER; note = 2'-O-methyladenosine-3'-phosphate
  modified_base 13: mod_base = OTHER; note = 2'-O-methyladenosine-3'-phosphate
  modified_base 14: mod_base = OTHER; note = 2'-O-methylguanosine-3'-phosphate
  modified_base 15: mod_base = OTHER; note = 2'-O-methyladenosine-3'-phosphate
  modified_base 16: mod_base = OTHER; note = 2'-O-methyluridine-3'-phosphate
  modified_base 17: mod_base = OTHER; note = 2'-O-methylcytidine-3'-phosphate
  modified_base 18: mod_base = OTHER; note = 2'-O-methyluridine-3'-phosphate
  modified_base 19: mod_base = OTHER; note = 2'-O-methylguanosine-3'-phosphorothioate
  modified_base 20: mod_base = OTHER; note = 2'-O-methyladenosine-3'-phosphorothioate
  modified_base 21: mod_base = OTHER; note = 2'-O-methyladenosine
aaaaactctgaaagatctgaa

SEQ ID NO: 10590 - RNA, 21 nt, synthetic construct
  source 1..21: mol_type = other RNA
  modified_base 1: mod_base = OTHER; note = 2'-O-methyladenosine-3'-phosphorothioate
  modified_base 2: mod_base = OTHER; note = 2'-O-methyladenosine-3'-phosphorothioate
  modified_base 3: mod_base = OTHER; note = 2'-O-methyladenosine-3'-phosphate
  modified_base 4: mod_base = OTHER; note = 2'-O-methyladenosine-3'-phosphate
  modified_base 5: mod_base = OTHER; note = 2'-O-methylcytidine-3'-phosphate
  modified_base 6: mod_base = OTHER; note = 2'-O-docosanyl-uridine-3'-phosphate
  modified_base 7: mod_base = OTHER; note = 2'-deoxy-2'-fluorocytidine-3'-phosphate
  modified_base 8: mod_base = OTHER; note = 2'-O-methyluridine-3'-phosphate
  modified_base 9: mod_base = OTHER; note = 2'-deoxy-2'-fluoroguanosine-3'-phosphate
  modified_base 10: mod_base = OTHER; note = 2'-deoxy-2'-fluoroadenosine-3'-phosphate
  modified_base 11: mod_base = OTHER; note = 2'-deoxy-2'-fluoroadenosine-3'-phosphate
  modified_base 12: mod_base = OTHER; note = 2'-O-methyladenosine-3'-phosphate
  modified_base 13: mod_base = OTHER; note = 2'-O-methylguanosine-3'-phosphate
  modified_base 14: mod_base = OTHER; note = 2'-O-methyladenosine-3'-phosphate
  modified_base 15: mod_base = OTHER; note = 2'-O-methyluridine-3'-phosphate
  modified_base 16: mod_base = OTHER; note = 2'-O-methylcytidine-3'-phosphate
  modified_base 17: mod_base = OTHER; note = 2'-O-methyluridine-3'-phosphate
  modified_base 18: mod_base = OTHER; note = 2'-O-methylguanosine-3'-phosphate
  modified_base 19: mod_base = OTHER; note = 2'-O-methyladenosine-3'-phosphorothioate
  modified_base 20: mod_base = OTHER; note = 2'-O-methyluridine-3'-phosphorothioate
  modified_base 21: mod_base = OTHER; note = 2'-O-methyladenosine
aaaactctgaaagatctgata

SEQ ID NO: 10591 - RNA, 21 nt, synthetic construct
  source 1..21: mol_type = other RNA
  modified_base 1: mod_base = OTHER; note = 2'-O-methyladenosine-3'-phosphorothioate
  modified_base 2: mod_base = OTHER; note = 2'-O-methyladenosine-3'-phosphorothioate
  modified_base 3: mod_base = OTHER; note = 2'-O-methyladenosine-3'-phosphate
  modified_base 4: mod_base = OTHER; note = 2'-O-methylcytidine-3'-phosphate
  modified_base 5: mod_base = OTHER; note = 2'-O-methyluridine-3'-phosphate
  modified_base 6: mod_base = OTHER; note = 2'-O-docosanyl-cytidine-3'-phosphate
  modified_base 7: mod_base = OTHER; note = 2'-deoxy-2'-fluorouridine-3'-phosphate
  modified_base 8: mod_base = OTHER; note = 2'-O-methylguanosine-3'-phosphate
  modified_base 9: mod_base = OTHER; note = 2'-deoxy-2'-fluoroadenosine-3'-phosphate
  modified_base 10: mod_base = OTHER; note = 2'-deoxy-2'-fluoroadenosine-3'-phosphate
  modified_base 11: mod_base = OTHER; note = 2'-deoxy-2'-fluoroadenosine-3'-phosphate
  modified_base 12: mod_base = OTHER; note = 2'-O-methylguanosine-3'-phosphate
  modified_base 13: mod_base = OTHER; note = 2'-O-methyladenosine-3'-phosphate
  modified_base 14: mod_base = OTHER; note = 2'-O-methyluridine-3'-phosphate
  modified_base 15: mod_base = OTHER; note = 2'-O-methylcytidine-3'-phosphate
  modified_base 16: mod_base = OTHER; note = 2'-O-methyluridine-3'-phosphate
  modified_base 17: mod_base = OTHER; note = 2'-O-methylguanosine-3'-phosphate
  modified_base 18: mod_base = OTHER; note = 2'-O-methyladenosine-3'-phosphate
  modified_base 19: mod_base = OTHER; note = 2'-O-methyluridine-3'-phosphorothioate
  modified_base 20: mod_base = OTHER; note = 2'-O-methyluridine-3'-phosphorothioate
  modified_base 21: mod_base = OTHER; note = 2'-O-methyladenosine
aaactctgaaagatctgatta

SEQ ID NO: 10592 - RNA, 21 nt, synthetic construct
  source 1..21: mol_type = other RNA
  modified_base 1: mod_base = OTHER; note = 2'-O-methyladenosine-3'-phosphorothioate
  modified_base 2: mod_base = OTHER; note = 2'-O-methyladenosine-3'-phosphorothioate
  modified_base 3: mod_base = OTHER; note = 2'-O-methylcytidine-3'-phosphate
  modified_base 4: mod_base = OTHER; note = 2'-O-methyluridine-3'-phosphate
  modified_base 5: mod_base = OTHER; note = 2'-O-methylcytidine-3'-phosphate
  modified_base 6: mod_base = OTHER; note = 2'-O-docosanyl-uridine-3'-phosphate
  modified_base 7: mod_base = OTHER; note = 2'-deoxy-2'-fluoroguanosine-3'-phosphate
  modified_base 8: mod_base = OTHER; note = 2'-O-methyladenosine-3'-phosphate
  modified_base 9: mod_base = OTHER; note = 2'-deoxy-2'-fluoroadenosine-3'-phosphate
  modified_base 10: mod_base = OTHER; note = 2'-deoxy-2'-fluoroadenosine-3'-phosphate
  modified_base 11: mod_base = OTHER; note = 2'-deoxy-2'-fluoroguanosine-3'-phosphate
  modified_base 12: mod_base = OTHER; note = 2'-O-methyladenosine-3'-phosphate
  modified_base 13: mod_base = OTHER; note = 2'-O-methyluridine-3'-phosphate
  modified_base 14: mod_base = OTHER; note = 2'-O-methylcytidine-3'-phosphate
  modified_base 15: mod_base = OTHER; note = 2'-O-methyluridine-3'-phosphate
  modified_base 16: mod_base = OTHER; note = 2'-O-methylguanosine-3'-phosphate
  modified_base 17: mod_base = OTHER; note = 2'-O-methyladenosine-3'-phosphate
  modified_base 18: mod_base = OTHER; note = 2'-O-methyluridine-3'-phosphate
  modified_base 19: mod_base = OTHER; note = 2'-O-methyluridine-3'-phosphorothioate
  modified_base 20: mod_base = OTHER; note = 2'-O-methyluridine-3'-phosphorothioate
  modified_base 21: mod_base = OTHER; note = 2'-O-methyladenosine
aactctgaaagatctgattta

SEQ ID NO: 10593 - RNA, 21 nt, synthetic construct
  source 1..21: mol_type = other RNA
  modified_base 1: mod_base = OTHER; note = 2'-O-methylcytidine-3'-phosphorothioate
  modified_base 2: mod_base = OTHER; note = 2'-O-methyluridine-3'-phosphorothioate
  modified_base 3: mod_base = OTHER; note = 2'-O-methylcytidine-3'-phosphate
  modified_base 4: mod_base = OTHER; note = 2'-O-methyluridine-3'-phosphate
  modified_base 5: mod_base = OTHER; note = 2'-O-methylguanosine-3'-phosphate
  modified_base 6: mod_base = OTHER; note = 2'-O-docosanyl-adenosine-3'-phosphate
  modified_base 7: mod_base = OTHER; note = 2'-deoxy-2'-fluoroadenosine-3'-phosphate
  modified_base 8: mod_base = OTHER; note = 2'-O-methyladenosine-3'-phosphate
  modified_base 9: mod_base = OTHER; note = 2'-deoxy-2'-fluoroguanosine-3'-phosphate
  modified_base 10: mod_base = OTHER; note = 2'-deoxy-2'-fluoroadenosine-3'-phosphate
  modified_base 11: mod_base = OTHER; note = 2'-deoxy-2'-fluorouridine-3'-phosphate
  modified_base 12: mod_base = OTHER; note = 2'-O-methylcytidine-3'-phosphate
  modified_base 13: mod_base = OTHER; note = 2'-O-methyluridine-3'-phosphate
  modified_base 14: mod_base = OTHER; note = 2'-O-methylguanosine-3'-phosphate
  modified_base 15: mod_base = OTHER; note = 2'-O-methyladenosine-3'-phosphate
  modified_base 16: mod_base = OTHER; note = 2'-O-methyluridine-3'-phosphate
  modified_base 17: mod_base = OTHER; note = 2'-O-methyluridine-3'-phosphate
  modified_base 18: mod_base = OTHER; note = 2'-O-methyluridine-3'-phosphate
  modified_base 19: mod_base = OTHER; note = 2'-O-methyladenosine-3'-phosphorothioate
  modified_base 20: mod_base = OTHER; note = 2'-O-methyluridine-3'-phosphorothioate
  modified_base 21: mod_base = OTHER; note = 2'-O-methyladenosine
ctctgaaagatctgatttata

SEQ ID NO: 10594 - RNA, 21 nt, synthetic construct
  source 1..21: mol_type = other RNA
  modified_base 1: mod_base = OTHER; note = 2'-O-methyluridine-3'-phosphorothioate
  modified_base 2: mod_base = OTHER; note = 2'-O-methylcytidine-3'-phosphorothioate
  modified_base 3: mod_base = OTHER; note = 2'-O-methyluridine-3'-phosphate
  modified_base 4: mod_base = OTHER; note = 2'-O-methylguanosine-3'-phosphate
  modified_base 5: mod_base = OTHER; note = 2'-O-methyladenosine-3'-phosphate
  modified_base 6: mod_base = OTHER; note = 2'-O-docosanyl-adenosine-3'-phosphate
  modified_base 7: mod_base = OTHER; note = 2'-deoxy-2'-fluoroadenosine-3'-phosphate
  modified_base 8: mod_base = OTHER; note = 2'-O-methylguanosine-3'-phosphate
  modified_base 9: mod_base = OTHER; note = 2'-deoxy-2'-fluoroadenosine-3'-phosphate
  modified_base 10: mod_base = OTHER; note = 2'-deoxy-2'-fluorouridine-3'-phosphate
  modified_base 11: mod_base = OTHER; note = 2'-deoxy-2'-fluorocytidine-3'-phosphate
  modified_base 12: mod_base = OTHER; note = 2'-O-methyluridine-3'-phosphate
  modified_base 13: mod_base = OTHER; note = 2'-O-methylguanosine-3'-phosphate
  modified_base 14: mod_base = OTHER; note = 2'-O-methyladenosine-3'-phosphate
  modified_base 15: mod_base = OTHER; note = 2'-O-methyluridine-3'-phosphate
  modified_base 16: mod_base = OTHER; note = 2'-O-methyluridine-3'-phosphate
  modified_base 17: mod_base = OTHER; note = 2'-O-methyluridine-3'-phosphate
  modified_base 18: mod_base = OTHER; note = 2'-O-methyladenosine-3'-phosphate
  modified_base 19: mod_base = OTHER; note = 2'-O-methyluridine-3'-phosphorothioate
  modified_base 20: mod_base = OTHER; note = 2'-O-methylguanosine-3'-phosphorothioate
  modified_base 21: mod_base = OTHER; note = 2'-O-methyladenosine
tctgaaagatctgatttatga

SEQ ID NO: 10595 - RNA, 21 nt, synthetic construct
  source 1..21: mol_type = other RNA
  modified_base 1: mod_base = OTHER; note = 2'-O-methylcytidine-3'-phosphorothioate
  modified_base 2: mod_base = OTHER; note = 2'-O-methyluridine-3'-phosphorothioate
  modified_base 3: mod_base = OTHER; note = 2'-O-methylguanosine-3'-phosphate
  modified_base 4: mod_base = OTHER; note = 2'-O-methyladenosine-3'-phosphate
  modified_base 5: mod_base = OTHER; note = 2'-O-methyladenosine-3'-phosphate
  modified_base 6: mod_base = OTHER; note = 2'-O-docosanyl-adenosine-3'-phosphate
  modified_base 7: mod_base = OTHER; note = 2'-deoxy-2'-fluoroguanosine-3'-phosphate
  modified_base 8: mod_base = OTHER; note = 2'-O-methyladenosine-3'-phosphate
  modified_base 9: mod_base = OTHER; note = 2'-deoxy-2'-fluorouridine-3'-phosphate
  modified_base 10: mod_base = OTHER; note = 2'-deoxy-2'-fluorocytidine-3'-phosphate
  modified_base 11: mod_base = OTHER; note = 2'-deoxy-2'-fluorouridine-3'-phosphate
  modified_base 12: mod_base = OTHER; note = 2'-O-methylguanosine-3'-phosphate
  modified_base 13: mod_base = OTHER; note = 2'-O-methyladenosine-3'-phosphate
  modified_base 14: mod_base = OTHER; note = 2'-O-methyluridine-3'-phosphate
  modified_base 15: mod_base = OTHER; note = 2'-O-methyluridine-3'-phosphate
  modified_base 16: mod_base = OTHER; note = 2'-O-methyluridine-3'-phosphate
  modified_base 17: mod_base = OTHER; note = 2'-O-methyladenosine-3'-phosphate
  modified_base 18: mod_base = OTHER; note = 2'-O-methyluridine-3'-phosphate
  modified_base 19: mod_base = OTHER; note = 2'-O-methylguanosine-3'-phosphorothioate
  modified_base 20: mod_base = OTHER; note = 2'-O-methyladenosine-3'-phosphorothioate
  modified_base 21: mod_base = OTHER; note = 2'-O-methyladenosine
ctgaaagatctgatttatgaa

SEQ ID NO: 10596 - RNA, 21 nt, synthetic construct
  source 1..21: mol_type = other RNA
  modified_base 1: mod_base = OTHER; note = 2'-O-methyluridine-3'-phosphorothioate
  modified_base 2: mod_base = OTHER; note = 2'-O-methylguanosine-3'-phosphorothioate
  modified_base 3: mod_base = OTHER; note = 2'-O-methyladenosine-3'-phosphate
  modified_base 4: mod_base = OTHER; note = 2'-O-methyladenosine-3'-phosphate
  modified_base 5: mod_base = OTHER; note = 2'-O-methyladenosine-3'-phosphate
  modified_base 6: mod_base = OTHER; note = 2'-O-docosanyl-guanosine-3'-phosphate
  modified_base 7: mod_base = OTHER; note = 2'-deoxy-2'-fluoroadenosine-3'-phosphate
  modified_base 8: mod_base = OTHER; note = 2'-O-methyluridine-3'-phosphate
  modified_base 9: mod_base = OTHER; note = 2'-deoxy-2'-fluorocytidine-3'-phosphate
  modified_base 10: mod_base = OTHER; note = 2'-deoxy-2'-fluorouridine-3'-phosphate
  modified_base 11: mod_base = OTHER; note = 2'-deoxy-2'-fluoroguanosine-3'-phosphate
  modified_base 12: mod_base = OTHER; note = 2'-O-methyladenosine-3'-phosphate
  modified_base 13: mod_base = OTHER; note = 2'-O-methyluridine-3'-phosphate
  modified_base 14: mod_base = OTHER; note = 2'-O-methyluridine-3'-phosphate
  modified_base 15: mod_base = OTHER; note = 2'-O-methyluridine-3'-phosphate
  modified_base 16: mod_base = OTHER; note = 2'-O-methyladenosine-3'-phosphate
  modified_base 17: mod_base = OTHER; note = 2'-O-methyluridine-3'-phosphate
  modified_base 18: mod_base = OTHER; note = 2'-O-methylguanosine-3'-phosphate
  modified_base 19: mod_base = OTHER; note = 2'-O-methyladenosine-3'-phosphorothioate
  modified_base 20: mod_base = OTHER; note = 2'-O-methyluridine-3'-phosphorothioate
  modified_base 21: mod_base = OTHER; note = 2'-O-methyladenosine
tgaaagatctgatttatgata

SEQ ID NO: 10597 - RNA, 21 nt, synthetic construct
  source 1..21: mol_type = other RNA
  modified_base 1: mod_base = OTHER; note = 2'-O-methylguanosine-3'-phosphorothioate
  modified_base 2: mod_base = OTHER; note = 2'-O-methyladenosine-3'-phosphorothioate
  modified_base 3: mod_base = OTHER; note = 2'-O-methyladenosine-3'-phosphate
  modified_base 4: mod_base = OTHER; note = 2'-O-methyladenosine-3'-phosphate
  modified_base 5: mod_base = OTHER; note = 2'-O-methylguanosine-3'-phosphate
  modified_base 6: mod_base = OTHER; note = 2'-O-docosanyl-adenosine-3'-phosphate
  modified_base 7: mod_base = OTHER; note = 2'-deoxy-2'-fluorouridine-3'-phosphate
  modified_base 8: mod_base = OTHER; note = 2'-O-methylcytidine-3'-phosphate
  modified_base 9: mod_base = OTHER; note = 2'-deoxy-2'-fluorouridine-3'-phosphate
  modified_base 10: mod_base = OTHER; note = 2'-deoxy-2'-fluoroguanosine-3'-phosphate
  modified_base 11: mod_base = OTHER; note = 2'-deoxy-2'-fluoroadenosine-3'-phosphate
  modified_base 12: mod_base = OTHER; note = 2'-O-methyluridine-3'-phosphate
  modified_base 13: mod_base = OTHER; note = 2'-O-methyluridine-3'-phosphate
  modified_base 14: mod_base = OTHER; note = 2'-O-methyluridine-3'-phosphate
  modified_base 15: mod_base = OTHER; note = 2'-O-methyladenosine-3'-phosphate
  modified_base 16: mod_base = OTHER; note = 2'-O-methyluridine-3'-phosphate
  modified_base 17: mod_base = OTHER; note = 2'-O-methylguanosine-3'-phosphate
  modified_base 18: mod_base = OTHER; note = 2'-O-methyladenosine-3'-phosphate
  modified_base 19: mod_base = OTHER; note = 2'-O-methyluridine-3'-phosphorothioate
  modified_base 20: mod_base = OTHER; note = 2'-O-methylguanosine-3'-phosphorothioate
  modified_base 21: mod_base = OTHER; note = 2'-O-methyladenosine
gaaagatctgatttatgatga

SEQ ID NO: 10598 - RNA, 21 nt, synthetic construct
  source 1..21: mol_type = other RNA
  modified_base 1: mod_base = OTHER; note = 2'-O-methyladenosine-3'-phosphorothioate
  modified_base 2: mod_base = OTHER; note = 2'-O-methyladenosine-3'-phosphorothioate
  modified_base 3: mod_base = OTHER; note = 2'-O-methyladenosine-3'-phosphate
  modified_base 4: mod_base = OTHER; note = 2'-O-methylguanosine-3'-phosphate
  modified_base 5: mod_base = OTHER; note = 2'-O-methyladenosine-3'-phosphate
  modified_base 6: mod_base = OTHER; note = 2'-O-docosanyl-uridine-3'-phosphate
  modified_base 7: mod_base = OTHER; note = 2'-deoxy-2'-fluorocytidine-3'-phosphate
  modified_base 8: mod_base = OTHER; note = 2'-O-methyluridine-3'-phosphate
  modified_base 9: mod_base = OTHER; note = 2'-deoxy-2'-fluoroguanosine-3'-phosphate
  modified_base 10: mod_base = OTHER; note = 2'-deoxy-2'-fluoroadenosine-3'-phosphate
  modified_base 11: mod_base = OTHER; note = 2'-deoxy-2'-fluorouridine-3'-phosphate
  modified_base 12: mod_base = OTHER; note = 2'-O-methyluridine-3'-phosphate
  modified_base 13: mod_base = OTHER; note = 2'-O-methyluridine-3'-phosphate
  modified_base 14: mod_base = OTHER; note = 2'-O-methyladenosine-3'-phosphate
  modified_base 15: mod_base = OTHER; note = 2'-O-methyluridine-3'-phosphate
  modified_base 16: mod_base = OTHER; note = 2'-O-methylguanosine-3'-phosphate
  modified_base 17: mod_base = OTHER; note = 2'-O-methyladenosine-3'-phosphate
  modified_base 18: mod_base = OTHER; note = 2'-O-methyluridine-3'-phosphate
  modified_base 19: mod_base = OTHER; note = 2'-O-methylguanosine-3'-phosphorothioate
  modified_base 20: mod_base = OTHER; note = 2'-O-methyluridine-3'-phosphorothioate
  modified_base 21: mod_base = OTHER; note = 2'-O-methyladenosine
aaagatctgatttatgatgta

SEQ ID NO: 10599 - RNA, 21 nt, synthetic construct
  source 1..21: mol_type = other RNA
  modified_base 1: mod_base = OTHER; note = 2'-O-methyladenosine-3'-phosphorothioate
  modified_base 2: mod_base = OTHER; note = 2'-O-methyladenosine-3'-phosphorothioate
  modified_base 3: mod_base = OTHER; note = 2'-O-methylguanosine-3'-phosphate
  modified_base 4: mod_base = OTHER; note = 2'-O-methyladenosine-3'-phosphate
  modified_base 5: mod_base = OTHER; note = 2'-O-methyluridine-3'-phosphate
  modified_base 6: mod_base = OTHER; note = 2'-O-docosanyl-cytidine-3'-phosphate
  modified_base 7: mod_base = OTHER; note = 2'-deoxy-2'-fluorouridine-3'-phosphate
  modified_base 8: mod_base = OTHER; note = 2'-O-methylguanosine-3'-phosphate
  modified_base 9: mod_base = OTHER; note = 2'-deoxy-2'-fluoroadenosine-3'-phosphate
  modified_base 10: mod_base = OTHER; note = 2'-deoxy-2'-fluorouridine-3'-phosphate
  modified_base 11: mod_base = OTHER; note = 2'-deoxy-2'-fluorouridine-3'-phosphate
  modified_base 12: mod_base = OTHER; note = 2'-O-methyluridine-3'-phosphate
  modified_base 13: mod_base = OTHER; note = 2'-O-methyladenosine-3'-phosphate
  modified_base 14: mod_base = OTHER; note = 2'-O-methyluridine-3'-phosphate
  modified_base 15: mod_base = OTHER; note = 2'-O-methylguanosine-3'-phosphate
  modified_base 16: mod_base = OTHER; note = 2'-O-methyladenosine-3'-phosphate
  modified_base 17: mod_base = OTHER; note = 2'-O-methyluridine-3'-phosphate
  modified_base 18: mod_base = OTHER; note = 2'-O-methylguanosine-3'-phosphate
  modified_base 19: mod_base = OTHER; note = 2'-O-methyluridine-3'-phosphorothioate
  modified_base 20: mod_base = OTHER; note = 2'-O-methylguanosine-3'-phosphorothioate
  modified_base 21: mod_base = OTHER; note = 2'-O-methyladenosine
aagatctgatttatgatgtga

SEQ ID NO: 10600 - RNA, 21 nt, synthetic construct
  source 1..21: mol_type = other RNA
  modified_base 1: mod_base = OTHER; note = 2'-O-methyladenosine-3'-phosphorothioate
  modified_base 2: mod_base = OTHER; note = 2'-O-methylguanosine-3'-phosphorothioate
  modified_base 3: mod_base = OTHER; note = 2'-O-methyladenosine-3'-phosphate
  modified_base 4: mod_base = OTHER; note = 2'-O-methyluridine-3'-phosphate
  modified_base 5: mod_base = OTHER; note = 2'-O-methylcytidine-3'-phosphate
  modified_base 6: mod_base = OTHER; note = 2'-O-docosanyl-uridine-3'-phosphate
  modified_base 7: mod_base = OTHER; note = 2'-deoxy-2'-fluoroguanosine-3'-phosphate
  modified_base 8: mod_base = OTHER; note = 2'-O-methyladenosine-3'-phosphate
  modified_base 9: mod_base = OTHER; note = 2'-deoxy-2'-fluorouridine-3'-phosphate
  modified_base 10: mod_base = OTHER; note = 2'-deoxy-2'-fluorouridine-3'-phosphate
  modified_base 11: mod_base = OTHER; note = 2'-deoxy-2'-fluorouridine-3'-phosphate
  modified_base 12: mod_base = OTHER; note = 2'-O-methyladenosine-3'-phosphate
  modified_base 13: mod_base = OTHER; note = 2'-O-methyluridine-3'-phosphate
  modified_base 14: mod_base = OTHER; note = 2'-O-methylguanosine-3'-phosphate
  modified_base 15: mod_base = OTHER; note = 2'-O-methyladenosine-3'-phosphate
  modified_base 16: mod_base = OTHER; note = 2'-O-methyluridine-3'-phosphate
  modified_base 17: mod_base = OTHER; note = 2'-O-methylguanosine-3'-phosphate
  modified_base 18: mod_base = OTHER; note = 2'-O-methyluridine-3'-phosphate
  modified_base 19: mod_base = OTHER; note = 2'-O-methylguanosine-3'-phosphorothioate
  modified_base 20: mod_base = OTHER; note = 2'-O-methyladenosine-3'-phosphorothioate
  modified_base 21: mod_base = OTHER; note = 2'-O-methyladenosine
agatctgatttatgatgtgaa

SEQ ID NO: 10601 - RNA, 21 nt, synthetic construct
  source 1..21: mol_type = other RNA
  modified_base 1: mod_base = OTHER; note = 2'-O-methylguanosine-3'-phosphorothioate
  modified_base 2: mod_base = OTHER; note = 2'-O-methyladenosine-3'-phosphorothioate
  modified_base 3: mod_base = OTHER; note = 2'-O-methyluridine-3'-phosphate
  modified_base 4: mod_base = OTHER; note = 2'-O-methylcytidine-3'-phosphate
  modified_base 5: mod_base = OTHER; note = 2'-O-methyluridine-3'-phosphate
  modified_base 6: mod_base = OTHER; note = 2'-O-docosanyl-guanosine-3'-phosphate
  modified_base 7: mod_base = OTHER; note = 2'-deoxy-2'-fluoroadenosine-3'-phosphate
  modified_base 8: mod_base = OTHER; note = 2'-O-methyluridine-3'-phosphate
  modified_base 9: mod_base = OTHER; note = 2'-deoxy-2'-fluorouridine-3'-phosphate
  modified_base 10: mod_base = OTHER; note = 2'-deoxy-2'-fluorouridine-3'-phosphate
  modified_base 11: mod_base = OTHER; note = 2'-deoxy-2'-fluoroadenosine-3'-phosphate
  modified_base 12: mod_base = OTHER; note = 2'-O-methyluridine-3'-phosphate
  modified_base 13: mod_base = OTHER; note = 2'-O-methylguanosine-3'-phosphate
  modified_base 14: mod_base = OTHER; note = 2'-O-methyladenosine-3'-phosphate
  modified_base 15: mod_base = OTHER; note = 2'-O-methyluridine-3'-phosphate
  modified_base 16: mod_base = OTHER; note = 2'-O-methylguanosine-3'-phosphate
  modified_base 17: mod_base = OTHER; note = 2'-O-methyluridine-3'-phosphate
  modified_base 18: mod_base = OTHER; note = 2'-O-methylguanosine-3'-phosphate
  modified_base 19: mod_base = OTHER; note = 2'-O-methyladenosine-3'-phosphorothioate
  modified_base 20: mod_base = OTHER; note = 2'-O-methylcytidine-3'-phosphorothioate
  modified_base 21: mod_base = OTHER; note = 2'-O-methyladenosine
gatctgatttatgatgtgaca

SEQ ID NO: 10602 - RNA, 21 nt, synthetic construct
  source 1..21: mol_type = other RNA
  modified_base 1: mod_base = OTHER; note = 2'-O-methyluridine-3'-phosphorothioate
  modified_base 2: mod_base = OTHER; note = 2'-O-methylguanosine-3'-phosphorothioate
  modified_base 3: mod_base = OTHER; note = 2'-O-methyluridine-3'-phosphate
  modified_base 4: mod_base = OTHER; note = 2'-O-methyluridine-3'-phosphate
  modified_base 5: mod_base = OTHER; note = 2'-O-methylguanosine-3'-phosphate
  modified_base 6: mod_base = OTHER; note = 2'-O-docosanyl-guanosine-3'-phosphate
  modified_base 7: mod_base = OTHER; note = 2'-deoxy-2'-fluorouridine-3'-phosphate
  modified_base 8: mod_base = OTHER; note = 2'-O-methyluridine-3'-phosphate
  modified_base 9: mod_base = OTHER; note = 2'-deoxy-2'-fluorocytidine-3'-phosphate
  modified_base 10: mod_base = OTHER; note = 2'-deoxy-2'-fluoroadenosine-3'-phosphate
  modified_base 11: mod_base = OTHER; note = 2'-deoxy-2'-fluoroadenosine-3'-phosphate
  modified_base 12: mod_base = OTHER; note = 2'-O-methyladenosine-3'-phosphate
  modified_base 13: mod_base = OTHER; note = 2'-O-methylguanosine-3'-phosphate
  modified_base 14: mod_base = OTHER; note = 2'-O-methylguanosine-3'-phosphate
  modified_base 15: mod_base = OTHER; note = 2'-O-methyladenosine-3'-phosphate
  modified_base 16: mod_base = OTHER; note = 2'-O-methylcytidine-3'-phosphate
  modified_base 17: mod_base = OTHER; note = 2'-O-methyladenosine-3'-phosphate
  modified_base 18: mod_base = OTHER; note = 2'-O-methyladenosine-3'-phosphate
  modified_base 19: mod_base = OTHER; note = 2'-O-methyluridine-3'-phosphorothioate
  modified_base 20: mod_base = OTHER; note = 2'-O-methyluridine-3'-phosphorothioate
  modified_base 21: mod_base = OTHER; note = 2'-O-methyladenosine
tgttggttcaaaggacaatta

SEQ ID NO: 10603 - RNA, 21 nt, synthetic construct
  source 1..21: mol_type = other RNA
  modified_base 1: mod_base = OTHER; note = 2'-O-methylguanosine-3'-phosphorothioate
  modified_base 2: mod_base = OTHER; note = 2'-O-methyluridine-3'-phosphorothioate
  modified_base 3: mod_base = OTHER; note = 2'-O-methylcytidine-3'-phosphate
  modified_base 4: mod_base = OTHER; note = 2'-O-methyluridine-3'-phosphate
  modified_base 5: mod_base = OTHER; note = 2'-O-methyladenosine-3'-phosphate
  modified_base 6: mod_base = OTHER; note = 2'-O-docosanyl-cytidine-3'-phosphate
  modified_base 7: mod_base = OTHER; note = 2'-deoxy-2'-fluorocytidine-3'-phosphate
  modified_base 8: mod_base = OTHER; note = 2'-O-methyluridine-3'-phosphate
  modified_base 9: mod_base = OTHER; note = 2'-deoxy-2'-fluorocytidine-3'-phosphate
  modified_base 10: mod_base = OTHER; note = 2'-deoxy-2'-fluorouridine-3'-phosphate
  modified_base 11: mod_base = OTHER; note = 2'-deoxy-2'-fluoroguanosine-3'-phosphate
  modified_base 12: mod_base = OTHER; note = 2'-O-methyluridine-3'-phosphate
  modified_base 13: mod_base = OTHER; note = 2'-O-methyluridine-3'-phosphate
  modified_base 14: mod_base = OTHER; note = 2'-O-methylguanosine-3'-phosphate
  modified_base 15: mod_base = OTHER; note = 2'-O-methylguanosine-3'-phosphate
  modified_base 16: mod_base = OTHER; note = 2'-O-methyluridine-3'-phosphate
  modified_base 17: mod_base = OTHER; note = 2'-O-methyluridine-3'-phosphate
  modified_base 18: mod_base = OTHER; note = 2'-O-methylcytidine-3'-phosphate
  modified_base 19: mod_base = OTHER; note = 2'-O-methyladenosine-3'-phosphorothioate
  modified_base 20: mod_base = OTHER; note = 2'-O-methyladenosine-3'-phosphorothioate
  modified_base 21: mod_base = OTHER; note = 2'-O-methyladenosine
gtctacctctgttggttcaaa

SEQ ID NO: 10604 - RNA, 21 nt, synthetic construct
  source 1..21: mol_type = other RNA
  modified_base 1: mod_base = OTHER; note = 2'-O-methyluridine-3'-phosphorothioate
  modified_base 2: mod_base = OTHER; note = 2'-O-methylcytidine-3'-phosphorothioate
  modified_base 3: mod_base = OTHER; note = 2'-O-methyluridine-3'-phosphate
  modified_base 4: mod_base = OTHER; note = 2'-O-methyladenosine-3'-phosphate
  modified_base 5: mod_base = OTHER; note = 2'-O-methylcytidine-3'-phosphate
  modified_base 6: mod_base = OTHER; note = 2'-O-docosanyl-cytidine-3'-phosphate
  modified_base 7: mod_base = OTHER; note = 2'-deoxy-2'-fluorouridine-3'-phosphate
  modified_base 8: mod_base = OTHER; note = 2'-O-methylcytidine-3'-phosphate
  modified_base 9: mod_base = OTHER; note = 2'-deoxy-2'-fluorouridine-3'-phosphate
  modified_base 10: mod_base = OTHER; note = 2'-deoxy-2'-fluoroguanosine-3'-phosphate
  modified_base 11: mod_base = OTHER; note = 2'-deoxy-2'-fluorouridine-3'-phosphate
  modified_base 12: mod_base = OTHER; note = 2'-O-methyluridine-3'-phosphate
  modified_base 13: mod_base = OTHER; note = 2'-O-methylguanosine-3'-phosphate
  modified_base 14: mod_base = OTHER; note = 2'-O-methylguanosine-3'-phosphate
  modified_base 15: mod_base = OTHER; note = 2'-O-methyluridine-3'-phosphate
  modified_base 16: mod_base = OTHER; note = 2'-O-methyluridine-3'-phosphate
  modified_base 17: mod_base = OTHER; note = 2'-O-methylcytidine-3'-phosphate
  modified_base 18: mod_base = OTHER; note = 2'-O-methyladenosine-3'-phosphate
  modified_base 19: mod_base = OTHER; note = 2'-O-methyladenosine-3'-phosphorothioate
  modified_base 20: mod_base = OTHER; note = 2'-O-methyladenosine-3'-phosphorothioate
  modified_base 21: mod_base = OTHER; note = 2'-O-methyladenosine
tctacctctgttggttcaaaa

SEQ ID NO: 10605 - RNA, 21 nt, synthetic construct
  source 1..21: mol_type = other RNA
  modified_base 1: mod_base = OTHER; note = 2'-O-methyladenosine-3'-phosphorothioate
  modified_base 2: mod_base = OTHER; note = 2'-O-methylcytidine-3'-phosphorothioate
  modified_base 3: mod_base = OTHER; note = 2'-O-methylcytidine-3'-phosphate
  modified_base 4: mod_base = OTHER; note = 2'-O-methyluridine-3'-phosphate
  modified_base 5: mod_base = OTHER; note = 2'-O-methylcytidine-3'-phosphate
  modified_base 6: mod_base = OTHER; note = 2'-O-docosanyl-uridine-3'-phosphate
  modified_base 7: mod_base = OTHER; note = 2'-deoxy-2'-fluoroguanosine-3'-phosphate
  modified_base 8: mod_base = OTHER; note = 2'-O-methyluridine-3'-phosphate
  modified_base 9: mod_base = OTHER; note = 2'-deoxy-2'-fluorouridine-3'-phosphate
  modified_base 10: mod_base = OTHER; note = 2'-deoxy-2'-fluoroguanosine-3'-phosphate
  modified_base 11: mod_base = OTHER; note = 2'-deoxy-2'-fluoroguanosine-3'-phosphate
  modified_base 12: mod_base = OTHER; note = 2'-O-methyluridine-3'-phosphate
  modified_base 13: mod_base = OTHER; note = 2'-O-methyluridine-3'-phosphate
  modified_base 14: mod_base = OTHER; note = 2'-O-methylcytidine-3'-phosphate
  modified_base 15: mod_base = OTHER; note = 2'-O-methyladenosine-3'-phosphate
  modified_base 16: mod_base = OTHER; note = 2'-O-methyladenosine-3'-phosphate
  modified_base 17: mod_base = OTHER; note = 2'-O-methyladenosine-3'-phosphate
  modified_base 18: mod_base = OTHER; note = 2'-O-methylguanosine-3'-phosphate
  modified_base 19: mod_base = OTHER; note = 2'-O-methylguanosine-3'-phosphorothioate
  modified_base 20: mod_base = OTHER; note = 2'-O-methyladenosine-3'-phosphorothioate
  modified_base 21: mod_base = OTHER; note = 2'-O-methyladenosine
acctctgttggttcaaaggaa

SEQ ID NO: 10606 - RNA, 21 nt, synthetic construct
  source 1..21: mol_type = other RNA
  modified_base 1: mod_base = OTHER; note = 2'-O-methylcytidine-3'-phosphorothioate
  modified_base 2: mod_base = OTHER; note = 2'-O-methylcytidine-3'-phosphorothioate
  modified_base 3: mod_base = OTHER; note = 2'-O-methyluridine-3'-phosphate
  modified_base 4: mod_base = OTHER; note = 2'-O-methylcytidine-3'-phosphate
  modified_base 5: mod_base = OTHER; note = 2'-O-methyluridine-3'-phosphate
  modified_base 6: mod_base = OTHER; note = 2'-O-docosanyl-guanosine-3'-phosphate
  modified_base 7: mod_base = OTHER; note = 2'-deoxy-2'-fluorouridine-3'-phosphate
  modified_base 8: mod_base = OTHER; note = 2'-O-methyluridine-3'-phosphate
  modified_base 9: mod_base = OTHER; note = 2'-deoxy-2'-fluoroguanosine-3'-phosphate
  modified_base 10: mod_base = OTHER; note = 2'-deoxy-2'-fluoroguanosine-3'-phosphate
  modified_base 11: mod_base = OTHER; note = 2'-deoxy-2'-fluorouridine-3'-phosphate
  modified_base 12: mod_base = OTHER; note = 2'-O-methyluridine-3'-phosphate
  modified_base 13: mod_base = OTHER; note = 2'-O-methylcytidine-3'-phosphate
  modified_base 14: mod_base = OTHER; note = 2'-O-methyladenosine-3'-phosphate
  modified_base 15: mod_base = OTHER; note = 2'-O-methyladenosine-3'-phosphate
  modified_base 16: mod_base = OTHER; note = 2'-O-methyladenosine-3'-phosphate
  modified_base 17: mod_base = OTHER; note = 2'-O-methylguanosine-3'-phosphate
  modified_base 18: mod_base = OTHER; note = 2'-O-methylguanosine-3'-phosphate
  modified_base 19: mod_base = OTHER; note = 2'-O-methyladenosine-3'-phosphorothioate
  modified_base 20: mod_base = OTHER; note = 2'-O-methylcytidine-3'-phosphorothioate
  modified_base 21: mod_base = OTHER; note = 2'-O-methyladenosine
cctctgttggttcaaaggaca

SEQ ID NO: 10607 - RNA, 21 nt, synthetic construct
  source 1..21: mol_type = other RNA
  modified_base 1: mod_base = OTHER; note = 2'-O-methylcytidine-3'-phosphorothioate
  modified_base 2: mod_base = OTHER; note = 2'-O-methyluridine-3'-phosphorothioate
  modified_base 3: mod_base = OTHER; note = 2'-O-methylguanosine-3'-phosphate
  modified_base 4: mod_base = OTHER; note = 2'-O-methyluridine-3'-phosphate
  modified_base 5: mod_base = OTHER; note = 2'-O-methyluridine-3'-phosphate
  modified_base 6: mod_base = OTHER; note = 2'-O-docosanyl-guanosine-3'-phosphate
  modified_base 7: mod_base = OTHER; note = 2'-deoxy-2'-fluoroguanosine-3'-phosphate
  modified_base 8: mod_base = OTHER; note = 2'-O-methyluridine-3'-phosphate
  modified_base 9: mod_base = OTHER; note = 2'-deoxy-2'-fluorouridine-3'-phosphate
  modified_base 10: mod_base = OTHER; note = 2'-deoxy-2'-fluorocytidine-3'-phosphate
  modified_base 11: mod_base = OTHER; note = 2'-deoxy-2'-fluoroadenosine-3'-phosphate
  modified_base 12: mod_base = OTHER; note = 2'-O-methyladenosine-3'-phosphate
  modified_base 13: mod_base = OTHER; note = 2'-O-methyladenosine-3'-phosphate
  modified_base 14: mod_base = OTHER; note = 2'-O-methylguanosine-3'-phosphate
  modified_base 15: mod_base = OTHER; note = 2'-O-methylguanosine-3'-phosphate
  modified_base 16: mod_base = OTHER; note = 2'-O-methyladenosine-3'-phosphate
  modified_base 17: mod_base = OTHER; note = 2'-O-methylcytidine-3'-phosphate
  modified_base 18: mod_base = OTHER; note = 2'-O-methyladenosine-3'-phosphate
  modified_base 19: mod_base = OTHER; note = 2'-O-methyladenosine-3'-phosphorothioate
  modified_base 20: mod_base = OTHER; note = 2'-O-methyluridine-3'-phosphorothioate
  modified_base 21: mod_base = OTHER; note = 2'-O-methyladenosine
ctgttggttcaaaggacaata

SEQ ID NO: 10608 - RNA, 21 nt, synthetic construct
  source 1..21: mol_type = other RNA
  modified_base 1: mod_base = OTHER; note = 2'-O-methylguanosine-3'-phosphorothioate
  modified_base 2: mod_base = OTHER; note = 2'-O-methylguanosine-3'-phosphorothioate
  modified_base 3: mod_base = OTHER; note = 2'-O-methyluridine-3'-phosphate
  modified_base 4: mod_base = OTHER; note = 2'-O-methyluridine-3'-phosphate
  modified_base 5: mod_base = OTHER; note = 2'-O-methylcytidine-3'-phosphate
  modified_base 6: mod_base = OTHER; note = 2'-O-docosanyl-adenosine-3'-phosphate
  modified_base 7: mod_base = OTHER; note = 2'-deoxy-2'-fluoroadenosine-3'-phosphate
  modified_base 8: mod_base = OTHER; note = 2'-O-methyladenosine-3'-phosphate
  modified_base 9: mod_base = OTHER; note = 2'-deoxy-2'-fluoroguanosine-3'-phosphate
  modified_base 10: mod_base = OTHER; note = 2'-deoxy-2'-fluoroguanosine-3'-phosphate
  modified_base 11: mod_base = OTHER; note = 2'-deoxy-2'-fluoroadenosine-3'-phosphate
  modified_base 12: mod_base = OTHER; note = 2'-O-methylcytidine-3'-phosphate
  modified_base 13: mod_base = OTHER; note = 2'-O-methyladenosine-3'-phosphate
  modified_base 14: mod_base = OTHER; note = 2'-O-methyladenosine-3'-phosphate
  modified_base 15: mod_base = OTHER; note = 2'-O-methyluridine-3'-phosphate
  modified_base 16: mod_base = OTHER; note = 2'-O-methyluridine-3'-phosphate
  modified_base 17: mod_base = OTHER; note = 2'-O-methylguanosine-3'-phosphate
  modified_base 18: mod_base = OTHER; note = 2'-O-methylcytidine-3'-phosphate
  modified_base 19: mod_base = OTHER; note = 2'-O-methyladenosine-3'-phosphorothioate
  modified_base 20: mod_base = OTHER; note = 2'-O-methyladenosine-3'-phosphorothioate
  modified_base 21: mod_base = OTHER; note = 2'-O-methyladenosine
ggttcaaaggacaattgcaaa

SEQ ID NO: 10609 - RNA, 21 nt, synthetic construct
  source 1..21: mol_type = other RNA
  modified_base 1: mod_base = OTHER; note = 2'-O-methyluridine-3'-phosphorothioate
  modified_base 2: mod_base = OTHER; note = 2'-O-methylcytidine-3'-phosphorothioate
  modified_base 3: mod_base = OTHER; note = 2'-O-methyladenosine-3'-phosphate
  modified_base 4: mod_base = OTHER; note = 2'-O-methyladenosine-3'-phosphate
  modified_base 5: mod_base = OTHER; note = 2'-O-methyladenosine-3'-phosphate
  modified_base 6: mod_base = OTHER; note = 2'-O-docosanyl-guanosine-3'-phosphate
  modified_base 7: mod_base = OTHER; note = 2'-deoxy-2'-fluoroguanosine-3'-phosphate
  modified_base 8: mod_base = OTHER; note = 2'-O-methyladenosine-3'-phosphate
  modified_base 9: mod_base = OTHER; note = 2'-deoxy-2'-fluorocytidine-3'-phosphate
  modified_base 10: mod_base = OTHER; note = 2'-deoxy-2'-fluoroadenosine-3'-phosphate
  modified_base 11: mod_base = OTHER; note = 2'-deoxy-2'-fluoroadenosine-3'-phosphate
  modified_base 12: mod_base = OTHER; note = 2'-O-methyluridine-3'-phosphate
  modified_base 13: mod_base = OTHER; note = 2'-O-methyluridine-3'-phosphate
  modified_base 14: mod_base = OTHER; note = 2'-O-methylguanosine-3'-phosphate
  modified_base 15: mod_base = OTHER; note = 2'-O-methylcytidine-3'-phosphate
  modified_base 16: mod_base = OTHER; note = 2'-O-methyladenosine-3'-phosphate
  modified_base 17: mod_base = OTHER; note = 2'-O-methyladenosine-3'-phosphate
  modified_base 18: mod_base = OTHER; note = 2'-O-methylguanosine-3'-phosphate
  modified_base 19: mod_base = OTHER; note = 2'-O-methylguanosine-3'-phosphorothioate
  modified_base 20: mod_base = OTHER; note = 2'-O-methyladenosine-3'-phosphorothioate
  modified_base 21: mod_base = OTHER; note = 2'-O-methyladenosine
tcaaaggacaattgcaaggaa

SEQ ID NO: 10610 - RNA, 21 nt, synthetic construct
  source 1..21: mol_type = other RNA
  modified_base 1: mod_base = OTHER; note = 2'-O-methyluridine-3'-phosphorothioate
  modified_base 2: mod_base = OTHER; note = 2'-O-methyladenosine-3'-phosphorothioate
  modified_base 3: mod_base = OTHER; note = 2'-O-methylguanosine-3'-phosphate
  modified_base 4: mod_base = OTHER; note = 2'-O-methyluridine-3'-phosphate
  modified_base 5: mod_base = OTHER; note = 2'-O-methyladenosine-3'-phosphate
  modified_base 6: mod_base = OTHER; note = 2'-O-docosanyl-guanosine-3'-phosphate
  modified_base 7: mod_base = OTHER; note = 2'-deoxy-2'-fluoroguanosine-3'-phosphate
  modified_base 8: mod_base = OTHER; note = 2'-O-methyladenosine-3'-phosphate
  modified_base 9: mod_base = OTHER; note = 2'-deoxy-2'-fluoroadenosine-3'-phosphate
  modified_base 10: mod_base = OTHER; note = 2'-deoxy-2'-fluoroadenosine-3'-phosphate
  modified_base 11: mod_base = OTHER; note = 2'-deoxy-2'-fluoroadenosine-3'-phosphate
  modified_base 12: mod_base = OTHER; note = 2'-O-methylguanosine-3'-phosphate
  modified_base 13: mod_base = OTHER; note = 2'-O-methylguanosine-3'-phosphate
  modified_base 14: mod_base = OTHER; note = 2'-O-methyluridine-3'-phosphate
  modified_base 15: mod_base = OTHER; note = 2'-O-methyladenosine-3'-phosphate
  modified_base 16: mod_base = OTHER; note = 2'-O-methylguanosine-3'-phosphate
  modified_base 17: mod_base = OTHER; note = 2'-O-methyladenosine-3'-phosphate
  modified_base 18: mod_base = OTHER; note = 2'-O-methyluridine-3'-phosphate
  modified_base 19: mod_base = OTHER; note = 2'-O-methyluridine-3'-phosphorothioate
  modified_base 20: mod_base = OTHER; note = 2'-O-methyluridine-3'-phosphorothioate
  modified_base 21: mod_base = OTHER; note = 2'-O-methyladenosine
tagtaggaaaaggtagattta

SEQ ID NO: 10611 - RNA, 21 nt, synthetic construct
  source 1..21: mol_type = other RNA
  modified_base 1: mod_base = OTHER; note = 2'-O-methyluridine-3'-phosphorothioate
  modified_base 2: mod_base = OTHER; note = 2'-O-methyladenosine-3'-phosphorothioate
  modified_base 3: mod_base = OTHER; note = 2'-O-methylguanosine-3'-phosphate
  modified_base 4: mod_base = OTHER; note = 2'-O-methylguanosine-3'-phosphate
  modified_base 5: mod_base = OTHER; note = 2'-O-methyladenosine-3'-phosphate
  modified_base 6: mod_base = OTHER; note = 2'-O-docosanyl-adenosine-3'-phosphate
  modified_base 7: mod_base = OTHER; note = 2'-deoxy-2'-fluoroadenosine-3'-phosphate
  modified_base 8: mod_base = OTHER; note = 2'-O-methyladenosine-3'-phosphate
  modified_base 9: mod_base = OTHER; note = 2'-deoxy-2'-fluoroguanosine-3'-phosphate
  modified_base 10: mod_base = OTHER; note = 2'-deoxy-2'-fluoroguanosine-3'-phosphate
  modified_base 11: mod_base = OTHER; note = 2'-deoxy-2'-fluorouridine-3'-phosphate
  modified_base 12: mod_base = OTHER; note = 2'-O-methyladenosine-3'-phosphate
  modified_base 13: mod_base = OTHER; note = 2'-O-methylguanosine-3'-phosphate
  modified_base 14: mod_base = OTHER; note = 2'-O-methyladenosine-3'-phosphate
  modified_base 15: mod_base = OTHER; note = 2'-O-methyluridine-3'-phosphate
  modified_base 16: mod_base = OTHER; note = 2'-O-methyluridine-3'-phosphate
  modified_base 17: mod_base = OTHER; note = 2'-O-methyluridine-3'-phosphate
  modified_base 18: mod_base = OTHER; note = 2'-O-methylguanosine-3'-phosphate
  modified_base 19: mod_base = OTHER; note = 2'-O-methylguanosine-3'-phosphorothioate
  modified_base 20: mod_base = OTHER; note = 2'-O-methyluridine-3'-phosphorothioate
  modified_base 21: mod_base = OTHER; note = 2'-O-methyladenosine
taggaaaaggtagatttggta

SEQ ID NO: 10612 - RNA, 21 nt, synthetic construct
  source 1..21: mol_type = other RNA
  modified_base 1: mod_base = OTHER; note = 2'-O-methylguanosine-3'-phosphorothioate
  modified_base 2: mod_base = OTHER; note = 2'-O-methyladenosine-3'-phosphorothioate
  modified_base 3: mod_base = OTHER; note = 2'-O-methyladenosine-3'-phosphate
  modified_base 4: mod_base = OTHER; note = 2'-O-methylguanosine-3'-phosphate
  modified_base 5: mod_base = OTHER; note = 2'-O-methyladenosine-3'-phosphate
  modified_base 6: mod_base = OTHER; note = 2'-O-docosanyl-uridine-3'-phosphate
  modified_base 7: mod_base = OTHER; note = 2'-deoxy-2'-fluoroguanosine-3'-phosphate
  modified_base 8: mod_base = OTHER; note = 2'-O-methyluridine-3'-phosphate
  modified_base 9: mod_base = OTHER; note = 2'-deoxy-2'-fluoroguanosine-3'-phosphate
  modified_base 10: mod_base = OTHER; note = 2'-deoxy-2'-fluoroguanosine-3'-phosphate
  modified_base 11: mod_base = OTHER; note = 2'-deoxy-2'-fluorocytidine-3'-phosphate
  modified_base 12: mod_base = OTHER; note = 2'-O-methyluridine-3'-phosphate
  modified_base 13: mod_base = OTHER; note = 2'-O-methylguanosine-3'-phosphate
  modified_base 14: mod_base = OTHER; note = 2'-O-methyluridine-3'-phosphate
  modified_base 15: mod_base = OTHER; note = 2'-O-methylguanosine-3'-phosphate
  modified_base 16: mod_base = OTHER; note = 2'-O-methyladenosine-3'-phosphate
  modified_base 17: mod_base = OTHER; note = 2'-O-methyladenosine-3'-phosphate
  modified_base 18: mod_base = OTHER; note = 2'-O-methyladenosine-3'-phosphate
  modified_base 19: mod_base = OTHER; note = 2'-O-methyladenosine-3'-phosphorothioate
  modified_base 20: mod_base = OTHER; note = 2'-O-methyluridine-3'-phosphorothioate
  modified_base 21: mod_base = OTHER; note = 2'-O-methyladenosine
gaagatgtggctgtgaaaata

SEQ ID NO: 10613 - RNA, 21 nt, synthetic construct
  source 1..21: mol_type = other RNA
  modified_base 1: mod_base = OTHER; note = 2'-O-methyladenosine-3'-phosphorothioate
  modified_base 2: mod_base = OTHER; note = 2'-O-methyladenosine-3'-phosphorothioate
  modified_base 3: mod_base = OTHER; note = 2'-O-methylguanosine-3'-phosphate
  modified_base 4: mod_base = OTHER; note = 2'-O-methyladenosine-3'-phosphate
  modified_base 5: mod_base = OTHER; note = 2'-O-methyluridine-3'-phosphate
  modified_base 6: mod_base = OTHER; note = 2'-O-docosanyl-guanosine-3'-phosphate
  modified_base 7: mod_base = OTHER; note = 2'-deoxy-2'-fluorouridine-3'-phosphate
  modified_base 8: mod_base = OTHER; note = 2'-O-methylguanosine-3'-phosphate
  modified_base 9: mod_base = OTHER; note = 2'-deoxy-2'-fluoroguanosine-3'-phosphate
  modified_base 10: mod_base = OTHER; note = 2'-deoxy-2'-fluorocytidine-3'-phosphate
  modified_base 11: mod_base = OTHER; note = 2'-deoxy-2'-fluorouridine-3'-phosphate
  modified_base 12: mod_base = OTHER; note = 2'-O-methylguanosine-3'-phosphate
  modified_base 13: mod_base = OTHER; note = 2'-O-methyluridine-3'-phosphate
  modified_base 14: mod_base = OTHER; note = 2'-O-methylguanosine-3'-phosphate
  modified_base 15: mod_base = OTHER; note = 2'-O-methyladenosine-3'-phosphate
  modified_base 16: mod_base = OTHER; note = 2'-O-methyladenosine-3'-phosphate
  modified_base 17: mod_base = OTHER; note = 2'-O-methyladenosine-3'-phosphate
  modified_base 18: mod_base = OTHER; note = 2'-O-methyladenosine-3'-phosphate
  modified_base 19: mod_base = OTHER; note = 2'-O-methyluridine-3'-phosphorothioate
  modified_base 20: mod_base = OTHER; note = 2'-O-methyladenosine-3'-phosphorothioate
  modified_base 21: mod_base = OTHER; note = 2'-O-methyladenosine
aagatgtggctgtgaaaataa

SEQ ID NO: 10614 - RNA, 21 nt, synthetic construct
  source 1..21: mol_type = other RNA
  modified_base 1: mod_base = OTHER; note = 2'-O-methyladenosine-3'-phosphorothioate
  modified_base 2: mod_base = OTHER; note = 2'-O-methylguanosine-3'-phosphorothioate
  modified_base 3: mod_base = OTHER; note = 2'-O-methyladenosine-3'-phosphate
  modified_base 4: mod_base = OTHER; note = 2'-O-methyluridine-3'-phosphate
  modified_base 5: mod_base = OTHER; note = 2'-O-methylguanosine-3'-phosphate
  modified_base 6: mod_base = OTHER; note = 2'-O-docosanyl-uridine-3'-phosphate
  modified_base 7: mod_base = OTHER; note = 2'-deoxy-2'-fluoroguanosine-3'-phosphate
  modified_base 8: mod_base = OTHER; note = 2'-O-methylguanosine-3'-phosphate
  modified_base 9: mod_base = OTHER; note = 2'-deoxy-2'-fluorocytidine-3'-phosphate
  modified_base 10: mod_base = OTHER; note = 2'-deoxy-2'-fluorouridine-3'-phosphate
  modified_base 11: mod_base = OTHER; note = 2'-deoxy-2'-fluoroguanosine-3'-phosphate
  modified_base 12: mod_base = OTHER; note = 2'-O-methyluridine-3'-phosphate
  modified_base 13: mod_base = OTHER; note = 2'-O-methylguanosine-3'-phosphate
  modified_base 14: mod_base = OTHER; note = 2'-O-methyladenosine-3'-phosphate
  modified_base 15: mod_base = OTHER; note = 2'-O-methyladenosine-3'-phosphate
  modified_base 16: mod_base = OTHER; note = 2'-O-methyladenosine-3'-phosphate
  modified_base 17: mod_base = OTHER; note = 2'-O-methyladenosine-3'-phosphate
  modified_base 18: mod_base = OTHER; note = 2'-O-methyluridine-3'-phosphate
  modified_base 19: mod_base = OTHER; note = 2'-O-methyladenosine-3'-phosphorothioate
  modified_base 20: mod_base = OTHER; note = 2'-O-methyluridine-3'-phosphorothioate
  modified_base 21: mod_base = OTHER; note = 2'-O-methyladenosine
agatgtggctgtgaaaatata

SEQ ID NO: 10615 - RNA, 21 nt, synthetic construct
  source 1..21: mol_type = other RNA
  modified_base 1: mod_base = OTHER; note = 2'-O-methylcytidine-3'-phosphorothioate
  modified_base 2: mod_base = OTHER; note = 2'-O-methylcytidine-3'-phosphorothioate
  modified_base 3: mod_base = OTHER; note = 2'-O-methyluridine-3'-phosphate
  modified_base 4: mod_base = OTHER; note = 2'-O-methylcytidine-3'-phosphate
  modified_base 5: mod_base = OTHER; note = 2'-O-methylcytidine-3'-phosphate
  modified_base 6: mod_base = OTHER; note = 2'-O-docosanyl-adenosine-3'-phosphate
  modified_base 7: mod_base = OTHER; note = 2'-deoxy-2'-fluoroguanosine-3'-phosphate
  modified_base 8: mod_base = OTHER; note = 2'-O-methyladenosine-3'-phosphate
  modified_base 9: mod_base = OTHER; note = 2'-deoxy-2'-fluoroguanosine-3'-phosphate
  modified_base 10: mod_base = OTHER; note = 2'-deoxy-2'-fluoroadenosine-3'-phosphate
  modified_base 11: mod_base = OTHER; note = 2'-deoxy-2'-fluorouridine-3'-phosphate
  modified_base 12: mod_base = OTHER; note = 2'-O-methylguanosine-3'-phosphate
  modified_base 13: mod_base = OTHER; note = 2'-O-methyladenosine-3'-phosphate
  modified_base 14: mod_base = OTHER; note = 2'-O-methyladenosine-3'-phosphate
  modified_base 15: mod_base = OTHER; note = 2'-O-methyladenosine-3'-phosphate
  modified_base 16: mod_base = OTHER; note = 2'-O-methylguanosine-3'-phosphate
  modified_base 17: mod_base = OTHER; note = 2'-O-methyladenosine-3'-phosphate
  modified_base 18: mod_base = OTHER; note = 2'-O-methyluridine-3'-phosphate
  modified_base 19: mod_base = OTHER; note = 2'-O-methylcytidine-3'-phosphorothioate
  modified_base 20: mod_base = OTHER; note = 2'-O-methyluridine-3'-phosphorothioate
  modified_base 21: mod_base = OTHER; note = 2'-O-methyladenosine
cctccagagatgaaagatcta

SEQ ID NO: 10616 - RNA, 21 nt, synthetic construct
  source 1..21: mol_type = other RNA
  modified_base 1: mod_base = OTHER; note = 2'-O-methylcytidine-3'-phosphorothioate
  modified_base 2: mod_base = OTHER; note = 2'-O-methyluridine-3'-phosphorothioate
  modified_base 3: mod_base = OTHER; note = 2'-O-methylcytidine-3'-phosphate
  modified_base 4: mod_base = OTHER; note = 2'-O-methylcytidine-3'-phosphate
  modified_base 5: mod_base = OTHER; note = 2'-O-methyluridine-3'-phosphate
  modified_base 6: mod_base = OTHER; note = 2'-O-docosanyl-cytidine-3'-phosphate
  modified_base 7: mod_base = OTHER; note = 2'-deoxy-2'-fluorocytidine-3'-phosphate
  modified_base 8: mod_base = OTHER; note = 2'-O-methyladenosine-3'-phosphate
  modified_base 9: mod_base = OTHER; note = 2'-deoxy-2'-fluoroguanosine-3'-phosphate
  modified_base 10: mod_base = OTHER; note = 2'-deoxy-2'-fluoroadenosine-3'-phosphate
  modified_base 11: mod_base = OTHER; note = 2'-deoxy-2'-fluoroguanosine-3'-phosphate
  modified_base 12: mod_base = OTHER; note = 2'-O-methyladenosine-3'-phosphate
  modified_base 13: mod_base = OTHER; note = 2'-O-methyluridine-3'-phosphate
  modified_base 14: mod_base = OTHER; note = 2'-O-methylguanosine-3'-phosphate
  modified_base 15: mod_base = OTHER; note = 2'-O-methyladenosine-3'-phosphate
  modified_base 16: mod_base = OTHER; note = 2'-O-methyladenosine-3'-phosphate
  modified_base 17: mod_base = OTHER; note = 2'-O-methyladenosine-3'-phosphate
  modified_base 18: mod_base = OTHER; note = 2'-O-methylguanosine-3'-phosphate
  modified_base 19: mod_base = OTHER; note = 2'-O-methyladenosine-3'-phosphorothioate
  modified_base 20: mod_base = OTHER; note = 2'-O-methyluridine-3'-phosphorothioate
  modified_base 21: mod_base = OTHER; note = 2'-O-methyladenosine
ctcctccagagatgaaagata

SEQ ID NO: 10617 - RNA, 21 nt, synthetic construct
  source 1..21: mol_type = other RNA
  modified_base 1: mod_base = OTHER; note = 2'-O-methyluridine-3'-phosphorothioate
  modified_base 2: mod_base = OTHER; note = 2'-O-methylcytidine-3'-phosphorothioate
  modified_base 3: mod_base = OTHER; note = 2'-O-methylcytidine-3'-phosphate
  modified_base 4: mod_base = OTHER; note = 2'-O-methyluridine-3'-phosphate
  modified_base 5: mod_base = OTHER; note = 2'-O-methylcytidine-3'-phosphate
  modified_base 6: mod_base = OTHER; note = 2'-O-docosanyl-cytidine-3'-phosphate
  modified_base 7: mod_base = OTHER; note = 2'-deoxy-2'-fluoroadenosine-3'-phosphate
  modified_base 8: mod_base = OTHER; note = 2'-O-methylguanosine-3'-phosphate
  modified_base 9: mod_base = OTHER; note = 2'-deoxy-2'-fluoroadenosine-3'-phosphate
  modified_base 10: mod_base = OTHER; note = 2'-deoxy-2'-fluoroguanosine-3'-phosphate
  modified_base 11: mod_base = OTHER; note = 2'-deoxy-2'-fluoroadenosine-3'-phosphate
  modified_base 12: mod_base = OTHER; note = 2'-O-methyluridine-3'-phosphate
  modified_base 13: mod_base = OTHER; note = 2'-O-methylguanosine-3'-phosphate
  modified_base 14: mod_base = OTHER; note = 2'-O-methyladenosine-3'-phosphate
  modified_base 15: mod_base = OTHER; note = 2'-O-methyladenosine-3'-phosphate
  modified_base 16: mod_base = OTHER; note = 2'-O-methyladenosine-3'-phosphate
  modified_base 17: mod_base = OTHER; note = 2'-O-methylguanosine-3'-phosphate
  modified_base 18: mod_base = OTHER; note = 2'-O-methyladenosine-3'-phosphate
  modified_base 19: mod_base = OTHER; note = 2'-O-methyluridine-3'-phosphorothioate
  modified_base 20: mod_base = OTHER; note = 2'-O-methylcytidine-3'-phosphorothioate
  modified_base 21: mod_base = OTHER; note = 2'-O-methyladenosine
tcctccagagatgaaagatca

SEQ ID NO: 10618 - RNA, 21 nt, synthetic construct
  source 1..21: mol_type = other RNA
  modified_base 1: mod_base = OTHER; note = 2'-O-methylcytidine-3'-phosphorothioate
  modified_base 2: mod_base = OTHER; note = 2'-O-methyluridine-3'-phosphorothioate
  modified_base 3: mod_base = OTHER; note = 2'-O-methylcytidine-3'-phosphate
  modified_base 4: mod_base = OTHER; note = 2'-O-methylcytidine-3'-phosphate
  modified_base 5: mod_base = OTHER; note = 2'-O-methyladenosine-3'-phosphate
  modified_base 6: mod_base = OTHER; note = 2'-O-docosanyl-guanosine-3'-phosphate
  modified_base 7: mod_base = OTHER; note = 2'-deoxy-2'-fluoroadenosine-3'-phosphate
  modified_base 8: mod_base = OTHER; note = 2'-O-methylguanosine-3'-phosphate
  modified_base 9: mod_base = OTHER; note = 2'-deoxy-2'-fluoroadenosine-3'-phosphate
  modified_base 10: mod_base = OTHER; note = 2'-deoxy-2'-fluorouridine-3'-phosphate
  modified_base 11: mod_base = OTHER; note = 2'-deoxy-2'-fluoroguanosine-3'-phosphate
  modified_base 12: mod_base = OTHER; note = 2'-O-methyladenosine-3'-phosphate
  modified_base 13: mod_base = OTHER; note = 2'-O-methyladenosine-3'-phosphate
  modified_base 14: mod_base = OTHER; note = 2'-O-methyladenosine-3'-phosphate
  modified_base 15: mod_base = OTHER; note = 2'-O-methylguanosine-3'-phosphate
  modified_base 16: mod_base = OTHER; note = 2'-O-methyladenosine-3'-phosphate
  modified_base 17: mod_base = OTHER; note = 2'-O-methyluridine-3'-phosphate
  modified_base 18: mod_base = OTHER; note = 2'-O-methylcytidine-3'-phosphate
  modified_base 19: mod_base = OTHER; note = 2'-O-methyluridine-3'-phosphorothioate
  modified_base 20: mod_base = OTHER; note = 2'-O-methyluridine-3'-phosphorothioate
  modified_base 21: mod_base = OTHER; note = 2'-O-methyladenosine
ctccagagatgaaagatctta

SEQ ID NO: 10619 - RNA, 21 nt, synthetic construct
  source 1..21: mol_type = other RNA
  modified_base 1: mod_base = OTHER; note = 2'-O-methyluridine-3'-phosphorothioate
  modified_base 2: mod_base = OTHER; note = 2'-O-methylcytidine-3'-phosphorothioate
  modified_base 3: mod_base = OTHER; note = 2'-O-methylcytidine-3'-phosphate
  modified_base 4: mod_base = OTHER; note = 2'-O-methyladenosine-3'-phosphate
  modified_base 5: mod_base = OTHER; note = 2'-O-methylguanosine-3'-phosphate
  modified_base 6: mod_base = OTHER; note = 2'-O-docosanyl-adenosine-3'-phosphate
  modified_base 7: mod_base = OTHER; note = 2'-deoxy-2'-fluoroguanosine-3'-phosphate
  modified_base 8: mod_base = OTHER; note = 2'-O-methyladenosine-3'-phosphate
  modified_base 9: mod_base = OTHER; note = 2'-deoxy-2'-fluorouridine-3'-phosphate
  modified_base 10: mod_base = OTHER; note = 2'-deoxy-2'-fluoroguanosine-3'-phosphate
  modified_base 11: mod_base = OTHER; note = 2'-deoxy-2'-fluoroadenosine-3'-phosphate
  modified_base 12: mod_base = OTHER; note = 2'-O-methyladenosine-3'-phosphate
  modified_base 13: mod_base = OTHER; note = 2'-O-methyladenosine-3'-phosphate
  modified_base 14: mod_base = OTHER; note = 2'-O-methylguanosine-3'-phosphate
  modified_base 15: mod_base = OTHER; note = 2'-O-methyladenosine-3'-phosphate
  modified_base 16: mod_base = OTHER; note = 2'-O-methyluridine-3'-phosphate
  modified_base 17: mod_base = OTHER; note = 2'-O-methylcytidine-3'-phosphate
  modified_base 18: mod_base = OTHER; note = 2'-O-methyluridine-3'-phosphate
  modified_base 19: mod_base = OTHER; note = 2'-O-methyluridine-3'-phosphorothioate
  modified_base 20: mod_base = OTHER; note = 2'-O-methylguanosine-3'-phosphorothioate
  modified_base 21: mod_base = OTHER; note = 2'-O-methyladenosine
tccagagatgaaagatcttga

SEQ ID NO: 10620 - RNA, 21 nt, synthetic construct
  source 1..21: mol_type = other RNA
  modified_base 1: mod_base = OTHER; note = 2'-O-methylcytidine-3'-phosphorothioate
  modified_base 2: mod_base = OTHER; note = 2'-O-methylcytidine-3'-phosphorothioate
  modified_base 3: mod_base = OTHER; note = 2'-O-methyladenosine-3'-phosphate
  modified_base 4: mod_base = OTHER; note = 2'-O-methylguanosine-3'-phosphate
  modified_base 5: mod_base = OTHER; note = 2'-O-methyladenosine-3'-phosphate
  modified_base 6: mod_base = OTHER; note = 2'-O-docosanyl-guanosine-3'-phosphate
  modified_base 7: mod_base = OTHER; note = 2'-deoxy-2'-fluoroadenosine-3'-phosphate
  modified_base 8: mod_base = OTHER; note = 2'-O-methyluridine-3'-phosphate
  modified_base 9: mod_base = OTHER; note = 2'-deoxy-2'-fluoroguanosine-3'-phosphate
  modified_base 10: mod_base = OTHER; note = 2'-deoxy-2'-fluoroadenosine-3'-phosphate
  modified_base 11: mod_base = OTHER; note = 2'-deoxy-2'-fluoroadenosine-3'-phosphate
  modified_base 12: mod_base = OTHER; note = 2'-O-methyladenosine-3'-phosphate
  modified_base 13: mod_base = OTHER; note = 2'-O-methylguanosine-3'-phosphate
  modified_base 14: mod_base = OTHER; note = 2'-O-methyladenosine-3'-phosphate
  modified_base 15: mod_base = OTHER; note = 2'-O-methyluridine-3'-phosphate
  modified_base 16: mod_base = OTHER; note = 2'-O-methylcytidine-3'-phosphate
  modified_base 17: mod_base = OTHER; note = 2'-O-methyluridine-3'-phosphate
  modified_base 18: mod_base = OTHER; note = 2'-O-methyluridine-3'-phosphate
  modified_base 19: mod_base = OTHER; note = 2'-O-methylguanosine-3'-phosphorothioate
  modified_base 20: mod_base = OTHER; note = 2'-O-methylguanosine-3'-phosphorothioate
  modified_base 21: mod_base = OTHER; note = 2'-O-methyladenosine
ccagagatgaaagatcttgga

SEQ ID NO: 10621 - RNA, 21 nt, synthetic construct
  source 1..21: mol_type = other RNA
  modified_base 1: mod_base = OTHER; note = 2'-O-methyladenosine-3'-phosphorothioate
  modified_base 2: mod_base = OTHER; note = 2'-O-methylguanosine-3'-phosphorothioate
  modified_base 3: mod_base = OTHER; note = 2'-O-methyladenosine-3'-phosphate
  modified_base 4: mod_base = OTHER; note = 2'-O-methylguanosine-3'-phosphate
  modified_base 5: mod_base = OTHER; note = 2'-O-methyladenosine-3'-phosphate
  modified_base 6: mod_base = OTHER; note = 2'-O-docosanyl-uridine-3'-phosphate
  modified_base 7: mod_base = OTHER; note = 2'-deoxy-2'-fluoroguanosine-3'-phosphate
  modified_base 8: mod_base = OTHER; note = 2'-O-methyladenosine-3'-phosphate
  modified_base 9: mod_base = OTHER; note = 2'-deoxy-2'-fluoroadenosine-3'-phosphate
  modified_base 10: mod_base = OTHER; note = 2'-deoxy-2'-fluoroadenosine-3'-phosphate
  modified_base 11: mod_base = OTHER; note = 2'-deoxy-2'-fluoroguanosine-3'-phosphate
  modified_base 12: mod_base = OTHER; note = 2'-O-methyladenosine-3'-phosphate
  modified_base 13: mod_base = OTHER; note = 2'-O-methyluridine-3'-phosphate
  modified_base 14: mod_base = OTHER; note = 2'-O-methylcytidine-3'-phosphate
  modified_base 15: mod_base = OTHER; note = 2'-O-methyluridine-3'-phosphate
  modified_base 16: mod_base = OTHER; note = 2'-O-methyluridine-3'-phosphate
  modified_base 17: mod_base = OTHER; note = 2'-O-methylguanosine-3'-phosphate
  modified_base 18: mod_base = OTHER; note = 2'-O-methylguanosine-3'-phosphate
  modified_base 19: mod_base = OTHER; note = 2'-O-methyluridine-3'-phosphorothioate
  modified_base 20: mod_base = OTHER; note = 2'-O-methyluridine-3'-phosphorothioate
  modified_base 21: mod_base = OTHER; note = 2'-O-methyladenosine
agagatgaaagatcttggtta

SEQ ID NO: 10622 - RNA, 21 nt, synthetic construct
  source 1..21: mol_type = other RNA
  modified_base 1: mod_base = OTHER; note = 2'-O-methylguanosine-3'-phosphorothioate
  modified_base 2: mod_base = OTHER; note = 2'-O-methyladenosine-3'-phosphorothioate
  modified_base 3: mod_base = OTHER; note = 2'-O-methylguanosine-3'-phosphate
  modified_base 4: mod_base = OTHER; note = 2'-O-methyladenosine-3'-phosphate
  modified_base 5: mod_base = OTHER; note = 2'-O-methyluridine-3'-phosphate
  modified_base 6: mod_base = OTHER; note = 2'-O-docosanyl-guanosine-3'-phosphate
  modified_base 7: mod_base = OTHER; note = 2'-deoxy-2'-fluoroadenosine-3'-phosphate
  modified_base 8: mod_base = OTHER; note = 2'-O-methyladenosine-3'-phosphate
  modified_base 9: mod_base = OTHER; note = 2'-deoxy-2'-fluoroadenosine-3'-phosphate
  modified_base 10: mod_base = OTHER; note = 2'-deoxy-2'-fluoroguanosine-3'-phosphate
  modified_base 11: mod_base = OTHER; note = 2'-deoxy-2'-fluoroadenosine-3'-phosphate
  modified_base 12: mod_base = OTHER; note = 2'-O-methyluridine-3'-phosphate
  modified_base 13: mod_base = OTHER; note = 2'-O-methylcytidine-3'-phosphate
  modified_base 14: mod_base = OTHER; note = 2'-O-methyluridine-3'-phosphate
  modified_base 15: mod_base = OTHER; note = 2'-O-methyluridine-3'-phosphate
  modified_base 16: mod_base = OTHER; note = 2'-O-methylguanosine-3'-phosphate
  modified_base 17: mod_base = OTHER; note = 2'-O-methylguanosine-3'-phosphate
  modified_base 18: mod_base = OTHER; note = 2'-O-methyluridine-3'-phosphate
  modified_base 19: mod_base = OTHER; note = 2'-O-methyluridine-3'-phosphorothioate
  modified_base 20: mod_base = OTHER; note = 2'-O-methyluridine-3'-phosphorothioate
  modified_base 21: mod_base = OTHER; note = 2'-O-methyladenosine
gagatgaaagatcttggttta

SEQ ID NO: 10623 - RNA, 21 nt, synthetic construct
  source 1..21: mol_type = other RNA
  modified_base 1: mod_base = OTHER; note = 2'-O-methyladenosine-3'-phosphorothioate
  modified_base 2: mod_base = OTHER; note = 2'-O-methyluridine-3'-phosphorothioate
  modified_base 3: mod_base = OTHER; note = 2'-O-methylguanosine-3'-phosphate
  modified_base 4: mod_base = OTHER; note = 2'-O-methyladenosine-3'-phosphate
  modified_base 5: mod_base = OTHER; note = 2'-O-methyladenosine-3'-phosphate
  modified_base 6: mod_base = OTHER; note = 2'-O-docosanyl-adenosine-3'-phosphate
  modified_base 7: mod_base = OTHER; note = 2'-deoxy-2'-fluoroguanosine-3'-phosphate
  modified_base 8: mod_base = OTHER; note = 2'-O-methyladenosine-3'-phosphate
  modified_base 9: mod_base = OTHER; note = 2'-deoxy-2'-fluorouridine-3'-phosphate
  modified_base 10: mod_base = OTHER; note = 2'-deoxy-2'-fluorocytidine-3'-phosphate
  modified_base 11: mod_base = OTHER; note = 2'-deoxy-2'-fluorouridine-3'-phosphate
  modified_base 12: mod_base = OTHER; note = 2'-O-methyluridine-3'-phosphate
  modified_base 13: mod_base = OTHER; note = 2'-O-methylguanosine-3'-phosphate
  modified_base 14: mod_base = OTHER; note = 2'-O-methylguanosine-3'-phosphate
  modified_base 15: mod_base = OTHER; note = 2'-O-methyluridine-3'-phosphate
  modified_base 16: mod_base = OTHER; note = 2'-O-methyluridine-3'-phosphate
  modified_base 17: mod_base = OTHER; note = 2'-O-methyluridine-3'-phosphate
  modified_base 18: mod_base = OTHER; note = 2'-O-methylcytidine-3'-phosphate
  modified_base 19: mod_base = OTHER; note = 2'-O-methylguanosine-3'-phosphorothioate
  modified_base 20: mod_base = OTHER; note = 2'-O-methyluridine-3'-phosphorothioate
  modified_base 21: mod_base = OTHER; note = 2'-O-methyladenosine
atgaaagatcttggtttcgta

SEQ ID NO: 10624 - RNA, 21 nt, synthetic construct
  source 1..21: mol_type = other RNA
  modified_base 1: mod_base = OTHER; note = 2'-O-methyluridine-3'-phosphorothioate
  modified_base 2: mod_base = OTHER; note = 2'-O-methyluridine-3'-phosphorothioate
  modified_base 3: mod_base = OTHER; note = 2'-O-methyluridine-3'-phosphate
  modified_base 4: mod_base = OTHER; note = 2'-O-methylcytidine-3'-phosphate
  modified_base 5: mod_base = OTHER; note = 2'-O-methylguanosine-3'-phosphate
  modified_base 6: mod_base = OTHER; note = 2'-O-docosanyl-uridine-3'-phosphate
  modified_base 7: mod_base = OTHER; note = 2'-deoxy-2'-fluoroguanosine-3'-phosphate
  modified_base 8: mod_base = OTHER; note = 2'-O-methyladenosine-3'-phosphate
  modified_base 9: mod_base = OTHER; note = 2'-deoxy-2'-fluoroguanosine-3'-phosphate
  modified_base 10: mod_base = OTHER; note = 2'-deoxy-2'-fluoroguanosine-3'-phosphate
  modified_base 11: mod_base = OTHER; note = 2'-deoxy-2'-fluorocytidine-3'-phosphate
  modified_base 12: mod_base = OTHER; note = 2'-O-methyladenosine-3'-phosphate
  modified_base 13: mod_base = OTHER; note = 2'-O-methylguanosine-3'-phosphate
  modified_base 14: mod_base = OTHER; note = 2'-O-methyladenosine-3'-phosphate
  modified_base 15: mod_base = OTHER; note = 2'-O-methyladenosine-3'-phosphate
  modified_base 16: mod_base = OTHER; note = 2'-O-methyladenosine-3'-phosphate
  modified_base 17: mod_base = OTHER; note = 2'-O-methyluridine-3'-phosphate
  modified_base 18: mod_base = OTHER; note = 2'-O-methyluridine-3'-phosphate
  modified_base 19: mod_base = OTHER; note = 2'-O-methyluridine-3'-phosphorothioate
  modified_base 20: mod_base = OTHER; note = 2'-O-methyladenosine-3'-phosphorothioate
  modified_base 21: mod_base = OTHER; note = 2'-O-methyladenosine
tttcgtgaggcagaaatttaa

SEQ ID NO: 10625 - RNA, 21 nt, synthetic construct
  source 1..21: mol_type = other RNA
  modified_base 1: mod_base = OTHER; note = 2'-O-methyluridine-3'-phosphorothioate
  modified_base 2: mod_base = OTHER; note = 2'-O-methylguanosine-3'-phosphorothioate
  modified_base 3: mod_base = OTHER; note = 2'-O-methylcytidine-3'-phosphate
  modified_base 4: mod_base = OTHER; note = 2'-O-methylguanosine-3'-phosphate
  modified_base 5: mod_base = OTHER; note = 2'-O-methyladenosine-3'-phosphate
  modified_base 6: mod_base = OTHER; note = 2'-O-docosanyl-cytidine-3'-phosphate
  modified_base 7: mod_base = OTHER; note = 2'-deoxy-2'-fluoroadenosine-3'-phosphate
  modified_base 8: mod_base = OTHER; note = 2'-O-methyluridine-3'-phosphate
  modified_base 9: mod_base = OTHER; note = 2'-deoxy-2'-fluoroguanosine-3'-phosphate
  modified_base 10: mod_base = OTHER; note = 2'-deoxy-2'-fluoroadenosine-3'-phosphate
  modified_base 11: mod_base = OTHER; note = 2'-deoxy-2'-fluoroadenosine-3'-phosphate
  modified_base 12: mod_base = OTHER; note = 2'-O-methyladenosine-3'-phosphate
  modified_base 13: mod_base = OTHER; note = 2'-O-methyladenosine-3'-phosphate
  modified_base 14: mod_base = OTHER; note = 2'-O-methylcytidine-3'-phosphate
  modified_base 15: mod_base = OTHER; note = 2'-O-methyladenosine-3'-phosphate
  modified_base 16: mod_base = OTHER; note = 2'-O-methyluridine-3'-phosphate
  modified_base 17: mod_base = OTHER; note = 2'-O-methylcytidine-3'-phosphate
  modified_base 18: mod_base = OTHER; note = 2'-O-methylcytidine-3'-phosphate
  modified_base 19: mod_base = OTHER; note = 2'-O-methyluridine-3'-phosphorothioate
  modified_base 20: mod_base = OTHER; note = 2'-O-methyluridine-3'-phosphorothioate
  modified_base 21: mod_base = OTHER; note = 2'-O-methyladenosine
tgcgacatgaaaacatcctta

SEQ ID NO: 10626 - RNA, 21 nt, synthetic construct
  source 1..21: mol_type = other RNA
  modified_base 1: mod_base = OTHER; note = 2'-O-methyluridine-3'-phosphorothioate
  modified_base 2: mod_base = OTHER; note = 2'-O-methyluridine-3'-phosphorothioate
  modified_base 3: mod_base = OTHER; note = 2'-O-methylguanosine-3'-phosphate
  modified_base 4: mod_base = OTHER; note = 2'-O-methylcytidine-3'-phosphate
  modified_base 5: mod_base = OTHER; note = 2'-O-methyluridine-3'-phosphate
  modified_base 6: mod_base = OTHER; note = 2'-O-docosanyl-guanosine-3'-phosphate
  modified_base 7: mod_base = OTHER; note = 2'-deoxy-2'-fluorocytidine-3'-phosphate
  modified_base 8: mod_base = OTHER; note = 2'-O-methyluridine-3'-phosphate
  modified_base 9: mod_base = OTHER; note = 2'-deoxy-2'-fluoroguanosine-3'-phosphate
  modified_base 10: mod_base = OTHER; note = 2'-deoxy-2'-fluoroadenosine-3'-phosphate
  modified_base 11: mod_base = OTHER; note = 2'-deoxy-2'-fluorocytidine-3'-phosphate
  modified_base 12: mod_base = OTHER; note = 2'-O-methyladenosine-3'-phosphate
  modified_base 13: mod_base = OTHER; note = 2'-O-methyladenosine-3'-phosphate
  modified_base 14: mod_base = OTHER; note = 2'-O-methylcytidine-3'-phosphate
  modified_base 15: mod_base = OTHER; note = 2'-O-methyladenosine-3'-phosphate
  modified_base 16: mod_base = OTHER; note = 2'-O-methyladenosine-3'-phosphate
  modified_base 17: mod_base = OTHER; note = 2'-O-methyladenosine-3'-phosphate
  modified_base 18: mod_base = OTHER; note = 2'-O-methylguanosine-3'-phosphate
  modified_base 19: mod_base = OTHER; note = 2'-O-methyladenosine-3'-phosphorothioate
  modified_base 20: mod_base = OTHER; note = 2'-O-methyluridine-3'-phosphorothioate
  modified_base 21: mod_base = OTHER; note = 2'-O-methyladenosine
ttgctgctgacaacaaagata

SEQ ID NO: 10627 - RNA, 21 nt, synthetic construct
  source 1..21: mol_type = other RNA
  modified_base 1: mod_base = OTHER; note = 2'-O-methyladenosine-3'-phosphorothioate
  modified_base 2: mod_base = OTHER; note = 2'-O-methyluridine-3'-phosphorothioate
  modified_base 3: mod_base = OTHER; note = 2'-O-methylguanosine-3'-phosphate
  modified_base 4: mod_base = OTHER; note = 2'-O-methylcytidine-3'-phosphate
  modified_base 5: mod_base = OTHER; note = 2'-O-methyluridine-3'-phosphate
  modified_base 6: mod_base = OTHER; note = 2'-O-docosanyl-guanosine-3'-phosphate
  modified_base 7: mod_base = OTHER; note = 2'-deoxy-2'-fluorocytidine-3'-phosphate
  modified_base 8: mod_base = OTHER; note = 2'-O-methylguanosine-3'-phosphate
  modified_base 9: mod_base = OTHER; note = 2'-deoxy-2'-fluoroadenosine-3'-phosphate
  modified_base 10: mod_base = OTHER; note = 2'-deoxy-2'-fluorocytidine-3'-phosphate
  modified_base 11: mod_base = OTHER; note = 2'-deoxy-2'-fluoroadenosine-3'-phosphate
  modified_base 12: mod_base = OTHER; note = 2'-O-methyluridine-3'-phosphate
  modified_base 13: mod_base = OTHER; note = 2'-O-methylguanosine-3'-phosphate
  modified_base 14: mod_base = OTHER; note = 2'-O-methyladenosine-3'-phosphate
  modified_base 15: mod_base = OTHER; note = 2'-O-methyladenosine-3'-phosphate
  modified_base 16: mod_base = OTHER; note = 2'-O-methyladenosine-3'-phosphate
  modified_base 17: mod_base = OTHER; note = 2'-O-methyladenosine-3'-phosphate
  modified_base 18: mod_base = OTHER; note = 2'-O-methylcytidine-3'-phosphate
  modified_base 19: mod_base = OTHER; note = 2'-O-methyladenosine-3'-phosphorothioate
  modified_base 20: mod_base = OTHER; note = 2'-O-methyluridine-3'-phosphorothioate
  modified_base 21: mod_base = OTHER; note = 2'-O-methyladenosine
atgctgcgacatgaaaacata

SEQ ID NO: 10628 - RNA, 21 nt, synthetic construct
  source 1..21: mol_type = other RNA
  modified_base 1: mod_base = OTHER; note = 2'-O-methylcytidine-3'-phosphorothioate
  modified_base 2: mod_base = OTHER; note = 2'-O-methyluridine-3'-phosphorothioate
  modified_base 3: mod_base = OTHER; note = 2'-O-methylguanosine-3'-phosphate
  modified_base 4: mod_base = OTHER; note = 2'-O-methylcytidine-3'-phosphate
  modified_base 5: mod_base = OTHER; note = 2'-O-methylguanosine-3'-phosphate
  modified_base 6: mod_base = OTHER; note = 2'-O-docosanyl-adenosine-3'-phosphate
  modified_base 7: mod_base = OTHER; note = 2'-deoxy-2'-fluorocytidine-3'-phosphate
  modified_base 8: mod_base = OTHER; note = 2'-O-methyladenosine-3'-phosphate
  modified_base 9: mod_base = OTHER; note = 2'-deoxy-2'-fluorouridine-3'-phosphate
  modified_base 10: mod_base = OTHER; note = 2'-deoxy-2'-fluoroguanosine-3'-phosphate
  modified_base 11: mod_base = OTHER; note = 2'-deoxy-2'-fluoroadenosine-3'-phosphate
  modified_base 12: mod_base = OTHER; note = 2'-O-methyladenosine-3'-phosphate
  modified_base 13: mod_base = OTHER; note = 2'-O-methyladenosine-3'-phosphate
  modified_base 14: mod_base = OTHER; note = 2'-O-methyladenosine-3'-phosphate
  modified_base 15: mod_base = OTHER; note = 2'-O-methylcytidine-3'-phosphate
  modified_base 16: mod_base = OTHER; note = 2'-O-methyladenosine-3'-phosphate
  modified_base 17: mod_base = OTHER; note = 2'-O-methyluridine-3'-phosphate
  modified_base 18: mod_base = OTHER; note = 2'-O-methylcytidine-3'-phosphate
  modified_base 19: mod_base = OTHER; note = 2'-O-methylcytidine-3'-phosphorothioate
  modified_base 20: mod_base = OTHER; note = 2'-O-methyluridine-3'-phosphorothioate
  modified_base 21: mod_base = OTHER; note = 2'-O-methyladenosine
ctgcgacatgaaaacatccta

SEQ ID NO: 10629 - RNA, 21 nt, synthetic construct
  source 1..21: mol_type = other RNA
  modified_base 1: mod_base = OTHER; note = 2'-O-methylguanosine-3'-phosphorothioate
  modified_base 2: mod_base = OTHER; note = 2'-O-methylcytidine-3'-phosphorothioate
  modified_base 3: mod_base = OTHER; note = 2'-O-methylguanosine-3'-phosphate
  modified_base 4: mod_base = OTHER; note = 2'-O-methyladenosine-3'-phosphate
  modified_base 5: mod_base = OTHER; note = 2'-O-methylcytidine-3'-phosphate
  modified_base 6: mod_base = OTHER; note = 2'-O-docosanyl-adenosine-3'-phosphate
  modified_base 7: mod_base = OTHER; note = 2'-deoxy-2'-fluorouridine-3'-phosphate
  modified_base 8: mod_base = OTHER; note = 2'-O-methylguanosine-3'-phosphate
  modified_base 9: mod_base = OTHER; note = 2'-deoxy-2'-fluoroadenosine-3'-phosphate
  modified_base 10: mod_base = OTHER; note = 2'-deoxy-2'-fluoroadenosine-3'-phosphate
  modified_base 11: mod_base = OTHER; note = 2'-deoxy-2'-fluoroadenosine-3'-phosphate
  modified_base 12: mod_base = OTHER; note = 2'-O-methyladenosine-3'-phosphate
  modified_base 13: mod_base = OTHER; note = 2'-O-methylcytidine-3'-phosphate
  modified_base 14: mod_base = OTHER; note = 2'-O-methyladenosine-3'-phosphate
  modified_base 15: mod_base = OTHER; note = 2'-O-methyluridine-3'-phosphate
  modified_base 16: mod_base = OTHER; note = 2'-O-methylcytidine-3'-phosphate
  modified_base 17: mod_base = OTHER; note = 2'-O-methylcytidine-3'-phosphate
  modified_base 18: mod_base = OTHER; note = 2'-O-methyluridine-3'-phosphate
  modified_base 19: mod_base = OTHER; note = 2'-O-methyluridine-3'-phosphorothioate
  modified_base 20: mod_base = OTHER; note = 2'-O-methylguanosine-3'-phosphorothioate
  modified_base 21: mod_base = OTHER; note = 2'-O-methyladenosine
gcgacatgaaaacatccttga

SEQ ID NO: 10630 - RNA, 21 nt, synthetic construct
  source 1..21: mol_type = other RNA
  modified_base 1: mod_base = OTHER; note = 2'-O-methylguanosine-3'-phosphorothioate
  modified_base 2: mod_base = OTHER; note = 2'-O-methyladenosine-3'-phosphorothioate
  modified_base 3: mod_base = OTHER; note = 2'-O-methylcytidine-3'-phosphate
  modified_base 4: mod_base = OTHER; note = 2'-O-methyladenosine-3'-phosphate
  modified_base 5: mod_base = OTHER; note = 2'-O-methyluridine-3'-phosphate
  modified_base 6: mod_base = OTHER; note = 2'-O-docosanyl-guanosine-3'-phosphate
  modified_base 7: mod_base = OTHER; note = 2'-deoxy-2'-fluoroadenosine-3'-phosphate
  modified_base 8: mod_base = OTHER; note = 2'-O-methyladenosine-3'-phosphate
  modified_base 9: mod_base = OTHER; note = 2'-deoxy-2'-fluoroadenosine-3'-phosphate
  modified_base 10: mod_base = OTHER; note = 2'-deoxy-2'-fluoroadenosine-3'-phosphate
  modified_base 11: mod_base = OTHER; note = 2'-deoxy-2'-fluorocytidine-3'-phosphate
  modified_base 12: mod_base = OTHER; note = 2'-O-methyladenosine-3'-phosphate
  modified_base 13: mod_base = OTHER; note = 2'-O-methyluridine-3'-phosphate
  modified_base 14: mod_base = OTHER; note = 2'-O-methylcytidine-3'-phosphate
  modified_base 15: mod_base = OTHER; note = 2'-O-methylcytidine-3'-phosphate
  modified_base 16: mod_base = OTHER; note = 2'-O-methyluridine-3'-phosphate
  modified_base 17: mod_base = OTHER; note = 2'-O-methyluridine-3'-phosphate
  modified_base 18: mod_base = OTHER; note = 2'-O-methylguanosine-3'-phosphate
  modified_base 19: mod_base = OTHER; note = 2'-O-methylguanosine-3'-phosphorothioate
  modified_base 20: mod_base = OTHER; note = 2'-O-methyluridine-3'-phosphorothioate
  modified_base 21: mod_base = OTHER; note = 2'-O-methyladenosine
gacatgaaaacatccttggta

SEQ ID NO: 10631 - RNA, 21 nt, synthetic construct
  source 1..21: mol_type = other RNA
  modified_base 1: mod_base = OTHER; note = 2'-O-methyladenosine-3'-phosphorothioate
  modified_base 2: mod_base = OTHER; note = 2'-O-methylcytidine-3'-phosphorothioate
  modified_base 3: mod_base = OTHER; note = 2'-O-methyladenosine-3'-phosphate
  modified_base 4: mod_base = OTHER; note = 2'-O-methyluridine-3'-phosphate
  modified_base 5: mod_base = OTHER; note = 2'-O-methylguanosine-3'-phosphate
  modified_base 6: mod_base = OTHER; note = 2'-O-docosanyl-adenosine-3'-phosphate
  modified_base 7: mod_base = OTHER; note = 2'-deoxy-2'-fluoroadenosine-3'-phosphate
  modified_base 8: mod_base = OTHER; note = 2'-O-methyladenosine-3'-phosphate
  modified_base 9: mod_base = OTHER; note = 2'-deoxy-2'-fluoroadenosine-3'-phosphate
  modified_base 10: mod_base = OTHER; note = 2'-deoxy-2'-fluorocytidine-3'-phosphate
  modified_base 11: mod_base = OTHER; note = 2'-deoxy-2'-fluoroadenosine-3'-phosphate
  modified_base 12: mod_base = OTHER; note = 2'-O-methyluridine-3'-phosphate
  modified_base 13: mod_base = OTHER; note = 2'-O-methylcytidine-3'-phosphate
  modified_base 14: mod_base = OTHER; note = 2'-O-methylcytidine-3'-phosphate
  modified_base 15: mod_base = OTHER; note = 2'-O-methyluridine-3'-phosphate
  modified_base 16: mod_base = OTHER; note = 2'-O-methyluridine-3'-phosphate
  modified_base 17: mod_base = OTHER; note = 2'-O-methylguanosine-3'-phosphate
  modified_base 18: mod_base = OTHER; note = 2'-O-methylguanosine-3'-phosphate
  modified_base 19: mod_base = OTHER; note = 2'-O-methyluridine-3'-phosphorothioate
  modified_base 20: mod_base = OTHER; note = 2'-O-methyluridine-3'-phosphorothioate
  modified_base 21: mod_base = OTHER; note = 2'-O-methyladenosine
acatgaaaacatccttggtta

SEQ ID NO: 10632 - RNA, 21 nt, synthetic construct
  source 1..21: mol_type = other RNA
  modified_base 1: mod_base = OTHER; note = 2'-O-methylcytidine-3'-phosphorothioate
  modified_base 2: mod_base = OTHER; note = 2'-O-methyladenosine-3'-phosphorothioate
  modified_base 3: mod_base = OTHER; note = 2'-O-methyluridine-3'-phosphate
  modified_base 4: mod_base = OTHER; note = 2'-O-methylguanosine-3'-phosphate
  modified_base 5: mod_base = OTHER; note = 2'-O-methyladenosine-3'-phosphate
  modified_base 6: mod_base = OTHER; note = 2'-O-docosanyl-adenosine-3'-phosphate
  modified_base 7: mod_base = OTHER; note = 2'-deoxy-2'-fluoroadenosine-3'-phosphate
  modified_base 8: mod_base = OTHER; note = 2'-O-methyladenosine-3'-phosphate
  modified_base 9: mod_base = OTHER; note = 2'-deoxy-2'-fluorocytidine-3'-phosphate
  modified_base 10: mod_base = OTHER; note = 2'-deoxy-2'-fluoroadenosine-3'-phosphate
  modified_base 11: mod_base = OTHER; note = 2'-deoxy-2'-fluorouridine-3'-phosphate
  modified_base 12: mod_base = OTHER; note = 2'-O-methylcytidine-3'-phosphate
  modified_base 13: mod_base = OTHER; note = 2'-O-methylcytidine-3'-phosphate
  modified_base 14: mod_base = OTHER; note = 2'-O-methyluridine-3'-phosphate
  modified_base 15: mod_base = OTHER; note = 2'-O-methyluridine-3'-phosphate
  modified_base 16: mod_base = OTHER; note = 2'-O-methylguanosine-3'-phosphate
  modified_base 17: mod_base = OTHER; note = 2'-O-methylguanosine-3'-phosphate
  modified_base 18: mod_base = OTHER; note = 2'-O-methyluridine-3'-phosphate
  modified_base 19: mod_base = OTHER; note = 2'-O-methyluridine-3'-phosphorothioate
  modified_base 20: mod_base = OTHER; note = 2'-O-methyluridine-3'-phosphorothioate
  modified_base 21: mod_base = OTHER; note = 2'-O-methyladenosine
catgaaaacatccttggttta

SEQ ID NO: 10633 - RNA, 21 nt, synthetic construct
  source 1..21: mol_type = other RNA
  modified_base 1: mod_base = OTHER; note = 2'-O-methylguanosine-3'-phosphorothioate
  modified_base 2: mod_base = OTHER; note = 2'-O-methyladenosine-3'-phosphorothioate
  modified_base 3: mod_base = OTHER; note = 2'-O-methyladenosine-3'-phosphate
  modified_base 4: mod_base = OTHER; note = 2'-O-methyladenosine-3'-phosphate
  modified_base 5: mod_base = OTHER; note = 2'-O-methyladenosine-3'-phosphate
  modified_base 6: mod_base = OTHER; note = 2'-O-docosanyl-cytidine-3'-phosphate
  modified_base 7: mod_base = OTHER; note = 2'-deoxy-2'-fluoroadenosine-3'-phosphate
  modified_base 8: mod_base = OTHER; note = 2'-O-methyluridine-3'-phosphate
  modified_base 9: mod_base = OTHER; note = 2'-deoxy-2'-fluorocytidine-3'-phosphate
  modified_base 10: mod_base = OTHER; note = 2'-deoxy-2'-fluorocytidine-3'-phosphate
  modified_base 11: mod_base = OTHER; note = 2'-deoxy-2'-fluorouridine-3'-phosphate
  modified_base 12: mod_base = OTHER; note = 2'-O-methyluridine-3'-phosphate
  modified_base 13: mod_base = OTHER; note = 2'-O-methylguanosine-3'-phosphate
  modified_base 14: mod_base = OTHER; note = 2'-O-methylguanosine-3'-phosphate
  modified_base 15: mod_base = OTHER; note = 2'-O-methyluridine-3'-phosphate
  modified_base 16: mod_base = OTHER; note = 2'-O-methyluridine-3'-phosphate
  modified_base 17: mod_base = OTHER; note = 2'-O-methyluridine-3'-phosphate
  modified_base 18: mod_base = OTHER; note = 2'-O-methylcytidine-3'-phosphate
  modified_base 19: mod_base = OTHER; note = 2'-O-methyladenosine-3'-phosphorothioate
  modified_base 20: mod_base = OTHER; note = 2'-O-methyluridine-3'-phosphorothioate
  modified_base 21: mod_base = OTHER; note = 2'-O-methyladenosine
gaaaacatccttggtttcata

SEQ ID NO: 10634 - RNA, 21 nt, synthetic construct
  source 1..21: mol_type = other RNA
  modified_base 1: mod_base = OTHER; note = 2'-O-methylcytidine-3'-phosphorothioate
  modified_base 2: mod_base = OTHER; note = 2'-O-methyladenosine-3'-phosphorothioate
  modified_base 3: mod_base = OTHER; note = 2'-O-methyluridine-3'-phosphate
  modified_base 4: mod_base = OTHER; note = 2'-O-methylcytidine-3'-phosphate
  modified_base 5: mod_base = OTHER; note = 2'-O-methylcytidine-3'-phosphate
  modified_base 6: mod_base = OTHER; note = 2'-O-docosanyl-uridine-3'-phosphate
  modified_base 7: mod_base = OTHER; note = 2'-deoxy-2'-fluorouridine-3'-phosphate
  modified_base 8: mod_base = OTHER; note = 2'-O-methylguanosine-3'-phosphate
  modified_base 9: mod_base = OTHER; note = 2'-deoxy-2'-fluoroguanosine-3'-phosphate
  modified_base 10: mod_base = OTHER; note = 2'-deoxy-2'-fluorouridine-3'-phosphate
  modified_base 11: mod_base = OTHER; note = 2'-deoxy-2'-fluorouridine-3'-phosphate
  modified_base 12: mod_base = OTHER; note = 2'-O-methyluridine-3'-phosphate
  modified_base 13: mod_base = OTHER; note = 2'-O-methylcytidine-3'-phosphate
  modified_base 14: mod_base = OTHER; note = 2'-O-methyladenosine-3'-phosphate
  modified_base 15: mod_base = OTHER; note = 2'-O-methyluridine-3'-phosphate
  modified_base 16: mod_base = OTHER; note = 2'-O-methyluridine-3'-phosphate
  modified_base 17: mod_base = OTHER; note = 2'-O-methylguanosine-3'-phosphate
  modified_base 18: mod_base = OTHER; note = 2'-O-methylcytidine-3'-phosphate
  modified_base 19: mod_base = OTHER; note = 2'-O-methyluridine-3'-phosphorothioate
  modified_base 20: mod_base = OTHER; note = 2'-O-methylguanosine-3'-phosphorothioate
  modified_base 21: mod_base = OTHER; note = 2'-O-methyladenosine
catccttggtttcattgctga

SEQ ID NO: 10635 - RNA, 21 nt, synthetic construct
  source 1..21: mol_type = other RNA
  modified_base 1: mod_base = OTHER; note = 2'-O-methylcytidine-3'-phosphorothioate
  modified_base 2: mod_base = OTHER; note = 2'-O-methyluridine-3'-phosphorothioate
  modified_base 3: mod_base = OTHER; note = 2'-O-methyluridine-3'-phosphate
  modified_base 4: mod_base = OTHER; note = 2'-O-methylguanosine-3'-phosphate
  modified_base 5: mod_base = OTHER; note = 2'-O-methylguanosine-3'-phosphate
  modified_base 6: mod_base = OTHER; note = 2'-O-docosanyl-uridine-3'-phosphate
  modified_base 7: mod_base = OTHER; note = 2'-deoxy-2'-fluorouridine-3'-phosphate
  modified_base 8: mod_base = OTHER; note = 2'-O-methyluridine-3'-phosphate
  modified_base 9: mod_base = OTHER; note = 2'-deoxy-2'-fluorocytidine-3'-phosphate
  modified_base 10: mod_base = OTHER; note = 2'-deoxy-2'-fluoroadenosine-3'-phosphate
  modified_base 11: mod_base = OTHER; note = 2'-deoxy-2'-fluorouridine-3'-phosphate
  modified_base 12: mod_base = OTHER; note = 2'-O-methyluridine-3'-phosphate
  modified_base 13: mod_base = OTHER; note = 2'-O-methylguanosine-3'-phosphate
  modified_base 14: mod_base = OTHER; note = 2'-O-methylcytidine-3'-phosphate
  modified_base 15: mod_base = OTHER; note = 2'-O-methyluridine-3'-phosphate
  modified_base 16: mod_base = OTHER; note = 2'-O-methylguanosine-3'-phosphate
  modified_base 17: mod_base = OTHER; note = 2'-O-methylcytidine-3'-phosphate
  modified_base 18: mod_base = OTHER; note = 2'-O-methyluridine-3'-phosphate
  modified_base 19: mod_base = OTHER; note = 2'-O-methylguanosine-3'-phosphorothioate
  modified_base 20: mod_base = OTHER; note = 2'-O-methyladenosine-3'-phosphorothioate
  modified_base 21: mod_base = OTHER; note = 2'-O-methyladenosine
cttggtttcattgctgctgaa

SEQ ID NO: 10636 - RNA, 21 nt, synthetic construct
  source 1..21: mol_type = other RNA
  modified_base 1: mod_base = OTHER; note = 2'-O-methylguanosine-3'-phosphorothioate
  modified_base 2: mod_base = OTHER; note = 2'-O-methylguanosine-3'-phosphorothioate
  modified_base 3: mod_base = OTHER; note = 2'-O-methyluridine-3'-phosphate
  modified_base 4: mod_base = OTHER; note = 2'-O-methyluridine-3'-phosphate
  modified_base 5: mod_base = OTHER; note = 2'-O-methyluridine-3'-phosphate
  modified_base 6: mod_base = OTHER; note = 2'-O-docosanyl-cytidine-3'-phosphate
  modified_base 7: mod_base = OTHER; note = 2'-deoxy-2'-fluoroadenosine-3'-phosphate
  modified_base 8: mod_base = OTHER; note = 2'-O-methyluridine-3'-phosphate
  modified_base 9: mod_base = OTHER; note = 2'-deoxy-2'-fluorouridine-3'-phosphate
  modified_base 10: mod_base = OTHER; note = 2'-deoxy-2'-fluoroguanosine-3'-phosphate
  modified_base 11: mod_base = OTHER; note = 2'-deoxy-2'-fluorocytidine-3'-phosphate
  modified_base 12: mod_base = OTHER; note = 2'-O-methyluridine-3'-phosphate
  modified_base 13: mod_base = OTHER; note = 2'-O-methylguanosine-3'-phosphate
  modified_base 14: mod_base = OTHER; note = 2'-O-methylcytidine-3'-phosphate
  modified_base 15: mod_base = OTHER; note = 2'-O-methyluridine-3'-phosphate
  modified_base 16: mod_base = OTHER; note = 2'-O-methylguanosine-3'-phosphate
  modified_base 17: mod_base = OTHER; note = 2'-O-methyladenosine-3'-phosphate
  modified_base 18: mod_base = OTHER; note = 2'-O-methylcytidine-3'-phosphate
  modified_base 19: mod_base = OTHER; note = 2'-O-methyladenosine-3'-phosphorothioate
  modified_base 20: mod_base = OTHER; note = 2'-O-methyladenosine-3'-phosphorothioate
  modified_base 21: mod_base = OTHER; note = 2'-O-methyladenosine
ggtttcattgctgctgacaaa

SEQ ID NO: 10637 - RNA, 21 nt, synthetic construct
  source 1..21: mol_type = other RNA
  modified_base 1: mod_base = OTHER; note = 2'-O-methyluridine-3'-phosphorothioate
  modified_base 2: mod_base = OTHER; note = 2'-O-methyluridine-3'-phosphorothioate
  modified_base 3: mod_base = OTHER; note = 2'-O-methylcytidine-3'-phosphate
  modified_base 4: mod_base = OTHER; note = 2'-O-methyladenosine-3'-phosphate
  modified_base 5: mod_base = OTHER; note = 2'-O-methyluridine-3'-phosphate
  modified_base 6: mod_base = OTHER; note = 2'-O-docosanyl-uridine-3'-phosphate
  modified_base 7: mod_base = OTHER; note = 2'-deoxy-2'-fluoroguanosine-3'-phosphate
  modified_base 8: mod_base = OTHER; note = 2'-O-methylcytidine-3'-phosphate
  modified_base 9: mod_base = OTHER; note = 2'-deoxy-2'-fluorouridine-3'-phosphate
  modified_base 10: mod_base = OTHER; note = 2'-deoxy-2'-fluoroguanosine-3'-phosphate
  modified_base 11: mod_base = OTHER; note = 2'-deoxy-2'-fluorocytidine-3'-phosphate
  modified_base 12: mod_base = OTHER; note = 2'-O-methyluridine-3'-phosphate
  modified_base 13: mod_base = OTHER; note = 2'-O-methylguanosine-3'-phosphate
  modified_base 14: mod_base = OTHER; note = 2'-O-methyladenosine-3'-phosphate
  modified_base 15: mod_base = OTHER; note = 2'-O-methylcytidine-3'-phosphate
  modified_base 16: mod_base = OTHER; note = 2'-O-methyladenosine-3'-phosphate
  modified_base 17: mod_base = OTHER; note = 2'-O-methyladenosine-3'-phosphate
  modified_base 18: mod_base = OTHER; note = 2'-O-methylcytidine-3'-phosphate
  modified_base 19: mod_base = OTHER; note = 2'-O-methyladenosine-3'-phosphorothioate
  modified_base 20: mod_base = OTHER; note = 2'-O-methyladenosine-3'-phosphorothioate
  modified_base 21: mod_base = OTHER; note = 2'-O-methyladenosine
ttcattgctgctgacaacaaa

SEQ ID NO: 10638 - RNA, 21 nt, synthetic construct
  source 1..21: mol_type = other RNA
  modified_base 1: mod_base = OTHER; note = 2'-O-methyluridine-3'-phosphorothioate
  modified_base 2: mod_base = OTHER; note = 2'-O-methylcytidine-3'-phosphorothioate
  modified_base 3: mod_base = OTHER; note = 2'-O-methyladenosine-3'-phosphate
  modified_base 4: mod_base = OTHER; note = 2'-O-methyluridine-3'-phosphate
  modified_base 5: mod_base = OTHER; note = 2'-O-methyluridine-3'-phosphate
  modified_base 6: mod_base = OTHER; note = 2'-O-docosanyl-guanosine-3'-phosphate
  modified_base 7: mod_base = OTHER; note = 2'-deoxy-2'-fluorocytidine-3'-phosphate
  modified_base 8: mod_base = OTHER; note = 2'-O-methyluridine-3'-phosphate
  modified_base 9: mod_base = OTHER; note = 2'-deoxy-2'-fluoroguanosine-3'-phosphate
  modified_base 10: mod_base = OTHER; note = 2'-deoxy-2'-fluorocytidine-3'-phosphate
  modified_base 11: mod_base = OTHER; note = 2'-deoxy-2'-fluorouridine-3'-phosphate
  modified_base 12: mod_base = OTHER; note = 2'-O-methylguanosine-3'-phosphate
  modified_base 13: mod_base = OTHER; note = 2'-O-methyladenosine-3'-phosphate
  modified_base 14: mod_base = OTHER; note = 2'-O-methylcytidine-3'-phosphate
  modified_base 15: mod_base = OTHER; note = 2'-O-methyladenosine-3'-phosphate
  modified_base 16: mod_base = OTHER; note = 2'-O-methyladenosine-3'-phosphate
  modified_base 17: mod_base = OTHER; note = 2'-O-methylcytidine-3'-phosphate
  modified_base 18: mod_base = OTHER; note = 2'-O-methyladenosine-3'-phosphate
  modified_base 19: mod_base = OTHER; note = 2'-O-methyladenosine-3'-phosphorothioate
  modified_base 20: mod_base = OTHER; note = 2'-O-methyladenosine-3'-phosphorothioate
  modified_base 21: mod_base = OTHER; note = 2'-O-methyladenosine
tcattgctgctgacaacaaaa

SEQ ID NO: 10639 - RNA, 21 nt, synthetic construct
  source 1..21: mol_type = other RNA
  modified_base 1: mod_base = OTHER; note = 2'-O-methyluridine-3'-phosphorothioate
  modified_base 2: mod_base = OTHER; note = 2'-O-methylguanosine-3'-phosphorothioate
  modified_base 3: mod_base = OTHER; note = 2'-O-methylcytidine-3'-phosphate
  modified_base 4: mod_base = OTHER; note = 2'-O-methyluridine-3'-phosphate
  modified_base 5: mod_base = OTHER; note = 2'-O-methylguanosine-3'-phosphate
  modified_base 6: mod_base = OTHER; note = 2'-O-docosanyl-adenosine-3'-phosphate
  modified_base 7: mod_base = OTHER; note = 2'-deoxy-2'-fluorocytidine-3'-phosphate
  modified_base 8: mod_base = OTHER; note = 2'-O-methyladenosine-3'-phosphate
  modified_base 9: mod_base = OTHER; note = 2'-deoxy-2'-fluoroadenosine-3'-phosphate
  modified_base 10: mod_base = OTHER; note = 2'-deoxy-2'-fluorocytidine-3'-phosphate
  modified_base 11: mod_base = OTHER; note = 2'-deoxy-2'-fluoroadenosine-3'-phosphate
  modified_base 12: mod_base = OTHER; note = 2'-O-methyladenosine-3'-phosphate
  modified_base 13: mod_base = OTHER; note = 2'-O-methyladenosine-3'-phosphate
  modified_base 14: mod_base = OTHER; note = 2'-O-methylguanosine-3'-phosphate
  modified_base 15: mod_base = OTHER; note = 2'-O-methyladenosine-3'-phosphate
  modified_base 16: mod_base = OTHER; note = 2'-O-methyluridine-3'-phosphate
  modified_base 17: mod_base = OTHER; note = 2'-O-methyladenosine-3'-phosphate
  modified_base 18: mod_base = OTHER; note = 2'-O-methyladenosine-3'-phosphate
  modified_base 19: mod_base = OTHER; note = 2'-O-methyluridine-3'-phosphorothioate
  modified_base 20: mod_base = OTHER; note = 2'-O-methylguanosine-3'-phosphorothioate
  modified_base 21: mod_base = OTHER; note = 2'-O-methyladenosine
tgctgacaacaaagataatga

SEQ ID NO: 10640 - RNA, 21 nt, synthetic construct
  source 1..21: mol_type = other RNA
  modified_base 1: mod_base = OTHER; note = 2'-O-methylguanosine-3'-phosphorothioate
  modified_base 2: mod_base = OTHER; note = 2'-O-methylcytidine-3'-phosphorothioate
  modified_base 3: mod_base = OTHER; note = 2'-O-methyluridine-3'-phosphate
  modified_base 4: mod_base = OTHER; note = 2'-O-methylguanosine-3'-phosphate
  modified_base 5: mod_base = OTHER; note = 2'-O-methyladenosine-3'-phosphate
  modified_base 6: mod_base = OTHER; note = 2'-O-docosanyl-cytidine-3'-phosphate
  modified_base 7: mod_base = OTHER; note = 2'-deoxy-2'-fluoroadenosine-3'-phosphate
  modified_base 8: mod_base = OTHER; note = 2'-O-methyladenosine-3'-phosphate
  modified_base 9: mod_base = OTHER; note = 2'-deoxy-2'-fluorocytidine-3'-phosphate
  modified_base 10: mod_base = OTHER; note = 2'-deoxy-2'-fluoroadenosine-3'-phosphate
  modified_base 11: mod_base = OTHER; note = 2'-deoxy-2'-fluoroadenosine-3'-phosphate
  modified_base 12: mod_base = OTHER; note = 2'-O-methyladenosine-3'-phosphate
  modified_base 13: mod_base = OTHER; note = 2'-O-methylguanosine-3'-phosphate
  modified_base 14: mod_base = OTHER; note = 2'-O-methyladenosine-3'-phosphate
  modified_base 15: mod_base = OTHER; note = 2'-O-methyluridine-3'-phosphate
  modified_base 16: mod_base = OTHER; note = 2'-O-methyladenosine-3'-phosphate
  modified_base 17: mod_base = OTHER; note = 2'-O-methyladenosine-3'-phosphate
  modified_base 18: mod_base = OTHER; note = 2'-O-methyluridine-3'-phosphate
  modified_base 19: mod_base = OTHER; note = 2'-O-methylguanosine-3'-phosphorothioate
  modified_base 20: mod_base = OTHER; note = 2'-O-methylguanosine-3'-phosphorothioate
  modified_base 21: mod_base = OTHER; note = 2'-O-methyladenosine
gctgacaacaaagataatgga

SEQ ID NO: 10641 - RNA, 21 nt, synthetic construct
  source 1..21: mol_type = other RNA
  modified_base 1: mod_base = OTHER; note = 2'-O-methyluridine-3'-phosphorothioate
  modified_base 2: mod_base = OTHER; note = 2'-O-methylguanosine-3'-phosphorothioate
  modified_base 3: mod_base = OTHER; note = 2'-O-methyladenosine-3'-phosphate
  modified_base 4: mod_base = OTHER; note = 2'-O-methylcytidine-3'-phosphate
  modified_base 5: mod_base = OTHER; note = 2'-O-methyladenosine-3'-phosphate
  modified_base 6: mod_base = OTHER; note = 2'-O-docosanyl-adenosine-3'-phosphate
  modified_base 7: mod_base = OTHER; note = 2'-deoxy-2'-fluorocytidine-3'-phosphate
  modified_base 8: mod_base = OTHER; note = 2'-O-methyladenosine-3'-phosphate
  modified_base 9: mod_base = OTHER; note = 2'-deoxy-2'-fluoroadenosine-3'-phosphate
  modified_base 10: mod_base = OTHER; note = 2'-deoxy-2'-fluoroadenosine-3'-phosphate
  modified_base 11: mod_base = OTHER; note = 2'-deoxy-2'-fluoroguanosine-3'-phosphate
  modified_base 12: mod_base = OTHER; note = 2'-O-methyladenosine-3'-phosphate
  modified_base 13: mod_base = OTHER; note = 2'-O-methyluridine-3'-phosphate
  modified_base 14: mod_base = OTHER; note = 2'-O-methyladenosine-3'-phosphate
  modified_base 15: mod_base = OTHER; note = 2'-O-methyladenosine-3'-phosphate
  modified_base 16: mod_base = OTHER; note = 2'-O-methyluridine-3'-phosphate
  modified_base 17: mod_base = OTHER; note = 2'-O-methylguanosine-3'-phosphate
  modified_base 18: mod_base = OTHER; note = 2'-O-methylguanosine-3'-phosphate
  modified_base 19: mod_base = OTHER; note = 2'-O-methyladenosine-3'-phosphorothioate
  modified_base 20: mod_base = OTHER; note = 2'-O-methyladenosine-3'-phosphorothioate
  modified_base 21: mod_base = OTHER; note = 2'-O-methyladenosine
tgacaacaaagataatggaaa

SEQ ID NO: 10642 - RNA, 21 nt, synthetic construct
  source 1..21: mol_type = other RNA
  modified_base 1: mod_base = OTHER; note = 2'-O-methylguanosine-3'-phosphorothioate
  modified_base 2: mod_base = OTHER; note = 2'-O-methyladenosine-3'-phosphorothioate
  modified_base 3: mod_base = OTHER; note = 2'-O-methylcytidine-3'-phosphate
  modified_base 4: mod_base = OTHER; note = 2'-O-methyladenosine-3'-phosphate
  modified_base 5: mod_base = OTHER; note = 2'-O-methyladenosine-3'-phosphate
  modified_base 6: mod_base = OTHER; note = 2'-O-docosanyl-cytidine-3'-phosphate
  modified_base 7: mod_base = OTHER; note = 2'-deoxy-2'-fluoroadenosine-3'-phosphate
  modified_base 8: mod_base = OTHER; note = 2'-O-methyladenosine-3'-phosphate
  modified_base 9: mod_base = OTHER; note = 2'-deoxy-2'-fluoroadenosine-3'-phosphate
  modified_base 10: mod_base = OTHER; note = 2'-deoxy-2'-fluoroguanosine-3'-phosphate
  modified_base 11: mod_base = OTHER; note = 2'-deoxy-2'-fluoroadenosine-3'-phosphate
  modified_base 12: mod_base = OTHER; note = 2'-O-methyluridine-3'-phosphate
  modified_base 13: mod_base = OTHER; note = 2'-O-methyladenosine-3'-phosphate
  modified_base 14: mod_base = OTHER; note = 2'-O-methyladenosine-3'-phosphate
  modified_base 15: mod_base = OTHER; note = 2'-O-methyluridine-3'-phosphate
  modified_base 16: mod_base = OTHER; note = 2'-O-methylguanosine-3'-phosphate
  modified_base 17: mod_base = OTHER; note = 2'-O-methylguanosine-3'-phosphate
  modified_base 18: mod_base = OTHER; note = 2'-O-methyladenosine-3'-phosphate
  modified_base 19: mod_base = OTHER; note = 2'-O-methyladenosine-3'-phosphorothioate
  modified_base 20: mod_base = OTHER; note = 2'-O-methylcytidine-3'-phosphorothioate
  modified_base 21: mod_base = OTHER; note = 2'-O-methyladenosine
gacaacaaagataatggaaca

SEQ ID NO: 10643 - RNA, 21 nt, synthetic construct
  source 1..21: mol_type = other RNA
  modified_base 1: mod_base = OTHER; note = 2'-O-methyluridine-3'-phosphorothioate
  modified_base 2: mod_base = OTHER; note = 2'-O-methylguanosine-3'-phosphorothioate
  modified_base 3: mod_base = OTHER; note = 2'-O-methylguanosine-3'-phosphate
  modified_base 4: mod_base = OTHER; note = 2'-O-methyluridine-3'-phosphate
  modified_base 5: mod_base = OTHER; note = 2'-O-methyladenosine-3'-phosphate
  modified_base 6: mod_base = OTHER; note = 2'-O-docosanyl-uridine-3'-phosphate
  modified_base 7: mod_base = OTHER; note = 2'-deoxy-2'-fluorocytidine-3'-phosphate
  modified_base 8: mod_base = OTHER; note = 2'-O-methyluridine-3'-phosphate
  modified_base 9: mod_base = OTHER; note = 2'-deoxy-2'-fluoroguanosine-3'-phosphate
  modified_base 10: mod_base = OTHER; note = 2'-deoxy-2'-fluoroadenosine-3'-phosphate
  modified_base 11: mod_base = OTHER; note = 2'-deoxy-2'-fluoroadenosine-3'-phosphate
  modified_base 12: mod_base = OTHER; note = 2'-O-methyluridine-3'-phosphate
  modified_base 13: mod_base = OTHER; note = 2'-O-methyladenosine-3'-phosphate
  modified_base 14: mod_base = OTHER; note = 2'-O-methyluridine-3'-phosphate
  modified_base 15: mod_base = OTHER; note = 2'-O-methylcytidine-3'-phosphate
  modified_base 16: mod_base = OTHER; note = 2'-O-methyladenosine-3'-phosphate
  modified_base 17: mod_base = OTHER; note = 2'-O-methyluridine-3'-phosphate
  modified_base 18: mod_base = OTHER; note = 2'-O-methylguanosine-3'-phosphate
  modified_base 19: mod_base = OTHER; note = 2'-O-methyladenosine-3'-phosphorothioate
  modified_base 20: mod_base = OTHER; note = 2'-O-methyladenosine-3'-phosphorothioate
  modified_base 21: mod_base = OTHER; note = 2'-O-methyladenosine
tggtatctgaatatcatgaaa

SEQ ID NO: 10644 - RNA, 21 nt, synthetic construct
  source 1..21: mol_type = other RNA
  modified_base 1: mod_base = OTHER; note = 2'-O-methyladenosine-3'-phosphorothioate
  modified_base 2: mod_base = OTHER; note = 2'-O-methyladenosine-3'-phosphorothioate
  modified_base 3: mod_base = OTHER; note = 2'-O-methylcytidine-3'-phosphate
  modified_base 4: mod_base = OTHER; note = 2'-O-methyladenosine-3'-phosphate
  modified_base 5: mod_base = OTHER; note = 2'-O-methyladenosine-3'-phosphate
  modified_base 6: mod_base = OTHER; note = 2'-O-docosanyl-adenosine-3'-phosphate
  modified_base 7: mod_base = OTHER; note = 2'-deoxy-2'-fluoroguanosine-3'-phosphate
  modified_base 8: mod_base = OTHER; note = 2'-O-methyladenosine-3'-phosphate
  modified_base 9: mod_base = OTHER; note = 2'-deoxy-2'-fluorouridine-3'-phosphate
  modified_base 10: mod_base = OTHER; note = 2'-deoxy-2'-fluoroadenosine-3'-phosphate
  modified_base 11: mod_base = OTHER; note = 2'-deoxy-2'-fluoroadenosine-3'-phosphate
  modified_base 12: mod_base = OTHER; note = 2'-O-methyluridine-3'-phosphate
  modified_base 13: mod_base = OTHER; note = 2'-O-methylguanosine-3'-phosphate
  modified_base 14: mod_base = OTHER; note = 2'-O-methylguanosine-3'-phosphate
  modified_base 15: mod_base = OTHER; note = 2'-O-methyladenosine-3'-phosphate
  modified_base 16: mod_base = OTHER; note = 2'-O-methyladenosine-3'-phosphate
  modified_base 17: mod_base = OTHER; note = 2'-O-methylcytidine-3'-phosphate
  modified_base 18: mod_base = OTHER; note = 2'-O-methyluridine-3'-phosphate
  modified_base 19: mod_base = OTHER; note = 2'-O-methyluridine-3'-phosphorothioate
  modified_base 20: mod_base = OTHER; note = 2'-O-methylguanosine-3'-phosphorothioate
  modified_base 21: mod_base = OTHER; note = 2'-O-methyladenosine
aacaaagataatggaacttga

SEQ ID NO: 10645 - RNA, 21 nt, synthetic construct
  source 1..21: mol_type = other RNA
  modified_base 1: mod_base = OTHER; note = 2'-O-methyladenosine-3'-phosphorothioate
  modified_base 2: mod_base = OTHER; note = 2'-O-methylcytidine-3'-phosphorothioate
  modified_base 3: mod_base = OTHER; note = 2'-O-methyluridine-3'-phosphate
  modified_base 4: mod_base = OTHER; note = 2'-O-methyluridine-3'-phosphate
  modified_base 5: mod_base = OTHER; note = 2'-O-methyluridine-3'-phosphate
  modified_base 6: mod_base = OTHER; note = 2'-O-docosanyl-guanosine-3'-phosphate
  modified_base 7: mod_base = OTHER; note = 2'-deoxy-2'-fluoroguanosine-3'-phosphate
  modified_base 8: mod_base = OTHER; note = 2'-O-methylcytidine-3'-phosphate
  modified_base 9: mod_base = OTHER; note = 2'-deoxy-2'-fluorouridine-3'-phosphate
  modified_base 10: mod_base = OTHER; note = 2'-deoxy-2'-fluoroguanosine-3'-phosphate
  modified_base 11: mod_base = OTHER; note = 2'-deoxy-2'-fluoroguanosine-3'-phosphate
  modified_base 12: mod_base = OTHER; note = 2'-O-methyluridine-3'-phosphate
  modified_base 13: mod_base = OTHER; note = 2'-O-methyladenosine-3'-phosphate
  modified_base 14: mod_base = OTHER; note = 2'-O-methyluridine-3'-phosphate
  modified_base 15: mod_base = OTHER; note = 2'-O-methylcytidine-3'-phosphate
  modified_base 16: mod_base = OTHER; note = 2'-O-methyluridine-3'-phosphate
  modified_base 17: mod_base = OTHER; note = 2'-O-methylguanosine-3'-phosphate
  modified_base 18: mod_base = OTHER; note = 2'-O-methyladenosine-3'-phosphate
  modified_base 19: mod_base = OTHER; note = 2'-O-methyladenosine-3'-phosphorothioate
  modified_base 20: mod_base = OTHER; note = 2'-O-methyluridine-3'-phosphorothioate
  modified_base 21: mod_base = OTHER; note = 2'-O-methyladenosine
actttggctggtatctgaata

SEQ ID NO: 10646 - RNA, 21 nt, synthetic construct
  source 1..21: mol_type = other RNA
  modified_base 1: mod_base = OTHER; note = 2'-O-methyluridine-3'-phosphorothioate
  modified_base 2: mod_base = OTHER; note = 2'-O-methyluridine-3'-phosphorothioate
  modified_base 3: mod_base = OTHER; note = 2'-O-methyluridine-3'-phosphate
  modified_base 4: mod_base = OTHER; note = 2'-O-methylguanosine-3'-phosphate
  modified_base 5: mod_base = OTHER; note = 2'-O-methylguanosine-3'-phosphate
  modified_base 6: mod_base = OTHER; note = 2'-O-docosanyl-cytidine-3'-phosphate
  modified_base 7: mod_base = OTHER; note = 2'-deoxy-2'-fluorouridine-3'-phosphate
  modified_base 8: mod_base = OTHER; note = 2'-O-methylguanosine-3'-phosphate
  modified_base 9: mod_base = OTHER; note = 2'-deoxy-2'-fluoroguanosine-3'-phosphate
  modified_base 10: mod_base = OTHER; note = 2'-deoxy-2'-fluorouridine-3'-phosphate
  modified_base 11: mod_base = OTHER; note = 2'-deoxy-2'-fluoroadenosine-3'-phosphate
  modified_base 12: mod_base = OTHER; note = 2'-O-methyluridine-3'-phosphate
  modified_base 13: mod_base = OTHER; note = 2'-O-methylcytidine-3'-phosphate
  modified_base 14: mod_base = OTHER; note = 2'-O-methyluridine-3'-phosphate
  modified_base 15: mod_base = OTHER; note = 2'-O-methylguanosine-3'-phosphate
  modified_base 16: mod_base = OTHER; note = 2'-O-methyladenosine-3'-phosphate
  modified_base 17: mod_base = OTHER; note = 2'-O-methyladenosine-3'-phosphate
  modified_base 18: mod_base = OTHER; note = 2'-O-methyluridine-3'-phosphate
  modified_base 19: mod_base = OTHER; note = 2'-O-methyladenosine-3'-phosphorothioate
  modified_base 20: mod_base = OTHER; note = 2'-O-methyluridine-3'-phosphorothioate
  modified_base 21: mod_base = OTHER; note = 2'-O-methyladenosine
tttggctggtatctgaatata

SEQ ID NO: 10647 - RNA, 21 nt, synthetic construct
  source 1..21: mol_type = other RNA
  modified_base 1: mod_base = OTHER; note = 2'-O-methyluridine-3'-phosphorothioate
  modified_base 2: mod_base = OTHER; note = 2'-O-methyluridine-3'-phosphorothioate
  modified_base 3: mod_base = OTHER; note = 2'-O-methylguanosine-3'-phosphate
  modified_base 4: mod_base = OTHER; note = 2'-O-methylguanosine-3'-phosphate
  modified_base 5: mod_base = OTHER; note = 2'-O-methylcytidine-3'-phosphate
  modified_base 6: mod_base = OTHER; note = 2'-O-docosanyl-uridine-3'-phosphate
  modified_base 7: mod_base = OTHER; note = 2'-deoxy-2'-fluoroguanosine-3'-phosphate
  modified_base 8: mod_base = OTHER; note = 2'-O-methylguanosine-3'-phosphate
  modified_base 9: mod_base = OTHER; note = 2'-deoxy-2'-fluorouridine-3'-phosphate
  modified_base 10: mod_base = OTHER; note = 2'-deoxy-2'-fluoroadenosine-3'-phosphate
  modified_base 11: mod_base = OTHER; note = 2'-deoxy-2'-fluorouridine-3'-phosphate
  modified_base 12: mod_base = OTHER; note = 2'-O-methylcytidine-3'-phosphate
  modified_base 13: mod_base = OTHER; note = 2'-O-methyluridine-3'-phosphate
  modified_base 14: mod_base = OTHER; note = 2'-O-methylguanosine-3'-phosphate
  modified_base 15: mod_base = OTHER; note = 2'-O-methyladenosine-3'-phosphate
  modified_base 16: mod_base = OTHER; note = 2'-O-methyladenosine-3'-phosphate
  modified_base 17: mod_base = OTHER; note = 2'-O-methyluridine-3'-phosphate
  modified_base 18: mod_base = OTHER; note = 2'-O-methyladenosine-3'-phosphate
  modified_base 19: mod_base = OTHER; note = 2'-O-methyluridine-3'-phosphorothioate
  modified_base 20: mod_base = OTHER; note = 2'-O-methylcytidine-3'-phosphorothioate
  modified_base 21: mod_base = OTHER; note = 2'-O-methyladenosine
ttggctggtatctgaatatca

SEQ ID NO: 10648 - RNA, 21 nt, synthetic construct
  source 1..21: mol_type = other RNA
  modified_base 1: mod_base = OTHER; note = 2'-O-methyluridine-3'-phosphorothioate
  modified_base 2: mod_base = OTHER; note = 2'-O-methylguanosine-3'-phosphorothioate
  modified_base 3: mod_base = OTHER; note = 2'-O-methylguanosine-3'-phosphate
  modified_base 4: mod_base = OTHER; note = 2'-O-methylcytidine-3'-phosphate
  modified_base 5: mod_base = OTHER; note = 2'-O-methyluridine-3'-phosphate
  modified_base 6: mod_base = OTHER; note = 2'-O-docosanyl-guanosine-3'-phosphate
  modified_base 7: mod_base = OTHER; note = 2'-deoxy-2'-fluoroguanosine-3'-phosphate
  modified_base 8: mod_base = OTHER; note = 2'-O-methyluridine-3'-phosphate
  modified_base 9: mod_base = OTHER; note = 2'-deoxy-2'-fluoroadenosine-3'-phosphate
  modified_base 10: mod_base = OTHER; note = 2'-deoxy-2'-fluorouridine-3'-phosphate
  modified_base 11: mod_base = OTHER; note = 2'-deoxy-2'-fluorocytidine-3'-phosphate
  modified_base 12: mod_base = OTHER; note = 2'-O-methyluridine-3'-phosphate
  modified_base 13: mod_base = OTHER; note = 2'-O-methylguanosine-3'-phosphate
  modified_base 14: mod_base = OTHER; note = 2'-O-methyladenosine-3'-phosphate
  modified_base 15: mod_base = OTHER; note = 2'-O-methyladenosine-3'-phosphate
  modified_base 16: mod_base = OTHER; note = 2'-O-methyluridine-3'-phosphate
  modified_base 17: mod_base = OTHER; note = 2'-O-methyladenosine-3'-phosphate
  modified_base 18: mod_base = OTHER; note = 2'-O-methyluridine-3'-phosphate
  modified_base 19: mod_base = OTHER; note = 2'-O-methylcytidine-3'-phosphorothioate
  modified_base 20: mod_base = OTHER; note = 2'-O-methyladenosine-3'-phosphorothioate
  modified_base 21: mod_base = OTHER; note = 2'-O-methyladenosine
tggctggtatctgaatatcaa

SEQ ID NO: 10649 - RNA, 21 nt, synthetic construct
  source 1..21: mol_type = other RNA
  modified_base 1: mod_base = OTHER; note = 2'-O-methylguanosine-3'-phosphorothioate
  modified_base 2: mod_base = OTHER; note = 2'-O-methyluridine-3'-phosphorothioate
  modified_base 3: mod_base = OTHER; note = 2'-O-methyladenosine-3'-phosphate
  modified_base 4: mod_base = OTHER; note = 2'-O-methyluridine-3'-phosphate
  modified_base 5: mod_base = OTHER; note = 2'-O-methylcytidine-3'-phosphate
  modified_base 6: mod_base = OTHER; note = 2'-O-docosanyl-uridine-3'-phosphate
  modified_base 7: mod_base = OTHER; note = 2'-deoxy-2'-fluoroguanosine-3'-phosphate
  modified_base 8: mod_base = OTHER; note = 2'-O-methyladenosine-3'-phosphate
  modified_base 9: mod_base = OTHER; note = 2'-deoxy-2'-fluoroadenosine-3'-phosphate
  modified_base 10: mod_base = OTHER; note = 2'-deoxy-2'-fluorouridine-3'-phosphate
  modified_base 11: mod_base = OTHER; note = 2'-deoxy-2'-fluoroadenosine-3'-phosphate
  modified_base 12: mod_base = OTHER; note = 2'-O-methyluridine-3'-phosphate
  modified_base 13: mod_base = OTHER; note = 2'-O-methylcytidine-3'-phosphate
  modified_base 14: mod_base = OTHER; note = 2'-O-methyladenosine-3'-phosphate
  modified_base 15: mod_base = OTHER; note = 2'-O-methyluridine-3'-phosphate
  modified_base 16: mod_base = OTHER; note = 2'-O-methylguanosine-3'-phosphate
  modified_base 17: mod_base = OTHER; note = 2'-O-methyladenosine-3'-phosphate
  modified_base 18: mod_base = OTHER; note = 2'-O-methyladenosine-3'-phosphate
  modified_base 19: mod_base = OTHER; note = 2'-O-methylcytidine-3'-phosphorothioate
  modified_base 20: mod_base = OTHER; note = 2'-O-methyladenosine-3'-phosphorothioate
  modified_base 21: mod_base = OTHER; note = 2'-O-methyladenosine
gtatctgaatatcatgaacaa

SEQ ID NO: 10650 - RNA, 21 nt, synthetic construct
  source 1..21: mol_type = other RNA
  modified_base 1: mod_base = OTHER; note = 2'-O-methylcytidine-3'-phosphorothioate
  modified_base 2: mod_base = OTHER; note = 2'-O-methyladenosine-3'-phosphorothioate
  modified_base 3: mod_base = OTHER; note = 2'-O-methyluridine-3'-phosphate
  modified_base 4: mod_base = OTHER; note = 2'-O-methylguanosine-3'-phosphate
  modified_base 5: mod_base = OTHER; note = 2'-O-methyladenosine-3'-phosphate
  modified_base 6: mod_base = OTHER; note = 2'-O-docosanyl-adenosine-3'-phosphate
  modified_base 7: mod_base = OTHER; note = 2'-deoxy-2'-fluorocytidine-3'-phosphate
  modified_base 8: mod_base = OTHER; note = 2'-O-methyladenosine-3'-phosphate
  modified_base 9: mod_base = OTHER; note = 2'-deoxy-2'-fluoroguanosine-3'-phosphate
  modified_base 10: mod_base = OTHER; note = 2'-deoxy-2'-fluoroguanosine-3'-phosphate
  modified_base 11: mod_base = OTHER; note = 2'-deoxy-2'-fluoroguanosine-3'-phosphate
  modified_base 12: mod_base = OTHER; note = 2'-O-methylcytidine-3'-phosphate
  modified_base 13: mod_base = OTHER; note = 2'-O-methyluridine-3'-phosphate
  modified_base 14: mod_base = OTHER; note = 2'-O-methylcytidine-3'-phosphate
  modified_base 15: mod_base = OTHER; note = 2'-O-methylcytidine-3'-phosphate
  modified_base 16: mod_base = OTHER; note = 2'-O-methyluridine-3'-phosphate
  modified_base 17: mod_base = OTHER; note = 2'-O-methyluridine-3'-phosphate
  modified_base 18: mod_base = OTHER; note = 2'-O-methyladenosine-3'-phosphate
  modified_base 19: mod_base = OTHER; note = 2'-O-methyluridine-3'-phosphorothioate
  modified_base 20: mod_base = OTHER; note = 2'-O-methyladenosine-3'-phosphorothioate
  modified_base 21: mod_base = OTHER; note = 2'-O-methyladenosine
catgaacagggctccttataa

SEQ ID NO: 10651 - RNA, 21 nt, synthetic construct
  source 1..21: mol_type = other RNA
  modified_base 1: mod_base = OTHER; note = 2'-O-methyladenosine-3'-phosphorothioate
  modified_base 2: mod_base = OTHER; note = 2'-O-methyluridine-3'-phosphorothioate
  modified_base 3: mod_base = OTHER; note = 2'-O-methylguanosine-3'-phosphate
  modified_base 4: mod_base = OTHER; note = 2'-O-methyladenosine-3'-phosphate
  modified_base 5: mod_base = OTHER; note = 2'-O-methyladenosine-3'-phosphate
  modified_base 6: mod_base = OTHER; note = 2'-O-docosanyl-cytidine-3'-phosphate
  modified_base 7: mod_base = OTHER; note = 2'-deoxy-2'-fluoroadenosine-3'-phosphate
  modified_base 8: mod_base = OTHER; note = 2'-O-methylguanosine-3'-phosphate
  modified_base 9: mod_base = OTHER; note = 2'-deoxy-2'-fluoroguanosine-3'-phosphate
  modified_base 10: mod_base = OTHER; note = 2'-deoxy-2'-fluoroguanosine-3'-phosphate
  modified_base 11: mod_base = OTHER; note = 2'-deoxy-2'-fluorocytidine-3'-phosphate
  modified_base 12: mod_base = OTHER; note = 2'-O-methyluridine-3'-phosphate
  modified_base 13: mod_base = OTHER; note = 2'-O-methylcytidine-3'-phosphate
  modified_base 14: mod_base = OTHER; note = 2'-O-methylcytidine-3'-phosphate
  modified_base 15: mod_base = OTHER; note = 2'-O-methyluridine-3'-phosphate
  modified_base 16: mod_base = OTHER; note = 2'-O-methyluridine-3'-phosphate
  modified_base 17: mod_base = OTHER; note = 2'-O-methyladenosine-3'-phosphate
  modified_base 18: mod_base = OTHER; note = 2'-O-methyluridine-3'-phosphate
  modified_base 19: mod_base = OTHER; note = 2'-O-methyladenosine-3'-phosphorothioate
  modified_base 20: mod_base = OTHER; note = 2'-O-methyluridine-3'-phosphorothioate
  modified_base 21: mod_base = OTHER; note = 2'-O-methyladenosine
atgaacagggctccttatata

SEQ ID NO: 10652 - RNA, 21 nt, synthetic construct
  source 1..21: mol_type = other RNA
  modified_base 1: mod_base = OTHER; note = 2'-O-methylcytidine-3'-phosphorothioate
  modified_base 2: mod_base = OTHER; note = 2'-O-methyluridine-3'-phosphorothioate
  modified_base 3: mod_base = OTHER; note = 2'-O-methylcytidine-3'-phosphate
  modified_base 4: mod_base = OTHER; note = 2'-O-methylcytidine-3'-phosphate
  modified_base 5: mod_base = OTHER; note = 2'-O-methyluridine-3'-phosphate
  modified_base 6: mod_base = OTHER; note = 2'-O-docosanyl-uridine-3'-phosphate
  modified_base 7: mod_base = OTHER; note = 2'-deoxy-2'-fluoroadenosine-3'-phosphate
  modified_base 8: mod_base = OTHER; note = 2'-O-methyluridine-3'-phosphate
  modified_base 9: mod_base = OTHER; note = 2'-deoxy-2'-fluoroadenosine-3'-phosphate
  modified_base 10: mod_base = OTHER; note = 2'-deoxy-2'-fluorouridine-3'-phosphate
  modified_base 11: mod_base = OTHER; note = 2'-deoxy-2'-fluoroguanosine-3'-phosphate
  modified_base 12: mod_base = OTHER; note = 2'-O-methyladenosine-3'-phosphate
  modified_base 13: mod_base = OTHER; note = 2'-O-methylcytidine-3'-phosphate
  modified_base 14: mod_base = OTHER; note = 2'-O-methyluridine-3'-phosphate
  modified_base 15: mod_base = OTHER; note = 2'-O-methyladenosine-3'-phosphate
  modified_base 16: mod_base = OTHER; note = 2'-O-methyluridine-3'-phosphate
  modified_base 17: mod_base = OTHER; note = 2'-O-methyluridine-3'-phosphate
  modified_base 18: mod_base = OTHER; note = 2'-O-methyluridine-3'-phosphate
  modified_base 19: mod_base = OTHER; note = 2'-O-methylguanosine-3'-phosphorothioate
  modified_base 20: mod_base = OTHER; note = 2'-O-methyladenosine-3'-phosphorothioate
  modified_base 21: mod_base = OTHER; note = 2'-O-methyladenosine
ctccttatatgactatttgaa

SEQ ID NO: 10653 - RNA, 21 nt, synthetic construct
  source 1..21: mol_type = other RNA
  modified_base 1: mod_base = OTHER; note = 2'-O-methyladenosine-3'-phosphorothioate
  modified_base 2: mod_base = OTHER; note = 2'-O-methylcytidine-3'-phosphorothioate
  modified_base 3: mod_base = OTHER; note = 2'-O-methyladenosine-3'-phosphate
  modified_base 4: mod_base = OTHER; note = 2'-O-methylguanosine-3'-phosphate
  modified_base 5: mod_base = OTHER; note = 2'-O-methylguanosine-3'-phosphate
  modified_base 6: mod_base = OTHER; note = 2'-O-docosanyl-guanosine-3'-phosphate
  modified_base 7: mod_base = OTHER; note = 2'-deoxy-2'-fluorocytidine-3'-phosphate
  modified_base 8: mod_base = OTHER; note = 2'-O-methyluridine-3'-phosphate
  modified_base 9: mod_base = OTHER; note = 2'-deoxy-2'-fluorocytidine-3'-phosphate
  modified_base 10: mod_base = OTHER; note = 2'-deoxy-2'-fluorocytidine-3'-phosphate
  modified_base 11: mod_base = OTHER; note = 2'-deoxy-2'-fluorouridine-3'-phosphate
  modified_base 12: mod_base = OTHER; note = 2'-O-methyluridine-3'-phosphate
  modified_base 13: mod_base = OTHER; note = 2'-O-methyladenosine-3'-phosphate
  modified_base 14: mod_base = OTHER; note = 2'-O-methyluridine-3'-phosphate
  modified_base 15: mod_base = OTHER; note = 2'-O-methyladenosine-3'-phosphate
  modified_base 16: mod_base = OTHER; note = 2'-O-methyluridine-3'-phosphate
  modified_base 17: mod_base = OTHER; note = 2'-O-methylguanosine-3'-phosphate
  modified_base 18: mod_base = OTHER; note = 2'-O-methyladenosine-3'-phosphate
  modified_base 19: mod_base = OTHER; note = 2'-O-methylcytidine-3'-phosphorothioate
  modified_base 20: mod_base = OTHER; note = 2'-O-methyluridine-3'-phosphorothioate
  modified_base 21: mod_base = OTHER; note = 2'-O-methyladenosine
acagggctccttatatgacta

SEQ ID NO: 10654 - RNA, 21 nt, synthetic construct
  source 1..21: mol_type = other RNA
  modified_base 1: mod_base = OTHER; note = 2'-O-methylcytidine-3'-phosphorothioate
  modified_base 2: mod_base = OTHER; note = 2'-O-methyladenosine-3'-phosphorothioate
  modified_base 3: mod_base = OTHER; note = 2'-O-methylguanosine-3'-phosphate
  modified_base 4: mod_base = OTHER; note = 2'-O-methylguanosine-3'-phosphate
  modified_base 5: mod_base = OTHER; note = 2'-O-methylguanosine-3'-phosphate
  modified_base 6: mod_base = OTHER; note = 2'-O-docosanyl-cytidine-3'-phosphate
  modified_base 7: mod_base = OTHER; note = 2'-deoxy-2'-fluorouridine-3'-phosphate
  modified_base 8: mod_base = OTHER; note = 2'-O-methylcytidine-3'-phosphate
  modified_base 9: mod_base = OTHER; note = 2'-deoxy-2'-fluorocytidine-3'-phosphate
  modified_base 10: mod_base = OTHER; note = 2'-deoxy-2'-fluorouridine-3'-phosphate
  modified_base 11: mod_base = OTHER; note = 2'-deoxy-2'-fluorouridine-3'-phosphate
  modified_base 12: mod_base = OTHER; note = 2'-O-methyladenosine-3'-phosphate
  modified_base 13: mod_base = OTHER; note = 2'-O-methyluridine-3'-phosphate
  modified_base 14: mod_base = OTHER; note = 2'-O-methyladenosine-3'-phosphate
  modified_base 15: mod_base = OTHER; note = 2'-O-methyluridine-3'-phosphate
  modified_base 16: mod_base = OTHER; note = 2'-O-methylguanosine-3'-phosphate
  modified_base 17: mod_base = OTHER; note = 2'-O-methyladenosine-3'-phosphate
  modified_base 18: mod_base = OTHER; note = 2'-O-methylcytidine-3'-phosphate
  modified_base 19: mod_base = OTHER; note = 2'-O-methyluridine-3'-phosphorothioate
  modified_base 20: mod_base = OTHER; note = 2'-O-methyladenosine-3'-phosphorothioate
  modified_base 21: mod_base = OTHER; note = 2'-O-methyladenosine
cagggctccttatatgactaa

SEQ ID NO: 10655 - RNA, 21 nt, synthetic construct
  source 1..21: mol_type = other RNA
  modified_base 1: mod_base = OTHER; note = 2'-O-methyladenosine-3'-phosphorothioate
  modified_base 2: mod_base = OTHER; note = 2'-O-methylguanosine-3'-phosphorothioate
  modified_base 3: mod_base = OTHER; note = 2'-O-methylguanosine-3'-phosphate
  modified_base 4: mod_base = OTHER; note = 2'-O-methylguanosine-3'-phosphate
  modified_base 5: mod_base = OTHER; note = 2'-O-methylcytidine-3'-phosphate
  modified_base 6: mod_base = OTHER; note = 2'-O-docosanyl-uridine-3'-phosphate
  modified_base 7: mod_base = OTHER; note = 2'-deoxy-2'-fluorocytidine-3'-phosphate
  modified_base 8: mod_base = OTHER; note = 2'-O-methylcytidine-3'-phosphate
  modified_base 9: mod_base = OTHER; note = 2'-deoxy-2'-fluorouridine-3'-phosphate
  modified_base 10: mod_base = OTHER; note = 2'-deoxy-2'-fluorouridine-3'-phosphate
  modified_base 11: mod_base = OTHER; note = 2'-deoxy-2'-fluoroadenosine-3'-phosphate
  modified_base 12: mod_base = OTHER; note = 2'-O-methyluridine-3'-phosphate
  modified_base 13: mod_base = OTHER; note = 2'-O-methyladenosine-3'-phosphate
  modified_base 14: mod_base = OTHER; note = 2'-O-methyluridine-3'-phosphate
  modified_base 15: mod_base = OTHER; note = 2'-O-methylguanosine-3'-phosphate
  modified_base 16: mod_base = OTHER; note = 2'-O-methyladenosine-3'-phosphate
  modified_base 17: mod_base = OTHER; note = 2'-O-methylcytidine-3'-phosphate
  modified_base 18: mod_base = OTHER; note = 2'-O-methyluridine-3'-phosphate
  modified_base 19: mod_base = OTHER; note = 2'-O-methyladenosine-3'-phosphorothioate
  modified_base 20: mod_base = OTHER; note = 2'-O-methyluridine-3'-phosphorothioate
  modified_base 21: mod_base = OTHER; note = 2'-O-methyladenosine
agggctccttatatgactata

SEQ ID NO: 10656 - RNA, 21 nt, synthetic construct
  source 1..21: mol_type = other RNA
  modified_base 1: mod_base = OTHER; note = 2'-O-methylguanosine-3'-phosphorothioate
  modified_base 2: mod_base = OTHER; note = 2'-O-methylguanosine-3'-phosphorothioate
  modified_base 3: mod_base = OTHER; note = 2'-O-methylguanosine-3'-phosphate
  modified_base 4: mod_base = OTHER; note = 2'-O-methylcytidine-3'-phosphate
  modified_base 5: mod_base = OTHER; note = 2'-O-methyluridine-3'-phosphate
  modified_base 6: mod_base = OTHER; note = 2'-O-docosanyl-cytidine-3'-phosphate
  modified_base 7: mod_base = OTHER; note = 2'-deoxy-2'-fluorocytidine-3'-phosphate
  modified_base 8: mod_base = OTHER; note = 2'-O-methyluridine-3'-phosphate
  modified_base 9: mod_base = OTHER; note = 2'-deoxy-2'-fluorouridine-3'-phosphate
  modified_base 10: mod_base = OTHER; note = 2'-deoxy-2'-fluoroadenosine-3'-phosphate
  modified_base 11: mod_base = OTHER; note = 2'-deoxy-2'-fluorouridine-3'-phosphate
  modified_base 12: mod_base = OTHER; note = 2'-O-methyladenosine-3'-phosphate
  modified_base 13: mod_base = OTHER; note = 2'-O-methyluridine-3'-phosphate
  modified_base 14: mod_base = OTHER; note = 2'-O-methylguanosine-3'-phosphate
  modified_base 15: mod_base = OTHER; note = 2'-O-methyladenosine-3'-phosphate
  modified_base 16: mod_base = OTHER; note = 2'-O-methylcytidine-3'-phosphate
  modified_base 17: mod_base = OTHER; note = 2'-O-methyluridine-3'-phosphate
  modified_base 18: mod_base = OTHER; note = 2'-O-methyladenosine-3'-phosphate
  modified_base 19: mod_base = OTHER; note = 2'-O-methyluridine-3'-phosphorothioate
  modified_base 20: mod_base = OTHER; note = 2'-O-methyluridine-3'-phosphorothioate
  modified_base 21: mod_base = OTHER; note = 2'-O-methyladenosine
gggctccttatatgactatta

SEQ ID NO: 10657 - RNA, 21 nt, synthetic construct
  source 1..21: mol_type = other RNA
  modified_base 1: mod_base = OTHER; note = 2'-O-methylguanosine-3'-phosphorothioate
  modified_base 2: mod_base = OTHER; note = 2'-O-methylguanosine-3'-phosphorothioate
  modified_base 3: mod_base = OTHER; note = 2'-O-methylcytidine-3'-phosphate
  modified_base 4: mod_base = OTHER; note = 2'-O-methyluridine-3'-phosphate
  modified_base 5: mod_base = OTHER; note = 2'-O-methylcytidine-3'-phosphate
  modified_base 6: mod_base = OTHER; note = 2'-O-docosanyl-cytidine-3'-phosphate
  modified_base 7: mod_base = OTHER; note = 2'-deoxy-2'-fluorouridine-3'-phosphate
  modified_base 8: mod_base = OTHER; note = 2'-O-methyluridine-3'-phosphate
  modified_base 9: mod_base = OTHER; note = 2'-deoxy-2'-fluoroadenosine-3'-phosphate
  modified_base 10: mod_base = OTHER; note = 2'-deoxy-2'-fluorouridine-3'-phosphate
  modified_base 11: mod_base = OTHER; note = 2'-deoxy-2'-fluoroadenosine-3'-phosphate
  modified_base 12: mod_base = OTHER; note = 2'-O-methyluridine-3'-phosphate
  modified_base 13: mod_base = OTHER; note = 2'-O-methylguanosine-3'-phosphate
  modified_base 14: mod_base = OTHER; note = 2'-O-methyladenosine-3'-phosphate
  modified_base 15: mod_base = OTHER; note = 2'-O-methylcytidine-3'-phosphate
  modified_base 16: mod_base = OTHER; note = 2'-O-methyluridine-3'-phosphate
  modified_base 17: mod_base = OTHER; note = 2'-O-methyladenosine-3'-phosphate
  modified_base 18: mod_base = OTHER; note = 2'-O-methyluridine-3'-phosphate
  modified_base 19: mod_base = OTHER; note = 2'-O-methyluridine-3'-phosphorothioate
  modified_base 20: mod_base = OTHER; note = 2'-O-methyluridine-3'-phosphorothioate
  modified_base 21: mod_base = OTHER; note = 2'-O-methyladenosine
ggctccttatatgactattta

SEQ ID NO: 10658 - RNA, 21 nt, synthetic construct
  source 1..21: mol_type = other RNA
  modified_base 1: mod_base = OTHER; note = 2'-O-methylguanosine-3'-phosphorothioate
  modified_base 2: mod_base = OTHER; note = 2'-O-methylcytidine-3'-phosphorothioate
  modified_base 3: mod_base = OTHER; note = 2'-O-methyluridine-3'-phosphate
  modified_base 4: mod_base = OTHER; note = 2'-O-methylcytidine-3'-phosphate
  modified_base 5: mod_base = OTHER; note = 2'-O-methylcytidine-3'-phosphate
  modified_base 6: mod_base = OTHER; note = 2'-O-docosanyl-uridine-3'-phosphate
  modified_base 7: mod_base = OTHER; note = 2'-deoxy-2'-fluorouridine-3'-phosphate
  modified_base 8: mod_base = OTHER; note = 2'-O-methyladenosine-3'-phosphate
  modified_base 9: mod_base = OTHER; note = 2'-deoxy-2'-fluorouridine-3'-phosphate
  modified_base 10: mod_base = OTHER; note = 2'-deoxy-2'-fluoroadenosine-3'-phosphate
  modified_base 11: mod_base = OTHER; note = 2'-deoxy-2'-fluorouridine-3'-phosphate
  modified_base 12: mod_base = OTHER; note = 2'-O-methylguanosine-3'-phosphate
  modified_base 13: mod_base = OTHER; note = 2'-O-methyladenosine-3'-phosphate
  modified_base 14: mod_base = OTHER; note = 2'-O-methylcytidine-3'-phosphate
  modified_base 15: mod_base = OTHER; note = 2'-O-methyluridine-3'-phosphate
  modified_base 16: mod_base = OTHER; note = 2'-O-methyladenosine-3'-phosphate
  modified_base 17: mod_base = OTHER; note = 2'-O-methyluridine-3'-phosphate
  modified_base 18: mod_base = OTHER; note = 2'-O-methyluridine-3'-phosphate
  modified_base 19: mod_base = OTHER; note = 2'-O-methyluridine-3'-phosphorothioate
  modified_base 20: mod_base = OTHER; note = 2'-O-methylguanosine-3'-phosphorothioate
  modified_base 21: mod_base = OTHER; note = 2'-O-methyladenosine
gctccttatatgactatttga

SEQ ID NO: 10659 - RNA, 21 nt, synthetic construct
  source 1..21: mol_type = other RNA
  modified_base 1: mod_base = OTHER; note = 2'-O-methyluridine-3'-phosphorothioate
  modified_base 2: mod_base = OTHER; note = 2'-O-methylcytidine-3'-phosphorothioate
  modified_base 3: mod_base = OTHER; note = 2'-O-methylcytidine-3'-phosphate
  modified_base 4: mod_base = OTHER; note = 2'-O-methyluridine-3'-phosphate
  modified_base 5: mod_base = OTHER; note = 2'-O-methyluridine-3'-phosphate
  modified_base 6: mod_base = OTHER; note = 2'-O-docosanyl-adenosine-3'-phosphate
  modified_base 7: mod_base = OTHER; note = 2'-deoxy-2'-fluorouridine-3'-phosphate
  modified_base 8: mod_base = OTHER; note = 2'-O-methyladenosine-3'-phosphate
  modified_base 9: mod_base = OTHER; note = 2'-deoxy-2'-fluorouridine-3'-phosphate
  modified_base 10: mod_base = OTHER; note = 2'-deoxy-2'-fluoroguanosine-3'-phosphate
  modified_base 11: mod_base = OTHER; note = 2'-deoxy-2'-fluoroadenosine-3'-phosphate
  modified_base 12: mod_base = OTHER; note = 2'-O-methylcytidine-3'-phosphate
  modified_base 13: mod_base = OTHER; note = 2'-O-methyluridine-3'-phosphate
  modified_base 14: mod_base = OTHER; note = 2'-O-methyladenosine-3'-phosphate
  modified_base 15: mod_base = OTHER; note = 2'-O-methyluridine-3'-phosphate
  modified_base 16: mod_base = OTHER; note = 2'-O-methyluridine-3'-phosphate
  modified_base 17: mod_base = OTHER; note = 2'-O-methyluridine-3'-phosphate
  modified_base 18: mod_base = OTHER; note = 2'-O-methylguanosine-3'-phosphate
  modified_base 19: mod_base = OTHER; note = 2'-O-methyladenosine-3'-phosphorothioate
  modified_base 20: mod_base = OTHER; note = 2'-O-methyladenosine-3'-phosphorothioate
  modified_base 21: mod_base = OTHER; note = 2'-O-methyladenosine
tccttatatgactatttgaaa

SEQ ID NO: 10660 - RNA, 21 nt, synthetic construct
  source 1..21: mol_type = other RNA
  modified_base 1: mod_base = OTHER; note = 2'-O-methylcytidine-3'-phosphorothioate
  modified_base 2: mod_base = OTHER; note = 2'-O-methylcytidine-3'-phosphorothioate
  modified_base 3: mod_base = OTHER; note = 2'-O-methyluridine-3'-phosphate
  modified_base 4: mod_base = OTHER; note = 2'-O-methyluridine-3'-phosphate
  modified_base 5: mod_base = OTHER; note = 2'-O-methyladenosine-3'-phosphate
  modified_base 6: mod_base = OTHER; note = 2'-O-docosanyl-uridine-3'-phosphate
  modified_base 7: mod_base = OTHER; note = 2'-deoxy-2'-fluoroadenosine-3'-phosphate
  modified_base 8: mod_base = OTHER; note = 2'-O-methyluridine-3'-phosphate
  modified_base 9: mod_base = OTHER; note = 2'-deoxy-2'-fluoroguanosine-3'-phosphate
  modified_base 10: mod_base = OTHER; note = 2'-deoxy-2'-fluoroadenosine-3'-phosphate
  modified_base 11: mod_base = OTHER; note = 2'-deoxy-2'-fluorocytidine-3'-phosphate
  modified_base 12: mod_base = OTHER; note = 2'-O-methyluridine-3'-phosphate
  modified_base 13: mod_base = OTHER; note = 2'-O-methyladenosine-3'-phosphate
  modified_base 14: mod_base = OTHER; note = 2'-O-methyluridine-3'-phosphate
  modified_base 15: mod_base = OTHER; note = 2'-O-methyluridine-3'-phosphate
  modified_base 16: mod_base = OTHER; note = 2'-O-methyluridine-3'-phosphate
  modified_base 17: mod_base = OTHER; note = 2'-O-methylguanosine-3'-phosphate
  modified_base 18: mod_base = OTHER; note = 2'-O-methyladenosine-3'-phosphate
  modified_base 19: mod_base = OTHER; note = 2'-O-methyladenosine-3'-phosphorothioate
  modified_base 20: mod_base = OTHER; note = 2'-O-methyluridine-3'-phosphorothioate
  modified_base 21: mod_base = OTHER; note = 2'-O-methyladenosine
ccttatatgactatttgaata

SEQ ID NO: 10661 - RNA, 21 nt, synthetic construct
  source 1..21: mol_type = other RNA
  modified_base 1: mod_base = OTHER; note = 2'-O-methyluridine-3'-phosphorothioate
  modified_base 2: mod_base = OTHER; note = 2'-O-methyluridine-3'-phosphorothioate
  modified_base 3: mod_base = OTHER; note = 2'-O-methyladenosine-3'-phosphate
  modified_base 4: mod_base = OTHER; note = 2'-O-methyluridine-3'-phosphate
  modified_base 5: mod_base = OTHER; note = 2'-O-methyladenosine-3'-phosphate
  modified_base 6: mod_base = OTHER; note = 2'-O-docosanyl-uridine-3'-phosphate
  modified_base 7: mod_base = OTHER; note = 2'-deoxy-2'-fluoroguanosine-3'-phosphate
  modified_base 8: mod_base = OTHER; note = 2'-O-methyladenosine-3'-phosphate
  modified_base 9: mod_base = OTHER; note = 2'-deoxy-2'-fluorocytidine-3'-phosphate
  modified_base 10: mod_base = OTHER; note = 2'-deoxy-2'-fluorouridine-3'-phosphate
  modified_base 11: mod_base = OTHER; note = 2'-deoxy-2'-fluoroadenosine-3'-phosphate
  modified_base 12: mod_base = OTHER; note = 2'-O-methyluridine-3'-phosphate
  modified_base 13: mod_base = OTHER; note = 2'-O-methyluridine-3'-phosphate
  modified_base 14: mod_base = OTHER; note = 2'-O-methyluridine-3'-phosphate
  modified_base 15: mod_base = OTHER; note = 2'-O-methylguanosine-3'-phosphate
  modified_base 16: mod_base = OTHER; note = 2'-O-methyladenosine-3'-phosphate
  modified_base 17: mod_base = OTHER; note = 2'-O-methyladenosine-3'-phosphate
  modified_base 18: mod_base = OTHER; note = 2'-O-methyluridine-3'-phosphate
  modified_base 19: mod_base = OTHER; note = 2'-O-methyladenosine-3'-phosphorothioate
  modified_base 20: mod_base = OTHER; note = 2'-O-methylguanosine-3'-phosphorothioate
  modified_base 21: mod_base = OTHER; note = 2'-O-methyladenosine
ttatatgactatttgaataga

SEQ ID NO: 10662 - RNA, 21 nt, synthetic construct
  source 1..21: mol_type = other RNA
  modified_base 1: mod_base = OTHER; note = 2'-O-methylguanosine-3'-phosphorothioate
  modified_base 2: mod_base = OTHER; note = 2'-O-methyluridine-3'-phosphorothioate
  modified_base 3: mod_base = OTHER; note = 2'-O-methylguanosine-3'-phosphate
  modified_base 4: mod_base = OTHER; note = 2'-O-methyladenosine-3'-phosphate
  modified_base 5: mod_base = OTHER; note = 2'-O-methylcytidine-3'-phosphate
  modified_base 6: mod_base = OTHER; note = 2'-O-docosanyl-cytidine-3'-phosphate
  modified_base 7: mod_base = OTHER; note = 2'-deoxy-2'-fluoroguanosine-3'-phosphate
  modified_base 8: mod_base = OTHER; note = 2'-O-methyluridine-3'-phosphate
  modified_base 9: mod_base = OTHER; note = 2'-deoxy-2'-fluoroguanosine-3'-phosphate
  modified_base 10: mod_base = OTHER; note = 2'-deoxy-2'-fluoroguanosine-3'-phosphate
  modified_base 11: mod_base = OTHER; note = 2'-deoxy-2'-fluorocytidine-3'-phosphate
  modified_base 12: mod_base = OTHER; note = 2'-O-methyluridine-3'-phosphate
  modified_base 13: mod_base = OTHER; note = 2'-O-methylguanosine-3'-phosphate
  modified_base 14: mod_base = OTHER; note = 2'-O-methylguanosine-3'-phosphate
  modified_base 15: mod_base = OTHER; note = 2'-O-methyladenosine-3'-phosphate
  modified_base 16: mod_base = OTHER; note = 2'-O-methyladenosine-3'-phosphate
  modified_base 17: mod_base = OTHER; note = 2'-O-methyluridine-3'-phosphate
  modified_base 18: mod_base = OTHER; note = 2'-O-methylguanosine-3'-phosphate
  modified_base 19: mod_base = OTHER; note = 2'-O-methyladenosine-3'-phosphorothioate
  modified_base 20: mod_base = OTHER; note = 2'-O-methyluridine-3'-phosphorothioate
  modified_base 21: mod_base = OTHER; note = 2'-O-methyladenosine
gtgaccgtggctggaatgata

SEQ ID NO: 10663 - RNA, 21 nt, synthetic construct
  source 1..21: mol_type = other RNA
  modified_base 1: mod_base = OTHER; note = 2'-O-methylcytidine-3'-phosphorothioate
  modified_base 2: mod_base = OTHER; note = 2'-O-methylguanosine-3'-phosphorothioate
  modified_base 3: mod_base = OTHER; note = 2'-O-methyluridine-3'-phosphate
  modified_base 4: mod_base = OTHER; note = 2'-O-methylguanosine-3'-phosphate
  modified_base 5: mod_base = OTHER; note = 2'-O-methylguanosine-3'-phosphate
  modified_base 6: mod_base = OTHER; note = 2'-O-docosanyl-cytidine-3'-phosphate
  modified_base 7: mod_base = OTHER; note = 2'-deoxy-2'-fluorouridine-3'-phosphate
  modified_base 8: mod_base = OTHER; note = 2'-O-methylguanosine-3'-phosphate
  modified_base 9: mod_base = OTHER; note = 2'-deoxy-2'-fluoroguanosine-3'-phosphate
  modified_base 10: mod_base = OTHER; note = 2'-deoxy-2'-fluoroadenosine-3'-phosphate
  modified_base 11: mod_base = OTHER; note = 2'-deoxy-2'-fluoroadenosine-3'-phosphate
  modified_base 12: mod_base = OTHER; note = 2'-O-methyluridine-3'-phosphate
  modified_base 13: mod_base = OTHER; note = 2'-O-methylguanosine-3'-phosphate
  modified_base 14: mod_base = OTHER; note = 2'-O-methyladenosine-3'-phosphate
  modified_base 15: mod_base = OTHER; note = 2'-O-methyluridine-3'-phosphate
  modified_base 16: mod_base = OTHER; note = 2'-O-methylcytidine-3'-phosphate
  modified_base 17: mod_base = OTHER; note = 2'-O-methyladenosine-3'-phosphate
  modified_base 18: mod_base = OTHER; note = 2'-O-methyladenosine-3'-phosphate
  modified_base 19: mod_base = OTHER; note = 2'-O-methylguanosine-3'-phosphorothioate
  modified_base 20: mod_base = OTHER; note = 2'-O-methylcytidine-3'-phosphorothioate
  modified_base 21: mod_base = OTHER; note = 2'-O-methyladenosine
cgtggctggaatgatcaagca

SEQ ID NO: 10664 - RNA, 21 nt, synthetic construct
  source 1..21: mol_type = other RNA
  modified_base 1: mod_base = OTHER; note = 2'-O-methyluridine-3'-phosphorothioate
  modified_base 2: mod_base = OTHER; note = 2'-O-methylguanosine-3'-phosphorothioate
  modified_base 3: mod_base = OTHER; note = 2'-O-methylguanosine-3'-phosphate
  modified_base 4: mod_base = OTHER; note = 2'-O-methylcytidine-3'-phosphate
  modified_base 5: mod_base = OTHER; note = 2'-O-methyluridine-3'-phosphate
  modified_base 6: mod_base = OTHER; note = 2'-O-docosanyl-guanosine-3'-phosphate
  modified_base 7: mod_base = OTHER; note = 2'-deoxy-2'-fluoroguanosine-3'-phosphate
  modified_base 8: mod_base = OTHER; note = 2'-O-methyladenosine-3'-phosphate
  modified_base 9: mod_base = OTHER; note = 2'-deoxy-2'-fluoroadenosine-3'-phosphate
  modified_base 10: mod_base = OTHER; note = 2'-deoxy-2'-fluorouridine-3'-phosphate
  modified_base 11: mod_base = OTHER; note = 2'-deoxy-2'-fluoroguanosine-3'-phosphate
  modified_base 12: mod_base = OTHER; note = 2'-O-methyladenosine-3'-phosphate
  modified_base 13: mod_base = OTHER; note = 2'-O-methyluridine-3'-phosphate
  modified_base 14: mod_base = OTHER; note = 2'-O-methylcytidine-3'-phosphate
  modified_base 15: mod_base = OTHER; note = 2'-O-methyladenosine-3'-phosphate
  modified_base 16: mod_base = OTHER; note = 2'-O-methyladenosine-3'-phosphate
  modified_base 17: mod_base = OTHER; note = 2'-O-methylguanosine-3'-phosphate
  modified_base 18: mod_base = OTHER; note = 2'-O-methylcytidine-3'-phosphate
  modified_base 19: mod_base = OTHER; note = 2'-O-methyluridine-3'-phosphorothioate
  modified_base 20: mod_base = OTHER; note = 2'-O-methylguanosine-3'-phosphorothioate
  modified_base 21: mod_base = OTHER; note = 2'-O-methyladenosine
tggctggaatgatcaagctga

SEQ ID NO: 10665 - RNA, 21 nt, synthetic construct
  source 1..21: mol_type = other RNA
  modified_base 1: mod_base = OTHER; note = 2'-O-methylcytidine-3'-phosphorothioate
  modified_base 2: mod_base = OTHER; note = 2'-O-methyladenosine-3'-phosphorothioate
  modified_base 3: mod_base = OTHER; note = 2'-O-methylcytidine-3'-phosphate
  modified_base 4: mod_base = OTHER; note = 2'-O-methyladenosine-3'-phosphate
  modified_base 5: mod_base = OTHER; note = 2'-O-methylcytidine-3'-phosphate
  modified_base 6: mod_base = OTHER; note = 2'-O-docosanyl-cytidine-3'-phosphate
  modified_base 7: mod_base = OTHER; note = 2'-deoxy-2'-fluorouridine-3'-phosphate
  modified_base 8: mod_base = OTHER; note = 2'-O-methyluridine-3'-phosphate
  modified_base 9: mod_base = OTHER; note = 2'-deoxy-2'-fluorocytidine-3'-phosphate
  modified_base 10: mod_base = OTHER; note = 2'-deoxy-2'-fluoroadenosine-3'-phosphate
  modified_base 11: mod_base = OTHER; note = 2'-deoxy-2'-fluorouridine-3'-phosphate
  modified_base 12: mod_base = OTHER; note = 2'-O-methyladenosine-3'-phosphate
  modified_base 13: mod_base = OTHER; note = 2'-O-methyluridine-3'-phosphate
  modified_base 14: mod_base = OTHER; note = 2'-O-methylguanosine-3'-phosphate
  modified_base 15: mod_base = OTHER; note = 2'-O-methylguanosine-3'-phosphate
  modified_base 16: mod_base = OTHER; note = 2'-O-methyladenosine-3'-phosphate
  modified_base 17: mod_base = OTHER; note = 2'-O-methylguanosine-3'-phosphate
  modified_base 18: mod_base = OTHER; note = 2'-O-methyladenosine-3'-phosphate
  modified_base 19: mod_base = OTHER; note = 2'-O-methyluridine-3'-phosphorothioate
  modified_base 20: mod_base = OTHER; note = 2'-O-methyluridine-3'-phosphorothioate
  modified_base 21: mod_base = OTHER; note = 2'-O-methyladenosine
cacaccttcatatggagatta

SEQ ID NO: 10666 - RNA, 21 nt, synthetic construct
  source 1..21: mol_type = other RNA
  modified_base 1: mod_base = OTHER; note = 2'-O-methylguanosine-3'-phosphorothioate
  modified_base 2: mod_base = OTHER; note = 2'-O-methylguanosine-3'-phosphorothioate
  modified_base 3: mod_base = OTHER; note = 2'-O-methylcytidine-3'-phosphate
  modified_base 4: mod_base = OTHER; note = 2'-O-methylguanosine-3'-phosphate
  modified_base 5: mod_base = OTHER; note = 2'-O-methylcytidine-3'-phosphate
  modified_base 6: mod_base = OTHER; note = 2'-O-docosanyl-uridine-3'-phosphate
  modified_base 7: mod_base = OTHER; note = 2'-deoxy-2'-fluorocytidine-3'-phosphate
  modified_base 8: mod_base = OTHER; note = 2'-O-methyluridine-3'-phosphate
  modified_base 9: mod_base = OTHER; note = 2'-deoxy-2'-fluorocytidine-3'-phosphate
  modified_base 10: mod_base = OTHER; note = 2'-deoxy-2'-fluoroadenosine-3'-phosphate
  modified_base 11: mod_base = OTHER; note = 2'-deoxy-2'-fluoroadenosine-3'-phosphate
  modified_base 12: mod_base = OTHER; note = 2'-O-methyluridine-3'-phosphate
  modified_base 13: mod_base = OTHER; note = 2'-O-methyluridine-3'-phosphate
  modified_base 14: mod_base = OTHER; note = 2'-O-methylguanosine-3'-phosphate
  modified_base 15: mod_base = OTHER; note = 2'-O-methylcytidine-3'-phosphate
  modified_base 16: mod_base = OTHER; note = 2'-O-methyluridine-3'-phosphate
  modified_base 17: mod_base = OTHER; note = 2'-O-methyladenosine-3'-phosphate
  modified_base 18: mod_base = OTHER; note = 2'-O-methylguanosine-3'-phosphate
  modified_base 19: mod_base = OTHER; note = 2'-O-methyluridine-3'-phosphorothioate
  modified_base 20: mod_base = OTHER; note = 2'-O-methylguanosine-3'-phosphorothioate
  modified_base 21: mod_base = OTHER; note = 2'-O-methyladenosine
ggcgctctcaattgctagtga

SEQ ID NO: 10667 - RNA, 21 nt, synthetic construct
  source 1..21: mol_type = other RNA
  modified_base 1: mod_base = OTHER; note = 2'-O-methylcytidine-3'-phosphorothioate
  modified_base 2: mod_base = OTHER; note = 2'-O-methyluridine-3'-phosphorothioate
  modified_base 3: mod_base = OTHER; note = 2'-O-methylcytidine-3'-phosphate
  modified_base 4: mod_base = OTHER; note = 2'-O-methyluridine-3'-phosphate
  modified_base 5: mod_base = OTHER; note = 2'-O-methylcytidine-3'-phosphate
  modified_base 6: mod_base = OTHER; note = 2'-O-docosanyl-adenosine-3'-phosphate
  modified_base 7: mod_base = OTHER; note = 2'-deoxy-2'-fluoroadenosine-3'-phosphate
  modified_base 8: mod_base = OTHER; note = 2'-O-methyluridine-3'-phosphate
  modified_base 9: mod_base = OTHER; note = 2'-deoxy-2'-fluorouridine-3'-phosphate
  modified_base 10: mod_base = OTHER; note = 2'-deoxy-2'-fluoroguanosine-3'-phosphate
  modified_base 11: mod_base = OTHER; note = 2'-deoxy-2'-fluorocytidine-3'-phosphate
  modified_base 12: mod_base = OTHER; note = 2'-O-methyluridine-3'-phosphate
  modified_base 13: mod_base = OTHER; note = 2'-O-methyladenosine-3'-phosphate
  modified_base 14: mod_base = OTHER; note = 2'-O-methylguanosine-3'-phosphate
  modified_base 15: mod_base = OTHER; note = 2'-O-methyluridine-3'-phosphate
  modified_base 16: mod_base = OTHER; note = 2'-O-methylguanosine-3'-phosphate
  modified_base 17: mod_base = OTHER; note = 2'-O-methylguanosine-3'-phosphate
  modified_base 18: mod_base = OTHER; note = 2'-O-methyluridine-3'-phosphate
  modified_base 19: mod_base = OTHER; note = 2'-O-methylcytidine-3'-phosphorothioate
  modified_base 20: mod_base = OTHER; note = 2'-O-methyluridine-3'-phosphorothioate
  modified_base 21: mod_base = OTHER; note = 2'-O-methyladenosine
ctctcaattgctagtggtcta

SEQ ID NO: 10668 - RNA, 21 nt, synthetic construct
  source 1..21: mol_type = other RNA
  modified_base 1: mod_base = OTHER; note = 2'-O-methylcytidine-3'-phosphorothioate
  modified_base 2: mod_base = OTHER; note = 2'-O-methyluridine-3'-phosphorothioate
  modified_base 3: mod_base = OTHER; note = 2'-O-methylguanosine-3'-phosphate
  modified_base 4: mod_base = OTHER; note = 2'-O-methylguanosine-3'-phosphate
  modified_base 5: mod_base = OTHER; note = 2'-O-methylcytidine-3'-phosphate
  modified_base 6: mod_base = OTHER; note = 2'-O-docosanyl-adenosine-3'-phosphate
  modified_base 7: mod_base = OTHER; note = 2'-deoxy-2'-fluorocytidine-3'-phosphate
  modified_base 8: mod_base = OTHER; note = 2'-O-methyladenosine-3'-phosphate
  modified_base 9: mod_base = OTHER; note = 2'-deoxy-2'-fluorocytidine-3'-phosphate
  modified_base 10: mod_base = OTHER; note = 2'-deoxy-2'-fluorocytidine-3'-phosphate
  modified_base 11: mod_base = OTHER; note = 2'-deoxy-2'-fluorouridine-3'-phosphate
  modified_base 12: mod_base = OTHER; note = 2'-O-methyluridine-3'-phosphate
  modified_base 13: mod_base = OTHER; note = 2'-O-methylcytidine-3'-phosphate
  modified_base 14: mod_base = OTHER; note = 2'-O-methyladenosine-3'-phosphate
  modified_base 15: mod_base = OTHER; note = 2'-O-methyluridine-3'-phosphate
  modified_base 16: mod_base = OTHER; note = 2'-O-methyladenosine-3'-phosphate
  modified_base 17: mod_base = OTHER; note = 2'-O-methyluridine-3'-phosphate
  modified_base 18: mod_base = OTHER; note = 2'-O-methylguanosine-3'-phosphate
  modified_base 19: mod_base = OTHER; note = 2'-O-methylguanosine-3'-phosphorothioate
  modified_base 20: mod_base = OTHER; note = 2'-O-methyladenosine-3'-phosphorothioate
  modified_base 21: mod_base = OTHER; note = 2'-O-methyladenosine
ctggcacaccttcatatggaa

SEQ ID NO: 10669 - RNA, 21 nt, synthetic construct
  source 1..21: mol_type = other RNA
  modified_base 1: mod_base = OTHER; note = 2'-O-methyluridine-3'-phosphorothioate
  modified_base 2: mod_base = OTHER; note = 2'-O-methylguanosine-3'-phosphorothioate
  modified_base 3: mod_base = OTHER; note = 2'-O-methylguanosine-3'-phosphate
  modified_base 4: mod_base = OTHER; note = 2'-O-methylcytidine-3'-phosphate
  modified_base 5: mod_base = OTHER; note = 2'-O-methyladenosine-3'-phosphate
  modified_base 6: mod_base = OTHER; note = 2'-O-docosanyl-cytidine-3'-phosphate
  modified_base 7: mod_base = OTHER; note = 2'-deoxy-2'-fluoroadenosine-3'-phosphate
  modified_base 8: mod_base = OTHER; note = 2'-O-methylcytidine-3'-phosphate
  modified_base 9: mod_base = OTHER; note = 2'-deoxy-2'-fluorocytidine-3'-phosphate
  modified_base 10: mod_base = OTHER; note = 2'-deoxy-2'-fluorouridine-3'-phosphate
  modified_base 11: mod_base = OTHER; note = 2'-deoxy-2'-fluorouridine-3'-phosphate
  modified_base 12: mod_base = OTHER; note = 2'-O-methylcytidine-3'-phosphate
  modified_base 13: mod_base = OTHER; note = 2'-O-methyladenosine-3'-phosphate
  modified_base 14: mod_base = OTHER; note = 2'-O-methyluridine-3'-phosphate
  modified_base 15: mod_base = OTHER; note = 2'-O-methyladenosine-3'-phosphate
  modified_base 16: mod_base = OTHER; note = 2'-O-methyluridine-3'-phosphate
  modified_base 17: mod_base = OTHER; note = 2'-O-methylguanosine-3'-phosphate
  modified_base 18: mod_base = OTHER; note = 2'-O-methylguanosine-3'-phosphate
  modified_base 19: mod_base = OTHER; note = 2'-O-methyladenosine-3'-phosphorothioate
  modified_base 20: mod_base = OTHER; note = 2'-O-methylguanosine-3'-phosphorothioate
  modified_base 21: mod_base = OTHER; note = 2'-O-methyladenosine
tggcacaccttcatatggaga

SEQ ID NO: 10670 - RNA, 21 nt, synthetic construct
  source 1..21: mol_type = other RNA
  modified_base 1: mod_base = OTHER; note = 2'-O-methylguanosine-3'-phosphorothioate
  modified_base 2: mod_base = OTHER; note = 2'-O-methylguanosine-3'-phosphorothioate
  modified_base 3: mod_base = OTHER; note = 2'-O-methylcytidine-3'-phosphate
  modified_base 4: mod_base = OTHER; note = 2'-O-methyladenosine-3'-phosphate
  modified_base 5: mod_base = OTHER; note = 2'-O-methylcytidine-3'-phosphate
  modified_base 6: mod_base = OTHER; note = 2'-O-docosanyl-adenosine-3'-phosphate
  modified_base 7: mod_base = OTHER; note = 2'-deoxy-2'-fluorocytidine-3'-phosphate
  modified_base 8: mod_base = OTHER; note = 2'-O-methylcytidine-3'-phosphate
  modified_base 9: mod_base = OTHER; note = 2'-deoxy-2'-fluorouridine-3'-phosphate
  modified_base 10: mod_base = OTHER; note = 2'-deoxy-2'-fluorouridine-3'-phosphate
  modified_base 11: mod_base = OTHER; note = 2'-deoxy-2'-fluorocytidine-3'-phosphate
  modified_base 12: mod_base = OTHER; note = 2'-O-methyladenosine-3'-phosphate
  modified_base 13: mod_base = OTHER; note = 2'-O-methyluridine-3'-phosphate
  modified_base 14: mod_base = OTHER; note = 2'-O-methyladenosine-3'-phosphate
  modified_base 15: mod_base = OTHER; note = 2'-O-methyluridine-3'-phosphate
  modified_base 16: mod_base = OTHER; note = 2'-O-methylguanosine-3'-phosphate
  modified_base 17: mod_base = OTHER; note = 2'-O-methylguanosine-3'-phosphate
  modified_base 18: mod_base = OTHER; note = 2'-O-methyladenosine-3'-phosphate
  modified_base 19: mod_base = OTHER; note = 2'-O-methylguanosine-3'-phosphorothioate
  modified_base 20: mod_base = OTHER; note = 2'-O-methyladenosine-3'-phosphorothioate
  modified_base 21: mod_base = OTHER; note = 2'-O-methyladenosine
ggcacaccttcatatggagaa

SEQ ID NO: 10671 - RNA, 21 nt, synthetic construct
  source 1..21: mol_type = other RNA
  modified_base 1: mod_base = OTHER; note = 2'-O-methylguanosine-3'-phosphorothioate
  modified_base 2: mod_base = OTHER; note = 2'-O-methylcytidine-3'-phosphorothioate
  modified_base 3: mod_base = OTHER; note = 2'-O-methyladenosine-3'-phosphate
  modified_base 4: mod_base = OTHER; note = 2'-O-methylcytidine-3'-phosphate
  modified_base 5: mod_base = OTHER; note = 2'-O-methyladenosine-3'-phosphate
  modified_base 6: mod_base = OTHER; note = 2'-O-docosanyl-cytidine-3'-phosphate
  modified_base 7: mod_base = OTHER; note = 2'-deoxy-2'-fluorocytidine-3'-phosphate
  modified_base 8: mod_base = OTHER; note = 2'-O-methyluridine-3'-phosphate
  modified_base 9: mod_base = OTHER; note = 2'-deoxy-2'-fluorouridine-3'-phosphate
  modified_base 10: mod_base = OTHER; note = 2'-deoxy-2'-fluorocytidine-3'-phosphate
  modified_base 11: mod_base = OTHER; note = 2'-deoxy-2'-fluoroadenosine-3'-phosphate
  modified_base 12: mod_base = OTHER; note = 2'-O-methyluridine-3'-phosphate
  modified_base 13: mod_base = OTHER; note = 2'-O-methyladenosine-3'-phosphate
  modified_base 14: mod_base = OTHER; note = 2'-O-methyluridine-3'-phosphate
  modified_base 15: mod_base = OTHER; note = 2'-O-methylguanosine-3'-phosphate
  modified_base 16: mod_base = OTHER; note = 2'-O-methylguanosine-3'-phosphate
  modified_base 17: mod_base = OTHER; note = 2'-O-methyladenosine-3'-phosphate
  modified_base 18: mod_base = OTHER; note = 2'-O-methylguanosine-3'-phosphate
  modified_base 19: mod_base = OTHER; note = 2'-O-methyladenosine-3'-phosphorothioate
  modified_base 20: mod_base = OTHER; note = 2'-O-methyluridine-3'-phosphorothioate
  modified_base 21: mod_base = OTHER; note = 2'-O-methyladenosine
gcacaccttcatatggagata

SEQ ID NO: 10672 - RNA, 21 nt, synthetic construct
  source 1..21: mol_type = other RNA
  modified_base 1: mod_base = OTHER; note = 2'-O-methyladenosine-3'-phosphorothioate
  modified_base 2: mod_base = OTHER; note = 2'-O-methylcytidine-3'-phosphorothioate
  modified_base 3: mod_base = OTHER; note = 2'-O-methyladenosine-3'-phosphate
  modified_base 4: mod_base = OTHER; note = 2'-O-methylcytidine-3'-phosphate
  modified_base 5: mod_base = OTHER; note = 2'-O-methylcytidine-3'-phosphate
  modified_base 6: mod_base = OTHER; note = 2'-O-docosanyl-uridine-3'-phosphate
  modified_base 7: mod_base = OTHER; note = 2'-deoxy-2'-fluorouridine-3'-phosphate
  modified_base 8: mod_base = OTHER; note = 2'-O-methylcytidine-3'-phosphate
  modified_base 9: mod_base = OTHER; note = 2'-deoxy-2'-fluoroadenosine-3'-phosphate
  modified_base 10: mod_base = OTHER; note = 2'-deoxy-2'-fluorouridine-3'-phosphate
  modified_base 11: mod_base = OTHER; note = 2'-deoxy-2'-fluoroadenosine-3'-phosphate
  modified_base 12: mod_base = OTHER; note = 2'-O-methyluridine-3'-phosphate
  modified_base 13: mod_base = OTHER; note = 2'-O-methylguanosine-3'-phosphate
  modified_base 14: mod_base = OTHER; note = 2'-O-methylguanosine-3'-phosphate
  modified_base 15: mod_base = OTHER; note = 2'-O-methyladenosine-3'-phosphate
  modified_base 16: mod_base = OTHER; note = 2'-O-methylguanosine-3'-phosphate
  modified_base 17: mod_base = OTHER; note = 2'-O-methyladenosine-3'-phosphate
  modified_base 18: mod_base = OTHER; note = 2'-O-methyluridine-3'-phosphate
  modified_base 19: mod_base = OTHER; note = 2'-O-methyluridine-3'-phosphorothioate
  modified_base 20: mod_base = OTHER; note = 2'-O-methylguanosine-3'-phosphorothioate
  modified_base 21: mod_base = OTHER; note = 2'-O-methyladenosine
acaccttcatatggagattga

SEQ ID NO: 10673 - RNA, 21 nt, synthetic construct
  source 1..21: mol_type = other RNA
  modified_base 1: mod_base = OTHER; note = 2'-O-methylcytidine-3'-phosphorothioate
  modified_base 2: mod_base = OTHER; note = 2'-O-methyladenosine-3'-phosphorothioate
  modified_base 3: mod_base = OTHER; note = 2'-O-methylcytidine-3'-phosphate
  modified_base 4: mod_base = OTHER; note = 2'-O-methylcytidine-3'-phosphate
  modified_base 5: mod_base = OTHER; note = 2'-O-methyluridine-3'-phosphate
  modified_base 6: mod_base = OTHER; note = 2'-O-docosanyl-uridine-3'-phosphate
  modified_base 7: mod_base = OTHER; note = 2'-deoxy-2'-fluorocytidine-3'-phosphate
  modified_base 8: mod_base = OTHER; note = 2'-O-methyladenosine-3'-phosphate
  modified_base 9: mod_base = OTHER; note = 2'-deoxy-2'-fluorouridine-3'-phosphate
  modified_base 10: mod_base = OTHER; note = 2'-deoxy-2'-fluoroadenosine-3'-phosphate
  modified_base 11: mod_base = OTHER; note = 2'-deoxy-2'-fluorouridine-3'-phosphate
  modified_base 12: mod_base = OTHER; note = 2'-O-methylguanosine-3'-phosphate
  modified_base 13: mod_base = OTHER; note = 2'-O-methylguanosine-3'-phosphate
  modified_base 14: mod_base = OTHER; note = 2'-O-methyladenosine-3'-phosphate
  modified_base 15: mod_base = OTHER; note = 2'-O-methylguanosine-3'-phosphate
  modified_base 16: mod_base = OTHER; note = 2'-O-methyladenosine-3'-phosphate
  modified_base 17: mod_base = OTHER; note = 2'-O-methyluridine-3'-phosphate
  modified_base 18: mod_base = OTHER; note = 2'-O-methyluridine-3'-phosphate
  modified_base 19: mod_base = OTHER; note = 2'-O-methylguanosine-3'-phosphorothioate
  modified_base 20: mod_base = OTHER; note = 2'-O-methyluridine-3'-phosphorothioate
  modified_base 21: mod_base = OTHER; note = 2'-O-methyladenosine
caccttcatatggagattgta

SEQ ID NO: 10674 - RNA, 21 nt, synthetic construct
  source 1..21: mol_type = other RNA
  modified_base 1: mod_base = OTHER; note = 2'-O-methyladenosine-3'-phosphorothioate
  modified_base 2: mod_base = OTHER; note = 2'-O-methylcytidine-3'-phosphorothioate
  modified_base 3: mod_base = OTHER; note = 2'-O-methylcytidine-3'-phosphate
  modified_base 4: mod_base = OTHER; note = 2'-O-methyluridine-3'-phosphate
  modified_base 5: mod_base = OTHER; note = 2'-O-methyluridine-3'-phosphate
  modified_base 6: mod_base = OTHER; note = 2'-O-docosanyl-cytidine-3'-phosphate
  modified_base 7: mod_base = OTHER; note = 2'-deoxy-2'-fluoroadenosine-3'-phosphate
  modified_base 8: mod_base = OTHER; note = 2'-O-methyluridine-3'-phosphate
  modified_base 9: mod_base = OTHER; note = 2'-deoxy-2'-fluoroadenosine-3'-phosphate
  modified_base 10: mod_base = OTHER; note = 2'-deoxy-2'-fluorouridine-3'-phosphate
  modified_base 11: mod_base = OTHER; note = 2'-deoxy-2'-fluoroguanosine-3'-phosphate
  modified_base 12: mod_base = OTHER; note = 2'-O-methylguanosine-3'-phosphate
  modified_base 13: mod_base = OTHER; note = 2'-O-methyladenosine-3'-phosphate
  modified_base 14: mod_base = OTHER; note = 2'-O-methylguanosine-3'-phosphate
  modified_base 15: mod_base = OTHER; note = 2'-O-methyladenosine-3'-phosphate
  modified_base 16: mod_base = OTHER; note = 2'-O-methyluridine-3'-phosphate
  modified_base 17: mod_base = OTHER; note = 2'-O-methyluridine-3'-phosphate
  modified_base 18: mod_base = OTHER; note = 2'-O-methylguanosine-3'-phosphate
  modified_base 19: mod_base = OTHER; note = 2'-O-methyluridine-3'-phosphorothioate
  modified_base 20: mod_base = OTHER; note = 2'-O-methyluridine-3'-phosphorothioate
  modified_base 21: mod_base = OTHER; note = 2'-O-methyladenosine
accttcatatggagattgtta

SEQ ID NO: 10675 - RNA, 21 nt, synthetic construct
  source 1..21: mol_type = other RNA
  modified_base 1: mod_base = OTHER; note = 2'-O-methylcytidine-3'-phosphorothioate
  modified_base 2: mod_base = OTHER; note = 2'-O-methylcytidine-3'-phosphorothioate
  modified_base 3: mod_base = OTHER; note = 2'-O-methyluridine-3'-phosphate
  modified_base 4: mod_base = OTHER; note = 2'-O-methyluridine-3'-phosphate
  modified_base 5: mod_base = OTHER; note = 2'-O-methylcytidine-3'-phosphate
  modified_base 6: mod_base = OTHER; note = 2'-O-docosanyl-adenosine-3'-phosphate
  modified_base 7: mod_base = OTHER; note = 2'-deoxy-2'-fluorouridine-3'-phosphate
  modified_base 8: mod_base = OTHER; note = 2'-O-methyladenosine-3'-phosphate
  modified_base 9: mod_base = OTHER; note = 2'-deoxy-2'-fluorouridine-3'-phosphate
  modified_base 10: mod_base = OTHER; note = 2'-deoxy-2'-fluoroguanosine-3'-phosphate
  modified_base 11: mod_base = OTHER; note = 2'-deoxy-2'-fluoroguanosine-3'-phosphate
  modified_base 12: mod_base = OTHER; note = 2'-O-methyladenosine-3'-phosphate
  modified_base 13: mod_base = OTHER; note = 2'-O-methylguanosine-3'-phosphate
  modified_base 14: mod_base = OTHER; note = 2'-O-methyladenosine-3'-phosphate
  modified_base 15: mod_base = OTHER; note = 2'-O-methyluridine-3'-phosphate
  modified_base 16: mod_base = OTHER; note = 2'-O-methyluridine-3'-phosphate
  modified_base 17: mod_base = OTHER; note = 2'-O-methylguanosine-3'-phosphate
  modified_base 18: mod_base = OTHER; note = 2'-O-methyluridine-3'-phosphate
  modified_base 19: mod_base = OTHER; note = 2'-O-methyluridine-3'-phosphorothioate
  modified_base 20: mod_base = OTHER; note = 2'-O-methylguanosine-3'-phosphorothioate
  modified_base 21: mod_base = OTHER; note = 2'-O-methyladenosine
ccttcatatggagattgttga

SEQ ID NO: 10676 - RNA, 21 nt, synthetic construct
  source 1..21: mol_type = other RNA
  modified_base 1: mod_base = OTHER; note = 2'-O-methylcytidine-3'-phosphorothioate
  modified_base 2: mod_base = OTHER; note = 2'-O-methyluridine-3'-phosphorothioate
  modified_base 3: mod_base = OTHER; note = 2'-O-methyluridine-3'-phosphate
  modified_base 4: mod_base = OTHER; note = 2'-O-methylcytidine-3'-phosphate
  modified_base 5: mod_base = OTHER; note = 2'-O-methyladenosine-3'-phosphate
  modified_base 6: mod_base = OTHER; note = 2'-O-docosanyl-uridine-3'-phosphate
  modified_base 7: mod_base = OTHER; note = 2'-deoxy-2'-fluoroadenosine-3'-phosphate
  modified_base 8: mod_base = OTHER; note = 2'-O-methyluridine-3'-phosphate
  modified_base 9: mod_base = OTHER; note = 2'-deoxy-2'-fluoroguanosine-3'-phosphate
  modified_base 10: mod_base = OTHER; note = 2'-deoxy-2'-fluoroguanosine-3'-phosphate
  modified_base 11: mod_base = OTHER; note = 2'-deoxy-2'-fluoroadenosine-3'-phosphate
  modified_base 12: mod_base = OTHER; note = 2'-O-methylguanosine-3'-phosphate
  modified_base 13: mod_base = OTHER; note = 2'-O-methyladenosine-3'-phosphate
  modified_base 14: mod_base = OTHER; note = 2'-O-methyluridine-3'-phosphate
  modified_base 15: mod_base = OTHER; note = 2'-O-methyluridine-3'-phosphate
  modified_base 16: mod_base = OTHER; note = 2'-O-methylguanosine-3'-phosphate
  modified_base 17: mod_base = OTHER; note = 2'-O-methyluridine-3'-phosphate
  modified_base 18: mod_base = OTHER; note = 2'-O-methyluridine-3'-phosphate
  modified_base 19: mod_base = OTHER; note = 2'-O-methylguanosine-3'-phosphorothioate
  modified_base 20: mod_base = OTHER; note = 2'-O-methylguanosine-3'-phosphorothioate
  modified_base 21: mod_base = OTHER; note = 2'-O-methyladenosine
cttcatatggagattgttgga

SEQ ID NO: 10677 - RNA, 21 nt, synthetic construct
  source 1..21: mol_type = other RNA
  modified_base 1: mod_base = OTHER; note = 2'-O-methyluridine-3'-phosphorothioate
  modified_base 2: mod_base = OTHER; note = 2'-O-methyluridine-3'-phosphorothioate
  modified_base 3: mod_base = OTHER; note = 2'-O-methylcytidine-3'-phosphate
  modified_base 4: mod_base = OTHER; note = 2'-O-methyladenosine-3'-phosphate
  modified_base 5: mod_base = OTHER; note = 2'-O-methyluridine-3'-phosphate
  modified_base 6: mod_base = OTHER; note = 2'-O-docosanyl-adenosine-3'-phosphate
  modified_base 7: mod_base = OTHER; note = 2'-deoxy-2'-fluorouridine-3'-phosphate
  modified_base 8: mod_base = OTHER; note = 2'-O-methylguanosine-3'-phosphate
  modified_base 9: mod_base = OTHER; note = 2'-deoxy-2'-fluoroguanosine-3'-phosphate
  modified_base 10: mod_base = OTHER; note = 2'-deoxy-2'-fluoroadenosine-3'-phosphate
  modified_base 11: mod_base = OTHER; note = 2'-deoxy-2'-fluoroguanosine-3'-phosphate
  modified_base 12: mod_base = OTHER; note = 2'-O-methyladenosine-3'-phosphate
  modified_base 13: mod_base = OTHER; note = 2'-O-methyluridine-3'-phosphate
  modified_base 14: mod_base = OTHER; note = 2'-O-methyluridine-3'-phosphate
  modified_base 15: mod_base = OTHER; note = 2'-O-methylguanosine-3'-phosphate
  modified_base 16: mod_base = OTHER; note = 2'-O-methyluridine-3'-phosphate
  modified_base 17: mod_base = OTHER; note = 2'-O-methyluridine-3'-phosphate
  modified_base 18: mod_base = OTHER; note = 2'-O-methylguanosine-3'-phosphate
  modified_base 19: mod_base = OTHER; note = 2'-O-methylguanosine-3'-phosphorothioate
  modified_base 20: mod_base = OTHER; note = 2'-O-methyluridine-3'-phosphorothioate
  modified_base 21: mod_base = OTHER; note = 2'-O-methyladenosine
ttcatatggagattgttggta

SEQ ID NO: 10678 - RNA, 21 nt, synthetic construct
  source 1..21: mol_type = other RNA
  modified_base 1: mod_base = OTHER; note = 2'-O-methyluridine-3'-phosphorothioate
  modified_base 2: mod_base = OTHER; note = 2'-O-methylcytidine-3'-phosphorothioate
  modified_base 3: mod_base = OTHER; note = 2'-O-methyladenosine-3'-phosphate
  modified_base 4: mod_base = OTHER; note = 2'-O-methyluridine-3'-phosphate
  modified_base 5: mod_base = OTHER; note = 2'-O-methyladenosine-3'-phosphate
  modified_base 6: mod_base = OTHER; note = 2'-O-docosanyl-uridine-3'-phosphate
  modified_base 7: mod_base = OTHER; note = 2'-deoxy-2'-fluoroguanosine-3'-phosphate
  modified_base 8: mod_base = OTHER; note = 2'-O-methylguanosine-3'-phosphate
  modified_base 9: mod_base = OTHER; note = 2'-deoxy-2'-fluoroadenosine-3'-phosphate
  modified_base 10: mod_base = OTHER; note = 2'-deoxy-2'-fluoroguanosine-3'-phosphate
  modified_base 11: mod_base = OTHER; note = 2'-deoxy-2'-fluoroadenosine-3'-phosphate
  modified_base 12: mod_base = OTHER; note = 2'-O-methyluridine-3'-phosphate
  modified_base 13: mod_base = OTHER; note = 2'-O-methyluridine-3'-phosphate
  modified_base 14: mod_base = OTHER; note = 2'-O-methylguanosine-3'-phosphate
  modified_base 15: mod_base = OTHER; note = 2'-O-methyluridine-3'-phosphate
  modified_base 16: mod_base = OTHER; note = 2'-O-methyluridine-3'-phosphate
  modified_base 17: mod_base = OTHER; note = 2'-O-methylguanosine-3'-phosphate
  modified_base 18: mod_base = OTHER; note = 2'-O-methylguanosine-3'-phosphate
  modified_base 19: mod_base = OTHER; note = 2'-O-methyluridine-3'-phosphorothioate
  modified_base 20: mod_base = OTHER; note = 2'-O-methyladenosine-3'-phosphorothioate
  modified_base 21: mod_base = OTHER; note = 2'-O-methyladenosine
tcatatggagattgttggtaa

SEQ ID NO: 10679 - RNA, 21 nt, synthetic construct
  source 1..21: mol_type = other RNA
  modified_base 1: mod_base = OTHER; note = 2'-O-methylcytidine-3'-phosphorothioate
  modified_base 2: mod_base = OTHER; note = 2'-O-methyladenosine-3'-phosphorothioate
  modified_base 3: mod_base = OTHER; note = 2'-O-methyluridine-3'-phosphate
  modified_base 4: mod_base = OTHER; note = 2'-O-methyladenosine-3'-phosphate
  modified_base 5: mod_base = OTHER; note = 2'-O-methyluridine-3'-phosphate
  modified_base 6: mod_base = OTHER; note = 2'-O-docosanyl-guanosine-3'-phosphate
  modified_base 7: mod_base = OTHER; note = 2'-deoxy-2'-fluoroguanosine-3'-phosphate
  modified_base 8: mod_base = OTHER; note = 2'-O-methyladenosine-3'-phosphate
  modified_base 9: mod_base = OTHER; note = 2'-deoxy-2'-fluoroguanosine-3'-phosphate
  modified_base 10: mod_base = OTHER; note = 2'-deoxy-2'-fluoroadenosine-3'-phosphate
  modified_base 11: mod_base = OTHER; note = 2'-deoxy-2'-fluorouridine-3'-phosphate
  modified_base 12: mod_base = OTHER; note = 2'-O-methyluridine-3'-phosphate
  modified_base 13: mod_base = OTHER; note = 2'-O-methylguanosine-3'-phosphate
  modified_base 14: mod_base = OTHER; note = 2'-O-methyluridine-3'-phosphate
  modified_base 15: mod_base = OTHER; note = 2'-O-methyluridine-3'-phosphate
  modified_base 16: mod_base = OTHER; note = 2'-O-methylguanosine-3'-phosphate
  modified_base 17: mod_base = OTHER; note = 2'-O-methylguanosine-3'-phosphate
  modified_base 18: mod_base = OTHER; note = 2'-O-methyluridine-3'-phosphate
  modified_base 19: mod_base = OTHER; note = 2'-O-methyladenosine-3'-phosphorothioate
  modified_base 20: mod_base = OTHER; note = 2'-O-methylcytidine-3'-phosphorothioate
  modified_base 21: mod_base = OTHER; note = 2'-O-methyladenosine
catatggagattgttggtaca

SEQ ID NO: 10680 - RNA, 21 nt, synthetic construct
  source 1..21: mol_type = other RNA
  modified_base 1: mod_base = OTHER; note = 2'-O-methyladenosine-3'-phosphorothioate
  modified_base 2: mod_base = OTHER; note = 2'-O-methyluridine-3'-phosphorothioate
  modified_base 3: mod_base = OTHER; note = 2'-O-methyladenosine-3'-phosphate
  modified_base 4: mod_base = OTHER; note = 2'-O-methyluridine-3'-phosphate
  modified_base 5: mod_base = OTHER; note = 2'-O-methylguanosine-3'-phosphate
  modified_base 6: mod_base = OTHER; note = 2'-O-docosanyl-guanosine-3'-phosphate
  modified_base 7: mod_base = OTHER; note = 2'-deoxy-2'-fluoroadenosine-3'-phosphate
  modified_base 8: mod_base = OTHER; note = 2'-O-methylguanosine-3'-phosphate
  modified_base 9: mod_base = OTHER; note = 2'-deoxy-2'-fluoroadenosine-3'-phosphate
  modified_base 10: mod_base = OTHER; note = 2'-deoxy-2'-fluorouridine-3'-phosphate
  modified_base 11: mod_base = OTHER; note = 2'-deoxy-2'-fluorouridine-3'-phosphate
  modified_base 12: mod_base = OTHER; note = 2'-O-methylguanosine-3'-phosphate
  modified_base 13: mod_base = OTHER; note = 2'-O-methyluridine-3'-phosphate
  modified_base 14: mod_base = OTHER; note = 2'-O-methyluridine-3'-phosphate
  modified_base 15: mod_base = OTHER; note = 2'-O-methylguanosine-3'-phosphate
  modified_base 16: mod_base = OTHER; note = 2'-O-methylguanosine-3'-phosphate
  modified_base 17: mod_base = OTHER; note = 2'-O-methyluridine-3'-phosphate
  modified_base 18: mod_base = OTHER; note = 2'-O-methyladenosine-3'-phosphate
  modified_base 19: mod_base = OTHER; note = 2'-O-methylcytidine-3'-phosphorothioate
  modified_base 20: mod_base = OTHER; note = 2'-O-methyladenosine-3'-phosphorothioate
  modified_base 21: mod_base = OTHER; note = 2'-O-methyladenosine
atatggagattgttggtacaa

SEQ ID NO: 10681 - RNA, 21 nt, synthetic construct
  source 1..21: mol_type = other RNA
  modified_base 1: mod_base = OTHER; note = 2'-O-methyluridine-3'-phosphorothioate
  modified_base 2: mod_base = OTHER; note = 2'-O-methyladenosine-3'-phosphorothioate
  modified_base 3: mod_base = OTHER; note = 2'-O-methyluridine-3'-phosphate
  modified_base 4: mod_base = OTHER; note = 2'-O-methylguanosine-3'-phosphate
  modified_base 5: mod_base = OTHER; note = 2'-O-methylguanosine-3'-phosphate
  modified_base 6: mod_base = OTHER; note = 2'-O-docosanyl-adenosine-3'-phosphate
  modified_base 7: mod_base = OTHER; note = 2'-deoxy-2'-fluoroguanosine-3'-phosphate
  modified_base 8: mod_base = OTHER; note = 2'-O-methyladenosine-3'-phosphate
  modified_base 9: mod_base = OTHER; note = 2'-deoxy-2'-fluorouridine-3'-phosphate
  modified_base 10: mod_base = OTHER; note = 2'-deoxy-2'-fluorouridine-3'-phosphate
  modified_base 11: mod_base = OTHER; note = 2'-deoxy-2'-fluoroguanosine-3'-phosphate
  modified_base 12: mod_base = OTHER; note = 2'-O-methyluridine-3'-phosphate
  modified_base 13: mod_base = OTHER; note = 2'-O-methyluridine-3'-phosphate
  modified_base 14: mod_base = OTHER; note = 2'-O-methylguanosine-3'-phosphate
  modified_base 15: mod_base = OTHER; note = 2'-O-methylguanosine-3'-phosphate
  modified_base 16: mod_base = OTHER; note = 2'-O-methyluridine-3'-phosphate
  modified_base 17: mod_base = OTHER; note = 2'-O-methyladenosine-3'-phosphate
  modified_base 18: mod_base = OTHER; note = 2'-O-methylcytidine-3'-phosphate
  modified_base 19: mod_base = OTHER; note = 2'-O-methyladenosine-3'-phosphorothioate
  modified_base 20: mod_base = OTHER; note = 2'-O-methylcytidine-3'-phosphorothioate
  modified_base 21: mod_base = OTHER; note = 2'-O-methyladenosine
tatggagattgttggtacaca

SEQ ID NO: 10682 - RNA, 21 nt, synthetic construct
  source 1..21: mol_type = other RNA
  modified_base 1: mod_base = OTHER; note = 2'-O-methyladenosine-3'-phosphorothioate
  modified_base 2: mod_base = OTHER; note = 2'-O-methyluridine-3'-phosphorothioate
  modified_base 3: mod_base = OTHER; note = 2'-O-methylguanosine-3'-phosphate
  modified_base 4: mod_base = OTHER; note = 2'-O-methylguanosine-3'-phosphate
  modified_base 5: mod_base = OTHER; note = 2'-O-methyladenosine-3'-phosphate
  modified_base 6: mod_base = OTHER; note = 2'-O-docosanyl-guanosine-3'-phosphate
  modified_base 7: mod_base = OTHER; note = 2'-deoxy-2'-fluoroadenosine-3'-phosphate
  modified_base 8: mod_base = OTHER; note = 2'-O-methyluridine-3'-phosphate
  modified_base 9: mod_base = OTHER; note = 2'-deoxy-2'-fluorouridine-3'-phosphate
  modified_base 10: mod_base = OTHER; note = 2'-deoxy-2'-fluoroguanosine-3'-phosphate
  modified_base 11: mod_base = OTHER; note = 2'-deoxy-2'-fluorouridine-3'-phosphate
  modified_base 12: mod_base = OTHER; note = 2'-O-methyluridine-3'-phosphate
  modified_base 13: mod_base = OTHER; note = 2'-O-methylguanosine-3'-phosphate
  modified_base 14: mod_base = OTHER; note = 2'-O-methylguanosine-3'-phosphate
  modified_base 15: mod_base = OTHER; note = 2'-O-methyluridine-3'-phosphate
  modified_base 16: mod_base = OTHER; note = 2'-O-methyladenosine-3'-phosphate
  modified_base 17: mod_base = OTHER; note = 2'-O-methylcytidine-3'-phosphate
  modified_base 18: mod_base = OTHER; note = 2'-O-methyladenosine-3'-phosphate
  modified_base 19: mod_base = OTHER; note = 2'-O-methylcytidine-3'-phosphorothioate
  modified_base 20: mod_base = OTHER; note = 2'-O-methyladenosine-3'-phosphorothioate
  modified_base 21: mod_base = OTHER; note = 2'-O-methyladenosine
atggagattgttggtacacaa

SEQ ID NO: 10683 - RNA, 21 nt, synthetic construct
  source 1..21: mol_type = other RNA
  modified_base 1: mod_base = OTHER; note = 2'-O-methyluridine-3'-phosphorothioate
  modified_base 2: mod_base = OTHER; note = 2'-O-methylguanosine-3'-phosphorothioate
  modified_base 3: mod_base = OTHER; note = 2'-O-methylguanosine-3'-phosphate
  modified_base 4: mod_base = OTHER; note = 2'-O-methyladenosine-3'-phosphate
  modified_base 5: mod_base = OTHER; note = 2'-O-methylguanosine-3'-phosphate
  modified_base 6: mod_base = OTHER; note = 2'-O-docosanyl-adenosine-3'-phosphate
  modified_base 7: mod_base = OTHER; note = 2'-deoxy-2'-fluorouridine-3'-phosphate
  modified_base 8: mod_base = OTHER; note = 2'-O-methyluridine-3'-phosphate
  modified_base 9: mod_base = OTHER; note = 2'-deoxy-2'-fluoroguanosine-3'-phosphate
  modified_base 10: mod_base = OTHER; note = 2'-deoxy-2'-fluorouridine-3'-phosphate
  modified_base 11: mod_base = OTHER; note = 2'-deoxy-2'-fluorouridine-3'-phosphate
  modified_base 12: mod_base = OTHER; note = 2'-O-methylguanosine-3'-phosphate
  modified_base 13: mod_base = OTHER; note = 2'-O-methylguanosine-3'-phosphate
  modified_base 14: mod_base = OTHER; note = 2'-O-methyluridine-3'-phosphate
  modified_base 15: mod_base = OTHER; note = 2'-O-methyladenosine-3'-phosphate
  modified_base 16: mod_base = OTHER; note = 2'-O-methylcytidine-3'-phosphate
  modified_base 17: mod_base = OTHER; note = 2'-O-methyladenosine-3'-phosphate
  modified_base 18: mod_base = OTHER; note = 2'-O-methylcytidine-3'-phosphate
  modified_base 19: mod_base = OTHER; note = 2'-O-methyladenosine-3'-phosphorothioate
  modified_base 20: mod_base = OTHER; note = 2'-O-methyladenosine-3'-phosphorothioate
  modified_base 21: mod_base = OTHER; note = 2'-O-methyladenosine
tggagattgttggtacacaaa

SEQ ID NO: 10684 - RNA, 21 nt, synthetic construct
  source 1..21: mol_type = other RNA
  modified_base 1: mod_base = OTHER; note = 2'-O-methyladenosine-3'-phosphorothioate
  modified_base 2: mod_base = OTHER; note = 2'-O-methyluridine-3'-phosphorothioate
  modified_base 3: mod_base = OTHER; note = 2'-O-methyluridine-3'-phosphate
  modified_base 4: mod_base = OTHER; note = 2'-O-methylguanosine-3'-phosphate
  modified_base 5: mod_base = OTHER; note = 2'-O-methylcytidine-3'-phosphate
  modified_base 6: mod_base = OTHER; note = 2'-O-docosanyl-uridine-3'-phosphate
  modified_base 7: mod_base = OTHER; note = 2'-deoxy-2'-fluorocytidine-3'-phosphate
  modified_base 8: mod_base = OTHER; note = 2'-O-methyladenosine-3'-phosphate
  modified_base 9: mod_base = OTHER; note = 2'-deoxy-2'-fluorouridine-3'-phosphate
  modified_base 10: mod_base = OTHER; note = 2'-deoxy-2'-fluorocytidine-3'-phosphate
  modified_base 11: mod_base = OTHER; note = 2'-deoxy-2'-fluoroguanosine-3'-phosphate
  modified_base 12: mod_base = OTHER; note = 2'-O-methyladenosine-3'-phosphate
  modified_base 13: mod_base = OTHER; note = 2'-O-methylguanosine-3'-phosphate
  modified_base 14: mod_base = OTHER; note = 2'-O-methyladenosine-3'-phosphate
  modified_base 15: mod_base = OTHER; note = 2'-O-methylcytidine-3'-phosphate
  modified_base 16: mod_base = OTHER; note = 2'-O-methyladenosine-3'-phosphate
  modified_base 17: mod_base = OTHER; note = 2'-O-methyluridine-3'-phosphate
  modified_base 18: mod_base = OTHER; note = 2'-O-methyladenosine-3'-phosphate
  modified_base 19: mod_base = OTHER; note = 2'-O-methyladenosine-3'-phosphorothioate
  modified_base 20: mod_base = OTHER; note = 2'-O-methyladenosine-3'-phosphorothioate
  modified_base 21: mod_base = OTHER; note = 2'-O-methyladenosine
attgctcatcgagacataaaa

SEQ ID NO: 10685 - RNA, 21 nt, synthetic construct
  source 1..21: mol_type = other RNA
  modified_base 1: mod_base = OTHER; note = 2'-O-methylguanosine-3'-phosphorothioate
  modified_base 2: mod_base = OTHER; note = 2'-O-methylguanosine-3'-phosphorothioate
  modified_base 3: mod_base = OTHER; note = 2'-O-methyladenosine-3'-phosphate
  modified_base 4: mod_base = OTHER; note = 2'-O-methylguanosine-3'-phosphate
  modified_base 5: mod_base = OTHER; note = 2'-O-methyladenosine-3'-phosphate
  modified_base 6: mod_base = OTHER; note = 2'-O-docosanyl-uridine-3'-phosphate
  modified_base 7: mod_base = OTHER; note = 2'-deoxy-2'-fluorouridine-3'-phosphate
  modified_base 8: mod_base = OTHER; note = 2'-O-methylguanosine-3'-phosphate
  modified_base 9: mod_base = OTHER; note = 2'-deoxy-2'-fluorouridine-3'-phosphate
  modified_base 10: mod_base = OTHER; note = 2'-deoxy-2'-fluorouridine-3'-phosphate
  modified_base 11: mod_base = OTHER; note = 2'-deoxy-2'-fluoroguanosine-3'-phosphate
  modified_base 12: mod_base = OTHER; note = 2'-O-methylguanosine-3'-phosphate
  modified_base 13: mod_base = OTHER; note = 2'-O-methyluridine-3'-phosphate
  modified_base 14: mod_base = OTHER; note = 2'-O-methyladenosine-3'-phosphate
  modified_base 15: mod_base = OTHER; note = 2'-O-methylcytidine-3'-phosphate
  modified_base 16: mod_base = OTHER; note = 2'-O-methyladenosine-3'-phosphate
  modified_base 17: mod_base = OTHER; note = 2'-O-methylcytidine-3'-phosphate
  modified_base 18: mod_base = OTHER; note = 2'-O-methyladenosine-3'-phosphate
  modified_base 19: mod_base = OTHER; note = 2'-O-methyladenosine-3'-phosphorothioate
  modified_base 20: mod_base = OTHER; note = 2'-O-methylguanosine-3'-phosphorothioate
  modified_base 21: mod_base = OTHER; note = 2'-O-methyladenosine
ggagattgttggtacacaaga

SEQ ID NO: 10686 - RNA, 21 nt, synthetic construct
  source 1..21: mol_type = other RNA
  modified_base 1: mod_base = OTHER; note = 2'-O-methylguanosine-3'-phosphorothioate
  modified_base 2: mod_base = OTHER; note = 2'-O-methyladenosine-3'-phosphorothioate
  modified_base 3: mod_base = OTHER; note = 2'-O-methylguanosine-3'-phosphate
  modified_base 4: mod_base = OTHER; note = 2'-O-methyladenosine-3'-phosphate
  modified_base 5: mod_base = OTHER; note = 2'-O-methyluridine-3'-phosphate
  modified_base 6: mod_base = OTHER; note = 2'-O-docosanyl-uridine-3'-phosphate
  modified_base 7: mod_base = OTHER; note = 2'-deoxy-2'-fluoroguanosine-3'-phosphate
  modified_base 8: mod_base = OTHER; note = 2'-O-methyluridine-3'-phosphate
  modified_base 9: mod_base = OTHER; note = 2'-deoxy-2'-fluorouridine-3'-phosphate
  modified_base 10: mod_base = OTHER; note = 2'-deoxy-2'-fluoroguanosine-3'-phosphate
  modified_base 11: mod_base = OTHER; note = 2'-deoxy-2'-fluoroguanosine-3'-phosphate
  modified_base 12: mod_base = OTHER; note = 2'-O-methyluridine-3'-phosphate
  modified_base 13: mod_base = OTHER; note = 2'-O-methyladenosine-3'-phosphate
  modified_base 14: mod_base = OTHER; note = 2'-O-methylcytidine-3'-phosphate
  modified_base 15: mod_base = OTHER; note = 2'-O-methyladenosine-3'-phosphate
  modified_base 16: mod_base = OTHER; note = 2'-O-methylcytidine-3'-phosphate
  modified_base 17: mod_base = OTHER; note = 2'-O-methyladenosine-3'-phosphate
  modified_base 18: mod_base = OTHER; note = 2'-O-methyladenosine-3'-phosphate
  modified_base 19: mod_base = OTHER; note = 2'-O-methylguanosine-3'-phosphorothioate
  modified_base 20: mod_base = OTHER; note = 2'-O-methylguanosine-3'-phosphorothioate
  modified_base 21: mod_base = OTHER; note = 2'-O-methyladenosine
gagattgttggtacacaagga

SEQ ID NO: 10687 - RNA, 21 nt, synthetic construct
  source 1..21: mol_type = other RNA
  modified_base 1: mod_base = OTHER; note = 2'-O-methyladenosine-3'-phosphorothioate
  modified_base 2: mod_base = OTHER; note = 2'-O-methyluridine-3'-phosphorothioate
  modified_base 3: mod_base = OTHER; note = 2'-O-methyluridine-3'-phosphate
  modified_base 4: mod_base = OTHER; note = 2'-O-methylguanosine-3'-phosphate
  modified_base 5: mod_base = OTHER; note = 2'-O-methyluridine-3'-phosphate
  modified_base 6: mod_base = OTHER; note = 2'-O-docosanyl-uridine-3'-phosphate
  modified_base 7: mod_base = OTHER; note = 2'-deoxy-2'-fluoroguanosine-3'-phosphate
  modified_base 8: mod_base = OTHER; note = 2'-O-methylguanosine-3'-phosphate
  modified_base 9: mod_base = OTHER; note = 2'-deoxy-2'-fluorouridine-3'-phosphate
  modified_base 10: mod_base = OTHER; note = 2'-deoxy-2'-fluoroadenosine-3'-phosphate
  modified_base 11: mod_base = OTHER; note = 2'-deoxy-2'-fluorocytidine-3'-phosphate
  modified_base 12: mod_base = OTHER; note = 2'-O-methyladenosine-3'-phosphate
  modified_base 13: mod_base = OTHER; note = 2'-O-methylcytidine-3'-phosphate
  modified_base 14: mod_base = OTHER; note = 2'-O-methyladenosine-3'-phosphate
  modified_base 15: mod_base = OTHER; note = 2'-O-methyladenosine-3'-phosphate
  modified_base 16: mod_base = OTHER; note = 2'-O-methylguanosine-3'-phosphate
  modified_base 17: mod_base = OTHER; note = 2'-O-methylguanosine-3'-phosphate
  modified_base 18: mod_base = OTHER; note = 2'-O-methyluridine-3'-phosphate
  modified_base 19: mod_base = OTHER; note = 2'-O-methyladenosine-3'-phosphorothioate
  modified_base 20: mod_base = OTHER; note = 2'-O-methyladenosine-3'-phosphorothioate
  modified_base 21: mod_base = OTHER; note = 2'-O-methyladenosine
attgttggtacacaaggtaaa

SEQ ID NO: 10688 - RNA, 21 nt, synthetic construct
  source 1..21: mol_type = other RNA
  modified_base 1: mod_base = OTHER; note = 2'-O-methyluridine-3'-phosphorothioate
  modified_base 2: mod_base = OTHER; note = 2'-O-methyluridine-3'-phosphorothioate
  modified_base 3: mod_base = OTHER; note = 2'-O-methylguanosine-3'-phosphate
  modified_base 4: mod_base = OTHER; note = 2'-O-methylguanosine-3'-phosphate
  modified_base 5: mod_base = OTHER; note = 2'-O-methyluridine-3'-phosphate
  modified_base 6: mod_base = OTHER; note = 2'-O-docosanyl-adenosine-3'-phosphate
  modified_base 7: mod_base = OTHER; note = 2'-deoxy-2'-fluorocytidine-3'-phosphate
  modified_base 8: mod_base = OTHER; note = 2'-O-methyladenosine-3'-phosphate
  modified_base 9: mod_base = OTHER; note = 2'-deoxy-2'-fluorocytidine-3'-phosphate
  modified_base 10: mod_base = OTHER; note = 2'-deoxy-2'-fluoroadenosine-3'-phosphate
  modified_base 11: mod_base = OTHER; note = 2'-deoxy-2'-fluoroadenosine-3'-phosphate
  modified_base 12: mod_base = OTHER; note = 2'-O-methylguanosine-3'-phosphate
  modified_base 13: mod_base = OTHER; note = 2'-O-methylguanosine-3'-phosphate
  modified_base 14: mod_base = OTHER; note = 2'-O-methyluridine-3'-phosphate
  modified_base 15: mod_base = OTHER; note = 2'-O-methyladenosine-3'-phosphate
  modified_base 16: mod_base = OTHER; note = 2'-O-methyladenosine-3'-phosphate
  modified_base 17: mod_base = OTHER; note = 2'-O-methyladenosine-3'-phosphate
  modified_base 18: mod_base = OTHER; note = 2'-O-methylcytidine-3'-phosphate
  modified_base 19: mod_base = OTHER; note = 2'-O-methylcytidine-3'-phosphorothioate
  modified_base 20: mod_base = OTHER; note = 2'-O-methyluridine-3'-phosphorothioate
  modified_base 21: mod_base = OTHER; note = 2'-O-methyladenosine
ttggtacacaaggtaaaccta

SEQ ID NO: 10689 - RNA, 21 nt, synthetic construct
  source 1..21: mol_type = other RNA
  modified_base 1: mod_base = OTHER; note = 2'-O-methylguanosine-3'-phosphorothioate
  modified_base 2: mod_base = OTHER; note = 2'-O-methyluridine-3'-phosphorothioate
  modified_base 3: mod_base = OTHER; note = 2'-O-methyladenosine-3'-phosphate
  modified_base 4: mod_base = OTHER; note = 2'-O-methylcytidine-3'-phosphate
  modified_base 5: mod_base = OTHER; note = 2'-O-methyladenosine-3'-phosphate
  modified_base 6: mod_base = OTHER; note = 2'-O-docosanyl-cytidine-3'-phosphate
  modified_base 7: mod_base = OTHER; note = 2'-deoxy-2'-fluoroadenosine-3'-phosphate
  modified_base 8: mod_base = OTHER; note = 2'-O-methyladenosine-3'-phosphate
  modified_base 9: mod_base = OTHER; note = 2'-deoxy-2'-fluoroguanosine-3'-phosphate
  modified_base 10: mod_base = OTHER; note = 2'-deoxy-2'-fluoroguanosine-3'-phosphate
  modified_base 11: mod_base = OTHER; note = 2'-deoxy-2'-fluorouridine-3'-phosphate
  modified_base 12: mod_base = OTHER; note = 2'-O-methyladenosine-3'-phosphate
  modified_base 13: mod_base = OTHER; note = 2'-O-methyladenosine-3'-phosphate
  modified_base 14: mod_base = OTHER; note = 2'-O-methyladenosine-3'-phosphate
  modified_base 15: mod_base = OTHER; note = 2'-O-methylcytidine-3'-phosphate
  modified_base 16: mod_base = OTHER; note = 2'-O-methylcytidine-3'-phosphate
  modified_base 17: mod_base = OTHER; note = 2'-O-methyluridine-3'-phosphate
  modified_base 18: mod_base = OTHER; note = 2'-O-methylguanosine-3'-phosphate
  modified_base 19: mod_base = OTHER; note = 2'-O-methylcytidine-3'-phosphorothioate
  modified_base 20: mod_base = OTHER; note = 2'-O-methyluridine-3'-phosphorothioate
  modified_base 21: mod_base = OTHER; note = 2'-O-methyladenosine
gtacacaaggtaaacctgcta

SEQ ID NO: 10690 - RNA, 21 nt, synthetic construct
  source 1..21: mol_type = other RNA
  modified_base 1: mod_base = OTHER; note = 2'-O-methyluridine-3'-phosphorothioate
  modified_base 2: mod_base = OTHER; note = 2'-O-methyladenosine-3'-phosphorothioate
  modified_base 3: mod_base = OTHER; note = 2'-O-methylcytidine-3'-phosphate
  modified_base 4: mod_base = OTHER; note = 2'-O-methyladenosine-3'-phosphate
  modified_base 5: mod_base = OTHER; note = 2'-O-methylcytidine-3'-phosphate
  modified_base 6: mod_base = OTHER; note = 2'-O-docosanyl-adenosine-3'-phosphate
  modified_base 7: mod_base = OTHER; note = 2'-deoxy-2'-fluoroadenosine-3'-phosphate
  modified_base 8: mod_base = OTHER; note = 2'-O-methylguanosine-3'-phosphate
  modified_base 9: mod_base = OTHER; note = 2'-deoxy-2'-fluoroguanosine-3'-phosphate
  modified_base 10: mod_base = OTHER; note = 2'-deoxy-2'-fluorouridine-3'-phosphate
  modified_base 11: mod_base = OTHER; note = 2'-deoxy-2'-fluoroadenosine-3'-phosphate
  modified_base 12: mod_base = OTHER; note = 2'-O-methyladenosine-3'-phosphate
  modified_base 13: mod_base = OTHER; note = 2'-O-methyladenosine-3'-phosphate
  modified_base 14: mod_base = OTHER; note = 2'-O-methylcytidine-3'-phosphate
  modified_base 15: mod_base = OTHER; note = 2'-O-methylcytidine-3'-phosphate
  modified_base 16: mod_base = OTHER; note = 2'-O-methyluridine-3'-phosphate
  modified_base 17: mod_base = OTHER; note = 2'-O-methylguanosine-3'-phosphate
  modified_base 18: mod_base = OTHER; note = 2'-O-methylcytidine-3'-phosphate
  modified_base 19: mod_base = OTHER; note = 2'-O-methyluridine-3'-phosphorothioate
  modified_base 20: mod_base = OTHER; note = 2'-O-methyladenosine-3'-phosphorothioate
  modified_base 21: mod_base = OTHER; note = 2'-O-methyladenosine
tacacaaggtaaacctgctaa

SEQ ID NO: 10691 - RNA, 21 nt, synthetic construct
  source 1..21: mol_type = other RNA
  modified_base 1: mod_base = OTHER; note = 2'-O-methyladenosine-3'-phosphorothioate
  modified_base 2: mod_base = OTHER; note = 2'-O-methylcytidine-3'-phosphorothioate
  modified_base 3: mod_base = OTHER; note = 2'-O-methyladenosine-3'-phosphate
  modified_base 4: mod_base = OTHER; note = 2'-O-methylcytidine-3'-phosphate
  modified_base 5: mod_base = OTHER; note = 2'-O-methyladenosine-3'-phosphate
  modified_base 6: mod_base = OTHER; note = 2'-O-docosanyl-adenosine-3'-phosphate
  modified_base 7: mod_base = OTHER; note = 2'-deoxy-2'-fluoroguanosine-3'-phosphate
  modified_base 8: mod_base = OTHER; note = 2'-O-methylguanosine-3'-phosphate
  modified_base 9: mod_base = OTHER; note = 2'-deoxy-2'-fluorouridine-3'-phosphate
  modified_base 10: mod_base = OTHER; note = 2'-deoxy-2'-fluoroadenosine-3'-phosphate
  modified_base 11: mod_base = OTHER; note = 2'-deoxy-2'-fluoroadenosine-3'-phosphate
  modified_base 12: mod_base = OTHER; note = 2'-O-methyladenosine-3'-phosphate
  modified_base 13: mod_base = OTHER; note = 2'-O-methylcytidine-3'-phosphate
  modified_base 14: mod_base = OTHER; note = 2'-O-methylcytidine-3'-phosphate
  modified_base 15: mod_base = OTHER; note = 2'-O-methyluridine-3'-phosphate
  modified_base 16: mod_base = OTHER; note = 2'-O-methylguanosine-3'-phosphate
  modified_base 17: mod_base = OTHER; note = 2'-O-methylcytidine-3'-phosphate
  modified_base 18: mod_base = OTHER; note = 2'-O-methyluridine-3'-phosphate
  modified_base 19: mod_base = OTHER; note = 2'-O-methyladenosine-3'-phosphorothioate
  modified_base 20: mod_base = OTHER; note = 2'-O-methyluridine-3'-phosphorothioate
  modified_base 21: mod_base = OTHER; note = 2'-O-methyladenosine
acacaaggtaaacctgctata

SEQ ID NO: 10692 - RNA, 21 nt, synthetic construct
  source 1..21: mol_type = other RNA
  modified_base 1: mod_base = OTHER; note = 2'-O-methylcytidine-3'-phosphorothioate
  modified_base 2: mod_base = OTHER; note = 2'-O-methyladenosine-3'-phosphorothioate
  modified_base 3: mod_base = OTHER; note = 2'-O-methylcytidine-3'-phosphate
  modified_base 4: mod_base = OTHER; note = 2'-O-methyladenosine-3'-phosphate
  modified_base 5: mod_base = OTHER; note = 2'-O-methyladenosine-3'-phosphate
  modified_base 6: mod_base = OTHER; note = 2'-O-docosanyl-guanosine-3'-phosphate
  modified_base 7: mod_base = OTHER; note = 2'-deoxy-2'-fluoroguanosine-3'-phosphate
  modified_base 8: mod_base = OTHER; note = 2'-O-methyluridine-3'-phosphate
  modified_base 9: mod_base = OTHER; note = 2'-deoxy-2'-fluoroadenosine-3'-phosphate
  modified_base 10: mod_base = OTHER; note = 2'-deoxy-2'-fluoroadenosine-3'-phosphate
  modified_base 11: mod_base = OTHER; note = 2'-deoxy-2'-fluoroadenosine-3'-phosphate
  modified_base 12: mod_base = OTHER; note = 2'-O-methylcytidine-3'-phosphate
  modified_base 13: mod_base = OTHER; note = 2'-O-methylcytidine-3'-phosphate
  modified_base 14: mod_base = OTHER; note = 2'-O-methyluridine-3'-phosphate
  modified_base 15: mod_base = OTHER; note = 2'-O-methylguanosine-3'-phosphate
  modified_base 16: mod_base = OTHER; note = 2'-O-methylcytidine-3'-phosphate
  modified_base 17: mod_base = OTHER; note = 2'-O-methyluridine-3'-phosphate
  modified_base 18: mod_base = OTHER; note = 2'-O-methyladenosine-3'-phosphate
  modified_base 19: mod_base = OTHER; note = 2'-O-methyluridine-3'-phosphorothioate
  modified_base 20: mod_base = OTHER; note = 2'-O-methyluridine-3'-phosphorothioate
  modified_base 21: mod_base = OTHER; note = 2'-O-methyladenosine
cacaaggtaaacctgctatta

SEQ ID NO: 10693 - RNA, 21 nt, synthetic construct
  source 1..21: mol_type = other RNA
  modified_base 1: mod_base = OTHER; note = 2'-O-methyladenosine-3'-phosphorothioate
  modified_base 2: mod_base = OTHER; note = 2'-O-methylcytidine-3'-phosphorothioate
  modified_base 3: mod_base = OTHER; note = 2'-O-methyladenosine-3'-phosphate
  modified_base 4: mod_base = OTHER; note = 2'-O-methyladenosine-3'-phosphate
  modified_base 5: mod_base = OTHER; note = 2'-O-methylguanosine-3'-phosphate
  modified_base 6: mod_base = OTHER; note = 2'-O-docosanyl-guanosine-3'-phosphate
  modified_base 7: mod_base = OTHER; note = 2'-deoxy-2'-fluorouridine-3'-phosphate
  modified_base 8: mod_base = OTHER; note = 2'-O-methyladenosine-3'-phosphate
  modified_base 9: mod_base = OTHER; note = 2'-deoxy-2'-fluoroadenosine-3'-phosphate
  modified_base 10: mod_base = OTHER; note = 2'-deoxy-2'-fluoroadenosine-3'-phosphate
  modified_base 11: mod_base = OTHER; note = 2'-deoxy-2'-fluorocytidine-3'-phosphate
  modified_base 12: mod_base = OTHER; note = 2'-O-methylcytidine-3'-phosphate
  modified_base 13: mod_base = OTHER; note = 2'-O-methyluridine-3'-phosphate
  modified_base 14: mod_base = OTHER; note = 2'-O-methylguanosine-3'-phosphate
  modified_base 15: mod_base = OTHER; note = 2'-O-methylcytidine-3'-phosphate
  modified_base 16: mod_base = OTHER; note = 2'-O-methyluridine-3'-phosphate
  modified_base 17: mod_base = OTHER; note = 2'-O-methyladenosine-3'-phosphate
  modified_base 18: mod_base = OTHER; note = 2'-O-methyluridine-3'-phosphate
  modified_base 19: mod_base = OTHER; note = 2'-O-methyluridine-3'-phosphorothioate
  modified_base 20: mod_base = OTHER; note = 2'-O-methylguanosine-3'-phosphorothioate
  modified_base 21: mod_base = OTHER; note = 2'-O-methyladenosine
acaaggtaaacctgctattga

SEQ ID NO: 10694 - RNA, 21 nt, synthetic construct
  source 1..21: mol_type = other RNA
  modified_base 1: mod_base = OTHER; note = 2'-O-methylcytidine-3'-phosphorothioate
  modified_base 2: mod_base = OTHER; note = 2'-O-methyladenosine-3'-phosphorothioate
  modified_base 3: mod_base = OTHER; note = 2'-O-methyladenosine-3'-phosphate
  modified_base 4: mod_base = OTHER; note = 2'-O-methylguanosine-3'-phosphate
  modified_base 5: mod_base = OTHER; note = 2'-O-methylguanosine-3'-phosphate
  modified_base 6: mod_base = OTHER; note = 2'-O-docosanyl-uridine-3'-phosphate
  modified_base 7: mod_base = OTHER; note = 2'-deoxy-2'-fluoroadenosine-3'-phosphate
  modified_base 8: mod_base = OTHER; note = 2'-O-methyladenosine-3'-phosphate
  modified_base 9: mod_base = OTHER; note = 2'-deoxy-2'-fluoroadenosine-3'-phosphate
  modified_base 10: mod_base = OTHER; note = 2'-deoxy-2'-fluorocytidine-3'-phosphate
  modified_base 11: mod_base = OTHER; note = 2'-deoxy-2'-fluorocytidine-3'-phosphate
  modified_base 12: mod_base = OTHER; note = 2'-O-methyluridine-3'-phosphate
  modified_base 13: mod_base = OTHER; note = 2'-O-methylguanosine-3'-phosphate
  modified_base 14: mod_base = OTHER; note = 2'-O-methylcytidine-3'-phosphate
  modified_base 15: mod_base = OTHER; note = 2'-O-methyluridine-3'-phosphate
  modified_base 16: mod_base = OTHER; note = 2'-O-methyladenosine-3'-phosphate
  modified_base 17: mod_base = OTHER; note = 2'-O-methyluridine-3'-phosphate
  modified_base 18: mod_base = OTHER; note = 2'-O-methyluridine-3'-phosphate
  modified_base 19: mod_base = OTHER; note = 2'-O-methylguanosine-3'-phosphorothioate
  modified_base 20: mod_base = OTHER; note = 2'-O-methylcytidine-3'-phosphorothioate
  modified_base 21: mod_base = OTHER; note = 2'-O-methyladenosine
caaggtaaacctgctattgca

SEQ ID NO: 10695 - RNA, 21 nt, synthetic construct
  source 1..21: mol_type = other RNA
  modified_base 1: mod_base = OTHER; note = 2'-O-methyladenosine-3'-phosphorothioate
  modified_base 2: mod_base = OTHER; note = 2'-O-methyladenosine-3'-phosphorothioate
  modified_base 3: mod_base = OTHER; note = 2'-O-methylguanosine-3'-phosphate
  modified_base 4: mod_base = OTHER; note = 2'-O-methylguanosine-3'-phosphate
  modified_base 5: mod_base = OTHER; note = 2'-O-methyluridine-3'-phosphate
  modified_base 6: mod_base = OTHER; note = 2'-O-docosanyl-adenosine-3'-phosphate
  modified_base 7: mod_base = OTHER; note = 2'-deoxy-2'-fluoroadenosine-3'-phosphate
  modified_base 8: mod_base = OTHER; note = 2'-O-methyladenosine-3'-phosphate
  modified_base 9: mod_base = OTHER; note = 2'-deoxy-2'-fluorocytidine-3'-phosphate
  modified_base 10: mod_base = OTHER; note = 2'-deoxy-2'-fluorocytidine-3'-phosphate
  modified_base 11: mod_base = OTHER; note = 2'-deoxy-2'-fluorouridine-3'-phosphate
  modified_base 12: mod_base = OTHER; note = 2'-O-methylguanosine-3'-phosphate
  modified_base 13: mod_base = OTHER; note = 2'-O-methylcytidine-3'-phosphate
  modified_base 14: mod_base = OTHER; note = 2'-O-methyluridine-3'-phosphate
  modified_base 15: mod_base = OTHER; note = 2'-O-methyladenosine-3'-phosphate
  modified_base 16: mod_base = OTHER; note = 2'-O-methyluridine-3'-phosphate
  modified_base 17: mod_base = OTHER; note = 2'-O-methyluridine-3'-phosphate
  modified_base 18: mod_base = OTHER; note = 2'-O-methylguanosine-3'-phosphate
  modified_base 19: mod_base = OTHER; note = 2'-O-methylcytidine-3'-phosphorothioate
  modified_base 20: mod_base = OTHER; note = 2'-O-methyluridine-3'-phosphorothioate
  modified_base 21: mod_base = OTHER; note = 2'-O-methyladenosine
aaggtaaacctgctattgcta

SEQ ID NO: 10696 - RNA, 21 nt, synthetic construct
  source 1..21: mol_type = other RNA
  modified_base 1: mod_base = OTHER; note = 2'-O-methyladenosine-3'-phosphorothioate
  modified_base 2: mod_base = OTHER; note = 2'-O-methylguanosine-3'-phosphorothioate
  modified_base 3: mod_base = OTHER; note = 2'-O-methylguanosine-3'-phosphate
  modified_base 4: mod_base = OTHER; note = 2'-O-methyluridine-3'-phosphate
  modified_base 5: mod_base = OTHER; note = 2'-O-methyladenosine-3'-phosphate
  modified_base 6: mod_base = OTHER; note = 2'-O-docosanyl-adenosine-3'-phosphate
  modified_base 7: mod_base = OTHER; note = 2'-deoxy-2'-fluoroadenosine-3'-phosphate
  modified_base 8: mod_base = OTHER; note = 2'-O-methylcytidine-3'-phosphate
  modified_base 9: mod_base = OTHER; note = 2'-deoxy-2'-fluorocytidine-3'-phosphate
  modified_base 10: mod_base = OTHER; note = 2'-deoxy-2'-fluorouridine-3'-phosphate
  modified_base 11: mod_base = OTHER; note = 2'-deoxy-2'-fluoroguanosine-3'-phosphate
  modified_base 12: mod_base = OTHER; note = 2'-O-methylcytidine-3'-phosphate
  modified_base 13: mod_base = OTHER; note = 2'-O-methyluridine-3'-phosphate
  modified_base 14: mod_base = OTHER; note = 2'-O-methyladenosine-3'-phosphate
  modified_base 15: mod_base = OTHER; note = 2'-O-methyluridine-3'-phosphate
  modified_base 16: mod_base = OTHER; note = 2'-O-methyluridine-3'-phosphate
  modified_base 17: mod_base = OTHER; note = 2'-O-methylguanosine-3'-phosphate
  modified_base 18: mod_base = OTHER; note = 2'-O-methylcytidine-3'-phosphate
  modified_base 19: mod_base = OTHER; note = 2'-O-methyluridine-3'-phosphorothioate
  modified_base 20: mod_base = OTHER; note = 2'-O-methylcytidine-3'-phosphorothioate
  modified_base 21: mod_base = OTHER; note = 2'-O-methyladenosine
aggtaaacctgctattgctca

SEQ ID NO: 10697 - RNA, 21 nt, synthetic construct
  source 1..21: mol_type = other RNA
  modified_base 1: mod_base = OTHER; note = 2'-O-methylguanosine-3'-phosphorothioate
  modified_base 2: mod_base = OTHER; note = 2'-O-methylguanosine-3'-phosphorothioate
  modified_base 3: mod_base = OTHER; note = 2'-O-methyluridine-3'-phosphate
  modified_base 4: mod_base = OTHER; note = 2'-O-methyladenosine-3'-phosphate
  modified_base 5: mod_base = OTHER; note = 2'-O-methyladenosine-3'-phosphate
  modified_base 6: mod_base = OTHER; note = 2'-O-docosanyl-adenosine-3'-phosphate
  modified_base 7: mod_base = OTHER; note = 2'-deoxy-2'-fluorocytidine-3'-phosphate
  modified_base 8: mod_base = OTHER; note = 2'-O-methylcytidine-3'-phosphate
  modified_base 9: mod_base = OTHER; note = 2'-deoxy-2'-fluorouridine-3'-phosphate
  modified_base 10: mod_base = OTHER; note = 2'-deoxy-2'-fluoroguanosine-3'-phosphate
  modified_base 11: mod_base = OTHER; note = 2'-deoxy-2'-fluorocytidine-3'-phosphate
  modified_base 12: mod_base = OTHER; note = 2'-O-methyluridine-3'-phosphate
  modified_base 13: mod_base = OTHER; note = 2'-O-methyladenosine-3'-phosphate
  modified_base 14: mod_base = OTHER; note = 2'-O-methyluridine-3'-phosphate
  modified_base 15: mod_base = OTHER; note = 2'-O-methyluridine-3'-phosphate
  modified_base 16: mod_base = OTHER; note = 2'-O-methylguanosine-3'-phosphate
  modified_base 17: mod_base = OTHER; note = 2'-O-methylcytidine-3'-phosphate
  modified_base 18: mod_base = OTHER; note = 2'-O-methyluridine-3'-phosphate
  modified_base 19: mod_base = OTHER; note = 2'-O-methylcytidine-3'-phosphorothioate
  modified_base 20: mod_base = OTHER; note = 2'-O-methyladenosine-3'-phosphorothioate
  modified_base 21: mod_base = OTHER; note = 2'-O-methyladenosine
ggtaaacctgctattgctcaa

SEQ ID NO: 10698 - RNA, 21 nt, synthetic construct
  source 1..21: mol_type = other RNA
  modified_base 1: mod_base = OTHER; note = 2'-O-methylguanosine-3'-phosphorothioate
  modified_base 2: mod_base = OTHER; note = 2'-O-methyluridine-3'-phosphorothioate
  modified_base 3: mod_base = OTHER; note = 2'-O-methyladenosine-3'-phosphate
  modified_base 4: mod_base = OTHER; note = 2'-O-methyladenosine-3'-phosphate
  modified_base 5: mod_base = OTHER; note = 2'-O-methyladenosine-3'-phosphate
  modified_base 6: mod_base = OTHER; note = 2'-O-docosanyl-cytidine-3'-phosphate
  modified_base 7: mod_base = OTHER; note = 2'-deoxy-2'-fluorocytidine-3'-phosphate
  modified_base 8: mod_base = OTHER; note = 2'-O-methyluridine-3'-phosphate
  modified_base 9: mod_base = OTHER; note = 2'-deoxy-2'-fluoroguanosine-3'-phosphate
  modified_base 10: mod_base = OTHER; note = 2'-deoxy-2'-fluorocytidine-3'-phosphate
  modified_base 11: mod_base = OTHER; note = 2'-deoxy-2'-fluorouridine-3'-phosphate
  modified_base 12: mod_base = OTHER; note = 2'-O-methyladenosine-3'-phosphate
  modified_base 13: mod_base = OTHER; note = 2'-O-methyluridine-3'-phosphate
  modified_base 14: mod_base = OTHER; note = 2'-O-methyluridine-3'-phosphate
  modified_base 15: mod_base = OTHER; note = 2'-O-methylguanosine-3'-phosphate
  modified_base 16: mod_base = OTHER; note = 2'-O-methylcytidine-3'-phosphate
  modified_base 17: mod_base = OTHER; note = 2'-O-methyluridine-3'-phosphate
  modified_base 18: mod_base = OTHER; note = 2'-O-methylcytidine-3'-phosphate
  modified_base 19: mod_base = OTHER; note = 2'-O-methyladenosine-3'-phosphorothioate
  modified_base 20: mod_base = OTHER; note = 2'-O-methyluridine-3'-phosphorothioate
  modified_base 21: mod_base = OTHER; note = 2'-O-methyladenosine
gtaaacctgctattgctcata

SEQ ID NO: 10699 - RNA, 21 nt, synthetic construct
  source 1..21: mol_type = other RNA
  modified_base 1: mod_base = OTHER; note = 2'-O-methyluridine-3'-phosphorothioate
  modified_base 2: mod_base = OTHER; note = 2'-O-methyladenosine-3'-phosphorothioate
  modified_base 3: mod_base = OTHER; note = 2'-O-methyladenosine-3'-phosphate
  modified_base 4: mod_base = OTHER; note = 2'-O-methyladenosine-3'-phosphate
  modified_base 5: mod_base = OTHER; note = 2'-O-methylcytidine-3'-phosphate
  modified_base 6: mod_base = OTHER; note = 2'-O-docosanyl-cytidine-3'-phosphate
  modified_base 7: mod_base = OTHER; note = 2'-deoxy-2'-fluorouridine-3'-phosphate
  modified_base 8: mod_base = OTHER; note = 2'-O-methylguanosine-3'-phosphate
  modified_base 9: mod_base = OTHER; note = 2'-deoxy-2'-fluorocytidine-3'-phosphate
  modified_base 10: mod_base = OTHER; note = 2'-deoxy-2'-fluorouridine-3'-phosphate
  modified_base 11: mod_base = OTHER; note = 2'-deoxy-2'-fluoroadenosine-3'-phosphate
  modified_base 12: mod_base = OTHER; note = 2'-O-methyluridine-3'-phosphate
  modified_base 13: mod_base = OTHER; note = 2'-O-methyluridine-3'-phosphate
  modified_base 14: mod_base = OTHER; note = 2'-O-methylguanosine-3'-phosphate
  modified_base 15: mod_base = OTHER; note = 2'-O-methylcytidine-3'-phosphate
  modified_base 16: mod_base = OTHER; note = 2'-O-methyluridine-3'-phosphate
  modified_base 17: mod_base = OTHER; note = 2'-O-methylcytidine-3'-phosphate
  modified_base 18: mod_base = OTHER; note = 2'-O-methyladenosine-3'-phosphate
  modified_base 19: mod_base = OTHER; note = 2'-O-methyluridine-3'-phosphorothioate
  modified_base 20: mod_base = OTHER; note = 2'-O-methylcytidine-3'-phosphorothioate
  modified_base 21: mod_base = OTHER; note = 2'-O-methyladenosine
taaacctgctattgctcatca

SEQ ID NO: 10700 - RNA, 21 nt, synthetic construct
  source 1..21: mol_type = other RNA
  modified_base 1: mod_base = OTHER; note = 2'-O-methyladenosine-3'-phosphorothioate
  modified_base 2: mod_base = OTHER; note = 2'-O-methyladenosine-3'-phosphorothioate
  modified_base 3: mod_base = OTHER; note = 2'-O-methyladenosine-3'-phosphate
  modified_base 4: mod_base = OTHER; note = 2'-O-methylcytidine-3'-phosphate
  modified_base 5: mod_base = OTHER; note = 2'-O-methylcytidine-3'-phosphate
  modified_base 6: mod_base = OTHER; note = 2'-O-docosanyl-uridine-3'-phosphate
  modified_base 7: mod_base = OTHER; note = 2'-deoxy-2'-fluoroguanosine-3'-phosphate
  modified_base 8: mod_base = OTHER; note = 2'-O-methylcytidine-3'-phosphate
  modified_base 9: mod_base = OTHER; note = 2'-deoxy-2'-fluorouridine-3'-phosphate
  modified_base 10: mod_base = OTHER; note = 2'-deoxy-2'-fluoroadenosine-3'-phosphate
  modified_base 11: mod_base = OTHER; note = 2'-deoxy-2'-fluorouridine-3'-phosphate
  modified_base 12: mod_base = OTHER; note = 2'-O-methyluridine-3'-phosphate
  modified_base 13: mod_base = OTHER; note = 2'-O-methylguanosine-3'-phosphate
  modified_base 14: mod_base = OTHER; note = 2'-O-methylcytidine-3'-phosphate
  modified_base 15: mod_base = OTHER; note = 2'-O-methyluridine-3'-phosphate
  modified_base 16: mod_base = OTHER; note = 2'-O-methylcytidine-3'-phosphate
  modified_base 17: mod_base = OTHER; note = 2'-O-methyladenosine-3'-phosphate
  modified_base 18: mod_base = OTHER; note = 2'-O-methyluridine-3'-phosphate
  modified_base 19: mod_base = OTHER; note = 2'-O-methylcytidine-3'-phosphorothioate
  modified_base 20: mod_base = OTHER; note = 2'-O-methylguanosine-3'-phosphorothioate
  modified_base 21: mod_base = OTHER; note = 2'-O-methyladenosine
aaacctgctattgctcatcga

SEQ ID NO: 10701 - RNA, 21 nt, synthetic construct
  source 1..21: mol_type = other RNA
  modified_base 1: mod_base = OTHER; note = 2'-O-methyladenosine-3'-phosphorothioate
  modified_base 2: mod_base = OTHER; note = 2'-O-methyladenosine-3'-phosphorothioate
  modified_base 3: mod_base = OTHER; note = 2'-O-methylcytidine-3'-phosphate
  modified_base 4: mod_base = OTHER; note = 2'-O-methylcytidine-3'-phosphate
  modified_base 5: mod_base = OTHER; note = 2'-O-methyluridine-3'-phosphate
  modified_base 6: mod_base = OTHER; note = 2'-O-docosanyl-guanosine-3'-phosphate
  modified_base 7: mod_base = OTHER; note = 2'-deoxy-2'-fluorocytidine-3'-phosphate
  modified_base 8: mod_base = OTHER; note = 2'-O-methyluridine-3'-phosphate
  modified_base 9: mod_base = OTHER; note = 2'-deoxy-2'-fluoroadenosine-3'-phosphate
  modified_base 10: mod_base = OTHER; note = 2'-deoxy-2'-fluorouridine-3'-phosphate
  modified_base 11: mod_base = OTHER; note = 2'-deoxy-2'-fluorouridine-3'-phosphate
  modified_base 12: mod_base = OTHER; note = 2'-O-methylguanosine-3'-phosphate
  modified_base 13: mod_base = OTHER; note = 2'-O-methylcytidine-3'-phosphate
  modified_base 14: mod_base = OTHER; note = 2'-O-methyluridine-3'-phosphate
  modified_base 15: mod_base = OTHER; note = 2'-O-methylcytidine-3'-phosphate
  modified_base 16: mod_base = OTHER; note = 2'-O-methyladenosine-3'-phosphate
  modified_base 17: mod_base = OTHER; note = 2'-O-methyluridine-3'-phosphate
  modified_base 18: mod_base = OTHER; note = 2'-O-methylcytidine-3'-phosphate
  modified_base 19: mod_base = OTHER; note = 2'-O-methylguanosine-3'-phosphorothioate
  modified_base 20: mod_base = OTHER; note = 2'-O-methyladenosine-3'-phosphorothioate
  modified_base 21: mod_base = OTHER; note = 2'-O-methyladenosine
aacctgctattgctcatcgaa

SEQ ID NO: 10702 - RNA, 21 nt, synthetic construct
  source 1..21: mol_type = other RNA
  modified_base 1: mod_base = OTHER; note = 2'-O-methyladenosine-3'-phosphorothioate
  modified_base 2: mod_base = OTHER; note = 2'-O-methylcytidine-3'-phosphorothioate
  modified_base 3: mod_base = OTHER; note = 2'-O-methylcytidine-3'-phosphate
  modified_base 4: mod_base = OTHER; note = 2'-O-methyluridine-3'-phosphate
  modified_base 5: mod_base = OTHER; note = 2'-O-methylguanosine-3'-phosphate
  modified_base 6: mod_base = OTHER; note = 2'-O-docosanyl-cytidine-3'-phosphate
  modified_base 7: mod_base = OTHER; note = 2'-deoxy-2'-fluorouridine-3'-phosphate
  modified_base 8: mod_base = OTHER; note = 2'-O-methyladenosine-3'-phosphate
  modified_base 9: mod_base = OTHER; note = 2'-deoxy-2'-fluorouridine-3'-phosphate
  modified_base 10: mod_base = OTHER; note = 2'-deoxy-2'-fluorouridine-3'-phosphate
  modified_base 11: mod_base = OTHER; note = 2'-deoxy-2'-fluoroguanosine-3'-phosphate
  modified_base 12: mod_base = OTHER; note = 2'-O-methylcytidine-3'-phosphate
  modified_base 13: mod_base = OTHER; note = 2'-O-methyluridine-3'-phosphate
  modified_base 14: mod_base = OTHER; note = 2'-O-methylcytidine-3'-phosphate
  modified_base 15: mod_base = OTHER; note = 2'-O-methyladenosine-3'-phosphate
  modified_base 16: mod_base = OTHER; note = 2'-O-methyluridine-3'-phosphate
  modified_base 17: mod_base = OTHER; note = 2'-O-methylcytidine-3'-phosphate
  modified_base 18: mod_base = OTHER; note = 2'-O-methylguanosine-3'-phosphate
  modified_base 19: mod_base = OTHER; note = 2'-O-methyladenosine-3'-phosphorothioate
  modified_base 20: mod_base = OTHER; note = 2'-O-methylguanosine-3'-phosphorothioate
  modified_base 21: mod_base = OTHER; note = 2'-O-methyladenosine
acctgctattgctcatcgaga

SEQ ID NO: 10703 - RNA, 21 nt, synthetic construct
  source 1..21: mol_type = other RNA
  modified_base 1: mod_base = OTHER; note = 2'-O-methylcytidine-3'-phosphorothioate
  modified_base 2: mod_base = OTHER; note = 2'-O-methylcytidine-3'-phosphorothioate
  modified_base 3: mod_base = OTHER; note = 2'-O-methyluridine-3'-phosphate
  modified_base 4: mod_base = OTHER; note = 2'-O-methylguanosine-3'-phosphate
  modified_base 5: mod_base = OTHER; note = 2'-O-methylcytidine-3'-phosphate
  modified_base 6: mod_base = OTHER; note = 2'-O-docosanyl-uridine-3'-phosphate
  modified_base 7: mod_base = OTHER; note = 2'-deoxy-2'-fluoroadenosine-3'-phosphate
  modified_base 8: mod_base = OTHER; note = 2'-O-methyluridine-3'-phosphate
  modified_base 9: mod_base = OTHER; note = 2'-deoxy-2'-fluorouridine-3'-phosphate
  modified_base 10: mod_base = OTHER; note = 2'-deoxy-2'-fluoroguanosine-3'-phosphate
  modified_base 11: mod_base = OTHER; note = 2'-deoxy-2'-fluorocytidine-3'-phosphate
  modified_base 12: mod_base = OTHER; note = 2'-O-methyluridine-3'-phosphate
  modified_base 13: mod_base = OTHER; note = 2'-O-methylcytidine-3'-phosphate
  modified_base 14: mod_base = OTHER; note = 2'-O-methyladenosine-3'-phosphate
  modified_base 15: mod_base = OTHER; note = 2'-O-methyluridine-3'-phosphate
  modified_base 16: mod_base = OTHER; note = 2'-O-methylcytidine-3'-phosphate
  modified_base 17: mod_base = OTHER; note = 2'-O-methylguanosine-3'-phosphate
  modified_base 18: mod_base = OTHER; note = 2'-O-methyladenosine-3'-phosphate
  modified_base 19: mod_base = OTHER; note = 2'-O-methylguanosine-3'-phosphorothioate
  modified_base 20: mod_base = OTHER; note = 2'-O-methyladenosine-3'-phosphorothioate
  modified_base 21: mod_base = OTHER; note = 2'-O-methyladenosine
cctgctattgctcatcgagaa

SEQ ID NO: 10704 - RNA, 21 nt, synthetic construct
  source 1..21: mol_type = other RNA
  modified_base 1: mod_base = OTHER; note = 2'-O-methylcytidine-3'-phosphorothioate
  modified_base 2: mod_base = OTHER; note = 2'-O-methyluridine-3'-phosphorothioate
  modified_base 3: mod_base = OTHER; note = 2'-O-methylguanosine-3'-phosphate
  modified_base 4: mod_base = OTHER; note = 2'-O-methylcytidine-3'-phosphate
  modified_base 5: mod_base = OTHER; note = 2'-O-methyluridine-3'-phosphate
  modified_base 6: mod_base = OTHER; note = 2'-O-docosanyl-adenosine-3'-phosphate
  modified_base 7: mod_base = OTHER; note = 2'-deoxy-2'-fluorouridine-3'-phosphate
  modified_base 8: mod_base = OTHER; note = 2'-O-methyluridine-3'-phosphate
  modified_base 9: mod_base = OTHER; note = 2'-deoxy-2'-fluoroguanosine-3'-phosphate
  modified_base 10: mod_base = OTHER; note = 2'-deoxy-2'-fluorocytidine-3'-phosphate
  modified_base 11: mod_base = OTHER; note = 2'-deoxy-2'-fluorouridine-3'-phosphate
  modified_base 12: mod_base = OTHER; note = 2'-O-methylcytidine-3'-phosphate
  modified_base 13: mod_base = OTHER; note = 2'-O-methyladenosine-3'-phosphate
  modified_base 14: mod_base = OTHER; note = 2'-O-methyluridine-3'-phosphate
  modified_base 15: mod_base = OTHER; note = 2'-O-methylcytidine-3'-phosphate
  modified_base 16: mod_base = OTHER; note = 2'-O-methylguanosine-3'-phosphate
  modified_base 17: mod_base = OTHER; note = 2'-O-methyladenosine-3'-phosphate
  modified_base 18: mod_base = OTHER; note = 2'-O-methylguanosine-3'-phosphate
  modified_base 19: mod_base = OTHER; note = 2'-O-methyladenosine-3'-phosphorothioate
  modified_base 20: mod_base = OTHER; note = 2'-O-methylcytidine-3'-phosphorothioate
  modified_base 21: mod_base = OTHER; note = 2'-O-methyladenosine
ctgctattgctcatcgagaca

SEQ ID NO: 10705 - RNA, 21 nt, synthetic construct
  source 1..21: mol_type = other RNA
  modified_base 1: mod_base = OTHER; note = 2'-O-methyluridine-3'-phosphorothioate
  modified_base 2: mod_base = OTHER; note = 2'-O-methylguanosine-3'-phosphorothioate
  modified_base 3: mod_base = OTHER; note = 2'-O-methylcytidine-3'-phosphate
  modified_base 4: mod_base = OTHER; note = 2'-O-methyluridine-3'-phosphate
  modified_base 5: mod_base = OTHER; note = 2'-O-methyladenosine-3'-phosphate
  modified_base 6: mod_base = OTHER; note = 2'-O-docosanyl-uridine-3'-phosphate
  modified_base 7: mod_base = OTHER; note = 2'-deoxy-2'-fluorouridine-3'-phosphate
  modified_base 8: mod_base = OTHER; note = 2'-O-methylguanosine-3'-phosphate
  modified_base 9: mod_base = OTHER; note = 2'-deoxy-2'-fluorocytidine-3'-phosphate
  modified_base 10: mod_base = OTHER; note = 2'-deoxy-2'-fluorouridine-3'-phosphate
  modified_base 11: mod_base = OTHER; note = 2'-deoxy-2'-fluorocytidine-3'-phosphate
  modified_base 12: mod_base = OTHER; note = 2'-O-methyladenosine-3'-phosphate
  modified_base 13: mod_base = OTHER; note = 2'-O-methyluridine-3'-phosphate
  modified_base 14: mod_base = OTHER; note = 2'-O-methylcytidine-3'-phosphate
  modified_base 15: mod_base = OTHER; note = 2'-O-methylguanosine-3'-phosphate
  modified_base 16: mod_base = OTHER; note = 2'-O-methyladenosine-3'-phosphate
  modified_base 17: mod_base = OTHER; note = 2'-O-methylguanosine-3'-phosphate
  modified_base 18: mod_base = OTHER; note = 2'-O-methyladenosine-3'-phosphate
  modified_base 19: mod_base = OTHER; note = 2'-O-methylcytidine-3'-phosphorothioate
  modified_base 20: mod_base = OTHER; note = 2'-O-methyladenosine-3'-phosphorothioate
  modified_base 21: mod_base = OTHER; note = 2'-O-methyladenosine
tgctattgctcatcgagacaa

SEQ ID NO: 10706 - RNA, 21 nt, synthetic construct
  source 1..21: mol_type = other RNA
  modified_base 1: mod_base = OTHER; note = 2'-O-methylguanosine-3'-phosphorothioate
  modified_base 2: mod_base = OTHER; note = 2'-O-methylcytidine-3'-phosphorothioate
  modified_base 3: mod_base = OTHER; note = 2'-O-methyluridine-3'-phosphate
  modified_base 4: mod_base = OTHER; note = 2'-O-methyladenosine-3'-phosphate
  modified_base 5: mod_base = OTHER; note = 2'-O-methyluridine-3'-phosphate
  modified_base 6: mod_base = OTHER; note = 2'-O-docosanyl-uridine-3'-phosphate
  modified_base 7: mod_base = OTHER; note = 2'-deoxy-2'-fluoroguanosine-3'-phosphate
  modified_base 8: mod_base = OTHER; note = 2'-O-methylcytidine-3'-phosphate
  modified_base 9: mod_base = OTHER; note = 2'-deoxy-2'-fluorouridine-3'-phosphate
  modified_base 10: mod_base = OTHER; note = 2'-deoxy-2'-fluorocytidine-3'-phosphate
  modified_base 11: mod_base = OTHER; note = 2'-deoxy-2'-fluoroadenosine-3'-phosphate
  modified_base 12: mod_base = OTHER; note = 2'-O-methyluridine-3'-phosphate
  modified_base 13: mod_base = OTHER; note = 2'-O-methylcytidine-3'-phosphate
  modified_base 14: mod_base = OTHER; note = 2'-O-methylguanosine-3'-phosphate
  modified_base 15: mod_base = OTHER; note = 2'-O-methyladenosine-3'-phosphate
  modified_base 16: mod_base = OTHER; note = 2'-O-methylguanosine-3'-phosphate
  modified_base 17: mod_base = OTHER; note = 2'-O-methyladenosine-3'-phosphate
  modified_base 18: mod_base = OTHER; note = 2'-O-methylcytidine-3'-phosphate
  modified_base 19: mod_base = OTHER; note = 2'-O-methyladenosine-3'-phosphorothioate
  modified_base 20: mod_base = OTHER; note = 2'-O-methyluridine-3'-phosphorothioate
  modified_base 21: mod_base = OTHER; note = 2'-O-methyladenosine
gctattgctcatcgagacata

SEQ ID NO: 10707 - RNA, 21 nt, synthetic construct
  source 1..21: mol_type = other RNA
  modified_base 1: mod_base = OTHER; note = 2'-O-methylcytidine-3'-phosphorothioate
  modified_base 2: mod_base = OTHER; note = 2'-O-methyluridine-3'-phosphorothioate
  modified_base 3: mod_base = OTHER; note = 2'-O-methyladenosine-3'-phosphate
  modified_base 4: mod_base = OTHER; note = 2'-O-methyluridine-3'-phosphate
  modified_base 5: mod_base = OTHER; note = 2'-O-methyluridine-3'-phosphate
  modified_base 6: mod_base = OTHER; note = 2'-O-docosanyl-guanosine-3'-phosphate
  modified_base 7: mod_base = OTHER; note = 2'-deoxy-2'-fluorocytidine-3'-phosphate
  modified_base 8: mod_base = OTHER; note = 2'-O-methyluridine-3'-phosphate
  modified_base 9: mod_base = OTHER; note = 2'-deoxy-2'-fluorocytidine-3'-phosphate
  modified_base 10: mod_base = OTHER; note = 2'-deoxy-2'-fluoroadenosine-3'-phosphate
  modified_base 11: mod_base = OTHER; note = 2'-deoxy-2'-fluorouridine-3'-phosphate
  modified_base 12: mod_base = OTHER; note = 2'-O-methylcytidine-3'-phosphate
  modified_base 13: mod_base = OTHER; note = 2'-O-methylguanosine-3'-phosphate
  modified_base 14: mod_base = OTHER; note = 2'-O-methyladenosine-3'-phosphate
  modified_base 15: mod_base = OTHER; note = 2'-O-methylguanosine-3'-phosphate
  modified_base 16: mod_base = OTHER; note = 2'-O-methyladenosine-3'-phosphate
  modified_base 17: mod_base = OTHER; note = 2'-O-methylcytidine-3'-phosphate
  modified_base 18: mod_base = OTHER; note = 2'-O-methyladenosine-3'-phosphate
  modified_base 19: mod_base = OTHER; note = 2'-O-methyluridine-3'-phosphorothioate
  modified_base 20: mod_base = OTHER; note = 2'-O-methyladenosine-3'-phosphorothioate
  modified_base 21: mod_base = OTHER; note = 2'-O-methyladenosine
ctattgctcatcgagacataa

SEQ ID NO: 10708 - RNA, 21 nt, synthetic construct
  source 1..21: mol_type = other RNA
  modified_base 1: mod_base = OTHER; note = 2'-O-methyluridine-3'-phosphorothioate
  modified_base 2: mod_base = OTHER; note = 2'-O-methyladenosine-3'-phosphorothioate
  modified_base 3: mod_base = OTHER; note = 2'-O-methyluridine-3'-phosphate
  modified_base 4: mod_base = OTHER; note = 2'-O-methyluridine-3'-phosphate
  modified_base 5: mod_base = OTHER; note = 2'-O-methylguanosine-3'-phosphate
  modified_base 6: mod_base = OTHER; note = 2'-O-docosanyl-cytidine-3'-phosphate
  modified_base 7: mod_base = OTHER; note = 2'-deoxy-2'-fluorouridine-3'-phosphate
  modified_base 8: mod_base = OTHER; note = 2'-O-methylcytidine-3'-phosphate
  modified_base 9: mod_base = OTHER; note = 2'-deoxy-2'-fluoroadenosine-3'-phosphate
  modified_base 10: mod_base = OTHER; note = 2'-deoxy-2'-fluorouridine-3'-phosphate
  modified_base 11: mod_base = OTHER; note = 2'-deoxy-2'-fluorocytidine-3'-phosphate
  modified_base 12: mod_base = OTHER; note = 2'-O-methylguanosine-3'-phosphate
  modified_base 13: mod_base = OTHER; note = 2'-O-methyladenosine-3'-phosphate
  modified_base 14: mod_base = OTHER; note = 2'-O-methylguanosine-3'-phosphate
  modified_base 15: mod_base = OTHER; note = 2'-O-methyladenosine-3'-phosphate
  modified_base 16: mod_base = OTHER; note = 2'-O-methylcytidine-3'-phosphate
  modified_base 17: mod_base = OTHER; note = 2'-O-methyladenosine-3'-phosphate
  modified_base 18: mod_base = OTHER; note = 2'-O-methyluridine-3'-phosphate
  modified_base 19: mod_base = OTHER; note = 2'-O-methyladenosine-3'-phosphorothioate
  modified_base 20: mod_base = OTHER; note = 2'-O-methyladenosine-3'-phosphorothioate
  modified_base 21: mod_base = OTHER; note = 2'-O-methyladenosine
tattgctcatcgagacataaa

SEQ ID NO: 10709 - RNA, 21 nt, synthetic construct
  source 1..21: mol_type = other RNA
  modified_base 1: mod_base = OTHER; note = 2'-O-methyluridine-3'-phosphorothioate
  modified_base 2: mod_base = OTHER; note = 2'-O-methyluridine-3'-phosphorothioate
  modified_base 3: mod_base = OTHER; note = 2'-O-methylguanosine-3'-phosphate
  modified_base 4: mod_base = OTHER; note = 2'-O-methylcytidine-3'-phosphate
  modified_base 5: mod_base = OTHER; note = 2'-O-methyluridine-3'-phosphate
  modified_base 6: mod_base = OTHER; note = 2'-O-docosanyl-cytidine-3'-phosphate
  modified_base 7: mod_base = OTHER; note = 2'-deoxy-2'-fluoroadenosine-3'-phosphate
  modified_base 8: mod_base = OTHER; note = 2'-O-methyluridine-3'-phosphate
  modified_base 9: mod_base = OTHER; note = 2'-deoxy-2'-fluorocytidine-3'-phosphate
  modified_base 10: mod_base = OTHER; note = 2'-deoxy-2'-fluoroguanosine-3'-phosphate
  modified_base 11: mod_base = OTHER; note = 2'-deoxy-2'-fluoroadenosine-3'-phosphate
  modified_base 12: mod_base = OTHER; note = 2'-O-methylguanosine-3'-phosphate
  modified_base 13: mod_base = OTHER; note = 2'-O-methyladenosine-3'-phosphate
  modified_base 14: mod_base = OTHER; note = 2'-O-methylcytidine-3'-phosphate
  modified_base 15: mod_base = OTHER; note = 2'-O-methyladenosine-3'-phosphate
  modified_base 16: mod_base = OTHER; note = 2'-O-methyluridine-3'-phosphate
  modified_base 17: mod_base = OTHER; note = 2'-O-methyladenosine-3'-phosphate
  modified_base 18: mod_base = OTHER; note = 2'-O-methyladenosine-3'-phosphate
  modified_base 19: mod_base = OTHER; note = 2'-O-methyladenosine-3'-phosphorothioate
  modified_base 20: mod_base = OTHER; note = 2'-O-methyladenosine-3'-phosphorothioate
  modified_base 21: mod_base = OTHER; note = 2'-O-methyladenosine
ttgctcatcgagacataaaaa

SEQ ID NO: 10710 - RNA, 21 nt, synthetic construct
  source 1..21: mol_type = other RNA
  modified_base 1: mod_base = OTHER; note = 2'-O-methyluridine-3'-phosphorothioate
  modified_base 2: mod_base = OTHER; note = 2'-O-methylguanosine-3'-phosphorothioate
  modified_base 3: mod_base = OTHER; note = 2'-O-methylcytidine-3'-phosphate
  modified_base 4: mod_base = OTHER; note = 2'-O-methyluridine-3'-phosphate
  modified_base 5: mod_base = OTHER; note = 2'-O-methylcytidine-3'-phosphate
  modified_base 6: mod_base = OTHER; note = 2'-O-docosanyl-adenosine-3'-phosphate
  modified_base 7: mod_base = OTHER; note = 2'-deoxy-2'-fluorouridine-3'-phosphate
  modified_base 8: mod_base = OTHER; note = 2'-O-methylcytidine-3'-phosphate
  modified_base 9: mod_base = OTHER; note = 2'-deoxy-2'-fluoroguanosine-3'-phosphate
  modified_base 10: mod_base = OTHER; note = 2'-deoxy-2'-fluoroadenosine-3'-phosphate
  modified_base 11: mod_base = OTHER; note = 2'-deoxy-2'-fluoroguanosine-3'-phosphate
  modified_base 12: mod_base = OTHER; note = 2'-O-methyladenosine-3'-phosphate
  modified_base 13: mod_base = OTHER; note = 2'-O-methylcytidine-3'-phosphate
  modified_base 14: mod_base = OTHER; note = 2'-O-methyladenosine-3'-phosphate
  modified_base 15: mod_base = OTHER; note = 2'-O-methyluridine-3'-phosphate
  modified_base 16: mod_base = OTHER; note = 2'-O-methyladenosine-3'-phosphate
  modified_base 17: mod_base = OTHER; note = 2'-O-methyladenosine-3'-phosphate
  modified_base 18: mod_base = OTHER; note = 2'-O-methyladenosine-3'-phosphate
  modified_base 19: mod_base = OTHER; note = 2'-O-methyladenosine-3'-phosphorothioate
  modified_base 20: mod_base = OTHER; note = 2'-O-methyluridine-3'-phosphorothioate
  modified_base 21: mod_base = OTHER; note = 2'-O-methyladenosine
tgctcatcgagacataaaata

SEQ ID NO: 10711 - RNA, 21 nt, synthetic construct
  source 1..21: mol_type = other RNA
  modified_base 1: mod_base = OTHER; note = 2'-O-methylguanosine-3'-phosphorothioate
  modified_base 2: mod_base = OTHER; note = 2'-O-methylcytidine-3'-phosphorothioate
  modified_base 3: mod_base = OTHER; note = 2'-O-methyluridine-3'-phosphate
  modified_base 4: mod_base = OTHER; note = 2'-O-methylcytidine-3'-phosphate
  modified_base 5: mod_base = OTHER; note = 2'-O-methyladenosine-3'-phosphate
  modified_base 6: mod_base = OTHER; note = 2'-O-docosanyl-uridine-3'-phosphate
  modified_base 7: mod_base = OTHER; note = 2'-deoxy-2'-fluorocytidine-3'-phosphate
  modified_base 8: mod_base = OTHER; note = 2'-O-methylguanosine-3'-phosphate
  modified_base 9: mod_base = OTHER; note = 2'-deoxy-2'-fluoroadenosine-3'-phosphate
  modified_base 10: mod_base = OTHER; note = 2'-deoxy-2'-fluoroguanosine-3'-phosphate
  modified_base 11: mod_base = OTHER; note = 2'-deoxy-2'-fluoroadenosine-3'-phosphate
  modified_base 12: mod_base = OTHER; note = 2'-O-methylcytidine-3'-phosphate
  modified_base 13: mod_base = OTHER; note = 2'-O-methyladenosine-3'-phosphate
  modified_base 14: mod_base = OTHER; note = 2'-O-methyluridine-3'-phosphate
  modified_base 15: mod_base = OTHER; note = 2'-O-methyladenosine-3'-phosphate
  modified_base 16: mod_base = OTHER; note = 2'-O-methyladenosine-3'-phosphate
  modified_base 17: mod_base = OTHER; note = 2'-O-methyladenosine-3'-phosphate
  modified_base 18: mod_base = OTHER; note = 2'-O-methyladenosine-3'-phosphate
  modified_base 19: mod_base = OTHER; note = 2'-O-methyluridine-3'-phosphorothioate
  modified_base 20: mod_base = OTHER; note = 2'-O-methylcytidine-3'-phosphorothioate
  modified_base 21: mod_base = OTHER; note = 2'-O-methyladenosine
gctcatcgagacataaaatca

SEQ ID NO: 10712 - RNA, 21 nt, synthetic construct
  source 1..21: mol_type = other RNA
  modified_base 1: mod_base = OTHER; note = 2'-O-methylcytidine-3'-phosphorothioate
  modified_base 2: mod_base = OTHER; note = 2'-O-methyluridine-3'-phosphorothioate
  modified_base 3: mod_base = OTHER; note = 2'-O-methylcytidine-3'-phosphate
  modified_base 4: mod_base = OTHER; note = 2'-O-methyladenosine-3'-phosphate
  modified_base 5: mod_base = OTHER; note = 2'-O-methyluridine-3'-phosphate
  modified_base 6: mod_base = OTHER; note = 2'-O-docosanyl-cytidine-3'-phosphate
  modified_base 7: mod_base = OTHER; note = 2'-deoxy-2'-fluoroguanosine-3'-phosphate
  modified_base 8: mod_base = OTHER; note = 2'-O-methyladenosine-3'-phosphate
  modified_base 9: mod_base = OTHER; note = 2'-deoxy-2'-fluoroguanosine-3'-phosphate
  modified_base 10: mod_base = OTHER; note = 2'-deoxy-2'-fluoroadenosine-3'-phosphate
  modified_base 11: mod_base = OTHER; note = 2'-deoxy-2'-fluorocytidine-3'-phosphate
  modified_base 12: mod_base = OTHER; note = 2'-O-methyladenosine-3'-phosphate
  modified_base 13: mod_base = OTHER; note = 2'-O-methyluridine-3'-phosphate
  modified_base 14: mod_base = OTHER; note = 2'-O-methyladenosine-3'-phosphate
  modified_base 15: mod_base = OTHER; note = 2'-O-methyladenosine-3'-phosphate
  modified_base 16: mod_base = OTHER; note = 2'-O-methyladenosine-3'-phosphate
  modified_base 17: mod_base = OTHER; note = 2'-O-methyladenosine-3'-phosphate
  modified_base 18: mod_base = OTHER; note = 2'-O-methyluridine-3'-phosphate
  modified_base 19: mod_base = OTHER; note = 2'-O-methylcytidine-3'-phosphorothioate
  modified_base 20: mod_base = OTHER; note = 2'-O-methyladenosine-3'-phosphorothioate
  modified_base 21: mod_base = OTHER; note = 2'-O-methyladenosine
ctcatcgagacataaaatcaa

SEQ ID NO: 10713 - RNA, 21 nt, synthetic construct
  source 1..21: mol_type = other RNA
  modified_base 1: mod_base = OTHER; note = 2'-O-methyluridine-3'-phosphorothioate
  modified_base 2: mod_base = OTHER; note = 2'-O-methylcytidine-3'-phosphorothioate
  modified_base 3: mod_base = OTHER; note = 2'-O-methyladenosine-3'-phosphate
  modified_base 4: mod_base = OTHER; note = 2'-O-methyluridine-3'-phosphate
  modified_base 5: mod_base = OTHER; note = 2'-O-methylcytidine-3'-phosphate
  modified_base 6: mod_base = OTHER; note = 2'-O-docosanyl-guanosine-3'-phosphate
  modified_base 7: mod_base = OTHER; note = 2'-deoxy-2'-fluoroadenosine-3'-phosphate
  modified_base 8: mod_base = OTHER; note = 2'-O-methylguanosine-3'-phosphate
  modified_base 9: mod_base = OTHER; note = 2'-deoxy-2'-fluoroadenosine-3'-phosphate
  modified_base 10: mod_base = OTHER; note = 2'-deoxy-2'-fluorocytidine-3'-phosphate
  modified_base 11: mod_base = OTHER; note = 2'-deoxy-2'-fluoroadenosine-3'-phosphate
  modified_base 12: mod_base = OTHER; note = 2'-O-methyluridine-3'-phosphate
  modified_base 13: mod_base = OTHER; note = 2'-O-methyladenosine-3'-phosphate
  modified_base 14: mod_base = OTHER; note = 2'-O-methyladenosine-3'-phosphate
  modified_base 15: mod_base = OTHER; note = 2'-O-methyladenosine-3'-phosphate
  modified_base 16: mod_base = OTHER; note = 2'-O-methyladenosine-3'-phosphate
  modified_base 17: mod_base = OTHER; note = 2'-O-methyluridine-3'-phosphate
  modified_base 18: mod_base = OTHER; note = 2'-O-methylcytidine-3'-phosphate
  modified_base 19: mod_base = OTHER; note = 2'-O-methyladenosine-3'-phosphorothioate
  modified_base 20: mod_base = OTHER; note = 2'-O-methyladenosine-3'-phosphorothioate
  modified_base 21: mod_base = OTHER; note = 2'-O-methyladenosine
tcatcgagacataaaatcaaa

SEQ ID NO: 10714 - RNA, 21 nt, synthetic construct
  source 1..21: mol_type = other RNA
  modified_base 1: mod_base = OTHER; note = 2'-O-methylcytidine-3'-phosphorothioate
  modified_base 2: mod_base = OTHER; note = 2'-O-methyladenosine-3'-phosphorothioate
  modified_base 3: mod_base = OTHER; note = 2'-O-methyluridine-3'-phosphate
  modified_base 4: mod_base = OTHER; note = 2'-O-methylcytidine-3'-phosphate
  modified_base 5: mod_base = OTHER; note = 2'-O-methylguanosine-3'-phosphate
  modified_base 6: mod_base = OTHER; note = 2'-O-docosanyl-adenosine-3'-phosphate
  modified_base 7: mod_base = OTHER; note = 2'-deoxy-2'-fluoroguanosine-3'-phosphate
  modified_base 8: mod_base = OTHER; note = 2'-O-methyladenosine-3'-phosphate
  modified_base 9: mod_base = OTHER; note = 2'-deoxy-2'-fluorocytidine-3'-phosphate
  modified_base 10: mod_base = OTHER; note = 2'-deoxy-2'-fluoroadenosine-3'-phosphate
  modified_base 11: mod_base = OTHER; note = 2'-deoxy-2'-fluorouridine-3'-phosphate
  modified_base 12: mod_base = OTHER; note = 2'-O-methyladenosine-3'-phosphate
  modified_base 13: mod_base = OTHER; note = 2'-O-methyladenosine-3'-phosphate
  modified_base 14: mod_base = OTHER; note = 2'-O-methyladenosine-3'-phosphate
  modified_base 15: mod_base = OTHER; note = 2'-O-methyladenosine-3'-phosphate
  modified_base 16: mod_base = OTHER; note = 2'-O-methyluridine-3'-phosphate
  modified_base 17: mod_base = OTHER; note = 2'-O-methylcytidine-3'-phosphate
  modified_base 18: mod_base = OTHER; note = 2'-O-methyladenosine-3'-phosphate
  modified_base 19: mod_base = OTHER; note = 2'-O-methyladenosine-3'-phosphorothioate
  modified_base 20: mod_base = OTHER; note = 2'-O-methyladenosine-3'-phosphorothioate
  modified_base 21: mod_base = OTHER; note = 2'-O-methyladenosine
catcgagacataaaatcaaaa

SEQ ID NO: 10715 - RNA, 21 nt, synthetic construct
  source 1..21: mol_type = other RNA
  modified_base 1: mod_base = OTHER; note = 2'-O-methyladenosine-3'-phosphorothioate
  modified_base 2: mod_base = OTHER; note = 2'-O-methyluridine-3'-phosphorothioate
  modified_base 3: mod_base = OTHER; note = 2'-O-methylcytidine-3'-phosphate
  modified_base 4: mod_base = OTHER; note = 2'-O-methylguanosine-3'-phosphate
  modified_base 5: mod_base = OTHER; note = 2'-O-methyladenosine-3'-phosphate
  modified_base 6: mod_base = OTHER; note = 2'-O-docosanyl-guanosine-3'-phosphate
  modified_base 7: mod_base = OTHER; note = 2'-deoxy-2'-fluoroadenosine-3'-phosphate
  modified_base 8: mod_base = OTHER; note = 2'-O-methylcytidine-3'-phosphate
  modified_base 9: mod_base = OTHER; note = 2'-deoxy-2'-fluoroadenosine-3'-phosphate
  modified_base 10: mod_base = OTHER; note = 2'-deoxy-2'-fluorouridine-3'-phosphate
  modified_base 11: mod_base = OTHER; note = 2'-deoxy-2'-fluoroadenosine-3'-phosphate
  modified_base 12: mod_base = OTHER; note = 2'-O-methyladenosine-3'-phosphate
  modified_base 13: mod_base = OTHER; note = 2'-O-methyladenosine-3'-phosphate
  modified_base 14: mod_base = OTHER; note = 2'-O-methyladenosine-3'-phosphate
  modified_base 15: mod_base = OTHER; note = 2'-O-methyluridine-3'-phosphate
  modified_base 16: mod_base = OTHER; note = 2'-O-methylcytidine-3'-phosphate
  modified_base 17: mod_base = OTHER; note = 2'-O-methyladenosine-3'-phosphate
  modified_base 18: mod_base = OTHER; note = 2'-O-methyladenosine-3'-phosphate
  modified_base 19: mod_base = OTHER; note = 2'-O-methyladenosine-3'-phosphorothioate
  modified_base 20: mod_base = OTHER; note = 2'-O-methylguanosine-3'-phosphorothioate
  modified_base 21: mod_base = OTHER; note = 2'-O-methyladenosine
atcgagacataaaatcaaaga

SEQ ID NO: 10716 - RNA, 21 nt, synthetic construct
  source 1..21: mol_type = other RNA
  modified_base 1: mod_base = OTHER; note = 2'-O-methyluridine-3'-phosphorothioate
  modified_base 2: mod_base = OTHER; note = 2'-O-methylcytidine-3'-phosphorothioate
  modified_base 3: mod_base = OTHER; note = 2'-O-methylguanosine-3'-phosphate
  modified_base 4: mod_base = OTHER; note = 2'-O-methyladenosine-3'-phosphate
  modified_base 5: mod_base = OTHER; note = 2'-O-methylguanosine-3'-phosphate
  modified_base 6: mod_base = OTHER; note = 2'-O-docosanyl-adenosine-3'-phosphate
  modified_base 7: mod_base = OTHER; note = 2'-deoxy-2'-fluorocytidine-3'-phosphate
  modified_base 8: mod_base = OTHER; note = 2'-O-methyladenosine-3'-phosphate
  modified_base 9: mod_base = OTHER; note = 2'-deoxy-2'-fluorouridine-3'-phosphate
  modified_base 10: mod_base = OTHER; note = 2'-deoxy-2'-fluoroadenosine-3'-phosphate
  modified_base 11: mod_base = OTHER; note = 2'-deoxy-2'-fluoroadenosine-3'-phosphate
  modified_base 12: mod_base = OTHER; note = 2'-O-methyladenosine-3'-phosphate
  modified_base 13: mod_base = OTHER; note = 2'-O-methyladenosine-3'-phosphate
  modified_base 14: mod_base = OTHER; note = 2'-O-methyluridine-3'-phosphate
  modified_base 15: mod_base = OTHER; note = 2'-O-methylcytidine-3'-phosphate
  modified_base 16: mod_base = OTHER; note = 2'-O-methyladenosine-3'-phosphate
  modified_base 17: mod_base = OTHER; note = 2'-O-methyladenosine-3'-phosphate
  modified_base 18: mod_base = OTHER; note = 2'-O-methyladenosine-3'-phosphate
  modified_base 19: mod_base = OTHER; note = 2'-O-methylguanosine-3'-phosphorothioate
  modified_base 20: mod_base = OTHER; note = 2'-O-methyladenosine-3'-phosphorothioate
  modified_base 21: mod_base = OTHER; note = 2'-O-methyladenosine
tcgagacataaaatcaaagaa

SEQ ID NO: 10717 - RNA, 21 nt, synthetic construct
  source 1..21: mol_type = other RNA
  modified_base 1: mod_base = OTHER; note = 2'-O-methylcytidine-3'-phosphorothioate
  modified_base 2: mod_base = OTHER; note = 2'-O-methylguanosine-3'-phosphorothioate
  modified_base 3: mod_base = OTHER; note = 2'-O-methyladenosine-3'-phosphate
  modified_base 4: mod_base = OTHER; note = 2'-O-methylguanosine-3'-phosphate
  modified_base 5: mod_base = OTHER; note = 2'-O-methyladenosine-3'-phosphate
  modified_base 6: mod_base = OTHER; note = 2'-O-docosanyl-cytidine-3'-phosphate
  modified_base 7: mod_base = OTHER; note = 2'-deoxy-2'-fluoroadenosine-3'-phosphate
  modified_base 8: mod_base = OTHER; note = 2'-O-methyluridine-3'-phosphate
  modified_base 9: mod_base = OTHER; note = 2'-deoxy-2'-fluoroadenosine-3'-phosphate
  modified_base 10: mod_base = OTHER; note = 2'-deoxy-2'-fluoroadenosine-3'-phosphate
  modified_base 11: mod_base = OTHER; note = 2'-deoxy-2'-fluoroadenosine-3'-phosphate
  modified_base 12: mod_base = OTHER; note = 2'-O-methyladenosine-3'-phosphate
  modified_base 13: mod_base = OTHER; note = 2'-O-methyluridine-3'-phosphate
  modified_base 14: mod_base = OTHER; note = 2'-O-methylcytidine-3'-phosphate
  modified_base 15: mod_base = OTHER; note = 2'-O-methyladenosine-3'-phosphate
  modified_base 16: mod_base = OTHER; note = 2'-O-methyladenosine-3'-phosphate
  modified_base 17: mod_base = OTHER; note = 2'-O-methyladenosine-3'-phosphate
  modified_base 18: mod_base = OTHER; note = 2'-O-methylguanosine-3'-phosphate
  modified_base 19: mod_base = OTHER; note = 2'-O-methyladenosine-3'-phosphorothioate
  modified_base 20: mod_base = OTHER; note = 2'-O-methyladenosine-3'-phosphorothioate
  modified_base 21: mod_base = OTHER; note = 2'-O-methyladenosine
cgagacataaaatcaaagaaa

SEQ ID NO: 10718 - RNA, 21 nt, synthetic construct
  source 1..21: mol_type = other RNA
  modified_base 1: mod_base = OTHER; note = 2'-O-methylguanosine-3'-phosphorothioate
  modified_base 2: mod_base = OTHER; note = 2'-O-methyladenosine-3'-phosphorothioate
  modified_base 3: mod_base = OTHER; note = 2'-O-methylguanosine-3'-phosphate
  modified_base 4: mod_base = OTHER; note = 2'-O-methyladenosine-3'-phosphate
  modified_base 5: mod_base = OTHER; note = 2'-O-methylcytidine-3'-phosphate
  modified_base 6: mod_base = OTHER; note = 2'-O-docosanyl-adenosine-3'-phosphate
  modified_base 7: mod_base = OTHER; note = 2'-deoxy-2'-fluorouridine-3'-phosphate
  modified_base 8: mod_base = OTHER; note = 2'-O-methyladenosine-3'-phosphate
  modified_base 9: mod_base = OTHER; note = 2'-deoxy-2'-fluoroadenosine-3'-phosphate
  modified_base 10: mod_base = OTHER; note = 2'-deoxy-2'-fluoroadenosine-3'-phosphate
  modified_base 11: mod_base = OTHER; note = 2'-deoxy-2'-fluoroadenosine-3'-phosphate
  modified_base 12: mod_base = OTHER; note = 2'-O-methyluridine-3'-phosphate
  modified_base 13: mod_base = OTHER; note = 2'-O-methylcytidine-3'-phosphate
  modified_base 14: mod_base = OTHER; note = 2'-O-methyladenosine-3'-phosphate
  modified_base 15: mod_base = OTHER; note = 2'-O-methyladenosine-3'-phosphate
  modified_base 16: mod_base = OTHER; note = 2'-O-methyladenosine-3'-phosphate
  modified_base 17: mod_base = OTHER; note = 2'-O-methylguanosine-3'-phosphate
  modified_base 18: mod_base = OTHER; note = 2'-O-methyladenosine-3'-phosphate
  modified_base 19: mod_base = OTHER; note = 2'-O-methyladenosine-3'-phosphorothioate
  modified_base 20: mod_base = OTHER; note = 2'-O-methyluridine-3'-phosphorothioate
  modified_base 21: mod_base = OTHER; note = 2'-O-methyladenosine
gagacataaaatcaaagaata

SEQ ID NO: 10719 - RNA, 21 nt, synthetic construct
  source 1..21: mol_type = other RNA
  modified_base 1: mod_base = OTHER; note = 2'-O-methyladenosine-3'-phosphorothioate
  modified_base 2: mod_base = OTHER; note = 2'-O-methylguanosine-3'-phosphorothioate
  modified_base 3: mod_base = OTHER; note = 2'-O-methyladenosine-3'-phosphate
  modified_base 4: mod_base = OTHER; note = 2'-O-methylcytidine-3'-phosphate
  modified_base 5: mod_base = OTHER; note = 2'-O-methyladenosine-3'-phosphate
  modified_base 6: mod_base = OTHER; note = 2'-O-docosanyl-uridine-3'-phosphate
  modified_base 7: mod_base = OTHER; note = 2'-deoxy-2'-fluoroadenosine-3'-phosphate
  modified_base 8: mod_base = OTHER; note = 2'-O-methyladenosine-3'-phosphate
  modified_base 9: mod_base = OTHER; note = 2'-deoxy-2'-fluoroadenosine-3'-phosphate
  modified_base 10: mod_base = OTHER; note = 2'-deoxy-2'-fluoroadenosine-3'-phosphate
  modified_base 11: mod_base = OTHER; note = 2'-deoxy-2'-fluorouridine-3'-phosphate
  modified_base 12: mod_base = OTHER; note = 2'-O-methylcytidine-3'-phosphate
  modified_base 13: mod_base = OTHER; note = 2'-O-methyladenosine-3'-phosphate
  modified_base 14: mod_base = OTHER; note = 2'-O-methyladenosine-3'-phosphate
  modified_base 15: mod_base = OTHER; note = 2'-O-methyladenosine-3'-phosphate
  modified_base 16: mod_base = OTHER; note = 2'-O-methylguanosine-3'-phosphate
  modified_base 17: mod_base = OTHER; note = 2'-O-methyladenosine-3'-phosphate
  modified_base 18: mod_base = OTHER; note = 2'-O-methyladenosine-3'-phosphate
  modified_base 19: mod_base = OTHER; note = 2'-O-methyluridine-3'-phosphorothioate
  modified_base 20: mod_base = OTHER; note = 2'-O-methyladenosine-3'-phosphorothioate
  modified_base 21: mod_base = OTHER; note = 2'-O-methyladenosine
agacataaaatcaaagaataa

SEQ ID NO: 10720 - RNA, 21 nt, synthetic construct
  source 1..21: mol_type = other RNA
  modified_base 1: mod_base = OTHER; note = 2'-O-methyladenosine-3'-phosphorothioate
  modified_base 2: mod_base = OTHER; note = 2'-O-methylguanosine-3'-phosphorothioate
  modified_base 3: mod_base = OTHER; note = 2'-O-methyluridine-3'-phosphate
  modified_base 4: mod_base = OTHER; note = 2'-O-methylguanosine-3'-phosphate
  modified_base 5: mod_base = OTHER; note = 2'-O-methyluridine-3'-phosphate
  modified_base 6: mod_base = OTHER; note = 2'-O-docosanyl-guanosine-3'-phosphate
  modified_base 7: mod_base = OTHER; note = 2'-deoxy-2'-fluoroadenosine-3'-phosphate
  modified_base 8: mod_base = OTHER; note = 2'-O-methyladenosine-3'-phosphate
  modified_base 9: mod_base = OTHER; note = 2'-deoxy-2'-fluoroadenosine-3'-phosphate
  modified_base 10: mod_base = OTHER; note = 2'-deoxy-2'-fluorocytidine-3'-phosphate
  modified_base 11: mod_base = OTHER; note = 2'-deoxy-2'-fluorouridine-3'-phosphate
  modified_base 12: mod_base = OTHER; note = 2'-O-methyluridine-3'-phosphate
  modified_base 13: mod_base = OTHER; note = 2'-O-methylguanosine-3'-phosphate
  modified_base 14: mod_base = OTHER; note = 2'-O-methyluridine-3'-phosphate
  modified_base 15: mod_base = OTHER; note = 2'-O-methylguanosine-3'-phosphate
  modified_base 16: mod_base = OTHER; note = 2'-O-methylcytidine-3'-phosphate
  modified_base 17: mod_base = OTHER; note = 2'-O-methylcytidine-3'-phosphate
  modified_base 18: mod_base = OTHER; note = 2'-O-methyladenosine-3'-phosphate
  modified_base 19: mod_base = OTHER; note = 2'-O-methyluridine-3'-phosphorothioate
  modified_base 20: mod_base = OTHER; note = 2'-O-methyladenosine-3'-phosphorothioate
  modified_base 21: mod_base = OTHER; note = 2'-O-methyladenosine
agtgtgaaacttgtgccataa

SEQ ID NO: 10721 - RNA, 21 nt, synthetic construct
  source 1..21: mol_type = other RNA
  modified_base 1: mod_base = OTHER; note = 2'-O-methyladenosine-3'-phosphorothioate
  modified_base 2: mod_base = OTHER; note = 2'-O-methyladenosine-3'-phosphorothioate
  modified_base 3: mod_base = OTHER; note = 2'-O-methyluridine-3'-phosphate
  modified_base 4: mod_base = OTHER; note = 2'-O-methyladenosine-3'-phosphate
  modified_base 5: mod_base = OTHER; note = 2'-O-methyluridine-3'-phosphate
  modified_base 6: mod_base = OTHER; note = 2'-O-docosanyl-cytidine-3'-phosphate
  modified_base 7: mod_base = OTHER; note = 2'-deoxy-2'-fluorouridine-3'-phosphate
  modified_base 8: mod_base = OTHER; note = 2'-O-methyluridine-3'-phosphate
  modified_base 9: mod_base = OTHER; note = 2'-deoxy-2'-fluoroadenosine-3'-phosphate
  modified_base 10: mod_base = OTHER; note = 2'-deoxy-2'-fluoroguanosine-3'-phosphate
  modified_base 11: mod_base = OTHER; note = 2'-deoxy-2'-fluorouridine-3'-phosphate
  modified_base 12: mod_base = OTHER; note = 2'-O-methylguanosine-3'-phosphate
  modified_base 13: mod_base = OTHER; note = 2'-O-methyladenosine-3'-phosphate
  modified_base 14: mod_base = OTHER; note = 2'-O-methyladenosine-3'-phosphate
  modified_base 15: mod_base = OTHER; note = 2'-O-methyladenosine-3'-phosphate
  modified_base 16: mod_base = OTHER; note = 2'-O-methyladenosine-3'-phosphate
  modified_base 17: mod_base = OTHER; note = 2'-O-methyladenosine-3'-phosphate
  modified_base 18: mod_base = OTHER; note = 2'-O-methylguanosine-3'-phosphate
  modified_base 19: mod_base = OTHER; note = 2'-O-methyluridine-3'-phosphorothioate
  modified_base 20: mod_base = OTHER; note = 2'-O-methylguanosine-3'-phosphorothioate
  modified_base 21: mod_base = OTHER; note = 2'-O-methyladenosine
aatatcttagtgaaaaagtga

SEQ ID NO: 10722 - RNA, 21 nt, synthetic construct
  source 1..21: mol_type = other RNA
  modified_base 1: mod_base = OTHER; note = 2'-O-methyladenosine-3'-phosphorothioate
  modified_base 2: mod_base = OTHER; note = 2'-O-methyluridine-3'-phosphorothioate
  modified_base 3: mod_base = OTHER; note = 2'-O-methyladenosine-3'-phosphate
  modified_base 4: mod_base = OTHER; note = 2'-O-methyluridine-3'-phosphate
  modified_base 5: mod_base = OTHER; note = 2'-O-methylcytidine-3'-phosphate
  modified_base 6: mod_base = OTHER; note = 2'-O-docosanyl-uridine-3'-phosphate
  modified_base 7: mod_base = OTHER; note = 2'-deoxy-2'-fluorouridine-3'-phosphate
  modified_base 8: mod_base = OTHER; note = 2'-O-methyladenosine-3'-phosphate
  modified_base 9: mod_base = OTHER; note = 2'-deoxy-2'-fluoroguanosine-3'-phosphate
  modified_base 10: mod_base = OTHER; note = 2'-deoxy-2'-fluorouridine-3'-phosphate
  modified_base 11: mod_base = OTHER; note = 2'-deoxy-2'-fluoroguanosine-3'-phosphate
  modified_base 12: mod_base = OTHER; note = 2'-O-methyladenosine-3'-phosphate
  modified_base 13: mod_base = OTHER; note = 2'-O-methyladenosine-3'-phosphate
  modified_base 14: mod_base = OTHER; note = 2'-O-methyladenosine-3'-phosphate
  modified_base 15: mod_base = OTHER; note = 2'-O-methyladenosine-3'-phosphate
  modified_base 16: mod_base = OTHER; note = 2'-O-methyladenosine-3'-phosphate
  modified_base 17: mod_base = OTHER; note = 2'-O-methylguanosine-3'-phosphate
  modified_base 18: mod_base = OTHER; note = 2'-O-methyluridine-3'-phosphate
  modified_base 19: mod_base = OTHER; note = 2'-O-methylguanosine-3'-phosphorothioate
  modified_base 20: mod_base = OTHER; note = 2'-O-methyluridine-3'-phosphorothioate
  modified_base 21: mod_base = OTHER; note = 2'-O-methyladenosine
atatcttagtgaaaaagtgta

SEQ ID NO: 10723 - RNA, 21 nt, synthetic construct
  source 1..21: mol_type = other RNA
  modified_base 1: mod_base = OTHER; note = 2'-O-methyluridine-3'-phosphorothioate
  modified_base 2: mod_base = OTHER; note = 2'-O-methyladenosine-3'-phosphorothioate
  modified_base 3: mod_base = OTHER; note = 2'-O-methyluridine-3'-phosphate
  modified_base 4: mod_base = OTHER; note = 2'-O-methylcytidine-3'-phosphate
  modified_base 5: mod_base = OTHER; note = 2'-O-methyluridine-3'-phosphate
  modified_base 6: mod_base = OTHER; note = 2'-O-docosanyl-uridine-3'-phosphate
  modified_base 7: mod_base = OTHER; note = 2'-deoxy-2'-fluoroadenosine-3'-phosphate
  modified_base 8: mod_base = OTHER; note = 2'-O-methylguanosine-3'-phosphate
  modified_base 9: mod_base = OTHER; note = 2'-deoxy-2'-fluorouridine-3'-phosphate
  modified_base 10: mod_base = OTHER; note = 2'-deoxy-2'-fluoroguanosine-3'-phosphate
  modified_base 11: mod_base = OTHER; note = 2'-deoxy-2'-fluoroadenosine-3'-phosphate
  modified_base 12: mod_base = OTHER; note = 2'-O-methyladenosine-3'-phosphate
  modified_base 13: mod_base = OTHER; note = 2'-O-methyladenosine-3'-phosphate
  modified_base 14: mod_base = OTHER; note = 2'-O-methyladenosine-3'-phosphate
  modified_base 15: mod_base = OTHER; note = 2'-O-methyladenosine-3'-phosphate
  modified_base 16: mod_base = OTHER; note = 2'-O-methylguanosine-3'-phosphate
  modified_base 17: mod_base = OTHER; note = 2'-O-methyluridine-3'-phosphate
  modified_base 18: mod_base = OTHER; note = 2'-O-methylguanosine-3'-phosphate
  modified_base 19: mod_base = OTHER; note = 2'-O-methyluridine-3'-phosphorothioate
  modified_base 20: mod_base = OTHER; note = 2'-O-methylguanosine-3'-phosphorothioate
  modified_base 21: mod_base = OTHER; note = 2'-O-methyladenosine
tatcttagtgaaaaagtgtga

SEQ ID NO: 10724 - RNA, 21 nt, synthetic construct
  source 1..21: mol_type = other RNA
  modified_base 1: mod_base = OTHER; note = 2'-O-methyladenosine-3'-phosphorothioate
  modified_base 2: mod_base = OTHER; note = 2'-O-methyluridine-3'-phosphorothioate
  modified_base 3: mod_base = OTHER; note = 2'-O-methylcytidine-3'-phosphate
  modified_base 4: mod_base = OTHER; note = 2'-O-methyluridine-3'-phosphate
  modified_base 5: mod_base = OTHER; note = 2'-O-methyluridine-3'-phosphate
  modified_base 6: mod_base = OTHER; note = 2'-O-docosanyl-adenosine-3'-phosphate
  modified_base 7: mod_base = OTHER; note = 2'-deoxy-2'-fluoroguanosine-3'-phosphate
  modified_base 8: mod_base = OTHER; note = 2'-O-methyluridine-3'-phosphate
  modified_base 9: mod_base = OTHER; note = 2'-deoxy-2'-fluoroguanosine-3'-phosphate
  modified_base 10: mod_base = OTHER; note = 2'-deoxy-2'-fluoroadenosine-3'-phosphate
  modified_base 11: mod_base = OTHER; note = 2'-deoxy-2'-fluoroadenosine-3'-phosphate
  modified_base 12: mod_base = OTHER; note = 2'-O-methyladenosine-3'-phosphate
  modified_base 13: mod_base = OTHER; note = 2'-O-methyladenosine-3'-phosphate
  modified_base 14: mod_base = OTHER; note = 2'-O-methyladenosine-3'-phosphate
  modified_base 15: mod_base = OTHER; note = 2'-O-methylguanosine-3'-phosphate
  modified_base 16: mod_base = OTHER; note = 2'-O-methyluridine-3'-phosphate
  modified_base 17: mod_base = OTHER; note = 2'-O-methylguanosine-3'-phosphate
  modified_base 18: mod_base = OTHER; note = 2'-O-methyluridine-3'-phosphate
  modified_base 19: mod_base = OTHER; note = 2'-O-methylguanosine-3'-phosphorothioate
  modified_base 20: mod_base = OTHER; note = 2'-O-methyladenosine-3'-phosphorothioate
  modified_base 21: mod_base = OTHER; note = 2'-O-methyladenosine
atcttagtgaaaaagtgtgaa

SEQ ID NO: 10725 - RNA, 21 nt, synthetic construct
  source 1..21: mol_type = other RNA
  modified_base 1: mod_base = OTHER; note = 2'-O-methyluridine-3'-phosphorothioate
  modified_base 2: mod_base = OTHER; note = 2'-O-methylcytidine-3'-phosphorothioate
  modified_base 3: mod_base = OTHER; note = 2'-O-methyluridine-3'-phosphate
  modified_base 4: mod_base = OTHER; note = 2'-O-methyluridine-3'-phosphate
  modified_base 5: mod_base = OTHER; note = 2'-O-methyladenosine-3'-phosphate
  modified_base 6: mod_base = OTHER; note = 2'-O-docosanyl-guanosine-3'-phosphate
  modified_base 7: mod_base = OTHER; note = 2'-deoxy-2'-fluorouridine-3'-phosphate
  modified_base 8: mod_base = OTHER; note = 2'-O-methylguanosine-3'-phosphate
  modified_base 9: mod_base = OTHER; note = 2'-deoxy-2'-fluoroadenosine-3'-phosphate
  modified_base 10: mod_base = OTHER; note = 2'-deoxy-2'-fluoroadenosine-3'-phosphate
  modified_base 11: mod_base = OTHER; note = 2'-deoxy-2'-fluoroadenosine-3'-phosphate
  modified_base 12: mod_base = OTHER; note = 2'-O-methyladenosine-3'-phosphate
  modified_base 13: mod_base = OTHER; note = 2'-O-methyladenosine-3'-phosphate
  modified_base 14: mod_base = OTHER; note = 2'-O-methylguanosine-3'-phosphate
  modified_base 15: mod_base = OTHER; note = 2'-O-methyluridine-3'-phosphate
  modified_base 16: mod_base = OTHER; note = 2'-O-methylguanosine-3'-phosphate
  modified_base 17: mod_base = OTHER; note = 2'-O-methyluridine-3'-phosphate
  modified_base 18: mod_base = OTHER; note = 2'-O-methylguanosine-3'-phosphate
  modified_base 19: mod_base = OTHER; note = 2'-O-methyladenosine-3'-phosphorothioate
  modified_base 20: mod_base = OTHER; note = 2'-O-methyladenosine-3'-phosphorothioate
  modified_base 21: mod_base = OTHER; note = 2'-O-methyladenosine
tcttagtgaaaaagtgtgaaa

SEQ ID NO: 10726 - RNA, 21 nt, synthetic construct
  source 1..21: mol_type = other RNA
  modified_base 1: mod_base = OTHER; note = 2'-O-methylcytidine-3'-phosphorothioate
  modified_base 2: mod_base = OTHER; note = 2'-O-methyluridine-3'-phosphorothioate
  modified_base 3: mod_base = OTHER; note = 2'-O-methyluridine-3'-phosphate
  modified_base 4: mod_base = OTHER; note = 2'-O-methyladenosine-3'-phosphate
  modified_base 5: mod_base = OTHER; note = 2'-O-methylguanosine-3'-phosphate
  modified_base 6: mod_base = OTHER; note = 2'-O-docosanyl-uridine-3'-phosphate
  modified_base 7: mod_base = OTHER; note = 2'-deoxy-2'-fluoroguanosine-3'-phosphate
  modified_base 8: mod_base = OTHER; note = 2'-O-methyladenosine-3'-phosphate
  modified_base 9: mod_base = OTHER; note = 2'-deoxy-2'-fluoroadenosine-3'-phosphate
  modified_base 10: mod_base = OTHER; note = 2'-deoxy-2'-fluoroadenosine-3'-phosphate
  modified_base 11: mod_base = OTHER; note = 2'-deoxy-2'-fluoroadenosine-3'-phosphate
  modified_base 12: mod_base = OTHER; note = 2'-O-methyladenosine-3'-phosphate
  modified_base 13: mod_base = OTHER; note = 2'-O-methylguanosine-3'-phosphate
  modified_base 14: mod_base = OTHER; note = 2'-O-methyluridine-3'-phosphate
  modified_base 15: mod_base = OTHER; note = 2'-O-methylguanosine-3'-phosphate
  modified_base 16: mod_base = OTHER; note = 2'-O-methyluridine-3'-phosphate
  modified_base 17: mod_base = OTHER; note = 2'-O-methylguanosine-3'-phosphate
  modified_base 18: mod_base = OTHER; note = 2'-O-methyladenosine-3'-phosphate
  modified_base 19: mod_base = OTHER; note = 2'-O-methyladenosine-3'-phosphorothioate
  modified_base 20: mod_base = OTHER; note = 2'-O-methyladenosine-3'-phosphorothioate
  modified_base 21: mod_base = OTHER; note = 2'-O-methyladenosine
cttagtgaaaaagtgtgaaaa

SEQ ID NO: 10727 - RNA, 21 nt, synthetic construct
  source 1..21: mol_type = other RNA
  modified_base 1: mod_base = OTHER; note = 2'-O-methyluridine-3'-phosphorothioate
  modified_base 2: mod_base = OTHER; note = 2'-O-methyluridine-3'-phosphorothioate
  modified_base 3: mod_base = OTHER; note = 2'-O-methyladenosine-3'-phosphate
  modified_base 4: mod_base = OTHER; note = 2'-O-methylguanosine-3'-phosphate
  modified_base 5: mod_base = OTHER; note = 2'-O-methyluridine-3'-phosphate
  modified_base 6: mod_base = OTHER; note = 2'-O-docosanyl-guanosine-3'-phosphate
  modified_base 7: mod_base = OTHER; note = 2'-deoxy-2'-fluoroadenosine-3'-phosphate
  modified_base 8: mod_base = OTHER; note = 2'-O-methyladenosine-3'-phosphate
  modified_base 9: mod_base = OTHER; note = 2'-deoxy-2'-fluoroadenosine-3'-phosphate
  modified_base 10: mod_base = OTHER; note = 2'-deoxy-2'-fluoroadenosine-3'-phosphate
  modified_base 11: mod_base = OTHER; note = 2'-deoxy-2'-fluoroadenosine-3'-phosphate
  modified_base 12: mod_base = OTHER; note = 2'-O-methylguanosine-3'-phosphate
  modified_base 13: mod_base = OTHER; note = 2'-O-methyluridine-3'-phosphate
  modified_base 14: mod_base = OTHER; note = 2'-O-methylguanosine-3'-phosphate
  modified_base 15: mod_base = OTHER; note = 2'-O-methyluridine-3'-phosphate
  modified_base 16: mod_base = OTHER; note = 2'-O-methylguanosine-3'-phosphate
  modified_base 17: mod_base = OTHER; note = 2'-O-methyladenosine-3'-phosphate
  modified_base 18: mod_base = OTHER; note = 2'-O-methyladenosine-3'-phosphate
  modified_base 19: mod_base = OTHER; note = 2'-O-methyladenosine-3'-phosphorothioate
  modified_base 20: mod_base = OTHER; note = 2'-O-methylcytidine-3'-phosphorothioate
  modified_base 21: mod_base = OTHER; note = 2'-O-methyladenosine
ttagtgaaaaagtgtgaaaca

SEQ ID NO: 10728 - RNA, 21 nt, synthetic construct
  source 1..21: mol_type = other RNA
  modified_base 1: mod_base = OTHER; note = 2'-O-methyluridine-3'-phosphorothioate
  modified_base 2: mod_base = OTHER; note = 2'-O-methyladenosine-3'-phosphorothioate
  modified_base 3: mod_base = OTHER; note = 2'-O-methylguanosine-3'-phosphate
  modified_base 4: mod_base = OTHER; note = 2'-O-methyluridine-3'-phosphate
  modified_base 5: mod_base = OTHER; note = 2'-O-methylguanosine-3'-phosphate
  modified_base 6: mod_base = OTHER; note = 2'-O-docosanyl-adenosine-3'-phosphate
  modified_base 7: mod_base = OTHER; note = 2'-deoxy-2'-fluoroadenosine-3'-phosphate
  modified_base 8: mod_base = OTHER; note = 2'-O-methyladenosine-3'-phosphate
  modified_base 9: mod_base = OTHER; note = 2'-deoxy-2'-fluoroadenosine-3'-phosphate
  modified_base 10: mod_base = OTHER; note = 2'-deoxy-2'-fluoroadenosine-3'-phosphate
  modified_base 11: mod_base = OTHER; note = 2'-deoxy-2'-fluoroguanosine-3'-phosphate
  modified_base 12: mod_base = OTHER; note = 2'-O-methyluridine-3'-phosphate
  modified_base 13: mod_base = OTHER; note = 2'-O-methylguanosine-3'-phosphate
  modified_base 14: mod_base = OTHER; note = 2'-O-methyluridine-3'-phosphate
  modified_base 15: mod_base = OTHER; note = 2'-O-methylguanosine-3'-phosphate
  modified_base 16: mod_base = OTHER; note = 2'-O-methyladenosine-3'-phosphate
  modified_base 17: mod_base = OTHER; note = 2'-O-methyladenosine-3'-phosphate
  modified_base 18: mod_base = OTHER; note = 2'-O-methyladenosine-3'-phosphate
  modified_base 19: mod_base = OTHER; note = 2'-O-methylcytidine-3'-phosphorothioate
  modified_base 20: mod_base = OTHER; note = 2'-O-methyluridine-3'-phosphorothioate
  modified_base 21: mod_base = OTHER; note = 2'-O-methyladenosine
tagtgaaaaagtgtgaaacta

SEQ ID NO: 10729 - RNA, 21 nt, synthetic construct
  source 1..21: mol_type = other RNA
  modified_base 1: mod_base = OTHER; note = 2'-O-methyladenosine-3'-phosphorothioate
  modified_base 2: mod_base = OTHER; note = 2'-O-methylguanosine-3'-phosphorothioate
  modified_base 3: mod_base = OTHER; note = 2'-O-methyluridine-3'-phosphate
  modified_base 4: mod_base = OTHER; note = 2'-O-methylguanosine-3'-phosphate
  modified_base 5: mod_base = OTHER; note = 2'-O-methyladenosine-3'-phosphate
  modified_base 6: mod_base = OTHER; note = 2'-O-docosanyl-adenosine-3'-phosphate
  modified_base 7: mod_base = OTHER; note = 2'-deoxy-2'-fluoroadenosine-3'-phosphate
  modified_base 8: mod_base = OTHER; note = 2'-O-methyladenosine-3'-phosphate
  modified_base 9: mod_base = OTHER; note = 2'-deoxy-2'-fluoroadenosine-3'-phosphate
  modified_base 10: mod_base = OTHER; note = 2'-deoxy-2'-fluoroguanosine-3'-phosphate
  modified_base 11: mod_base = OTHER; note = 2'-deoxy-2'-fluorouridine-3'-phosphate
  modified_base 12: mod_base = OTHER; note = 2'-O-methylguanosine-3'-phosphate
  modified_base 13: mod_base = OTHER; note = 2'-O-methyluridine-3'-phosphate
  modified_base 14: mod_base = OTHER; note = 2'-O-methylguanosine-3'-phosphate
  modified_base 15: mod_base = OTHER; note = 2'-O-methyladenosine-3'-phosphate
  modified_base 16: mod_base = OTHER; note = 2'-O-methyladenosine-3'-phosphate
  modified_base 17: mod_base = OTHER; note = 2'-O-methyladenosine-3'-phosphate
  modified_base 18: mod_base = OTHER; note = 2'-O-methylcytidine-3'-phosphate
  modified_base 19: mod_base = OTHER; note = 2'-O-methyluridine-3'-phosphorothioate
  modified_base 20: mod_base = OTHER; note = 2'-O-methyluridine-3'-phosphorothioate
  modified_base 21: mod_base = OTHER; note = 2'-O-methyladenosine
agtgaaaaagtgtgaaactta

SEQ ID NO: 10730 - RNA, 21 nt, synthetic construct
  source 1..21: mol_type = other RNA
  modified_base 1: mod_base = OTHER; note = 2'-O-methylguanosine-3'-phosphorothioate
  modified_base 2: mod_base = OTHER; note = 2'-O-methyluridine-3'-phosphorothioate
  modified_base 3: mod_base = OTHER; note = 2'-O-methylguanosine-3'-phosphate
  modified_base 4: mod_base = OTHER; note = 2'-O-methyladenosine-3'-phosphate
  modified_base 5: mod_base = OTHER; note = 2'-O-methyladenosine-3'-phosphate
  modified_base 6: mod_base = OTHER; note = 2'-O-docosanyl-adenosine-3'-phosphate
  modified_base 7: mod_base = OTHER; note = 2'-deoxy-2'-fluoroadenosine-3'-phosphate
  modified_base 8: mod_base = OTHER; note = 2'-O-methyladenosine-3'-phosphate
  modified_base 9: mod_base = OTHER; note = 2'-deoxy-2'-fluoroguanosine-3'-phosphate
  modified_base 10: mod_base = OTHER; note = 2'-deoxy-2'-fluorouridine-3'-phosphate
  modified_base 11: mod_base = OTHER; note = 2'-deoxy-2'-fluoroguanosine-3'-phosphate
  modified_base 12: mod_base = OTHER; note = 2'-O-methyluridine-3'-phosphate
  modified_base 13: mod_base = OTHER; note = 2'-O-methylguanosine-3'-phosphate
  modified_base 14: mod_base = OTHER; note = 2'-O-methyladenosine-3'-phosphate
  modified_base 15: mod_base = OTHER; note = 2'-O-methyladenosine-3'-phosphate
  modified_base 16: mod_base = OTHER; note = 2'-O-methyladenosine-3'-phosphate
  modified_base 17: mod_base = OTHER; note = 2'-O-methylcytidine-3'-phosphate
  modified_base 18: mod_base = OTHER; note = 2'-O-methyluridine-3'-phosphate
  modified_base 19: mod_base = OTHER; note = 2'-O-methyluridine-3'-phosphorothioate
  modified_base 20: mod_base = OTHER; note = 2'-O-methylguanosine-3'-phosphorothioate
  modified_base 21: mod_base = OTHER; note = 2'-O-methyladenosine
gtgaaaaagtgtgaaacttga

SEQ ID NO: 10731 - RNA, 21 nt, synthetic construct
  source 1..21: mol_type = other RNA
  modified_base 1: mod_base = OTHER; note = 2'-O-methyluridine-3'-phosphorothioate
  modified_base 2: mod_base = OTHER; note = 2'-O-methylguanosine-3'-phosphorothioate
  modified_base 3: mod_base = OTHER; note = 2'-O-methyladenosine-3'-phosphate
  modified_base 4: mod_base = OTHER; note = 2'-O-methyladenosine-3'-phosphate
  modified_base 5: mod_base = OTHER; note = 2'-O-methyladenosine-3'-phosphate
  modified_base 6: mod_base = OTHER; note = 2'-O-docosanyl-adenosine-3'-phosphate
  modified_base 7: mod_base = OTHER; note = 2'-deoxy-2'-fluoroadenosine-3'-phosphate
  modified_base 8: mod_base = OTHER; note = 2'-O-methylguanosine-3'-phosphate
  modified_base 9: mod_base = OTHER; note = 2'-deoxy-2'-fluorouridine-3'-phosphate
  modified_base 10: mod_base = OTHER; note = 2'-deoxy-2'-fluoroguanosine-3'-phosphate
  modified_base 11: mod_base = OTHER; note = 2'-deoxy-2'-fluorouridine-3'-phosphate
  modified_base 12: mod_base = OTHER; note = 2'-O-methylguanosine-3'-phosphate
  modified_base 13: mod_base = OTHER; note = 2'-O-methyladenosine-3'-phosphate
  modified_base 14: mod_base = OTHER; note = 2'-O-methyladenosine-3'-phosphate
  modified_base 15: mod_base = OTHER; note = 2'-O-methyladenosine-3'-phosphate
  modified_base 16: mod_base = OTHER; note = 2'-O-methylcytidine-3'-phosphate
  modified_base 17: mod_base = OTHER; note = 2'-O-methyluridine-3'-phosphate
  modified_base 18: mod_base = OTHER; note = 2'-O-methyluridine-3'-phosphate
  modified_base 19: mod_base = OTHER; note = 2'-O-methylguanosine-3'-phosphorothioate
  modified_base 20: mod_base = OTHER; note = 2'-O-methyluridine-3'-phosphorothioate
  modified_base 21: mod_base = OTHER; note = 2'-O-methyladenosine
tgaaaaagtgtgaaacttgta

SEQ ID NO: 10732 - RNA, 21 nt, synthetic construct
  source 1..21: mol_type = other RNA
  modified_base 1: mod_base = OTHER; note = 2'-O-methylguanosine-3'-phosphorothioate
  modified_base 2: mod_base = OTHER; note = 2'-O-methyladenosine-3'-phosphorothioate
  modified_base 3: mod_base = OTHER; note = 2'-O-methyladenosine-3'-phosphate
  modified_base 4: mod_base = OTHER; note = 2'-O-methyladenosine-3'-phosphate
  modified_base 5: mod_base = OTHER; note = 2'-O-methyladenosine-3'-phosphate
  modified_base 6: mod_base = OTHER; note = 2'-O-docosanyl-adenosine-3'-phosphate
  modified_base 7: mod_base = OTHER; note = 2'-deoxy-2'-fluoroguanosine-3'-phosphate
  modified_base 8: mod_base = OTHER; note = 2'-O-methyluridine-3'-phosphate
  modified_base 9: mod_base = OTHER; note = 2'-deoxy-2'-fluoroguanosine-3'-phosphate
  modified_base 10: mod_base = OTHER; note = 2'-deoxy-2'-fluorouridine-3'-phosphate
  modified_base 11: mod_base = OTHER; note = 2'-deoxy-2'-fluoroguanosine-3'-phosphate
  modified_base 12: mod_base = OTHER; note = 2'-O-methyladenosine-3'-phosphate
  modified_base 13: mod_base = OTHER; note = 2'-O-methyladenosine-3'-phosphate
  modified_base 14: mod_base = OTHER; note = 2'-O-methyladenosine-3'-phosphate
  modified_base 15: mod_base = OTHER; note = 2'-O-methylcytidine-3'-phosphate
  modified_base 16: mod_base = OTHER; note = 2'-O-methyluridine-3'-phosphate
  modified_base 17: mod_base = OTHER; note = 2'-O-methyluridine-3'-phosphate
  modified_base 18: mod_base = OTHER; note = 2'-O-methylguanosine-3'-phosphate
  modified_base 19: mod_base = OTHER; note = 2'-O-methyluridine-3'-phosphorothioate
  modified_base 20: mod_base = OTHER; note = 2'-O-methylguanosine-3'-phosphorothioate
  modified_base 21: mod_base = OTHER; note = 2'-O-methyladenosine
gaaaaagtgtgaaacttgtga

SEQ ID NO: 10733 - RNA, 21 nt, synthetic construct
  source 1..21: mol_type = other RNA
  modified_base 1: mod_base = OTHER; note = 2'-O-methyladenosine-3'-phosphorothioate
  modified_base 2: mod_base = OTHER; note = 2'-O-methyladenosine-3'-phosphorothioate
  modified_base 3: mod_base = OTHER; note = 2'-O-methyladenosine-3'-phosphate
  modified_base 4: mod_base = OTHER; note = 2'-O-methyladenosine-3'-phosphate
  modified_base 5: mod_base = OTHER; note = 2'-O-methyladenosine-3'-phosphate
  modified_base 6: mod_base = OTHER; note = 2'-O-docosanyl-guanosine-3'-phosphate
  modified_base 7: mod_base = OTHER; note = 2'-deoxy-2'-fluorouridine-3'-phosphate
  modified_base 8: mod_base = OTHER; note = 2'-O-methylguanosine-3'-phosphate
  modified_base 9: mod_base = OTHER; note = 2'-deoxy-2'-fluorouridine-3'-phosphate
  modified_base 10: mod_base = OTHER; note = 2'-deoxy-2'-fluoroguanosine-3'-phosphate
  modified_base 11: mod_base = OTHER; note = 2'-deoxy-2'-fluoroadenosine-3'-phosphate
  modified_base 12: mod_base = OTHER; note = 2'-O-methyladenosine-3'-phosphate
  modified_base 13: mod_base = OTHER; note = 2'-O-methyladenosine-3'-phosphate
  modified_base 14: mod_base = OTHER; note = 2'-O-methylcytidine-3'-phosphate
  modified_base 15: mod_base = OTHER; note = 2'-O-methyluridine-3'-phosphate
  modified_base 16: mod_base = OTHER; note = 2'-O-methyluridine-3'-phosphate
  modified_base 17: mod_base = OTHER; note = 2'-O-methylguanosine-3'-phosphate
  modified_base 18: mod_base = OTHER; note = 2'-O-methyluridine-3'-phosphate
  modified_base 19: mod_base = OTHER; note = 2'-O-methylguanosine-3'-phosphorothioate
  modified_base 20: mod_base = OTHER; note = 2'-O-methylcytidine-3'-phosphorothioate
  modified_base 21: mod_base = OTHER; note = 2'-O-methyladenosine
aaaaagtgtgaaacttgtgca

SEQ ID NO: 10734 - RNA, 21 nt, synthetic construct
  source 1..21: mol_type = other RNA
  modified_base 1: mod_base = OTHER; note = 2'-O-methyladenosine-3'-phosphorothioate
  modified_base 2: mod_base = OTHER; note = 2'-O-methyladenosine-3'-phosphorothioate
  modified_base 3: mod_base = OTHER; note = 2'-O-methyladenosine-3'-phosphate
  modified_base 4: mod_base = OTHER; note = 2'-O-methyladenosine-3'-phosphate
  modified_base 5: mod_base = OTHER; note = 2'-O-methylguanosine-3'-phosphate
  modified_base 6: mod_base = OTHER; note = 2'-O-docosanyl-uridine-3'-phosphate
  modified_base 7: mod_base = OTHER; note = 2'-deoxy-2'-fluoroguanosine-3'-phosphate
  modified_base 8: mod_base = OTHER; note = 2'-O-methyluridine-3'-phosphate
  modified_base 9: mod_base = OTHER; note = 2'-deoxy-2'-fluoroguanosine-3'-phosphate
  modified_base 10: mod_base = OTHER; note = 2'-deoxy-2'-fluoroadenosine-3'-phosphate
  modified_base 11: mod_base = OTHER; note = 2'-deoxy-2'-fluoroadenosine-3'-phosphate
  modified_base 12: mod_base = OTHER; note = 2'-O-methyladenosine-3'-phosphate
  modified_base 13: mod_base = OTHER; note = 2'-O-methylcytidine-3'-phosphate
  modified_base 14: mod_base = OTHER; note = 2'-O-methyluridine-3'-phosphate
  modified_base 15: mod_base = OTHER; note = 2'-O-methyluridine-3'-phosphate
  modified_base 16: mod_base = OTHER; note = 2'-O-methylguanosine-3'-phosphate
  modified_base 17: mod_base = OTHER; note = 2'-O-methyluridine-3'-phosphate
  modified_base 18: mod_base = OTHER; note = 2'-O-methylguanosine-3'-phosphate
  modified_base 19: mod_base = OTHER; note = 2'-O-methylcytidine-3'-phosphorothioate
  modified_base 20: mod_base = OTHER; note = 2'-O-methylcytidine-3'-phosphorothioate
  modified_base 21: mod_base = OTHER; note = 2'-O-methyladenosine
aaaagtgtgaaacttgtgcca

SEQ ID NO: 10735 - RNA, 21 nt, synthetic construct
  source 1..21: mol_type = other RNA
  modified_base 1: mod_base = OTHER; note = 2'-O-methyladenosine-3'-phosphorothioate
  modified_base 2: mod_base = OTHER; note = 2'-O-methyladenosine-3'-phosphorothioate
  modified_base 3: mod_base = OTHER; note = 2'-O-methylguanosine-3'-phosphate
  modified_base 4: mod_base = OTHER; note = 2'-O-methyluridine-3'-phosphate
  modified_base 5: mod_base = OTHER; note = 2'-O-methylguanosine-3'-phosphate
  modified_base 6: mod_base = OTHER; note = 2'-O-docosanyl-uridine-3'-phosphate
  modified_base 7: mod_base = OTHER; note = 2'-deoxy-2'-fluoroguanosine-3'-phosphate
  modified_base 8: mod_base = OTHER; note = 2'-O-methyladenosine-3'-phosphate
  modified_base 9: mod_base = OTHER; note = 2'-deoxy-2'-fluoroadenosine-3'-phosphate
  modified_base 10: mod_base = OTHER; note = 2'-deoxy-2'-fluoroadenosine-3'-phosphate
  modified_base 11: mod_base = OTHER; note = 2'-deoxy-2'-fluorocytidine-3'-phosphate
  modified_base 12: mod_base = OTHER; note = 2'-O-methyluridine-3'-phosphate
  modified_base 13: mod_base = OTHER; note = 2'-O-methyluridine-3'-phosphate
  modified_base 14: mod_base = OTHER; note = 2'-O-methylguanosine-3'-phosphate
  modified_base 15: mod_base = OTHER; note = 2'-O-methyluridine-3'-phosphate
  modified_base 16: mod_base = OTHER; note = 2'-O-methylguanosine-3'-phosphate
  modified_base 17: mod_base = OTHER; note = 2'-O-methylcytidine-3'-phosphate
  modified_base 18: mod_base = OTHER; note = 2'-O-methylcytidine-3'-phosphate
  modified_base 19: mod_base = OTHER; note = 2'-O-methyladenosine-3'-phosphorothioate
  modified_base 20: mod_base = OTHER; note = 2'-O-methyluridine-3'-phosphorothioate
  modified_base 21: mod_base = OTHER; note = 2'-O-methyladenosine
aagtgtgaaacttgtgccata

SEQ ID NO: 10736 - RNA, 21 nt, synthetic construct
  source 1..21: mol_type = other RNA
  modified_base 1: mod_base = OTHER; note = 2'-O-methylguanosine-3'-phosphorothioate
  modified_base 2: mod_base = OTHER; note = 2'-O-methyluridine-3'-phosphorothioate
  modified_base 3: mod_base = OTHER; note = 2'-O-methylguanosine-3'-phosphate
  modified_base 4: mod_base = OTHER; note = 2'-O-methyladenosine-3'-phosphate
  modified_base 5: mod_base = OTHER; note = 2'-O-methyladenosine-3'-phosphate
  modified_base 6: mod_base = OTHER; note = 2'-O-docosanyl-guanosine-3'-phosphate
  modified_base 7: mod_base = OTHER; note = 2'-deoxy-2'-fluorocytidine-3'-phosphate
  modified_base 8: mod_base = OTHER; note = 2'-O-methyladenosine-3'-phosphate
  modified_base 9: mod_base = OTHER; note = 2'-deoxy-2'-fluorouridine-3'-phosphate
  modified_base 10: mod_base = OTHER; note = 2'-deoxy-2'-fluoroguanosine-3'-phosphate
  modified_base 11: mod_base = OTHER; note = 2'-deoxy-2'-fluoroadenosine-3'-phosphate
  modified_base 12: mod_base = OTHER; note = 2'-O-methyluridine-3'-phosphate
  modified_base 13: mod_base = OTHER; note = 2'-O-methyluridine-3'-phosphate
  modified_base 14: mod_base = OTHER; note = 2'-O-methylcytidine-3'-phosphate
  modified_base 15: mod_base = OTHER; note = 2'-O-methyladenosine-3'-phosphate
  modified_base 16: mod_base = OTHER; note = 2'-O-methyladenosine-3'-phosphate
  modified_base 17: mod_base = OTHER; note = 2'-O-methyluridine-3'-phosphate
  modified_base 18: mod_base = OTHER; note = 2'-O-methyladenosine-3'-phosphate
  modified_base 19: mod_base = OTHER; note = 2'-O-methylcytidine-3'-phosphorothioate
  modified_base 20: mod_base = OTHER; note = 2'-O-methyluridine-3'-phosphorothioate
  modified_base 21: mod_base = OTHER; note = 2'-O-methyladenosine
gtgaagcatgattcaatacta

SEQ ID NO: 10737 - RNA, 21 nt, synthetic construct
  source 1..21: mol_type = other RNA
  modified_base 1: mod_base = OTHER; note = 2'-O-methylguanosine-3'-phosphorothioate
  modified_base 2: mod_base = OTHER; note = 2'-O-methylcytidine-3'-phosphorothioate
  modified_base 3: mod_base = OTHER; note = 2'-O-methyluridine-3'-phosphate
  modified_base 4: mod_base = OTHER; note = 2'-O-methylguanosine-3'-phosphate
  modified_base 5: mod_base = OTHER; note = 2'-O-methyluridine-3'-phosphate
  modified_base 6: mod_base = OTHER; note = 2'-O-docosanyl-guanosine-3'-phosphate
  modified_base 7: mod_base = OTHER; note = 2'-deoxy-2'-fluoroadenosine-3'-phosphate
  modified_base 8: mod_base = OTHER; note = 2'-O-methyladenosine-3'-phosphate
  modified_base 9: mod_base = OTHER; note = 2'-deoxy-2'-fluoroguanosine-3'-phosphate
  modified_base 10: mod_base = OTHER; note = 2'-deoxy-2'-fluorocytidine-3'-phosphate
  modified_base 11: mod_base = OTHER; note = 2'-deoxy-2'-fluoroadenosine-3'-phosphate
  modified_base 12: mod_base = OTHER; note = 2'-O-methyluridine-3'-phosphate
  modified_base 13: mod_base = OTHER; note = 2'-O-methylguanosine-3'-phosphate
  modified_base 14: mod_base = OTHER; note = 2'-O-methyladenosine-3'-phosphate
  modified_base 15: mod_base = OTHER; note = 2'-O-methyluridine-3'-phosphate
  modified_base 16: mod_base = OTHER; note = 2'-O-methyluridine-3'-phosphate
  modified_base 17: mod_base = OTHER; note = 2'-O-methylcytidine-3'-phosphate
  modified_base 18: mod_base = OTHER; note = 2'-O-methyladenosine-3'-phosphate
  modified_base 19: mod_base = OTHER; note = 2'-O-methyladenosine-3'-phosphorothioate
  modified_base 20: mod_base = OTHER; note = 2'-O-methyluridine-3'-phosphorothioate
  modified_base 21: mod_base = OTHER; note = 2'-O-methyladenosine
gctgtgaagcatgattcaata

SEQ ID NO: 10738 - RNA, 21 nt, synthetic construct
  source 1..21: mol_type = other RNA
  modified_base 1: mod_base = OTHER; note = 2'-O-methylcytidine-3'-phosphorothioate
  modified_base 2: mod_base = OTHER; note = 2'-O-methyluridine-3'-phosphorothioate
  modified_base 3: mod_base = OTHER; note = 2'-O-methylguanosine-3'-phosphate
  modified_base 4: mod_base = OTHER; note = 2'-O-methyluridine-3'-phosphate
  modified_base 5: mod_base = OTHER; note = 2'-O-methylguanosine-3'-phosphate
  modified_base 6: mod_base = OTHER; note = 2'-O-docosanyl-adenosine-3'-phosphate
  modified_base 7: mod_base = OTHER; note = 2'-deoxy-2'-fluoroadenosine-3'-phosphate
  modified_base 8: mod_base = OTHER; note = 2'-O-methylguanosine-3'-phosphate
  modified_base 9: mod_base = OTHER; note = 2'-deoxy-2'-fluorocytidine-3'-phosphate
  modified_base 10: mod_base = OTHER; note = 2'-deoxy-2'-fluoroadenosine-3'-phosphate
  modified_base 11: mod_base = OTHER; note = 2'-deoxy-2'-fluorouridine-3'-phosphate
  modified_base 12: mod_base = OTHER; note = 2'-O-methylguanosine-3'-phosphate
  modified_base 13: mod_base = OTHER; note = 2'-O-methyladenosine-3'-phosphate
  modified_base 14: mod_base = OTHER; note = 2'-O-methyluridine-3'-phosphate
  modified_base 15: mod_base = OTHER; note = 2'-O-methyluridine-3'-phosphate
  modified_base 16: mod_base = OTHER; note = 2'-O-methylcytidine-3'-phosphate
  modified_base 17: mod_base = OTHER; note = 2'-O-methyladenosine-3'-phosphate
  modified_base 18: mod_base = OTHER; note = 2'-O-methyladenosine-3'-phosphate
  modified_base 19: mod_base = OTHER; note = 2'-O-methyluridine-3'-phosphorothioate
  modified_base 20: mod_base = OTHER; note = 2'-O-methyladenosine-3'-phosphorothioate
  modified_base 21: mod_base = OTHER; note = 2'-O-methyladenosine
ctgtgaagcatgattcaataa

SEQ ID NO: 10739 - RNA, 21 nt, synthetic construct
  source 1..21: mol_type = other RNA
  modified_base 1: mod_base = OTHER; note = 2'-O-methyluridine-3'-phosphorothioate
  modified_base 2: mod_base = OTHER; note = 2'-O-methylguanosine-3'-phosphorothioate
  modified_base 3: mod_base = OTHER; note = 2'-O-methyladenosine-3'-phosphate
  modified_base 4: mod_base = OTHER; note = 2'-O-methyladenosine-3'-phosphate
  modified_base 5: mod_base = OTHER; note = 2'-O-methylguanosine-3'-phosphate
  modified_base 6: mod_base = OTHER; note = 2'-O-docosanyl-cytidine-3'-phosphate
  modified_base 7: mod_base = OTHER; note = 2'-deoxy-2'-fluoroadenosine-3'-phosphate
  modified_base 8: mod_base = OTHER; note = 2'-O-methyluridine-3'-phosphate
  modified_base 9: mod_base = OTHER; note = 2'-deoxy-2'-fluoroguanosine-3'-phosphate
  modified_base 10: mod_base = OTHER; note = 2'-deoxy-2'-fluoroadenosine-3'-phosphate
  modified_base 11: mod_base = OTHER; note = 2'-deoxy-2'-fluorouridine-3'-phosphate
  modified_base 12: mod_base = OTHER; note = 2'-O-methyluridine-3'-phosphate
  modified_base 13: mod_base = OTHER; note = 2'-O-methylcytidine-3'-phosphate
  modified_base 14: mod_base = OTHER; note = 2'-O-methyladenosine-3'-phosphate
  modified_base 15: mod_base = OTHER; note = 2'-O-methyladenosine-3'-phosphate
  modified_base 16: mod_base = OTHER; note = 2'-O-methyluridine-3'-phosphate
  modified_base 17: mod_base = OTHER; note = 2'-O-methyladenosine-3'-phosphate
  modified_base 18: mod_base = OTHER; note = 2'-O-methylcytidine-3'-phosphate
  modified_base 19: mod_base = OTHER; note = 2'-O-methyluridine-3'-phosphorothioate
  modified_base 20: mod_base = OTHER; note = 2'-O-methylguanosine-3'-phosphorothioate
  modified_base 21: mod_base = OTHER; note = 2'-O-methyladenosine
tgaagcatgattcaatactga

SEQ ID NO: 10740 - RNA, 21 nt, synthetic construct
  source 1..21: mol_type = other RNA
  modified_base 1: mod_base = OTHER; note = 2'-O-methylguanosine-3'-phosphorothioate
  modified_base 2: mod_base = OTHER; note = 2'-O-methylcytidine-3'-phosphorothioate
  modified_base 3: mod_base = OTHER; note = 2'-O-methyladenosine-3'-phosphate
  modified_base 4: mod_base = OTHER; note = 2'-O-methyluridine-3'-phosphate
  modified_base 5: mod_base = OTHER; note = 2'-O-methylguanosine-3'-phosphate
  modified_base 6: mod_base = OTHER; note = 2'-O-docosanyl-adenosine-3'-phosphate
  modified_base 7: mod_base = OTHER; note = 2'-deoxy-2'-fluorouridine-3'-phosphate
  modified_base 8: mod_base = OTHER; note = 2'-O-methyluridine-3'-phosphate
  modified_base 9: mod_base = OTHER; note = 2'-deoxy-2'-fluorocytidine-3'-phosphate
  modified_base 10: mod_base = OTHER; note = 2'-deoxy-2'-fluoroadenosine-3'-phosphate
  modified_base 11: mod_base = OTHER; note = 2'-deoxy-2'-fluoroadenosine-3'-phosphate
  modified_base 12: mod_base = OTHER; note = 2'-O-methyluridine-3'-phosphate
  modified_base 13: mod_base = OTHER; note = 2'-O-methyladenosine-3'-phosphate
  modified_base 14: mod_base = OTHER; note = 2'-O-methylcytidine-3'-phosphate
  modified_base 15: mod_base = OTHER; note = 2'-O-methyluridine-3'-phosphate
  modified_base 16: mod_base = OTHER; note = 2'-O-methylguanosine-3'-phosphate
  modified_base 17: mod_base = OTHER; note = 2'-O-methyladenosine-3'-phosphate
  modified_base 18: mod_base = OTHER; note = 2'-O-methyladenosine-3'-phosphate
  modified_base 19: mod_base = OTHER; note = 2'-O-methylcytidine-3'-phosphorothioate
  modified_base 20: mod_base = OTHER; note = 2'-O-methyladenosine-3'-phosphorothioate
  modified_base 21: mod_base = OTHER; note = 2'-O-methyladenosine
gcatgattcaatactgaacaa

SEQ ID NO: 10741 - RNA, 21 nt, synthetic construct
  source 1..21: mol_type = other RNA
  modified_base 1: mod_base = OTHER; note = 2'-O-methyladenosine-3'-phosphorothioate
  modified_base 2: mod_base = OTHER; note = 2'-O-methyluridine-3'-phosphorothioate
  modified_base 3: mod_base = OTHER; note = 2'-O-methylguanosine-3'-phosphate
  modified_base 4: mod_base = OTHER; note = 2'-O-methyladenosine-3'-phosphate
  modified_base 5: mod_base = OTHER; note = 2'-O-methyluridine-3'-phosphate
  modified_base 6: mod_base = OTHER; note = 2'-O-docosanyl-uridine-3'-phosphate
  modified_base 7: mod_base = OTHER; note = 2'-deoxy-2'-fluorocytidine-3'-phosphate
  modified_base 8: mod_base = OTHER; note = 2'-O-methyladenosine-3'-phosphate
  modified_base 9: mod_base = OTHER; note = 2'-deoxy-2'-fluoroadenosine-3'-phosphate
  modified_base 10: mod_base = OTHER; note = 2'-deoxy-2'-fluorouridine-3'-phosphate
  modified_base 11: mod_base = OTHER; note = 2'-deoxy-2'-fluoroadenosine-3'-phosphate
  modified_base 12: mod_base = OTHER; note = 2'-O-methylcytidine-3'-phosphate
  modified_base 13: mod_base = OTHER; note = 2'-O-methyluridine-3'-phosphate
  modified_base 14: mod_base = OTHER; note = 2'-O-methylguanosine-3'-phosphate
  modified_base 15: mod_base = OTHER; note = 2'-O-methyladenosine-3'-phosphate
  modified_base 16: mod_base = OTHER; note = 2'-O-methyladenosine-3'-phosphate
  modified_base 17: mod_base = OTHER; note = 2'-O-methylcytidine-3'-phosphate
  modified_base 18: mod_base = OTHER; note = 2'-O-methyladenosine-3'-phosphate
  modified_base 19: mod_base = OTHER; note = 2'-O-methylcytidine-3'-phosphorothioate
  modified_base 20: mod_base = OTHER; note = 2'-O-methyluridine-3'-phosphorothioate
  modified_base 21: mod_base = OTHER; note = 2'-O-methyladenosine
atgattcaatactgaacacta

SEQ ID NO: 10742 - RNA, 21 nt, synthetic construct
  source 1..21: mol_type = other RNA
  modified_base 1: mod_base = OTHER; note = 2'-O-methyluridine-3'-phosphorothioate
  modified_base 2: mod_base = OTHER; note = 2'-O-methylguanosine-3'-phosphorothioate
  modified_base 3: mod_base = OTHER; note = 2'-O-methyladenosine-3'-phosphate
  modified_base 4: mod_base = OTHER; note = 2'-O-methyluridine-3'-phosphate
  modified_base 5: mod_base = OTHER; note = 2'-O-methyluridine-3'-phosphate
  modified_base 6: mod_base = OTHER; note = 2'-O-docosanyl-cytidine-3'-phosphate
  modified_base 7: mod_base = OTHER; note = 2'-deoxy-2'-fluoroadenosine-3'-phosphate
  modified_base 8: mod_base = OTHER; note = 2'-O-methyladenosine-3'-phosphate
  modified_base 9: mod_base = OTHER; note = 2'-deoxy-2'-fluorouridine-3'-phosphate
  modified_base 10: mod_base = OTHER; note = 2'-deoxy-2'-fluoroadenosine-3'-phosphate
  modified_base 11: mod_base = OTHER; note = 2'-deoxy-2'-fluorocytidine-3'-phosphate
  modified_base 12: mod_base = OTHER; note = 2'-O-methyluridine-3'-phosphate
  modified_base 13: mod_base = OTHER; note = 2'-O-methylguanosine-3'-phosphate
  modified_base 14: mod_base = OTHER; note = 2'-O-methyladenosine-3'-phosphate
  modified_base 15: mod_base = OTHER; note = 2'-O-methyladenosine-3'-phosphate
  modified_base 16: mod_base = OTHER; note = 2'-O-methylcytidine-3'-phosphate
  modified_base 17: mod_base = OTHER; note = 2'-O-methyladenosine-3'-phosphate
  modified_base 18: mod_base = OTHER; note = 2'-O-methylcytidine-3'-phosphate
  modified_base 19: mod_base = OTHER; note = 2'-O-methyluridine-3'-phosphorothioate
  modified_base 20: mod_base = OTHER; note = 2'-O-methyladenosine-3'-phosphorothioate
  modified_base 21: mod_base = OTHER; note = 2'-O-methyladenosine
tgattcaatactgaacactaa

SEQ ID NO: 10743 - RNA, 21 nt, synthetic construct
  source 1..21: mol_type = other RNA
  modified_base 1: mod_base = OTHER; note = 2'-O-methyladenosine-3'-phosphorothioate
  modified_base 2: mod_base = OTHER; note = 2'-O-methyluridine-3'-phosphorothioate
  modified_base 3: mod_base = OTHER; note = 2'-O-methyladenosine-3'-phosphate
  modified_base 4: mod_base = OTHER; note = 2'-O-methylcytidine-3'-phosphate
  modified_base 5: mod_base = OTHER; note = 2'-O-methyluridine-3'-phosphate
  modified_base 6: mod_base = OTHER; note = 2'-O-docosanyl-guanosine-3'-phosphate
  modified_base 7: mod_base = OTHER; note = 2'-deoxy-2'-fluoroadenosine-3'-phosphate
  modified_base 8: mod_base = OTHER; note = 2'-O-methyladenosine-3'-phosphate
  modified_base 9: mod_base = OTHER; note = 2'-deoxy-2'-fluorocytidine-3'-phosphate
  modified_base 10: mod_base = OTHER; note = 2'-deoxy-2'-fluoroadenosine-3'-phosphate
  modified_base 11: mod_base = OTHER; note = 2'-deoxy-2'-fluorocytidine-3'-phosphate
  modified_base 12: mod_base = OTHER; note = 2'-O-methyluridine-3'-phosphate
  modified_base 13: mod_base = OTHER; note = 2'-O-methyladenosine-3'-phosphate
  modified_base 14: mod_base = OTHER; note = 2'-O-methyluridine-3'-phosphate
  modified_base 15: mod_base = OTHER; note = 2'-O-methylcytidine-3'-phosphate
  modified_base 16: mod_base = OTHER; note = 2'-O-methylguanosine-3'-phosphate
  modified_base 17: mod_base = OTHER; note = 2'-O-methyladenosine-3'-phosphate
  modified_base 18: mod_base = OTHER; note = 2'-O-methylcytidine-3'-phosphate
  modified_base 19: mod_base = OTHER; note = 2'-O-methyladenosine-3'-phosphorothioate
  modified_base 20: mod_base = OTHER; note = 2'-O-methyluridine-3'-phosphorothioate
  modified_base 21: mod_base = OTHER; note = 2'-O-methyladenosine
atactgaacactatcgacata

SEQ ID NO: 10744 - RNA, 21 nt, synthetic construct
  source 1..21: mol_type = other RNA
  modified_base 1: mod_base = OTHER; note = 2'-O-methyladenosine-3'-phosphorothioate
  modified_base 2: mod_base = OTHER; note = 2'-O-methylcytidine-3'-phosphorothioate
  modified_base 3: mod_base = OTHER; note = 2'-O-methyluridine-3'-phosphate
  modified_base 4: mod_base = OTHER; note = 2'-O-methylguanosine-3'-phosphate
  modified_base 5: mod_base = OTHER; note = 2'-O-methyladenosine-3'-phosphate
  modified_base 6: mod_base = OTHER; note = 2'-O-docosanyl-adenosine-3'-phosphate
  modified_base 7: mod_base = OTHER; note = 2'-deoxy-2'-fluorocytidine-3'-phosphate
  modified_base 8: mod_base = OTHER; note = 2'-O-methyladenosine-3'-phosphate
  modified_base 9: mod_base = OTHER; note = 2'-deoxy-2'-fluorocytidine-3'-phosphate
  modified_base 10: mod_base = OTHER; note = 2'-deoxy-2'-fluorouridine-3'-phosphate
  modified_base 11: mod_base = OTHER; note = 2'-deoxy-2'-fluoroadenosine-3'-phosphate
  modified_base 12: mod_base = OTHER; note = 2'-O-methyluridine-3'-phosphate
  modified_base 13: mod_base = OTHER; note = 2'-O-methylcytidine-3'-phosphate
  modified_base 14: mod_base = OTHER; note = 2'-O-methylguanosine-3'-phosphate
  modified_base 15: mod_base = OTHER; note = 2'-O-methyladenosine-3'-phosphate
  modified_base 16: mod_base = OTHER; note = 2'-O-methylcytidine-3'-phosphate
  modified_base 17: mod_base = OTHER; note = 2'-O-methyladenosine-3'-phosphate
  modified_base 18: mod_base = OTHER; note = 2'-O-methyluridine-3'-phosphate
  modified_base 19: mod_base = OTHER; note = 2'-O-methyladenosine-3'-phosphorothioate
  modified_base 20: mod_base = OTHER; note = 2'-O-methylcytidine-3'-phosphorothioate
  modified_base 21: mod_base = OTHER; note = 2'-O-methyladenosine
actgaacactatcgacataca

SEQ ID NO: 10745 - RNA, 21 nt, synthetic construct
  source 1..21: mol_type = other RNA
  modified_base 1: mod_base = OTHER; note = 2'-O-methyladenosine-3'-phosphorothioate
  modified_base 2: mod_base = OTHER; note = 2'-O-methyluridine-3'-phosphorothioate
  modified_base 3: mod_base = OTHER; note = 2'-O-methyladenosine-3'-phosphate
  modified_base 4: mod_base = OTHER; note = 2'-O-methylcytidine-3'-phosphate
  modified_base 5: mod_base = OTHER; note = 2'-O-methylcytidine-3'-phosphate
  modified_base 6: mod_base = OTHER; note = 2'-O-docosanyl-uridine-3'-phosphate
  modified_base 7: mod_base = OTHER; note = 2'-deoxy-2'-fluorocytidine-3'-phosphate
  modified_base 8: mod_base = OTHER; note = 2'-O-methyladenosine-3'-phosphate
  modified_base 9: mod_base = OTHER; note = 2'-deoxy-2'-fluoroguanosine-3'-phosphate
  modified_base 10: mod_base = OTHER; note = 2'-deoxy-2'-fluoroadenosine-3'-phosphate
  modified_base 11: mod_base = OTHER; note = 2'-deoxy-2'-fluoroadenosine-3'-phosphate
  modified_base 12: mod_base = OTHER; note = 2'-O-methyluridine-3'-phosphate
  modified_base 13: mod_base = OTHER; note = 2'-O-methylcytidine-3'-phosphate
  modified_base 14: mod_base = OTHER; note = 2'-O-methylcytidine-3'-phosphate
  modified_base 15: mod_base = OTHER; note = 2'-O-methyluridine-3'-phosphate
  modified_base 16: mod_base = OTHER; note = 2'-O-methyladenosine-3'-phosphate
  modified_base 17: mod_base = OTHER; note = 2'-O-methyladenosine-3'-phosphate
  modified_base 18: mod_base = OTHER; note = 2'-O-methyladenosine-3'-phosphate
  modified_base 19: mod_base = OTHER; note = 2'-O-methylguanosine-3'-phosphorothioate
  modified_base 20: mod_base = OTHER; note = 2'-O-methyluridine-3'-phosphorothioate
  modified_base 21: mod_base = OTHER; note = 2'-O-methyladenosine
atacctcagaatcctaaagta

SEQ ID NO: 10746 - RNA, 21 nt, synthetic construct
  source 1..21: mol_type = other RNA
  modified_base 1: mod_base = OTHER; note = 2'-O-methyluridine-3'-phosphorothioate
  modified_base 2: mod_base = OTHER; note = 2'-O-methylguanosine-3'-phosphorothioate
  modified_base 3: mod_base = OTHER; note = 2'-O-methylcytidine-3'-phosphate
  modified_base 4: mod_base = OTHER; note = 2'-O-methyluridine-3'-phosphate
  modified_base 5: mod_base = OTHER; note = 2'-O-methyluridine-3'-phosphate
  modified_base 6: mod_base = OTHER; note = 2'-O-docosanyl-guanosine-3'-phosphate
  modified_base 7: mod_base = OTHER; note = 2'-deoxy-2'-fluoroadenosine-3'-phosphate
  modified_base 8: mod_base = OTHER; note = 2'-O-methyluridine-3'-phosphate
  modified_base 9: mod_base = OTHER; note = 2'-deoxy-2'-fluoroguanosine-3'-phosphate
  modified_base 10: mod_base = OTHER; note = 2'-deoxy-2'-fluoroadenosine-3'-phosphate
  modified_base 11: mod_base = OTHER; note = 2'-deoxy-2'-fluorouridine-3'-phosphate
  modified_base 12: mod_base = OTHER; note = 2'-O-methyladenosine-3'-phosphate
  modified_base 13: mod_base = OTHER; note = 2'-O-methylcytidine-3'-phosphate
  modified_base 14: mod_base = OTHER; note = 2'-O-methyladenosine-3'-phosphate
  modified_base 15: mod_base = OTHER; note = 2'-O-methyladenosine-3'-phosphate
  modified_base 16: mod_base = OTHER; note = 2'-O-methyluridine-3'-phosphate
  modified_base 17: mod_base = OTHER; note = 2'-O-methylguanosine-3'-phosphate
  modified_base 18: mod_base = OTHER; note = 2'-O-methyladenosine-3'-phosphate
  modified_base 19: mod_base = OTHER; note = 2'-O-methyladenosine-3'-phosphorothioate
  modified_base 20: mod_base = OTHER; note = 2'-O-methyluridine-3'-phosphorothioate
  modified_base 21: mod_base = OTHER; note = 2'-O-methyladenosine
tgcttgatgatacaatgaata

SEQ ID NO: 10747 - RNA, 21 nt, synthetic construct
  source 1..21: mol_type = other RNA
  modified_base 1: mod_base = OTHER; note = 2'-O-methyluridine-3'-phosphorothioate
  modified_base 2: mod_base = OTHER; note = 2'-O-methyladenosine-3'-phosphorothioate
  modified_base 3: mod_base = OTHER; note = 2'-O-methyluridine-3'-phosphate
  modified_base 4: mod_base = OTHER; note = 2'-O-methyladenosine-3'-phosphate
  modified_base 5: mod_base = OTHER; note = 2'-O-methyluridine-3'-phosphate
  modified_base 6: mod_base = OTHER; note = 2'-O-docosanyl-guanosine-3'-phosphate
  modified_base 7: mod_base = OTHER; note = 2'-deoxy-2'-fluoroguanosine-3'-phosphate
  modified_base 8: mod_base = OTHER; note = 2'-O-methylcytidine-3'-phosphate
  modified_base 9: mod_base = OTHER; note = 2'-deoxy-2'-fluorouridine-3'-phosphate
  modified_base 10: mod_base = OTHER; note = 2'-deoxy-2'-fluorocytidine-3'-phosphate
  modified_base 11: mod_base = OTHER; note = 2'-deoxy-2'-fluorocytidine-3'-phosphate
  modified_base 12: mod_base = OTHER; note = 2'-O-methyluridine-3'-phosphate
  modified_base 13: mod_base = OTHER; note = 2'-O-methylguanosine-3'-phosphate
  modified_base 14: mod_base = OTHER; note = 2'-O-methyladenosine-3'-phosphate
  modified_base 15: mod_base = OTHER; note = 2'-O-methyladenosine-3'-phosphate
  modified_base 16: mod_base = OTHER; note = 2'-O-methyladenosine-3'-phosphate
  modified_base 17: mod_base = OTHER; note = 2'-O-methyluridine-3'-phosphate
  modified_base 18: mod_base = OTHER; note = 2'-O-methylguanosine-3'-phosphate
  modified_base 19: mod_base = OTHER; note = 2'-O-methylcytidine-3'-phosphorothioate
  modified_base 20: mod_base = OTHER; note = 2'-O-methyluridine-3'-phosphorothioate
  modified_base 21: mod_base = OTHER; note = 2'-O-methyladenosine
tatatggctcctgaaatgcta

SEQ ID NO: 10748 - RNA, 21 nt, synthetic construct
  source 1..21: mol_type = other RNA
  modified_base 1: mod_base = OTHER; note = 2'-O-methyluridine-3'-phosphorothioate
  modified_base 2: mod_base = OTHER; note = 2'-O-methylguanosine-3'-phosphorothioate
  modified_base 3: mod_base = OTHER; note = 2'-O-methylguanosine-3'-phosphate
  modified_base 4: mod_base = OTHER; note = 2'-O-methylcytidine-3'-phosphate
  modified_base 5: mod_base = OTHER; note = 2'-O-methyluridine-3'-phosphate
  modified_base 6: mod_base = OTHER; note = 2'-O-docosanyl-cytidine-3'-phosphate
  modified_base 7: mod_base = OTHER; note = 2'-deoxy-2'-fluorocytidine-3'-phosphate
  modified_base 8: mod_base = OTHER; note = 2'-O-methyluridine-3'-phosphate
  modified_base 9: mod_base = OTHER; note = 2'-deoxy-2'-fluoroguanosine-3'-phosphate
  modified_base 10: mod_base = OTHER; note = 2'-deoxy-2'-fluoroadenosine-3'-phosphate
  modified_base 11: mod_base = OTHER; note = 2'-deoxy-2'-fluoroadenosine-3'-phosphate
  modified_base 12: mod_base = OTHER; note = 2'-O-methyladenosine-3'-phosphate
  modified_base 13: mod_base = OTHER; note = 2'-O-methyluridine-3'-phosphate
  modified_base 14: mod_base = OTHER; note = 2'-O-methylguanosine-3'-phosphate
  modified_base 15: mod_base = OTHER; note = 2'-O-methylcytidine-3'-phosphate
  modified_base 16: mod_base = OTHER; note = 2'-O-methyluridine-3'-phosphate
  modified_base 17: mod_base = OTHER; note = 2'-O-methyluridine-3'-phosphate
  modified_base 18: mod_base = OTHER; note = 2'-O-methylguanosine-3'-phosphate
  modified_base 19: mod_base = OTHER; note = 2'-O-methyladenosine-3'-phosphorothioate
  modified_base 20: mod_base = OTHER; note = 2'-O-methyluridine-3'-phosphorothioate
  modified_base 21: mod_base = OTHER; note = 2'-O-methyladenosine
tggctcctgaaatgcttgata

SEQ ID NO: 10749 - RNA, 21 nt, synthetic construct
  source 1..21: mol_type = other RNA
  modified_base 1: mod_base = OTHER; note = 2'-O-methylguanosine-3'-phosphorothioate
  modified_base 2: mod_base = OTHER; note = 2'-O-methylguanosine-3'-phosphorothioate
  modified_base 3: mod_base = OTHER; note = 2'-O-methylcytidine-3'-phosphate
  modified_base 4: mod_base = OTHER; note = 2'-O-methyluridine-3'-phosphate
  modified_base 5: mod_base = OTHER; note = 2'-O-methylcytidine-3'-phosphate
  modified_base 6: mod_base = OTHER; note = 2'-O-docosanyl-cytidine-3'-phosphate
  modified_base 7: mod_base = OTHER; note = 2'-deoxy-2'-fluorouridine-3'-phosphate
  modified_base 8: mod_base = OTHER; note = 2'-O-methylguanosine-3'-phosphate
  modified_base 9: mod_base = OTHER; note = 2'-deoxy-2'-fluoroadenosine-3'-phosphate
  modified_base 10: mod_base = OTHER; note = 2'-deoxy-2'-fluoroadenosine-3'-phosphate
  modified_base 11: mod_base = OTHER; note = 2'-deoxy-2'-fluoroadenosine-3'-phosphate
  modified_base 12: mod_base = OTHER; note = 2'-O-methyluridine-3'-phosphate
  modified_base 13: mod_base = OTHER; note = 2'-O-methylguanosine-3'-phosphate
  modified_base 14: mod_base = OTHER; note = 2'-O-methylcytidine-3'-phosphate
  modified_base 15: mod_base = OTHER; note = 2'-O-methyluridine-3'-phosphate
  modified_base 16: mod_base = OTHER; note = 2'-O-methyluridine-3'-phosphate
  modified_base 17: mod_base = OTHER; note = 2'-O-methylguanosine-3'-phosphate
  modified_base 18: mod_base = OTHER; note = 2'-O-methyladenosine-3'-phosphate
  modified_base 19: mod_base = OTHER; note = 2'-O-methyluridine-3'-phosphorothioate
  modified_base 20: mod_base = OTHER; note = 2'-O-methylguanosine-3'-phosphorothioate
  modified_base 21: mod_base = OTHER; note = 2'-O-methyladenosine
ggctcctgaaatgcttgatga

SEQ ID NO: 10750 - RNA, 21 nt, synthetic construct
  source 1..21: mol_type = other RNA
  modified_base 1: mod_base = OTHER; note = 2'-O-methylguanosine-3'-phosphorothioate
  modified_base 2: mod_base = OTHER; note = 2'-O-methylcytidine-3'-phosphorothioate
  modified_base 3: mod_base = OTHER; note = 2'-O-methyluridine-3'-phosphate
  modified_base 4: mod_base = OTHER; note = 2'-O-methylcytidine-3'-phosphate
  modified_base 5: mod_base = OTHER; note = 2'-O-methylcytidine-3'-phosphate
  modified_base 6: mod_base = OTHER; note = 2'-O-docosanyl-uridine-3'-phosphate
  modified_base 7: mod_base = OTHER; note = 2'-deoxy-2'-fluoroguanosine-3'-phosphate
  modified_base 8: mod_base = OTHER; note = 2'-O-methyladenosine-3'-phosphate
  modified_base 9: mod_base = OTHER; note = 2'-deoxy-2'-fluoroadenosine-3'-phosphate
  modified_base 10: mod_base = OTHER; note = 2'-deoxy-2'-fluoroadenosine-3'-phosphate
  modified_base 11: mod_base = OTHER; note = 2'-deoxy-2'-fluorouridine-3'-phosphate
  modified_base 12: mod_base = OTHER; note = 2'-O-methylguanosine-3'-phosphate
  modified_base 13: mod_base = OTHER; note = 2'-O-methylcytidine-3'-phosphate
  modified_base 14: mod_base = OTHER; note = 2'-O-methyluridine-3'-phosphate
  modified_base 15: mod_base = OTHER; note = 2'-O-methyluridine-3'-phosphate
  modified_base 16: mod_base = OTHER; note = 2'-O-methylguanosine-3'-phosphate
  modified_base 17: mod_base = OTHER; note = 2'-O-methyladenosine-3'-phosphate
  modified_base 18: mod_base = OTHER; note = 2'-O-methyluridine-3'-phosphate
  modified_base 19: mod_base = OTHER; note = 2'-O-methylguanosine-3'-phosphorothioate
  modified_base 20: mod_base = OTHER; note = 2'-O-methyladenosine-3'-phosphorothioate
  modified_base 21: mod_base = OTHER; note = 2'-O-methyladenosine
gctcctgaaatgcttgatgaa

SEQ ID NO: 10751 - RNA, 21 nt, synthetic construct
  source 1..21: mol_type = other RNA
  modified_base 1: mod_base = OTHER; note = 2'-O-methylcytidine-3'-phosphorothioate
  modified_base 2: mod_base = OTHER; note = 2'-O-methyluridine-3'-phosphorothioate
  modified_base 3: mod_base = OTHER; note = 2'-O-methylcytidine-3'-phosphate
  modified_base 4: mod_base = OTHER; note = 2'-O-methylcytidine-3'-phosphate
  modified_base 5: mod_base = OTHER; note = 2'-O-methyluridine-3'-phosphate
  modified_base 6: mod_base = OTHER; note = 2'-O-docosanyl-guanosine-3'-phosphate
  modified_base 7: mod_base = OTHER; note = 2'-deoxy-2'-fluoroadenosine-3'-phosphate
  modified_base 8: mod_base = OTHER; note = 2'-O-methyladenosine-3'-phosphate
  modified_base 9: mod_base = OTHER; note = 2'-deoxy-2'-fluoroadenosine-3'-phosphate
  modified_base 10: mod_base = OTHER; note = 2'-deoxy-2'-fluorouridine-3'-phosphate
  modified_base 11: mod_base = OTHER; note = 2'-deoxy-2'-fluoroguanosine-3'-phosphate
  modified_base 12: mod_base = OTHER; note = 2'-O-methylcytidine-3'-phosphate
  modified_base 13: mod_base = OTHER; note = 2'-O-methyluridine-3'-phosphate
  modified_base 14: mod_base = OTHER; note = 2'-O-methyluridine-3'-phosphate
  modified_base 15: mod_base = OTHER; note = 2'-O-methylguanosine-3'-phosphate
  modified_base 16: mod_base = OTHER; note = 2'-O-methyladenosine-3'-phosphate
  modified_base 17: mod_base = OTHER; note = 2'-O-methyluridine-3'-phosphate
  modified_base 18: mod_base = OTHER; note = 2'-O-methylguanosine-3'-phosphate
  modified_base 19: mod_base = OTHER; note = 2'-O-methyladenosine-3'-phosphorothioate
  modified_base 20: mod_base = OTHER; note = 2'-O-methyluridine-3'-phosphorothioate
  modified_base 21: mod_base = OTHER; note = 2'-O-methyladenosine
ctcctgaaatgcttgatgata

SEQ ID NO: 10752 - RNA, 21 nt, synthetic construct
  source 1..21: mol_type = other RNA
  modified_base 1: mod_base = OTHER; note = 2'-O-methyluridine-3'-phosphorothioate
  modified_base 2: mod_base = OTHER; note = 2'-O-methylcytidine-3'-phosphorothioate
  modified_base 3: mod_base = OTHER; note = 2'-O-methylcytidine-3'-phosphate
  modified_base 4: mod_base = OTHER; note = 2'-O-methyluridine-3'-phosphate
  modified_base 5: mod_base = OTHER; note = 2'-O-methylguanosine-3'-phosphate
  modified_base 6: mod_base = OTHER; note = 2'-O-docosanyl-adenosine-3'-phosphate
  modified_base 7: mod_base = OTHER; note = 2'-deoxy-2'-fluoroadenosine-3'-phosphate
  modified_base 8: mod_base = OTHER; note = 2'-O-methyladenosine-3'-phosphate
  modified_base 9: mod_base = OTHER; note = 2'-deoxy-2'-fluorouridine-3'-phosphate
  modified_base 10: mod_base = OTHER; note = 2'-deoxy-2'-fluoroguanosine-3'-phosphate
  modified_base 11: mod_base = OTHER; note = 2'-deoxy-2'-fluorocytidine-3'-phosphate
  modified_base 12: mod_base = OTHER; note = 2'-O-methyluridine-3'-phosphate
  modified_base 13: mod_base = OTHER; note = 2'-O-methyluridine-3'-phosphate
  modified_base 14: mod_base = OTHER; note = 2'-O-methylguanosine-3'-phosphate
  modified_base 15: mod_base = OTHER; note = 2'-O-methyladenosine-3'-phosphate
  modified_base 16: mod_base = OTHER; note = 2'-O-methyluridine-3'-phosphate
  modified_base 17: mod_base = OTHER; note = 2'-O-methylguanosine-3'-phosphate
  modified_base 18: mod_base = OTHER; note = 2'-O-methyladenosine-3'-phosphate
  modified_base 19: mod_base = OTHER; note = 2'-O-methyluridine-3'-phosphorothioate
  modified_base 20: mod_base = OTHER; note = 2'-O-methyladenosine-3'-phosphorothioate
  modified_base 21: mod_base = OTHER; note = 2'-O-methyladenosine
tcctgaaatgcttgatgataa

SEQ ID NO: 10753 - RNA, 21 nt, synthetic construct
  source 1..21: mol_type = other RNA
  modified_base 1: mod_base = OTHER; note = 2'-O-methylcytidine-3'-phosphorothioate
  modified_base 2: mod_base = OTHER; note = 2'-O-methylcytidine-3'-phosphorothioate
  modified_base 3: mod_base = OTHER; note = 2'-O-methyluridine-3'-phosphate
  modified_base 4: mod_base = OTHER; note = 2'-O-methylguanosine-3'-phosphate
  modified_base 5: mod_base = OTHER; note = 2'-O-methyladenosine-3'-phosphate
  modified_base 6: mod_base = OTHER; note = 2'-O-docosanyl-adenosine-3'-phosphate
  modified_base 7: mod_base = OTHER; note = 2'-deoxy-2'-fluoroadenosine-3'-phosphate
  modified_base 8: mod_base = OTHER; note = 2'-O-methyluridine-3'-phosphate
  modified_base 9: mod_base = OTHER; note = 2'-deoxy-2'-fluoroguanosine-3'-phosphate
  modified_base 10: mod_base = OTHER; note = 2'-deoxy-2'-fluorocytidine-3'-phosphate
  modified_base 11: mod_base = OTHER; note = 2'-deoxy-2'-fluorouridine-3'-phosphate
  modified_base 12: mod_base = OTHER; note = 2'-O-methyluridine-3'-phosphate
  modified_base 13: mod_base = OTHER; note = 2'-O-methylguanosine-3'-phosphate
  modified_base 14: mod_base = OTHER; note = 2'-O-methyladenosine-3'-phosphate
  modified_base 15: mod_base = OTHER; note = 2'-O-methyluridine-3'-phosphate
  modified_base 16: mod_base = OTHER; note = 2'-O-methylguanosine-3'-phosphate
  modified_base 17: mod_base = OTHER; note = 2'-O-methyladenosine-3'-phosphate
  modified_base 18: mod_base = OTHER; note = 2'-O-methyluridine-3'-phosphate
  modified_base 19: mod_base = OTHER; note = 2'-O-methyladenosine-3'-phosphorothioate
  modified_base 20: mod_base = OTHER; note = 2'-O-methylcytidine-3'-phosphorothioate
  modified_base 21: mod_base = OTHER; note = 2'-O-methyladenosine
cctgaaatgcttgatgataca
